United States Patent Application Publication US 2018/0126003 A1 - sequence listing, part 119

SEQ ID NO: 208061 - RNA, 2352 nt, Artificial Sequence
  derived and/or modified sequence
augcgcuggcagugcgguacuagauucaggggccuccgucccgccguggcuccauggaccgcuuuacuggcccugggccuuccaggaugggugcuggccgugucggcuacugcagcugcgguugucccugaacaacacgcaagcguggccggccagcauccccuugacuggcugcugacagaccgagguccauuccacagggcacaggaguacgccgauuucauggagcgcuaccgccaaggguuuaccacaagguauagaauuuaucgcgaguucgcuagguggaaaguuaauaaucuggcauuggagcggaaagacuuuuucagcuuaccuuuaccucuagcacccgaguucauccgcaacauaagacugcucggccguagacccaauuuacagcagguuacagaaaauuugaucaagaaauacgguacacacuuccuauuaagugcuacacugggaggcgaggaaagccuaacaaucuucguggauaaacaaaagcucggucggaagacagagaccacugggggcgcaaguaucaucggaggcagcggcaacagcacagccgugucacuugaaacacugcaccagcucgccgcgagcuauuucauagaucgagaaagcaccuugcgcagacugcaccauauucagaucgccacaggggccauuaaagugaccgagaccaggacuggcccuuuaggaugcagcaauuaugauaaccuagacagcgugucuagcgugcuaguccaaucuccagagaauaaagugcagcugcucgggcugcagguguuguuaccagaguacuuaagagaacgcuuuguugcagcugcuuuauccuauaucacgugcagcucugaaggggaacuggucuguaaggagaacgacugcugguguaagugcucaccgacuuucccugaaugcaacugccccgaugcagauauacaggccauggaagacagcuugcugcaaauccaggauagcugggcaacccauaaccgucaauuugaggagagcgaggaauuccaagcauugcugaagaggcuaccugacgacagguuccugaacucuacugccaucucucaguucugggccauggauacaucucuccaacaucgcuaccagcaacugggagcugggcucaaaguguuauucaaaaaaacucaccgcauuuugaggcgacuguucaacuuguguaaacgcugccacaggcaaccccguuuuaggcuuccaaaggaacggagucucucuuauugguggaaccgcauucaaucacuuuuguauuguggcgaaagcaccuucccuggcaccuuucuggagcagucccauucauguacaugcccauaugaucaguccucuugucaggggccaauccccugcgcuuugggagagggacccgcuugcgcgcacugcgccccggacaauucaacaagauguggaucuuguaaccccggauauguacucgcccagggacugugucgaccagaggucgccgagucacuggagaauuuccucggacuugagacagaccuacaagaccuagaauuaaaguaucugcugcagaagcaagacucucgcauagagguucauucaaucuuuauuagcaaugacaugcgccuggguaguugguucgaccccuccuggcggaagcggaugcuuuugacccugaaaucuaacaaguauaagcccggccugguccacgugaugcucgcccuuagccuucagaucugucuaacuaagaauagcaccuuggagcccgucauggcgaucuacgugaaccccuucggcgggucucauucugaguccugguuuaugccggugaacgaaggaucguuccccgauugggagagaaccaacgucgaugccgcagcucaaugucaaaauuggacuaucacccuaggcaacagauggaagaccuuuuucgagacgguccacguguaccugaggagccguauuaagagccuggaugauagcagcaaugagaccauuuacuacgaaccacucgagaugaccgacccauccaaaaaccucggcuacaugaagaucaauacgcuacagguguuuggcuacagucugcccuucgacccagaugcuauccgagaucuaauauugcagcuugauuaucccuacacccaggguucacaggacuccgcacugcugcagcugaucgaguuacgagacagggugaaucagcuuuccccccccgggaagguccggcuggacuuguucagcugucuccugcgucaucgauugaagcuggcaaacaacgagguggggcguauccagucuucacuucgugccuuuaacaguaagcuaccuaauccagucgaauaugaaaccggcaagcucugcuccuag

SEQ ID NO: 208062 - RNA, 1611 nt, Artificial Sequence
  derived and/or modified sequence
augccaacccucugcucgagcuucggccugcagguccuuuuaccagaauaccuuagggaacgcuuuguugcugcugcucuuagcuauauuaccuguucgagcgagggcgagcuggugugcaaggagaaugacugcuggugcaaguguagucccaccuuuccugagugcaauugucccgaugcagauauucaggccauggaggauucacugcugcagauccaagauucuugggcuacucacaaccgccaguuugaagaaagcgaagaguuccaggcccuacugaagcgccugccagaugacagguuucuuaacaguacagcaauaucccaguucugggcuauggauaccucccuccaacacagguaccaacaacugggagcgggguugaaggugcuguucaaaaaaacacacagaauucuucggcgccuuuucaaccuguguaaaagaugccaucgacagccccgauuucgacugccgaaggagagcucaccaagaagcuuaucauacugguggaaucgcauccaaucccuacuguauuguggugagucgaccuucccuggcaccuuucuugagcagagucacagcuguacaugucccuaugaucaguccucgugccaaggccccauaccaugugcccugggagagggaccugccugugcgcauugcgcuccugauaauuccacucgcugugggagcugcaauccaggguaugugcuggcgcagggucuguguagaccagaaguugccgagucccuggaaaacuuccuaggauuagagacugaucugcaagaccuggaacugaaguaccuguuacaaaagcaggauagccggauugaaguacacuccaucuuuauuagcaacgauaugcgcuuaggcagcugguucgaucccuccuggagaaaaagaauguugcuuacccugaaaucaaauaaguacaaaccagguuuggugcacgugauguuagcucugucccuccagaucugcuugaccaaaaacaguacacucgaaccaguuauggcuaucuacgugaaccccuucggcgggucgcauucugaaaguugguucaugccugugaaugaggguagcuuccccgauugggaacgaacaaaugucgaugccgcugcacaaugucagaacuggacuauuacauuaggcaaccgauggaaaacauuuuuugagaccguccacgucuauuuacgaaguagaaucaaaagucuggacgauagcuccaaugaaacaaucuacuaugagccuuuggaaaugacugaucccaguaaaaaucucgguuauaugaagaucaauacucugcagguauuugguuauagccugccauucgacccugaugccauacgggaccucauuuugcaacucgauuacccauacacacagggcucccaagacagcgcccuuuugcaguugaucgaacuuagagaucgcgucaaccaguugucucccccuggcaaagugcgcuuggaccuuuuuucuugucuccuccggcaucgacuuaagcuggcuaauaaugagguaggacguauccagucuucccuacgcgccuuuaacagcaaauuacccaaucccguggaguacgagaccggcaagcuauguucuuag

SEQ ID NO: 208063 - RNA, 2352 nt, Artificial Sequence
  derived and/or modified sequence
augcgauggcagugcggaacacgguuucgaggacuuagaccagcgguggcgcccuggaccgcucuccucgcuuugggucugcccggaugggugcuggccgucuccgcuacagcagccgccguggugccugagcagcacgccagugucgcuggacagcauccucuagacuggcuucugacagaucgaggaccauuucaccgugcccaggaauaugccgacuucauggaaagauaucgccagggauucacuaccagguacagaaucuaucgugaguuugcccgauggaaagugaauaaucuugcgcuagaaagaaaagacuuuuucucacucccuuuaccguuggcaccagaguucaucagaaauauucgccuacugggacguagacccaaccugcaacaggugaccgaaaacuuaauuaagaaauacgggacccacuuucucuuaucugccacgcucggcggugaagagagccugacuauauucgucgacaagcagaaauugggaagaaaaacggaaacuacaggcggugccuccauaauuggcggcucugguaacagcacagcgguuaguuuagagacucugcaccaacucgccgcuucauacuucaucgaccgggaauccacccucagaagacuccaucacauucagauagccaccggcgcaauaaaagucacagagacacggaccggaccacugggcugcuccaacuacgauaaucuagacucuguuucaagcgugcugguacagucgccggagaacaaagugcaacuccuugggcugcaagugcuacucccugaguauuugagagaaagguucguggccgccgcacucucauauaucaccuguucuuccgaaggagaacuaguaugcaaggaaaacgauugcuggugcaagugcagccccacuuucccagaauguaauugucccgacgcagauauacaggcuauggaggauucucuguugcagauacaggacaguugggccacacauaacagacaguucgaagaguccgaggaauuucaagcgcuacugaagaggcuuccagacgaccgauuccugaacagcacagccauuucacaguucugggcuauggacaccucacuacaacaucgauaucagcaauugggagccggguugaaggugcuauucaaaaagacucaucggauccuuagacgucuguuuaauuuauguaagcgcugccaucgucagccucguuuucgccuuccaaaggaacggagccucucuuacugguggaacaggauucagucucuacuuuacugcggagagagcacuuuuccgggaacauucuuggaacagagucauagcuguacauguccauaugaucagaguucuugccagggccccaucccuugcgcgcucggcgaagguccagccugugcucacugugcccccgacaacuccacacgcugcgggagcuguaauccaggcuaugugcuagcucagggucuuugccgcccagaaguagcugagucuuuggaaaauuuuuuaggccucgaaacagacuugcaggauuuggaacuuaaauauuuacuacagaagcaggauuccagaaucgaaguccauagcaucuucaucucaaaugauaugcggcucggcucgugguuugaucccuccuggaggaagcggaugcuguugacgcugaagucuaacaaguacaaacccggccuuguccacguaauguuagcgcugucccuccagauuugcuugacuaaaaauucuacucucgaaccaguuauggccauuuacgugaaccccuuugguggcucacauagcgaaaguugguuuaugcccguuaaugaggggagcuuucccgacugggagcgaacaaacguggacgccgccgcucagugccagaacuggacaauaacuuuggguaauagauggaaaaccuucuuugagaccguacaugucuaucuuagaucacgaauuaaguccuuggacgauaguagcaaugaaacaauauacuacgagccacuugaaaugaccgauccuucuaaaaauuugggcuacaugaaaauuaacacucuccaggucuucggauauagccugccuuucgauccagacgcaauacgggaucucauccugcaacuggauuacccuuacacccagggcucacaggacagcgcacugcugcaguugaucgagcuucgugaucgagugaaucagcugucacccccuggcaaaguacgcuuagacuuguucaguugccuccuucgucaccgccugaaacuugccaauaacgaagucggacggauucagucuucccuuagggccuuuaauucuaaacuccccaauccuguugaguaugagaccgguaaacugugcucuuag

SEQ ID NO: 208064 - RNA, 1611 nt, Artificial Sequence
  derived and/or modified sequence
augccuacucucugcucuaguuucggucuucaagugcuacuaccggaguaccucagagaacgguucguugcggcugcccuuucguauauaacauguucgagugagggcgaacuuguauguaaagagaacgacugcuggugcaaaugcagccccaccuuccccgagugcaauugccccgaugcagacauacaagcaauggaagauucccuccugcagauccaggauagcugggcgacucacaacaggcaguucgaggaaagcgaggaauuucaggcccuacucaaacgccugccugacgaccgguuucuuaauucaacggcuauuucucaguucugggcuauggauaccucauuacaacacagguaccagcaacuaggagcaggacucaaaguguuauucaaaaaaacccaucggauucugcgccggcucuuuaaucucugcaaaagaugccauagacaaccccgcuuuagguugccuaaagaguccuccccucgaagccucagcuauugguggaacaggauacaaagcuuguuguacugcggcgaaucuacuuuuccuggcacguuucuagaacagucucauuccugcaccuguccuuacgaucagaguucaugucagggccccauaccgugugcucugggugaaggacccgcgugugcccacugugcccccgacaacucuacaagaugcggcucuuguaacccugguuacguccuagcucaaggacuguguagacccgaggucgcagagagucuugagaacuuuuugggccuugaaaccgaccugcaggaccuggaauuaaaauacuugcugcagaaacaagauucacgcauugaaguacacagcauuuucaucucaaaugauaugagauuagguucaugguucgacccaagcuggaggaaaagaauguugcuuacccugaaaucaaauaaguacaaaccagguuuggugcacgugauguuagcucugucccuccagaucugcuugaccaaaaacaguacacucgaaccaguuauggcuaucuacgugaaccccuucggcgggucgcauucugaaaguugguucaugccugugaaugaggguagcuuccccgauugggaacgaacaaaugucgaugccgcugcacaaugucagaacuggacuauuacauuaggcaaccgauggaaaacauuuuuugagaccguccacgucuauuuacgauccagaaucaaaagccucgacgacucuuccaaugagacuaucuauuacgaaccccuugaaaugacagauccuaguaagaaucucggguauaugaaaauuaacacccuccagguguucgguuauucccuuccauuugauccagacgcaauuagagaccugauucuccagcuagauuaccccuauacacaggggucacaggacagcgcgcuacuucaguugauugagcucagggaccguguuaaccagcucaguccgccaggcaaaguuagguuagaccuuuucucaugccuucuaagacaccgccugaagcucgcuaacaacgaagucggacggauccagucuagccuuagggcauucaauagcaaauugccaaauccuguggaguacgaaacugggaaacucugcucauag

SEQ ID NO: 208065 - protein, 269 aa, Artificial Sequence
  derived and/or modified sequence
MPLGLKPTCSVCKTTSSSMWKKGAQGEILCHHCTGRGGAGSGGAGSGAAGGTGGSGGGGFGAATFASTSATPPQSNGGGGGKQSKQEIHRRSARLRNTKYKSAPAAEKKVSTKGKGRRHIFKLKNPIKAPESVSTIITAESIFYKGVYYQIGDVVSVIDEQDGKPYYAQIRGFIQDQYCEKSAALTWLIPTLSSPRDQFDPASYIIGPEEDLPRKMEYLEFVCHAPSEYFKSRSSPFPTVPTRPEKGYIWTHVGPTPAITIKESVANHL

SEQ ID NO: 208066 - DNA, 810 bp, Artificial Sequence
  derived and/or modified sequence
atgcccctgggcctgaagcccacctgcagcgtgtgcaagaccaccagcagcagcatgtggaagaagggcgcccagggcgagatcctgtgccaccactgcaccggcagaggcggcgccggcagcggcggcgccggcagcggcgccgccggcggcaccggcggcagcggcggcggcggcttcggcgccgccaccttcgccagcaccagcgccacccccccccagagcaacggcggcggcggcggcaagcagagcaagcaggagatccacagaagaagcgccagactgagaaacaccaagtacaagagcgcccccgccgccgagaagaaggtgagcaccaagggcaagggcagaagacacatcttcaagctgaagaaccccatcaaggcccccgagagcgtgagcaccatcatcaccgccgagagcatcttctacaagggcgtgtactaccagatcggcgacgtggtgagcgtgatcgacgagcaggacggcaagccctactacgcccagatcagaggcttcatccaggaccagtactgcgagaagagcgccgccctgacctggctgatccccaccctgagcagccccagagaccagttcgaccccgccagctacatcatcggccccgaggaggacctgcccagaaagatggagtacctggagttcgtgtgccacgcccccagcgagtacttcaagagcagaagcagccccttccccaccgtgcccaccagacccgagaagggctacatctggacccacgtgggccccacccccgccatcaccatcaaggagagcgtggccaaccacctgtag

SEQ ID NO: 208067 - DNA, 810 bp, Artificial Sequence
  derived and/or modified sequence
atgcctctggggctcaaaccaacgtgttctgtctgcaaaacgacaagttcctccatgtggaagaaaggcgcccagggcgagattctgtgtcatcactgcacaggacgagggggggccggctccggaggggctggaagcggggctgcgggggggactggtggatccgggggcggcggatttggagctgccaccttcgcctccacttcagccactccacctcagtcgaatggcggggggggcgggaaacagagtaaacaggagatacacaggagaagcgctcggctgaggaacaccaaatataagtccgcccccgctgcagagaagaaggtctcaaccaaaggcaagggacgaagacacattttcaagttgaagaacccaatcaaggccccagagagcgtcagcaccatcatcactgccgaatctatcttctataagggcgtgtattatcaaatcggagacgttgttagcgtcattgatgaacaagacggcaagccatattacgcgcagatcagaggtttcatacaggatcagtactgcgaaaaatccgcagccctaacatggctgattcctactttgagctcgcctagggaccagtttgatcctgcctcctacattattgggcctgaagaagacttgccaaggaaaatggagtatctggaattcgtttgccatgctccaagcgaatattttaagtcccgtagcagcccgttccccaccgtgcccacaaggccagaaaagggttacatttggactcacgtgggacctacacctgcaatcactatcaaagagagcgtggccaaccatctttag

SEQ ID NO: 208068 - DNA, 810 bp, Artificial Sequence
  derived and/or modified sequence
atgcccctgggcctgaagcccacctgcagcgtgtgcaagaccaccagcagctccatgtggaagaagggggcccagggcgagatcctgtgccaccactgcaccggccggggcggggccggcagcggcggggccggcagcggggctgctgggggcaccggcggcagcggcggcggcggctttggagctgccacctttgccagcaccagcgccaccccaccccagagcaatggaggcggcggcggcaagcagagcaagcaggagatccaccggcgcagcgcccggctgaggaacaccaagtacaagagcgccccagctgctgagaagaaggtgtccaccaagggcaaaggaagaagacacatcttcaagctgaagaaccccatcaaggcccctgagagcgtgtccaccatcatcacagctgagagcatcttctacaagggcgtgtactaccagattggagatgtggtgtctgtgattgatgagcaggacggcaagccctactatgcccagatccggggcttcatccaggaccagtactgtgagaagtctgctgccctgacctggctgatccccaccctgagcagcccccgggaccagtttgatcctgccagctacatcatcggccctgaggaggacctgcccaggaagatggagtacctggagtttgtgtgccacgcccccagcgagtacttcaagagccgcagcagccccttccccaccgtgcccaccaggcctgagaagggctacatctggacccacgtgggccccaccccagccatcaccatcaaggagagcgtggccaaccacctgtag

SEQ ID NO: 208069 - DNA, 3361 bp, Artificial Sequence
  derived and/or modified sequence
tccgcgtcccccccaccccggccagatccctttcccagtcctgcttcccagtgcctcgggccagggaatcctggcctccgcctgcggagccggcggaacccgcttcccgcctccacggggcagcgccagcggcctggtcctttcaccggcagctccgtgccgacgctctcaccgctcttcctatcgccgggagtggcgggccgaccagggggcggccgggctaccgtccgccattcccgtgtctctgcgcccgcgggggccgcccgagccggccaccatgccgctgggcctgaagcccacctgcagcgtatgcaagaccacgtcgtcctccatgtggaagaagggagcgcagggggagatcctctgccatcattgcactggccggggcggcgcgggcagcgggggcgcaggctcgggggcggctggagggactgggggcagcggcggcggcggcttcggcgcggcgaccttcgccagcacctccgccacccctccgcagagcaacgggggcgggggcggcaagcagagtaagcaggaaattcacaggaggtctgctcggctcagaaacactaaatacaaatctgctccggctgctgaaaagaaagtctccaccaaaggaaaagggagaagacatatatttaaattgaaaaatcccatcaaagctcctgagtcagtttccactataatcactgcagaatcaatcttctacaagggagtatattaccaaattggtgatgttgtttctgtgattgatgaacaagatggaaagccctactatgctcaaatcagaggttttatccaggaccagtattgcgagaagagtgcagcactgacgtggctcattcctaccctctctagccccagagaccaatttgatcccgcctcctatatcatagggccagaggaagatcttccaaggaagatggaatacttggaatttgtttgtcatgcaccttctgagtatttcaagtcacggtcatcaccatttcccacagttcccaccagaccagagaagggctacatatggactcatgttgggcctactcctgcaataacaattaaggaatcagttgccaaccatttgtagttcacaaattaaaactgggtttccaggcctggtgtggtggctcacgcctgtagccccagctattgcaccactgctctccaagctgggcaatggagtcagattctctttcttaaaaaaccacaaaaaaactggatttccagttctctaatattcttagtaccacaagatatgtcataggtatctttaaatgaaattcttagctggaaaagtgactaaaaagtttttctcctgctacctagtaataaacaaatcattgtttattactggtcacttagaaaattaaaagggatagggccaggcacagtggcttatgcctgtaattgcagcacttttagaggccgaggcaggcggatcacctgaggtcgggaagtggatcgcctgaggtcaggagttcgagaccagcctggccaacatggcgaaaccccgtcgctactaaaaatacaaaaattagccaggtgtggtggcatgtgcctgtaatcccagctatttgggaggctgaggcaggagaatcgcctaaacccaggaggtggaggttgtagtgagccaagattgcaccgctgtgctccagcctgggcaacagagtgagactcttgtctcggaaaaaaaaaaaaaaaaaaaaggctgggcacagtggctcacgcctttaatcccagcactttgggaggctgaggcagatggatcgcctgaggttgggagttcgagaccagcctggccagcatggtgaaaccctgtctctactaaaaatacaaaaattagccaggtgtggtggcgcacacctgtagtcccagctactcgggaggctgaggcaggagaattggttgaacccaggaggcggaggttgcagtgagcagagatcgtgccactgcactccagcctgggtggacagagcaagactccgtctcaaagaaacaaacaaaaaattaaaagggatagaatataatgaaatatattttgaacttaaattatattctatatgtgtatcttcctaggcaaaagctgtaatttccagagagaccattaggaacaggtagtatctatttttctccattatttatttctagaaactcataaaatggattgtatttttctataagaacaaaatattaattaaggtatagatgactgaccaagggcttaatcaaataaaatgactaacagcatctatcataaagccacacaagccttatgttctcatctcaaaaatgctgtgacagctttttggctgctttaaccataagaaaaatgattggtggatgattttattagcccaggcttttaaaaactttcatctaggccacgtgcggtggctcatgcctgtaatcccggcactttgggaggcctgagtggatggatcacttgaggtcaggagttcaggaccagcctggccaacatgatgaaaccctgtctctactaaatatacaaaaattagttgggtgttatggtgcatgcctgtaatcccagctactcgggaggctgaggcaggagaattgcttgaactcgggaggtggagattgcagtaagccgagatcgtgccactgcactccagcctgggtgatagagcaagactgtctcaaaaaagaaaaaaaagaaaaaattttaatttaatccttctgtagaaacaggcattcagaaccattccattgatcttaataaagctgctctttactgtttctagtcaaaaatgagacttcgatcaaaccataagattttatactgcagatagtcagcttcaccaaagccgcagaggaaacatgtcgagatcaggcttcctgcttgatagtctcttgactaccattaaaacgaatattgggaggtcatgaaagtcattggtaggccattagcattgatatctttaaaacatctaccctaaaccatctgctatggacccataataagaggcctgttgtatatgaaattgtctagaattcaggtgcaggtctttgccggttaagtaagggagcaacacgtaaaatgggagaggagtggggtgtactcacttgcctcctcttttgtcctgatttaaccagcatttttcaaccctgggaaaatttgcagaatctaagttgattgtaatgattttgagctgcagcagctttaactcttaccctttttccacatagttatggtgtttgagttggaaagaaacaactataggtagctacacgtacataattatctctttattcacaaagggtatagtaaaattgattgtaaataactttctaagtgccaatattcaaaacttttggattaaaatgtatttttcaccgtgca

SEQ ID NO: 208070 - DNA, 810 bp, Artificial Sequence
  derived and/or modified sequence
atgcccctgggcctgaagcccacctgcagcgtgtgcaagaccacctctagcagtatgtggaagaagggggcacagggggaaatcttatgtcaccattgcaccggccgaggaggcgctggctccggtggcgcggggtcaggcgccgccggaggcaccgggggctctggtgggggcggctttggcgccgcgacttttgccagcacctctgcgaccccacctcagtccaacgggggcggcgggggtaagcagtcaaagcaagagattcacaggaggtcagctaggttgaggaatacaaaatacaagagtgcccctgccgctgagaaaaaagtgtccaccaaaggaaagggcagaagacacatttttaaacttaaaaatcccattaaggctcccgaatccgttagcactatcatcacagccgagtcaatcttctacaaaggcgtatactaccagatcggagatgtagtttcagtgatcgacgagcaggacggcaagccctattacgcacagattaggggttttatccaagaccagtactgcgaaaagagcgctgccctgacatggcttattccgaccctctcgtccccccgcgatcagttcgatcccgcatcatacatcatagggccagaggaggatctgccccgcaagatggagtatttggaattcgtgtgtcacgctccatccgagtattttaagtcgcggtccagccccttccctaccgtccccactaggcccgaaaaagggtacatatggacccacgtgggacctactccagctatcaccatcaaggagtctgtggccaaccatttatag

SEQ ID NO: 208071 - DNA, 810 bp, Artificial Sequence
  derived and/or modified sequence
atgccacttggcttaaaaccaacttgcagcgtatgcaagaccaccagttcgtctatgtggaagaagggcgctcagggcgaaatcctatgtcatcattgcactggccgagggggtgccggtagcgggggtgccggttctggcgctgccggaggcactggagggtccggcggagggggatttggggctgccacctttgcttctacctctgccacccccccacaaagcaacgggggtggcggtggcaagcagtccaagcaagagatccaccgcagatccgctcggctgcgtaacaccaagtataaatcagcacctgctgccgaaaaaaaggtttctactaagggaaagggacgtcgtcacatctttaaactgaaaaatcccatcaaggccccagagtcagtgtccacaatcatcacggccgaatctatcttctataaaggtgtgtactaccaaatcggcgatgtagtgtccgttatcgacgaacaggatggaaagccctattatgcacagatcaggggcttcattcaggatcagtactgcgagaagagcgcggcactcacttggctaataccgaccttgagctccccacgtgaccaattcgaccccgcaagctacattatcggaccagaggaggatcttccaagaaagatggagtatctggaattcgtgtgccacgcaccttcagagtatttcaaatccagatccagcccattccctacagtgccgacgcggcctgaaaagggttacatatggactcatgtcgggccaacacctgcaattaccattaaggaaagcgtcgccaaccacttatag

SEQ ID NO: 208072 - protein, 107 aa, Artificial Sequence
  derived and/or modified sequence
MGRKRLITDSYPVVKRREGPAGHSKGELAPELGEEPQPRDEEEAELELLRQFDLAWQYGPCTGITRLQRWCRAKQMGLEPPPEVWQVLKTHPGDPRFQCSLWHLYPL

SEQ ID NO: 208073 - protein, 34 aa, Artificial Sequence
  derived and/or modified sequence
MGRKRLITDSYPVVKRREGPAGHSKGELAPELGL

SEQ ID NO: 208074 - DNA, 324 bp, Artificial Sequence
  derived and/or modified sequence
atgggtcggaagcgattgataacggattcatacccagtggtcaaacgaagagaaggaccagcaggccacagcaaaggcgagttagcccccgaactcggggaggagccacagcctcgggatgaggaggaagcagaactggaactgttgaggcagttcgatctggcatggcaatatggcccttgtacgggcattactcgactgcagcggtggtgccgcgcaaagcagatggggcttgagcctcctcccgaagtgtggcaggtcctgaagacacatccaggggacccccgctttcaatgttcactctggcatttgtatccactgtag

SEQ ID NO: 208075 - DNA, 324 bp, Artificial Sequence
  derived and/or modified sequence
atgggcaggaagaggctcatcacagacagctaccctgtggtgaagaggcgggagggccctgctggccacagcaaaggagagctggcccctgagctgggggaggagccccagcccagagatgaggaggaggccgagctggagctgctgcggcagtttgacctggcctggcagtatggcccctgcaccggcatcacccggctgcagcgctggtgccgggccaagcagatgggcctggagcccccacctgaggtgtggcaggtgctgaagacccaccctggggacccccgcttccagtgcagcctgtggcacctgtaccccctgtag

SEQ ID NO: 208076 - DNA, 324 bp, Artificial Sequence
  derived and/or modified sequence
atgggccggaagcggctgatcaccgacagctaccccgtggtgaagcgacgggaggggcccgctggacatagtaagggtgagctcgcccccgagctaggggaggagcctcagccacgcgacgaggaggaggctgagctagagctcctcaggcagttcgatctcgcttggcagtacgggccatgcactggcataaccagactacaaagatggtgtcgagcaaaacagatgggccttgaaccacctcccgaagtttggcaggtactgaagacccatccaggcgacccgcgctttcagtgctcattgtggcatctgtatccgctgtag

SEQ ID NO: 208077 - DNA, 918 bp, Artificial Sequence
  derived and/or modified sequence
ctctctcggtttgtctgggtcatcttgtctgcccgccgctggcctggccccgtctgtctctctcagcagctgtctttctcgcgcccactggccggtctctcctcttccccgcagttgcctccttctctgcctgcctgggtggccgccatgggccggaagcggctcatcactgattcctacccggttgtgaagaggagggaggggcccgctgggcacagcaagggggagctggcacccgagctaggggaggagccccagccccgcgacgaggaggaagcggagctggagctgctgaggcagtttgacctggcctggcagtacgggccctgcaccgggatcacacggctgcagcgctggtgtcgggccaagcagatgggcttggagcctcccccagaggtgtggcaggtgctgaagacccaccccggagacccccgcttccagtgcagtctctggcatctctatcccctatgaggcaccacgtaagacctcctgcccttagctctcttgctcaccacccaagaacctcaggacagaagcgagagcccattgctcctgctcagctcagcccggctgcggaggaacccttggcaggcagaacctggaggtgtcagaggctcaactcctccatctaaccagcaggctcccagagtccccggaagagcctgcgcagctgaagcagagtgcttctagatggagagtggtcactggggaaaaggacctggccatcaccttccaatacctgctgcctgtctccctgacccatgatctggcaagttaggcacagtcagacatggacagttgatccatgaggaaaagatgctctcccacctaaggccaggaatctgagagcaggactggctgagctcccagggcaaggggttcactaatgcttatcaataaagaatattgagcctggaa

SEQ ID NO: 208078 - DNA, 899 bp, Artificial Sequence
  derived and/or modified sequence
ctgcccgccgctggcctggccccgtctgtctctctcagcagctgtctttctcgcgcccactggccggtctctcctcttccccgcagttgcctccttctctgcctgcctgggtggccgccatgggccggaagcggctcatcactgattcctacccggttgtgaagaggagggaggggcccgctgggcacagcaagggggagctggcacccgagctaggtctctgaggggaggagccccagccccgcgacgaggaggaagcggagctggagctgctgaggcagtttgacctggcctggcagtacgggccctgcaccgggatcacacggctgcagcgctggtgtcgggccaagcagatgggcttggagcctcccccagaggtgtggcaggtgctgaagacccaccccggagacccccgcttccagtgcagtctctggcatctctatcccctatgaggcaccacgtaagacctcctgcccttagctctcttgctcaccacccaagaacctcaggacagaagcgagagcccattgctcctgctcagctcagcccggctgcggaggaacccttggcaggcagaacctggaggtgtcagaggctcaactcctccatctaaccagcaggctcccagagtccccggaagagcctgcgcagctgaagcagagtgcttctagatggagagtggtcactggggaaaaggacctggccatcaccttccaatacctgctgcctgtctccctgacccatgatctggcaagttaggcacagtcagacatggacagttgatccatgaggaaaagatgctctcccacctaaggccaggaatctgagagcaggactggctgagctcccagggcaaggggttcactaatgcttatcaataaagaatattgagcctggaa

SEQ ID NO: 208079 - DNA, 324 bp, Artificial Sequence
  derived and/or modified sequence
atgggcaggaaacggctcataactgacagttacccagttgttaagagacgggaggggccagctggacactcaaaaggagagctggcacccgaattaggagaggagccacagcccagagacgaggaagaagccgagctcgaactgttgcgtcagtttgacctagcttggcaatatggaccttgcacaggcattactcggcttcaaaggtggtgccgcgctaaacaaatggggcttgagccccctcctgaagtctggcaggttctgaaaacacatcctggcgatccgcgatttcaatgtagcctgtggcacttgtatccgttatag

SEQ ID NO: 208080 - DNA, 324 bp, Artificial Sequence
  derived and/or modified sequence
atgggcagaaagagactgatcaccgacagctaccccgtggtgaagagaagagagggccccgccggccacagcaagggcgagctggcccccgagctgggcgaggagccccagcccagagacgaggaggaggccgagctggagctgctgagacagttcgacctggcctggcagtacggcccctgcaccggcatcaccagactgcagagatggtgcagagccaagcagatgggcctggagcccccccccgaggtgtggcaggtgctgaagacccaccccggcgaccccagattccagtgcagcctgtggcacctgtaccccctgtag

SEQ ID NO: 208081 - protein, 923 aa, Artificial Sequence
  derived and/or modified sequence
MSQFKRQRINPLPGGRNFSGTASTSLLGPPPGLLTPPVATELSQNARHLQGGEKQRVFTGIVTSLHDYFGVVDEEVFFQLSVVKGRLPQLGEKVLVKAAYNPGQAVPWNAVKVQTLSNQPLLKSPAPPLLHVAALGQKQGILGAQPQLIFQPHRIPPLFPQKPLSLFQTSHTLHLSHLNRFPARGPHGRLDQGRSDDYDSKKRKQRAGGEPWGAKKPRHDLPPYRVHLTPYTVDSPICDFLELQRRYRSLLVPSDFLSVHLSWLSAFPLSQPFSLHHPSRIQVSSEKEAAPDAGAEPITADSDPAYSSKVLLLSSPGLEELYRCCMLFVDDMAEPRETPEHPLKQIKFLLGRKEEEAVLVGGEWSPSLDGLDPQADPQVLVRTAIRCAQAQTGIDLSGCTKWWRFAEFQYLQPGPPRRLQTVVVYLPDVWTIMPTLEEWEALCQQKAAEAAPPTQEAQGETEPTEQAPDALEQAADTSRRNAETPEATTQQETDTDLPEAPPPPLEPAVIARPGCVNLSLHGIVEDRRPKERISFEVMVLAELFLEMLQRDFGYRVYKMLLSLPEKVVSPPEPEKEEAAKEEATKEEEAIKEEVVKEPKDEAQNEGPATESEAPLKEDGLLPKPLSSGGEEEEKPRGEASEDLCEMALDPELLLLRDDGEEEFAGAKLEDSEVRSVASNQSEMEFSSLQDMPKELDPSAVLPLDCLLAFVFFDANWCGYLHRRDLERILLTLGIRLSAEQAKQLVSRVVTQNICQYRSLQYSRQEGLDGGLPEEVLFGNLDLLPPPGKSTKPGAAPTEHKALVSHNGSLINVGSLLQRAEQQDSGRLYLENKIHTLELKLEESHNRFSATEVTNKTLAAEMQELRVRLAEAEETARTAERQKSQLQRLLQELRRRLTPLQLEIQRVVEKADSWVEKEEPAPSN

SEQ ID NO: 208082 - DNA, 2772 bp, Artificial Sequence
  derived and/or modified sequence
atgtctcagttcaagcgtcaacgaattaacccgctcccagggggccggaacttttccggaaccgctagcacatcattgctgggtcccccaccaggcttgctcactcctcctgtggccactgagctgtcgcagaacgcacgtcacctgcaggggggcgaaaagcagagagtcttcactggaattgtcacatccctgcacgattatttcggcgtggtagacgaggaagtgttcttccagctcagcgtggtgaaggggaggctacctcagctcggggaaaaggtgctggtgaaagctgcctacaaccctggtcaggccgtaccatggaacgccgtaaaggttcaaaccctctcaaatcagcctttactaaaatccccagccccacctctgctccacgtcgctgcccttgggcagaagcagggcatactgggagctcagcctcaactgatctttcagccgcatcggattccaccactcttcccccaaaagcccctctccctcttccaaacctcacacacactgcacctctcccacctgaacaggtttcctgcgcgggggccacacggcaggctggatcaaggaaggtccgatgactacgattcaaaaaagagaaaacagcgagctggcggagaaccttggggcgccaaaaagcctcgacacgatctccctccctatcgtgtccatcttaccccgtacaccgtcgattcgcccatctgtgactttctagagctgcaaaggaggtaccggtccctgctggttccctctgactttcttagcgtgcatttatcgtggctttcagctttccccctgtctcagcccttctcactccatcacccctcccgcatccaggtgtcttccgagaaggaagccgctccggatgcaggcgctgaacccatcaccgccgattccgaccccgcctactcatcaaaagtgctcctgcttagtagtcctgggctggaagaactttaccggtgttgtatgttgttcgtagatgacatggccgagcctcgagagactccagaacacccattgaaacagattaagttcttgttaggcagaaaagaagaggaggctgtgctagttggaggcgagtggtctccatctctggatggtctggacccacaggccgacccccaagtgctggtgaggacagctatcaggtgcgcccaggctcagactgggatcgatctatccgggtgcacaaagtggtggagattcgcggaatttcagtatttgcagccgggcccacctcgacggctgcagacggtcgtggtgtacctgcccgatgtgtggaccataatgcctactctagaggagtgggaagcattgtgtcagcagaaagctgcagaggcggcccctcctactcaggaggcgcagggagaaacagaacctacagagcaggctcctgacgccttagaacaggccgccgatacgagtaggcgaaacgcagagacaccagaggccaccactcagcaggagaccgacaccgatcttccggaagcccctcctcctcctttggagccagccgtgatcgctcggccgggctgcgtgaaccttagcttgcatggtattgtcgaggaccgtagacctaaagaaaggatctcgttcgaggtcatggtccttgcagagctgtttcttgagatgctgcagagagacttcgggtacagagtgtataagatgctcctttcactgcctgagaaagtcgtctcacctccagagcctgaaaaggaagaggctgctaaagaagaggctacaaaggaggaggaggctattaaagaggaagtagttaaggaacctaaggacgaagcccagaatgagggccctgctacagagtctgaggcgccgttgaaggaagatggcttgctccctaagccactgtcgtccggaggagaagaagaagagaagcctaggggagaggcctcggaagatctgtgtgagatggcactggacccagaactgctgcttttgcgtgatgatggcgaggaggaatttgccggcgccaagctcgaggactccgaagtccgatcagtggcaagcaaccagtcagagatggaatttagttcactgcaggacatgccaaaggagctggacccttccgcggtactccctctcgactgtttattagccttcgtgtttttcgacgcgaattggtgtggctatttgcatagacgagatcttgagaggatcttactgaccctcgggatacggctgtcagctgaacaggctaagcagctggtcagtagggtcgtgactcagaatatctgccaatataggtcattgcagtatagtcgacaagaaggcctggatggaggcttaccagaagaggttctcttcggaaatctagacttattgcctcctcctggcaagagtacaaagcctggagcagcccctactgagcacaaagccctggttagtcataatggatcattgattaatgttggctccctccttcagcgtgctgaacagcaggattccggcaggttatatctagaaaataagattcacaccctcgaacttaaactggaggaaagccacaacaggttttccgccaccgaagtgactaacaagacattggcagccgaaatgcaggagctgagggtacgacttgccgaggctgaggaaacggcacgcactgcggagagacagaagagccagctccagcggctgctccaggagctgcggcgacgtcttactccccttcaactggaaatccagagagttgtggagaaagccgattcatgggtagagaaagaggaaccagcgccatctaattag

SEQ ID NO: 208083 - DNA, 2772 bp, Artificial Sequence
  derived and/or modified sequence
atgtcccagttcaagcgccagaggatcaatcctcttccaggcggcagaaacttctcagggacagccagtacatccctccttgggccgcctccgggactgctgactccaccggtcgcaaccgagctgtcccagaacgcaaggcatttgcagggaggagaaaagcagagagtattcacaggcatagttacatctctgcacgattactttggggtagttgacgaggaagtgttcttccagttaagcgtggtaaaggggcggttgccccagctgggtgaaaaagtgcttgtcaaagccgcctataaccccgggcaggccgtgccctggaatgcggttaaggttcagactctcagcaaccagcctctgctgaagagtcccgcccctccactcctgcatgtcgcggccctgggccagaaacagggcatcctgggggcccagccccaactgatcttccagcctcacaggattcccccactctttcctcagaagcccctctcgctatttcagacctctcatactttgcatctttcacatttgaacagattcccagctagggggcctcatggacgactcgaccagggcagatcagatgactacgactcaaaaaagcggaaacaaagagccggaggcgaaccatggggtgcaaagaaaccacggcacgatctcccaccctatcgcgtacatcttaccccctatacagtcgatagccctatctgcgattttctggaactgcagcggcgctatcggagcctgttggttccctccgatttcttatcagtgcatttgtcttggctgtctgctttccccctgagccagcccttcagcttgcaccaccccagcagaattcaggtgtcgtctgagaaagaggcggcaccagacgcaggcgcagagccaatcacagccgattcagatcccgcctattccagtaaagtgctgcttctgagcagcccaggactggaggagctctacagatgttgcatgctctttgtggatgacatggcggagcctagagagacgccagagcaccccctgaaacagattaaattcctccttgggaggaaggaggaggaggcagtgctggtcggcggcgaatggtcaccgtctctggatggtctggacccacaggctgatccacaggtgctagtgcgcacagccattcgctgcgcacaggcccagaccggcatagatctgagcgggtgtaccaaatggtggaggttcgctgagttccagtatctacagcccggccccccgcgtagactgcagaccgtggttgtctacctgccagatgtgtggactatcatgcctactttagaggaatgggaggcattatgtcagcagaaagccgctgaggccgccccaccaacacaagaggcgcagggggaaaccgagccaacagagcaggcaccggatgctctggaacaagcggccgataccagcagacgaaacgccgaaaccccggaagccaccacccagcaggagacagatacagatctgccagaggctccaccgcctcccctcgaacctgccgtgattgccaggcctgggtgcgtcaatctttccctgcacgggatcgtcgaggacaggcgtccaaaagaaaggatttcattcgaagtgatggtattggcagagctctttctggagatgctccagagggacttcggctatcgtgtctacaagatgctgcttagccttcccgagaaggtcgtgtccccccccgaacccgagaaagaagaggcggctaaggaagaggcaacaaaggaggaagaagccatcaaggaggaagtcgttaaagaacctaaggacgaagcacaaaacgaggggcccgccaccgagtccgaggcgcctctcaaagaggacggcctgcttcctaagcctctgagctccggaggcgaggaggaggaaaagcctagaggagaagcatctgaggacttgtgtgagatggcccttgaccctgaactgctgctgctgcgggacgacggggaagaagagtttgccggcgcgaagcttgaggacagcgaggtccggagtgtggcttcaaatcagtcagaaatggagttttcctccctccaggatatgccgaaggagctggacccctccgctgtgctccctctggactgtttgttggcttttgtcttttttgacgctaattggtgtggatacctgcatcggcgggatctggagaggatattactgaccctaggaatccggctgagcgctgaacaggccaagcagctagtctcccgcgtcgttacccagaatatctgccagtataggtctctgcaatattctaggcaagagggacttgatggcgggctcccagaggaggtcctctttggaaacctggatctcctgcccccacccggaaaaagtactaagcctggagctgcacctacagaacataaggcattagtgtcccataatgggagcctgataaacgttggctcactcctccagagagcagagcaacaggacagcggccgcctttacctcgaaaacaagatccacactttggaactaaaactggaagagtcacacaatcgatttagcgctactgaggtcaccaacaaaaccctggcagccgaaatgcaagaactacgtgtgaggcttgcggaagcagaagagactgccaggaccgcagagaggcagaagagtcaactgcagaggttgctgcaggagttaaggcgccgtctcactccgttacagctcgaaattcagcgggtcgtcgaaaaagcggactcttgggtggagaaggaggaaccggccccatctaactag

SEQ ID NO: 208084 - DNA, 2772 bp, Artificial Sequence
  derived and/or modified sequence
atgagccagttcaagaggcagaggatcaaccccctgcccggcggcaggaacttctctggaacagccagcaccagcctgctgggccccccacctggcctgctgaccccacctgtggccacagagctgagccagaatgcccggcacctgcagggcggggagaagcagagggtcttcaccggcatcgtgaccagcctgcatgactactttggagtggtggatgaggaggtgttcttccagctgtctgtggtgaagggccgcctgccccagctgggggagaaggtgctggtgaaggccgcctacaaccctggccaggccgtgccctggaatgctgtgaaggtgcagaccctgagcaaccagcccctgctgaagagccctgccccacccctgctgcacgtggccgccctgggccagaagcagggcatcctgggcgcccagccccagctgatcttccagccccaccgcatccccccactcttcccccagaagcccctgagcctcttccagaccagccacaccctgcacctgagccacctgaaccgcttccctgcccggggcccccacggccgcctggaccagggccgcagtgatgattatgacagcaagaagaggaagcagagagctggaggagagccctggggcgccaagaagcccaggcatgacctgcccccctacagagtgcacctgaccccctacacagtggacagccccatctgtgacttcctggagctgcagaggcgctaccgcagcctgctggtgcccagcgacttcctgtctgtgcacctgtcctggctgagcgccttccccctgagccagcccttcagcctgcaccaccccagccgcatccaggtgtcctctgagaaggaggccgccccagatgctggagctgagcccatcacagctgacagcgaccctgcctacagcagcaaggtgctgctgctgagcagccctggcctggaggagctgtaccgctgctgcatgctgtttgtggatgacatggccgagccccgggagaccccagagcaccccctgaagcagatcaagttcctgctgggcaggaaggaggaggaggccgtgctggtgggcggggagtggagccccagcctggatggcctggacccccaggccgacccccaggtgctggtgaggacagccatccgctgtgcccaggcccagacaggcatcgacctgagcggctgcaccaagtggtggaggtttgctgagttccagtacctgcagcccggccccccccggcggctgcagacagtggtggtgtacctgcctgatgtgtggaccatcatgcccaccctggaggagtgggaggccctgtgccagcagaaggctgctgaggccgccccacccacccaggaggcccagggcgagacagagcccacagagcaggccccagatgccctggagcaggccgctgacaccagcagaagaaatgctgagaccccagaggccaccacccagcaggagacagacacagacctgcctgaggcccctcctccacccctggagcctgctgtgattgcccggcccggctgtgtgaacctgagcctgcatggaattgtggaggacagaagacccaaggagcgcatcagctttgaggtgatggtgctggccgagctgttcctggagatgctgcagagggactttggctacagagtgtacaagatgctgctgagcctgcctgagaaggtggtgagccccccagagcctgagaaggaggaggccgccaaggaggaggccaccaaggaggaggaggccatcaaggaggaggtggtgaaggagcccaaggatgaggcccagaatgaaggacctgccacagaaagtgaggcccccctgaaggaggatggcctgctgcccaagcccctgagcagtggaggagaggaggaggagaagcccagaggagaggccagcgaggacctgtgtgagatggccctggaccctgagctgctgctgctgagagatgatggagaggaggagtttgctggggccaagctggaggacagcgaggtgcgctctgtggccagcaaccagagcgagatggagttcagcagcctgcaggacatgcccaaggagctggaccccagcgctgtgctgcccctggactgcctgctggcctttgtgttctttgatgccaactggtgtggctacctgcaccggcgggacctggagcgcatcctgctgaccctgggcatccggctgtctgctgagcaggccaagcagctggtgtcccgggtggtgacccagaacatctgccagtaccgcagcctgcagtacagccggcaggagggcctggatggcggcctgcctgaggaggtgctgtttggaaacctggacctgctgcccccacctgggaagagcaccaagccaggggccgcccccacagagcacaaggccctggtgagccacaacggcagcctcatcaacgtgggcagcctgctgcagagagctgagcagcaggacagcggccgcctgtacctggagaacaagatccacaccctggagctgaagctggaggagagccacaaccgcttcagcgccacagaggtgaccaacaagaccctggccgctgagatgcaggagctgcgggtgcggctggccgaggccgaggagacagccaggacagctgagcggcagaagagccagctgcagaggctgctgcaggagctgcggcggcggctgacccccctgcagctggagatccagagggtggtggagaaggctgacagctgggtggagaaggaggagcccgcccccagcaactag

SEQ ID NO: 208085 - DNA, 2772 bp, Artificial Sequence
  derived and/or modified sequence
atgagccagttcaagcggcagcggatcaaccccctgcccggcggccgaaacttttctggtacagccagtacatccttgctcggtccgccgccagggctgctgacccccccggtagccaccgagctaagccagaatgcccggcatttacaaggaggtgagaaacagagggtgttcacgggaattgtgacaagtctgcacgactatttcggggtggttgacgaggaggtgtttttccaactcagtgtggtgaaggggagacttccccagctgggagaaaaagtgcttgtcaaggccgcttacaatcctgggcaggcggtaccttggaacgccgtgaaggtgcagaccctcagcaaccagccactccttaaatcccctgccccccctttattacatgtcgcagcgttagggcaaaaacagggcatcctcggcgcccaacctcagctcatcttccagccccacaggatccctcccttgtttcctcagaaacccctctcccttttccaaacaagtcacacccttcatctctctcatctaaaccgcttccctgctcggggaccacatgggcgcttagaccaggggagaagcgatgactacgactccaaaaagaggaagcaacgggctggcggcgaaccatggggcgcaaagaagccgagacatgacctgcctccgtatcgcgtgcacctgacaccatatacggttgacagccccatctgcgattttttagaattgcagcggcgctaccggagccttttagtcccatcagacttcttgtctgttcatctgagctggctgtctgcattccccctaagtcagccttttagtctccaccatccaagcagaatacaagtaagtagtgaaaaagaagccgcacctgatgcgggagccgagccgatcaccgccgactctgaccctgcttattctagcaaggtgctgcttctctcgagccccgggctggaggagctgtacagatgctgtatgcttttcgtggatgatatggccgaacctcgcgaaacccctgaacacccactgaagcagattaaattcttgctgggcaggaaggaggaagaagccgtgctggttgggggcgagtggtccccctcacttgatggacttgacccccaggccgacccacaggtgctcgttagaacagctatccgatgtgcgcaggcccagactggaattgatctgagcggctgcactaaatggtggcggttcgctgagtttcaatacttacaaccaggacctccacgcaggctccagaccgttgtggtttacctaccggatgtatggaccataatgcctaccttggaagagtgggaggcgctgtgccaacagaaggctgccgaggcggcacctcctacacaggaggctcagggcgagacagagccaactgaacaggcacccgatgccctggagcaggcagcagacacctctaggcggaatgcggagaccccagaagcaaccacacagcaggaaaccgacaccgatttacccgaggccccgcctccccccctggaacctgccgttatcgcaagaccaggatgcgtcaatttatccctgcatgggattgttgaggaccggagaccaaaggagcggattagcttcgaagttatggtactcgccgagctctttcttgagatgcttcagagagacttcggttacagggtctacaagatgcttctttctctccctgagaaggtggtcagccctcccgaacccgagaaggaggaggcggctaaggaggaggctaccaaggaggaggaagccataaaggaagaggttgtgaaggagccaaaagatgaagcccagaacgaaggacctgcaaccgagtcagaagcccccctgaaagaagacggcctgcttcccaagcccctctcctccggcggcgaggaagaggagaaacctcgaggcgaagcgtctgaggacctctgcgaaatggccttagacccggaactcctcctcttgagggacgatggagaggaggaatttgctggagccaaacttgaggactcagaggtgcgctcagtcgcctctaatcagagtgaaatggagttctcctctctgcaggatatgccaaaggagctggacccaagcgcagtactgcctctggactgcctgcttgcattcgtctttttcgatgccaactggtgtggttacttgcaccgaagagatctagaacgtatattactaaccctgggcataaggctgagcgccgagcaggctaaacagttggttagcagagttgtgactcaaaacatctgtcaatataggagcctccagtatagcagacaggaaggattggacggcggacttccagaagaagtcctgttcggaaacctcgatctcctcccaccccctgggaagtccactaagccaggcgctgccccaaccgaacataaagcattggtatctcataatggctcacttattaacgtcggcagcctgctgcaacgagcggagcaacaggattccggtcggctttatttggagaacaaaattcacacactcgaattaaagttggaggaatcacataaccggttctcagccacagaggttaccaataaaacgctggcggccgaaatgcaagaattgcgcgtgaggttggctgaggctgaggagactgctaggactgctgaaaggcagaagtctcagctgcaaaggttgctccaggagctccggcgtagactcacccccctgcagctcgaaatccagagggtggtggagaaggccgactcctgggtcgagaaggaagagcctgcaccctccaattag

SEQ ID NO: 208086 - DNA, 2772 bp, Artificial Sequence
  derived and/or modified sequence
atgagccagttcaagcggcagcggatcaaccccctgcccggcggccgaaatttctcgggcacagcgtccacttcactgctgggaccccctccaggtttacttaccccacctgtggctacggagctcagccagaacgcccgacaccttcaaggtggtgagaaacagagagtcttcactgggatagtgacttctttgcatgattacttcggtgtggttgacgaggaggtgtttttccagctgtcggttgttaagggccgcttacctcaactgggagagaaggtgcttgtgaaagccgcttacaatccagggcaggccgttccatggaatgctgtgaaggtgcagactctgtctaatcagcccctcctgaaatcgccagctccgccacttcttcacgtcgctgcactgggtcaaaaacaaggtatcctcggcgcacagcctcagctaattttccagccgcaccgtattccccctttgtttccacagaaacctctttctctgttccagaccagccataccctccatttgtcacatctcaacagatttcctgcgagaggtccccacggacgcctggatcagggaagatcggatgactatgactcgaaaaagagaaaacagcgagcaggaggcgaaccatggggggctaagaaaccccgccatgacctgcccccctaccgcgtgcatctgactccctatacagtagactcacctatctgcgacttcctggaactccagcggcgatatcgctccctgttggtgcccagcgactttttgagtgtccatttgtcgtggctgagtgcgtttccactgtctcagcctttctccctacaccatccgagtcgcatccaggtaagttctgagaaggaggccgcgcccgatgccggtgctgaacctattacagctgactcagaccccgcatactccagcaaggtcctgttactgtcttcaccaggtctagaggagctctaccgctgctgcatgctattcgtcgatgacatggctgaaccccgcgaaaccccggagcaccctctgaaacagatcaagtttctgctgggtagaaaggaagaagaggccgtccttgtcgggggagaatggtcccctagcctggacgggctggatccacaagcagacccacaagtcttggtccgcacagccatccggtgcgcccaggctcagacggggattgatttgtccggttgcacaaaatggtggcgattcgccgagttccaatacctgcagccaggacctccaaggagattgcagaccgtggtggtctatctgccggatgtttggacaattatgcctacattggaggagtgggaggctctttgtcagcagaaagcagcggaagctgctcctccgacacaagaggctcagggtgagacagagcctaccgagcaggcaccagatgcccttgagcaggccgctgatacctctaggcgaaatgcggagactcccgaagccacaactcagcaggaaactgatacagacctgcccgaagctccccctcccccacttgagcccgcggtgattgcccgtccaggctgcgtaaaccttagcctgcacggtattgtcgaggaccgcaggccaaaagagaggattagcttcgaggttatggtgttagccgagctctttctagaaatgctacagagggactttggctaccgggtgtacaagatgctcctgtctctacccgagaaggttgtatcaccgcctgagccggaaaaggaagaggccgcaaaggaggaagccactaaggaggaggaagcgattaaggaagaggtggtgaaagaaccaaaagacgaggcccagaatgagggaccagcgacagaatccgaggctccactgaaagaagatggcctgctgcccaaaccactctccagcggaggggaagaggaagagaaacccaggggcgaggcaagcgaggacctgtgcgagatggcactggaccctgagctgcttttgttgagggatgacggagaagaggaattcgccggagccaaactggaggactctgaagtaagatccgtggcctccaatcaatccgaaatggaattttcgtcactgcaggacatgccgaaggagttagatccatccgccgtgcttccactcgattgtctcctggcctttgtgttctttgatgccaactggtgcggatatctgcaccgaagagatctggaacgcattcttcttaccttgggtatccgtctgtctgccgagcaggctaaacaactggtgagtcgagtggtcactcagaatatttgtcagtaccgtagtctccagtattcaaggcaagaaggcctggacgggggactcccagaggaggtgctcttcggcaatctcgatctgctgccaccacctgggaaaagtactaaaccaggagcagcccccacagagcacaaagctcttgtgagtcacaacggatcactaattaacgtcggcagcctgttgcagcgggccgagcagcaggactcaggacggctctacctggaaaataagattcatactcttgagttaaagttagaagaatcacacaatagattctctgcgacggaggttacgaataaaacactggccgccgagatgcaggagctccgcgtaagactggccgaagccgaggagactgctcggacggctgaacggcagaaatctcaactccagcgtctgcttcaagagctgaggaggagattaactccactgcaactggagatccaaagggttgtggaaaaggcagatagctgggtggagaaggaggagccagcccctagtaactag

SEQ ID NO: 208087 - DNA, 2772 bp, Artificial Sequence
  derived and/or modified sequence
atgagccaatttaagcgacagcgcataaacccattacccggaggaaggaacttttcaggtactgccagtacctctttactgggcccaccgccagggcttctgacccctccggtagctactgagctcagccaaaatgcgcgacacttacagggaggcgaaaagcagcgtgtgttcacaggtatcgtcacaagcctccacgattactttggagttgtcgatgaagaggtattctttcagttgagcgtggtgaaaggacgtctaccccagctaggcgaaaaagtgctcgtgaaggctgcatacaatcccggacaggcagtaccctggaatgctgtgaaggtgcagacgctcagtaatcaaccactgctcaagtcgccagcgccacccttactgcacgtggcggctttggggcagaagcagggcattttaggtgctcagccgcagcttatctttcagcctcaccgaatcccacctctgttcccccagaagcctctgagcctctttcagacgagccatacattacacctgagtcacctaaacagatttcccgcacgcggacctcatggcagactcgatcagggcaggagcgacgattacgattcaaaaaagaggaaacagcgtgccggaggggagccatggggggcaaagaaacccagacacgatttaccgccatatagagtccacctgactccctacactgtggactctccgatctgcgattttcttgagctccagcgacgctatcgttccctgctggtgcccagcgactttctgagcgtccacctcagctggcttagcgccttccccctgtcccagcccttctcacttcatcacccaagccgcatccaggtttcgtcagaaaaggaggcagcaccggatgccggtgccgagcccattacagctgattctgaccctgcttatagttcgaaggttcttctcctgtcgtcccctggactcgaggagctgtacaggtgctgtatgctctttgttgatgatatggctgagcccagggagacaccagagcaccccttaaagcagatcaagttcctgctgggcaggaaggaggaggaagccgtcctagtggggggagaatggagcccatccctcgacggactggatccccaggcggaccctcaagtactggtgcggacggccatccggtgcgcacaggcacagaccggtatagatctgtctggctgcacaaaatggtggcggttcgccgaatttcaatacttgcagccagggccaccgagaaggttgcagacagtcgttgtgtatctgcctgacgtgtggacaatcatgcccacgttggaggagtgggaggccctgtgtcaacagaaggccgcagaagcagcccctcccacacaggaggcccaaggcgaaacagaaccaacagagcaagcccctgacgccctcgagcaggctgcagatacctcccggaggaacgctgaaacccctgaagcaacaacacagcaggaaaccgacacggacctgccggaggcgccaccacctcccctagagcccgcagtcatcgcgagaccgggatgcgttaatttaagcctgcatggtatcgtcgaagaccggcgtcccaaggagaggatttctttcgaggtcatggtgctcgccgagctctttctggagatgctccagcgagattttgggtacagagtgtacaaaatgctacttagcttgcccgaaaaggtggtatctccacctgagcctgagaaggaagaagccgctaaggaggaggccacaaaggaggaagaggctattaaagaagaagttgtcaaagagcctaaggacgaggcccagaatgaaggtccagccaccgagtcggaagccccactgaaggaagacggactgttgccaaagccactctcctccggcggagaggaggaggagaagccgcgaggcgaagcctcagaagatctctgtgagatggcactcgaccctgagttgttactgctccgagatgacggggaggaggagttcgccggagcgaaactcgaagactcagaggtgcgcagtgtggccagcaaccagtccgagatggaattttcttcactgcaagacatgcctaaagagctggacccctccgcagtgctacccctcgactgtctcttggcattcgtgttttttgacgccaactggtgcggttacctacatcgtagagacctggagaggatactgctcacccttgggatacgtctgtccgccgagcaggccaaacagctggtaagtcgagtcgtcacacagaatatatgccaatatagaagcctgcagtactcaagacaggaggggttggatggcggattgcccgaggaagtcctgtttgggaacctggacttactgccacccccaggtaagagcaccaagcccggagcagccccaacggagcataaagccttagtgtctcacaatggctccctcattaacgtcggttccctgttgcaaagggccgaacaacaagactccggtagactgtatctcgaaaacaaaatccacactctggaactgaagcttgaagagtcccataacagattttctgcgacagaagttacaaacaaaaccctggcagccgaaatgcaggagctgcgggtgagattagctgaagctgaggaaaccgcgcgaacggctgaaaggcaaaaatcacagctgcagcgtctccttcaggaattgcgcaggcgtcttactcccctgcagctggagatacagagagtggtggaaaaagcggatagctgggtcgaaaaagaggagcccgcaccatccaactag

SEQ ID NO: 208088 - DNA, 2772 bp, Artificial Sequence
  derived and/or modified sequence
atgtctcagtttaagcgacagcgcatcaatcccctccctgggggtcggaacttcagtggcactgcctctacctctctcctaggcccacctcccggactgcttacccctccggtggccacagagttatcccagaatgcacggcacctgcagggcggagagaaacagagagtgtttactggaattgtgacgtcactgcacgattacttcggcgtggtcgacgaggaggtgtttttccagctgtccgtggtgaaggggagactaccccagctcggcgaaaaggtgctggtgaaggccgcttataatcccggacaggccgtgccttggaacgctgttaaagtgcaaacattgtccaaccagccactattgaagtcccctgcacctccactgctgcacgtagctgctctcggccagaagcaggggattctaggcgctcaaccacagctaatctttcaaccgcacaggattcctcctctcttcccacagaaacctctgtccttgtttcagacttcccacacattacatttgtcccatcttaacagattccccgctcggggtcctcatgggcgtctggaccagggacgctctgacgattatgactcaaagaaacgcaagcagcgggcaggcggagagccatggggggctaagaagccgaggcacgacctccctccttacagggtccatttgacgccctacacagtagattcaccaatctgcgatttcctggaactgcagagacgctaccggtctttactggtgccgtcagatttcctatccgtgcacctctcatggctttccgcatttccccttagccagcctttctccctgcaccacccatcacggatacaggtttccagcgagaaggaggccgctcctgacgcgggagccgagcctatcactgcagattctgacccagcttacagctcaaaggtgctgttgctgagctccccaggactggaagagctatatcgttgttgcatgctatttgtggacgacatggcagagcctagggagactcccgaacatcctctgaagcagataaaattcctcctgggacgcaaggaggaggaggccgtcctggtcggcggtgagtggagtccgtctctggatgggctggatccccaggccgacccgcaggtgctcgtgaggactgctatccgttgcgctcaagcccagaccggaatagacctgtctggatgcactaaatggtggcggtttgcggaatttcagtacctgcagcctggtccacctcgacggcttcagactgtggtagtttacttgcctgatgtctggactataatgccaaccctggaggagtgggaagccctgtgtcagcaaaaagcagcggaggccgcaccgcctacacaggaagcccagggcgaaaccgagccgactgaacaggcccctgacgctctggagcaagccgctgacacgagccgcagaaatgctgagactcctgaagctaccacccaacaggaaactgataccgacctccccgaggccccaccacccccactggaacccgctgtcatcgctcgcccaggatgcgttaatttgagtctgcatggtatagtcgaggatcgccgaccaaaggagagaatcagttttgaagtaatggtgttagccgaattatttctggagatgctacagagagacttcggttaccgggtttataagatgcttctgagcctgccggaaaaggtcgtttcccctcccgaaccagagaaagaggaagctgccaaggaggaagccactaaagaggaagaagctataaaggaggaggtagtgaaggaaccaaaagatgaagcacaaaacgaggggccagcaaccgagtccgaagcccctctcaaagaggatgggttactccccaagcccttgtcatctggtggtgaagaggaagaaaaaccacggggagaggcaagcgaggacctttgtgaaatggctttggatcctgaattacttctattgagagatgatggggaagaggagtttgctggggctaagctggaagattcagaggtcaggtccgttgccagcaatcagagtgagatggagttctccagtctccaagacatgccaaaggagctcgacccctccgccgtgcttcctctcgattgtttgcttgccttcgttttctttgatgccaactggtgtggttatcttcatcgtcgcgacctggagcgcattctgcttaccctcggtatccggctttccgccgaacaggccaagcaacttgtctctagagttgttactcagaacatttgtcagtatcggagtctgcagtattccagacaagaaggattggacggaggcctgcctgaagaagtactctttgggaaccttgacctactgcctccaccaggaaagagtacaaagcctggggcagcaccaaccgagcacaaagccctcgtctcccacaacggctctttaattaacgtgggctccttgctgcaaagggccgaacagcaagatagcggcaggctgtacttggagaacaagattcacacactggagttgaagctggaggagagccataatcgcttcagcgccactgaggtgaccaacaagaccctcgccgctgaaatgcaggaactgcgcgtacgactggctgaggccgaagagacagctcgcacagccgaacgccagaagtcacagctgcagaggctactgcaagagctgagaaggcgtctgacccccctgcaattggaaatccagagagtcgtagaaaaggccgattcgtgggtcgaaaaagaagaaccagccccatctaactag

SEQ ID NO: 208089 - DNA, 4853 bp, Artificial Sequence
  derived and/or modified sequence
gcacttccgctccccagttgccgcgggatggcaagccggcgtgggggaagggagaggtcggcggagacgagggagggaccatatccgggagagcggcagcttccgaccagtggtcgcgcttccggagaggcgcttccggtggcggcggcagcagcggctgtggtggttccgggtgtctttgtccccccggtgtcgctgccctggcccgcagccttttccccacgactctgaaagaggacagcgttcccaatgtcccagtttaagcgccagcggatcaacccgcttccagggggacgcaacttctcaggcacagcttcaacatctcttctgggccctcctcctggtttgctcactcctcctgtggccacagaactgtcccagaatgccaggcaccttcagggtggggagaaacagcgggtcttcactggtattgttaccagcttgcatgactactttggggttgtggatgaagaggtcttttttcagctaagtgtggtgaagggccgtctgccccagctgggtgagaaggtgctggtgaaggctgcatacaacccaggccaggcagtgccctggaatgctgtcaaggtgcaaacgctctccaaccagcccctactgaagtccccagcacctcctcttctgcatgtagcagccctgggccagaagcaagggatcctgggagctcagcctcagttgatcttccagcctcaccggattcccccactctttcctcagaagcctctgagtctcttccaaacatcccacacacttcacctgagccacctgaacagatttcctgcccggggccctcatggacggttggatcagggccgaagtgatgactatgactccaagaaacgcaaacagcgggctggtggagagccctggggtgctaagaagccaaggcatgacctgcctccttaccgggtccacctcactccttacactgtggacagccccatctgtgacttcctagaactccagcgccgttaccgcagcctcctggtcccctcagattttctgtccgtgcatctgagttggctatcagccttccccctgagccagcccttttccctccatcatccaagccggatccaggtctcttctgaaaaggaggcagctccagacgctggtgctgagcccatcactgcagacagtgaccccgcttatagttcgaaggtactgctgctctcttccccggggttggaggaattgtatcgttgttgcatgctctttgtggatgacatggctgagccaagggagacgccagagcatcctctgaagcagattaagtttttgctgggcaggaaagaagaggaggcagtgctggttgggggtgaatggtctccttccctggatggcctcgacccccaggctgacccgcaggtgctggtgcgtaccgccatccgctgtgcgcaggcccagactggcattgatttgagcggctgtaccaagtggtggcgctttgccgagtttcagtacctgcagccgggacccccccggcggcttcagacagtggtggtgtacctgccggatgtctggaccatcatgcctactttggaggagtgggaggccctgtgccagcagaaagctgcagaggcagctcccccaacccaggaggcacaaggggaaacggagcctactgaacaggcacctgatgccttggagcaagcagcagacacttctagacggaacgcagaaactccagaggccaccacacagcaggaaacggacactgatctcccagaggcccctccaccccccctagaacctgctgtcatcgcacgccctggctgtgtaaacctgtccctccatgggattgtggaggatcggaggccaaaggaaaggatctcttttgaggtgatggtgctggccgagctgtttctggagatgctccagagggattttggctatagagtttataagatgctactgagccttcctgaaaaggtcgtgtccccacctgaacctgagaaggaggaggcggccaaggaagaagccaccaaggaggaagaagccatcaaagaggaggtggtcaaggagcccaaggatgaggcacagaatgagggcccggctacagagtcagaggccccgctgaaggaggatgggcttttgcccaaaccactctcttctgggggagaggaagaagaaaaaccccggggcgaggcttctgaggacctgtgtgagatggccctggacccagaactgttgcttctgagggatgatggagaggaggagtttgcaggagcaaagctggaggattcggaggtccggtccgttgcctcaaaccagtcagagatggagttctcttcacttcaggacatgcccaaggagctggatccctctgctgtgctccccttagactgtctgcttgcttttgtgttctttgatgccaactggtgtggctacttgcaccggcgagacttagagaggatcctccttacccttgggatccggctcagtgcagagcaggccaagcagctggtcagcagggtggtgacccagaacatctgccagtaccggagccttcagtacagccgccaggagggcctggatggtggccttcccgaggaggtgctcttcggaaacctggacctgctgccccctcctgggaaaagcacgaagccaggtgctgcccccacagaacacaaagccttggtgtcccacaatggcagcctgattaacgtggggagcctgctgcagcgcgcggagcagcaggacagcggccggctctacctagagaacaagatccacacactggagctgaagctggaggagagccataaccgtttctcagccactgaagtaaccaataagacgctggcggcagagatgcaggagctgcgagtccggctggcggaggccgaggagaccgcccggacggcggagcgacagaagagccagctccagcggctgctgcaggagctccgcaggcgtctgacccccctgcagctggagatccagcgggtggtggaaaaggctgacagctgggtggagaaggaggagccggcacctagcaactgacggcctcgcacggaactgccatcctgtgagggcagcggtggcgcccggcaaagttggagcccttgcggtaccagaaagcagcgagagcgagacctgggagccagggcaggggtggctgaccccatgctcagcctctaggggacggcaggccatcaggctgggggctgtgctatgtgggatggatgtgtgaggaaccccggttccacttaacaactaaatacaacatcttttgcacccctagaatgtcattttgccctcaaccttggtatttctcctggggcccttttagtcttgtgctgactttctcctgtcctcttccagtttagaataagacaggggagaaaaaggcttttcgagtgtgggacaaggtctgatgtcagtgaacggaactgaagagcaagacatggagcctggctggggctaagcagccccctcctccggatggcacaggctctgctaggttccggacacaggcttctgggggaagggtctcccttggccatcacgggaatggagtccatgctagaaagagctcagtgttgggctgggtttgccagtagaacactgcgttccagtcaccccggtcttgccagaagaaaccagcacctctttcccgtggctcctgtgttcagaatgtggtattggctctggcccagccttctcccctgttacccataattcttgcctctttccataatccgtggtttcagtttgactttgtatataaagttggggttttttttttttttttttggcttgttttttaaataaaccaaagtcaaaaacaaactgagagtgtgtcctccacagctcttcctactctcctaggcttgcccgcgtgccctcccacccagcgcctctgctggaccacggtgcagttcgctccagaaggtgggccagggccggggaggtgcgcacacacccctggcatgctgggctgcctgctggagggtgctgctgctccgtggagggcagcaggcccaggaaggggtttcctctgctcgcctaagttacagcacaatactatgtggacgtttcattgaaaattttacttgaaaaaataaaattccagatactcaggtgagacacaaacccactgttcctgctttgagacctgtgaattcttgtgggacagttccactgacagcttgcgttcccgaggtaccagtcctcagtgacctcgggaaccccaaccacttaggtcccaaagccacaagggtgccctttgtcttgctgggaagctggctgagggcctgccagggctggaggaccagctctcccgcacagggttcagggcctctcccagaaaaaagaggttttgaagtgaaaaggcaacgaggggccagagggctccccaggatgggtcttttggaggtagatttgatgcccacaacgcatgcaaggctaagacccccaacttagccaacgaagcccatggcctcagaagggctgcagcttgctcaggccgtgggccaggatgcatgctggacggttctccaaataaaaaagccccaagggtttgtctacactgcttacctgctggggctgtgagtggggagacggcggcctgcctagggctcctggtgccaggctcaggaagagtcattcattgcaaagggccggcaagtgaaccagggccacctctgtccccagcctgtgagaggagcagctagccctgagaagggcaaggatgaatgaggctgaccacgtcacaggagtcctccaagagtgacggggattcagtcatcggccacaatggagagggcccggagctcactgagtttggcctcgttctcccgctcccgctgctcatcggagtggcctggctggtc

SEQ ID NO: 208090 - DNA, 3980 bp, Artificial Sequence
  derived and/or modified sequence
cctcagtcctcccttggtggcctcgccgcggctctgctgggagacccggcgctggcggctgctgaggccggagcggagggcccgggagcgtgggagcaggagggtggcgcgcagccggtttcgcgtttggtcggccagggagctgccttcccaccagccggtcgaggaaacaacgggtcgggcttccggggagagggcccacacagtctcctcgccggcaccggcctcctccatttttccgggccttgcgtggagggttttggcggatgtttttgaacgaaggaatgtcatcggggctctctcgagcccctcaccccgccagctactctgggggtggcgtggcatagtgagaggagcgctaagttgttgggaggcctgggtccttttccccacgactctgaaagaggacagcgttcccaatgtcccagtttaagcgccagcggatcaacccgcttccagggggacgcaacttctcaggcacagcttcaacatctcttctgggccctcctcctggtttgctcactcctcctgtggccacagaactgtcccagaatgccaggcaccttcagggtggggagaaacagcgggtcttcactggtattgttaccagcttgcatgactactttggggttgtggatgaagaggtcttttttcagctaagtgtggtgaagggccgtctgccccagctgggtgagaaggtgctggtgaaggctgcatacaacccaggccaggcagtgccctggaatgctgtcaaggtgcaaacgctctccaaccagcccctactgaagtccccagcacctcctcttctgcatgtagcagccctgggccagaagcaagggatcctgggagctcagcctcagttgatcttccagcctcaccggattcccccactctttcctcagaagcctctgagtctcttccaaacatcccacacacttcacctgagccacctgaacagatttcctgcccggggccctcatggacggttggatcagggccgaagtgatgactatgactccaagaaacgcaaacagcgggctggtggagagccctggggtgctaagaagccaaggcatgacctgcctccttaccgggtccacctcactccttacactgtggacagccccatctgtgacttcctagaactccagcgccgttaccgcagcctcctggtcccctcagattttctgtccgtgcatctgagttggctatcagccttccccctgagccagcccttttccctccatcatccaagccggatccaggtctcttctgaaaaggaggcagctccagacgctggtgctgagcccatcactgcagacagtgaccccgcttatagttcgaaggtactgctgctctcttccccggggttggaggaattgtatcgttgttgcatgctctttgtggatgacatggctgagccaagggagacgccagagcatcctctgaagcagattaagtttttgctgggcaggaaagaagaggaggcagtgctggttgggggtgaatggtctccttccctggatggcctcgacccccaggctgacccgcaggtgctggtgcgtaccgccatccgctgtgcgcaggcccagactggcattgatttgagcggctgtaccaagtggtggcgctttgccgagtttcagtacctgcagccgggacccccccggcggcttcagacagtggtggtgtacctgccggatgtctggaccatcatgcctactttggaggagtgggaggccctgtgccagcagaaagctgcagaggcagctcccccaacccaggaggcacaaggggaaacggagcctactgaacaggcacctgatgccttggagcaagcagcagacacttctagacggaacgcagaaactccagaggccaccacacagcaggaaacggacactgatctcccagaggcccctccaccccccctagaacctgctgtcatcgcacgccctggctgtgtaaacctgtccctccatgggattgtggaggatcggaggccaaaggaaaggatctcttttgaggtgatggtgctggccgagctgtttctggagatgctccagagggattttggctatagagtttataagatgctactgagccttcctgaaaaggtcgtgtccccacctgaacctgagaaggaggaggcggccaaggaagaagccaccaaggaggaagaagccatcaaagaggaggtggtcaaggagcccaaggatgaggcacagaatgagggcccggctacagagtcagaggccccgctgaaggaggatgggcttttgcccaaaccactctcttctgggggagaggaagaagaaaaaccccggggcgaggcttctgaggacctgtgtgagatggccctggacccagaactgttgcttctgagggatgatggagaggaggagtttgcaggagcaaagctggaggattcggaggtccggtccgttgcctcaaaccagtcagagatggagttctcttcacttcaggacatgcccaaggagctggatccctctgctgtgctccccttagactgtctgcttgcttttgtgttctttgatgccaactggtgtggctacttgcaccggcgagacttagagaggatcctccttacccttgggatccggctcagtgcagagcaggccaagcagctggtcagcagggtggtgacccagaacatctgccagtaccggagccttcagtacagccgccaggagggcctggatggtggccttcccgaggaggtgctcttcggaaacctggacctgctgccccctcctgggaaaagcacgaagccaggtgctgcccccacagaacacaaagccttggtgtcccacaatggcagcctgattaacgtggggagcctgctgcagcgcgcggagcagcaggacagcggccggctctacctagagaacaagatccacacactggagctgaagctggaggagagccataaccgtttctcagccactgaagtaaccaataagacgctggcggcagagatgcaggagctgcgagtccggctggcggaggccgaggagaccgcccggacggcggagcgacagaagagccagctccagcggctgctgcaggagctccgcaggcgtctgacccccctgcagctggagatccagcgggtggtggaaaaggctgacagctgggtggagaaggaggagccggcacctagcaactgacggcctcgcacggaactgccatcctgtgagggcagcggtggcgcccggcaaagttggagcccttgcggtaccagaaagcagcgagagcgagacctgggagccagggcaggggtggctgaccccatgctcagcctctaggggacggcaggccatcaggctgggggctgtgctatgtgggatggatgtgtgaggaaccccggttccacttaacaactaaatacaacatcttttgcacccctagaatgtcattttgccctcaaccttggtatttctcctggggcccttttagtcttgtgctgactttctcctgtcctcttccagtttagaataagacaggggagaaaaaggcttttcgagtgtgggacaaggtctgatgtcagtgaacggaactgaagagcaagacatggagcctggctggggctaagcagccccctcctccggatggcacaggctctgctaggttccggacacaggcttctgggggaagggtctcccttggccatcacgggaatggagtccatgctagaaagagctcagtgttgggctgggtttgccagtagaacactgcgttccagtcaccccggtcttgccagaagaaaccagcacctctttcccgtggctcctgtgttcagaatgtggtattggctctggcccagccttctcccctgttacccataattcttgcctctttccataatccgtggtttcagtttgactttgtatataaagttggggttttttttttttttttttggcttgttttttaaataaaccaaagtcaaaaacaaa

SEQ ID NO: 208091 - DNA, 2772 bp, Artificial Sequence
  derived and/or modified sequence
atgagccagttcaagagacagagaatcaaccccctgcccggcggcagaaacttcagcggcaccgccagcaccagcctgctgggccccccccccggcctgctgaccccccccgtggccaccgagctgagccagaacgccagacacctgcagggcggcgagaagcagagagtgttcaccggcatcgtgaccagcctgcacgactacttcggcgtggtggacgaggaggtgttcttccagctgagcgtggtgaagggcagactgccccagctgggcgagaaggtgctggtgaaggccgcctacaaccccggccaggccgtgccctggaacgccgtgaaggtgcagaccctgagcaaccagcccctgctgaagagccccgccccccccctgctgcacgtggccgccctgggccagaagcagggcatcctgggcgcccagccccagctgatcttccagccccacagaatcccccccctgttcccccagaagcccctgagcctgttccagaccagccacaccctgcacctgagccacctgaacagattccccgccagaggcccccacggcagactggaccagggcagaagcgacgactacgacagcaagaagagaaagcagagagccggcggcgagccctggggcgccaagaagcccagacacgacctgcccccctacagagtgcacctgaccccctacaccgtggacagccccatctgcgacttcctggagctgcagagaagatacagaagcctgctggtgcccagcgacttcctgagcgtgcacctgagctggctgagcgccttccccctgagccagcccttcagcctgcaccaccccagcagaatccaggtgagcagcgagaaggaggccgcccccgacgccggcgccgagcccatcaccgccgacagcgaccccgcctacagcagcaaggtgctgctgctgagcagccccggcctggaggagctgtacagatgctgcatgctgttcgtggacgacatggccgagcccagagagacccccgagcaccccctgaagcagatcaagttcctgctgggcagaaaggaggaggaggccgtgctggtgggcggcgagtggagccccagcctggacggcctggacccccaggccgacccccaggtgctggtgagaaccgccatcagatgcgcccaggcccagaccggcatcgacctgagcggctgcaccaagtggtggagattcgccgagttccagtacctgcagcccggcccccccagaagactgcagaccgtggtggtgtacctgcccgacgtgtggaccatcatgcccaccctggaggagtgggaggccctgtgccagcagaaggccgccgaggccgccccccccacccaggaggcccagggcgagaccgagcccaccgagcaggcccccgacgccctggagcaggccgccgacaccagcagaagaaacgccgagacccccgaggccaccacccagcaggagaccgacaccgacctgcccgaggccccccccccccccctggagcccgccgtgatcgccagacccggctgcgtgaacctgagcctgcacggcatcgtggaggacagaagacccaaggagagaatcagcttcgaggtgatggtgctggccgagctgttcctggagatgctgcagagagacttcggctacagagtgtacaagatgctgctgagcctgcccgagaaggtggtgagcccccccgagcccgagaaggaggaggccgccaaggaggaggccaccaaggaggaggaggccatcaaggaggaggtggtgaaggagcccaaggacgaggcccagaacgagggccccgccaccgagagcgaggcccccctgaaggaggacggcctgctgcccaagcccctgagcagcggcggcgaggaggaggagaagcccagaggcgaggccagcgaggacctgtgcgagatggccctggaccccgagctgctgctgctgagagacgacggcgaggaggagttcgccggcgccaagctggaggacagcgaggtgagaagcgtggccagcaaccagagcgagatggagttcagcagcctgcaggacatgcccaaggagctggaccccagcgccgtgctgcccctggactgcctgctggccttcgtgttcttcgacgccaactggtgcggctacctgcacagaagagacctggagagaatcctgctgaccctgggcatcagactgagcgccgagcaggccaagcagctggtgagcagagtggtgacccagaacatctgccagtacagaagcctgcagtacagcagacaggagggcctggacggcggcctgcccgaggaggtgctgttcggcaacctggacctgctgcccccccccggcaagagcaccaagcccggcgccgcccccaccgagcacaaggccctggtgagccacaacggcagcctgatcaacgtgggcagcctgctgcagagagccgagcagcaggacagcggcagactgtacctggagaacaagatccacaccctggagctgaagctggaggagagccacaacagattcagcgccaccgaggtgaccaacaagaccctggccgccgagatgcaggagctgagagtgagactggccgaggccgaggagaccgccagaaccgccgagagacagaagagccagctgcagagactgctgcaggagctgagaagaagactgacccccctgcagctggagatccagagagtggtggagaaggccgacagctgggtggagaaggaggagcccgcccccagcaactag

SEQ ID NO: 208092 - protein, 84 aa, Artificial Sequence
  derived and/or modified sequence
MALSSQIWAACLLLLLLLASLTSGSVFPQQTGQLAELQPQDRAGARASWMPMFQRRRRRDTHFPICIFCCGCCHRSKCGMCCKT

SEQ ID NO: 208093 - protein, 25 aa, Artificial Sequence
  derived and/or modified sequence
DTHFPICIFCCGCCHRSKCGMCCKT

SEQ ID NO: 208094 - protein, 25 aa, Artificial Sequence
  derived and/or modified sequence
DTHFPICIFCCGCCHRSKCGMCCRT

SEQ ID NO: 208095 - protein, 25 aa, Artificial Sequence
  derived and/or modified sequence
DTHFPICIFCCGCCRKAICGMCCKT

SEQ ID NO: 208096 - protein, 25 aa, Artificial Sequence
  derived and/or modified sequence
DTHFPICIFCCGCCRQPNCGMCCKT

SEQ ID NO: 208097 - protein, 25 aa, Artificial Sequence
  derived and/or modified sequence
DTHFPICIFCCGCCRQSNCGMCCKT

SEQ ID NO: 208098 - protein, 25 aa, Artificial Sequence
  derived and/or modified sequence
DTHFPIYIFCCGCCHRSKCGMCCKT

SEQ ID NO: 208099 - protein, 25 aa, Artificial Sequence
  derived and/or modified sequence
DTNFPICIFCCKCCNNSQCGICCKT

SEQ ID NO: 208100 - protein, 25 aa, Artificial Sequence
  derived and/or modified sequence
DTNFPICLFCCKCCKNSSCGLCCIT

SEQ ID NO: 208101 - protein, 96 aa, Artificial Sequence
  derived and/or modified sequence
MRPMSIACAVAVIIACVCALQSAALPSEVRLDPEVRLEEPEDSEAARSIDQGVAAALAKETSPEVLFRTKRQSHLSLCRYCCNCCKNKGCGFCCRF

SEQ ID NO: 208102 - protein, 59 aa, Artificial Sequence
  derived and/or modified sequence
PHQTGQLTDLRAQDTAGAEAGLQPTLQLRRLRRRDTHFPICIFCCGCCKTPKCGFCCKT

SEQ ID NO: 208103 - protein, 59 aa, Artificial Sequence
  derived and/or modified sequence
PHQTGQLTDLRAQDTAGAEAGLQPTLQLRRLRRRDTHFPICIFCCGCCKTPKCGLCCIT

SEQ ID NO: 208104 - protein, 59 aa, Artificial Sequence
  derived and/or modified sequence
PHQTGQLTDLRAQDTAGAEAGLQPTLQLRRLRRRDTHFPICIFCCGCCKTPKCGLCCKT

SEQ ID NO: 208105 - protein, 56 aa, Artificial Sequence
  derived and/or modified sequence
PPQTRQLTDLQTKDTAGAAAGLTPVLQRRRRDTHFPICIFCCGCCRKGTCGMCCRT

SEQ ID NO: 208106 - protein, 86 aa, Artificial Sequence
  derived and/or modified sequence
MALNTNIRAACLLLLLLASLTSGSVLPHQTRQLADLQTQDAAGMAGAAAGLMPGLHQLRRRDTHFPICTLCCGCCNKQKCGWCCKT

SEQ ID NO: 208107 - protein, 54 aa, Artificial Sequence
  derived and/or modified sequence
QMRQTTELQPLHGEESRADIAIPMQKRRKRDINFPICRFCCQCCNKPSCGICCE

SEQ ID NO: 208108 - protein, 25 aa, Artificial Sequence
  derived and/or modified sequence
DINFPICRFCCQCCNKPSCGICCEE

SEQ ID NO: 208109 - protein, 20 aa, Artificial Sequence
  derived and/or modified sequence
ICIFCCGCCHRSKCGMCCKT

SEQ ID NO: 208110 - protein, 16 aa, Artificial Sequence
  derived and/or modified sequence
DTHFPICIFCCGCCHR

SEQ ID NO: 208111 - DNA, 252 bp, Artificial Sequence
  derived and/or modified sequence
atggccttgagttcgcagatctgggcggcatgccttcttttgttgctcctgctggcatcgctgacttccggttcggtgtttccgcagcaaaccggacaactggctgagctgcaaccacaggaccgcgccggcgcacgggcttcgtggatgccaatgtttcagcggagacggagaagagatacccatttcccgatctgcattttctgctgcgggtgttgccaccggtccaagtgcggcatgtgctgtaagact

SEQ ID NO: 208112 - DNA, 252 bp, Artificial Sequence
  derived and/or modified sequence
atggcccttagctcgcaaatatgggcagcctgcctgctgctgctattgctcctcgcaagcctgacatctgggagcgtattcccacaacaaaccgggcagctcgccgaacttcagccccaggatcgagccggagcccgtgcttcttggatgcctatgttccagcgtcggaggcgacgagatacccatttcccgatctgcattttttgctgcggatgttgccacaggtccaagtgcggcatgtgctgcaaaacc

SEQ ID NO: 208113 - DNA, 252 bp, Artificial Sequence
  derived and/or modified sequence
atggccctgtcctcgcagatttgggcagcatgtttgctgcttctgctcctcctggcctcactgactagcggctccgtgtttccgcagcaaactggacaactcgccgaactgcagccgcaagaccgcgctggtgcgagagcgagctggatgcctatgttccagaggcgccgccggagagatacccatttcccaatctgcatcttctgctgtggatgctgccaccggtcgaaatgcgggatgtgttgcaagacc

SEQ ID NO: 208114 - DNA, 252 bp, Artificial Sequence
  derived and/or modified sequence
atggctctgtcctcgcagatctgggcggcatgtctcctgttgctcctgcttctggccagccttacctccggttcggtgtttccgcaacaaactggacagcttgccgaattgcagccccaggaccgcgccggggcccgtgcatcttggatgcctatgttccaaaggcggaggcggcgggatacccacttccccatctgtatcttctgttgcggatgttgccacaggtcaaagtgcggcatgtgctgcaagacc

SEQ ID NO: 208115 - DNA, 252 bp, Artificial Sequence
  derived and/or modified sequence
atggcactgtcatcacagatctgggcggcgtgtctcctcctgctcctcctgttggcctccctgacgtccgggtcggtctttccccagcaaaccggacaactggctgaacttcaaccccaggatcgagccggcgccagagcatcctggatgccgatgtttcagagacgccgccgcagagatactcacttcccgatctgcatcttctgctgcgggtgctgccacaggtcaaaatgcggaatgtgctgcaagacc

SEQ ID NO: 208116 - DNA, 252 bp, Artificial Sequence
  derived and/or modified sequence
atggctctgtccagtcagatctgggctgcctgcctgctcctcctgctcctgttagcgtcattgacctccggatccgtcttcccccagcagacaggacagctagctgagcttcagcctcaggacagagcgggggcaagggcgtcctggatgcctatgtttcagaggaggcgacggcgagatacccacttccctatatgtatcttttgttgcggatgctgccatagaagcaaatgcggtatgtgctgcaaaact

SEQ ID NO: 208117 - DNA, 252 bp, Artificial Sequence
  derived and/or modified sequence
atggccctctcctcacagatttgggcggcatgtctcctcctgcttcttcttttggcctcgctgacctccggatcggtgtttccacagcaaactggacaactcgcagagctgcaaccacaagatagagccggtgcacgggcaagctggatgcctatgtttcaaagacggcgccgccgggacacccattttccaatctgtatcttttgctgcggctgttgtcacagatcgaagtgtggaatgtgttgcaagact

SEQ ID NO: 208118 - DNA, 252 bp, Artificial Sequence
  derived and/or modified sequence
atggcactttcctcgcaaatttgggcagcatgcctgcttcttcttctcctgcttgcttcccttacctcaggtagcgtgtttcctcaacagactggacaactggcggaattgcaaccacaggatagagctggcgcacgtgccagctggatgccaatgtttcaaaggagaaggcgaagagatacgcatttcccaatctgcatcttttgctgcggttgttgccatcgatcgaagtgcggaatgtgctgtaagact

SEQ ID NO: 208119 - DNA, 252 bp, Artificial Sequence
  derived and/or modified sequence
atggcattgtcgtcgcagatctgggctgcctgcttgttgctgctgttgctgttggcttctctgaccagtggtagcgtcttcccccaacagaccggacagctggctgagctacaaccccaagaccgagccggagctcgagccagctggatgccgatgttccagcgacgcaggcgacgggatacccacttccctatatgcattttttgctgtgggtgctgtcatcggtccaagtgcggaatgtgctgcaagacc

SEQ ID NO: 208120 - DNA, 252 bp, Artificial Sequence
  derived and/or modified sequence
atggcactgtcgtcacaaatttgggccgcgtgtctcctgctcctcctcctcttggcctcgcttacctcggggtccgtgtttccgcagcagactggacaattggcggaactgcaaccacaagatcgggccggcgctagagcctcctggatgccgatgttccaacggcgccggagacgcgacacccacttcccgatctgcatcttttgctgcggctgctgccaccggtcgaaatgcggtatgtgctgtaaaact

SEQ ID NO: 208121 - DNA, 252 bp, Artificial Sequence
  derived and/or modified sequence
atggccctgtcgtcacagatctgggccgcctgcctgctgcttctccttttactggccagtctcaccagtggatcagtcttcccgcagcaaactgggcagctggctgagttgcaaccgcaggaccgagctggcgcacgggcatcatggatgcccatgttccagcgtcgacgacgacgggatacacactttcctatctgtatcttctgttgcggctgctgccacaggtctaaatgcggcatgtgctgcaaaact

SEQ ID NO: 208122 - DNA, 252 bp, Artificial Sequence
  derived and/or modified sequence
atggcactttcttcccagatttgggccgcgtgtctccttttgctcctgcttcttgctagcctcactagcggttcagttttcccacagcaaacgggacagctggcagagctccagcctcaagaccgcgcaggtgcgcgggcttcgtggatgccgatgtttcagcgcagacggagacgcgatacccattttcctatatgtatattctgctgcggatgttgccacagatcgaaatgcggaatgtgttgtaagacc

SEQ ID NO: 208123 - DNA, 252 bp, Artificial Sequence
  derived and/or modified sequence
atggcgctgagcagccagatttgggcggcctgtctgctccttttactgctgttggctagcctgacctcagggagcgttttcccacaacaaactggtcagctggccgaattacaacctcaggatcgcgctggtgcacgagcgtcctggatgcctatgttccaacgccgccgccgccgcgatactcacttccctatttgcatcttctgctgcgggtgctgccatcgctctaagtgtggtatgtgttgcaagacg

SEQ ID NO: 208124 - DNA, 252 bp, Artificial Sequence
  derived and/or modified sequence
atggccctttcgtcgcagatctgggcggcctgtctgctgttgttgctgctgctggcttctcttacgagcggttcagtgtttcctcagcagactgggcaactggccgaactgcaaccgcaagaccgggcgggcgcgcgggctagctggatgcccatgttccagaggcgtcgccgccgcgatacccatttcccaatctgtatcttttgctgtggctgctgccacagatccaagtgcggaatgtgctgcaaaacc

SEQ ID NO: 208125 - DNA, 252 bp, Artificial Sequence
  derived and/or modified sequence
atggcactgtcctctcagatttgggccgcttgcctcctgctgcttctgcttctggcatccctgacctccggatcagtcttcccccaacaaacggggcagctggcagaattgcagcctcaagatagggccggtgcacgggcctcttggatgcctatgttccagagacggagacgacgggatactcatttccctatctgcatcttctgctgcgggtgttgccatcggtctaaatgcggaatgtgctgcaagaca

SEQ ID NO: 208126 - DNA, 252 bp, Artificial Sequence
  derived and/or modified sequence
atggcgttgtcctcccagatttgggctgcctgcctgctcctgttgctcctcctcgcctcgctgacgagcggttcagtgttcccccagcagactggacagctggccgaactccaaccacaagaccgcgcaggggcacgcgctagctggatgccgatgtttcagcgccgccgccggagagatacccactttcctatctgcatcttttgctgcggctgctgccaccgctcaaagtgcgggatgtgctgcaaaacc

SEQ ID NO: 208127 - DNA, 252 bp, Artificial Sequence
  derived and/or modified sequence
atggctttgtcgtcgcaaatctgggctgcttgcttgttgcttctgctgttgctcgcatcacttactagtggaagcgtgttcccgcagcagacgggccaactcgcggaactgcaacctcaggatcgggccggggcgcgtgcctcgtggatgccgatgttccagcgccggagacgccgcgacactcatttccccatttgcatcttttgttgtggatgctgtcaccggagcaaatgtggcatgtgctgcaagacc

SEQ ID NO: 208128 - DNA, 252 bp, Artificial Sequence
  derived and/or modified sequence
atggcccttagctcgcagatctgggcggcatgcctgcttctgctgttgctcctggcctccttgacttcggggtccgtgttcccgcagcaaaccggacaactcgccgagctgcagccacaggatcgggctggagctcgcgcgtcatggatgccaatgttccagcgcagaaggaggcgcgacacccattttccgatttgcatcttctgttgtggctgctgccaccgctcaaagtgtggaatgtgctgcaaaacc

SEQ ID NO: 208129 - DNA, 252 bp, Artificial Sequence
  derived and/or modified sequence
atggcgctgtcgtcccagatttgggcggcctgcttgttacttctcttgttattggcgagcttgacttcaggctccgttttcccccaacagacaggacagttggctgaacttcagccacaagatcgtgcaggggctagagcatcgtggatgcccatgttccagcgtcgtcgtcgtcgcgatacccattttccaatctgcatcttctgttgcggatgttgtcataggtctaagtgcgggatgtgttgtaaaact

SEQ ID NO: 208130 - DNA, 252 bp, Artificial Sequence
  derived and/or modified sequence
atggcactttcgagccagatatgggccgcatgccttctgctgcttctcttgctggcctcgcttacctcagggtccgtctttccacaacagaccggacaacttgctgaacttcagcctcaggatagagctggtgcgcgagcgtcctggatgccgatgttccaaaggagacgacgcagggacactcattttcccatctgcatcttttgctgtggttgttgtcaccgaagcaagtgtgggatgtgctgcaaaacc

SEQ ID NO: 208131 - DNA, 252 bp, Artificial Sequence
  derived and/or modified sequence
atggcgctgtcatcccagatttgggcagcttgcctcctcctcctgctccttctcgcctcgctgacttccggttctgtctttccacagcaaacgggtcaactggctgaacttcagccgcaggatcgggcgggagctagagcttcgtggatgccgatgtttcaaagacgcaggcgcagagacactcacttcccgatctgcatcttctgttgcggatgctgtcaccggagcaagtgcggaatgtgctgcaagacg

SEQ ID NO: 208132 - DNA, 252 bp, Artificial Sequence
  derived and/or modified sequence
atggccctctcgagccaaatctgggctgcgtgcctgttgcttttgcttcttctggcatcactgacctccgggagtgtgtttcctcaacagacgggacaattggctgaactgcaaccccaggatcgtgccggagcacgtgcaagttggatgcctatgtttcagagacggcggagacgagacactcacttccctatctgtatattctgttgcggctgttgtcataggtccaagtgcggtatgtgttgcaaaacc

SEQ ID NO: 208133 - DNA, 252 bp, Artificial Sequence
  derived and/or modified sequence
atggctttaagcagccagatttgggccgcctgcttgctcctgctcctcttattggcttctcttactagtggctcagtgttcccgcagcaaaccggacagctagccgaactccaaccccaggaccgcgctggagcccgagcttcttggatgcccatgttccagcgacgacggaggcgggacacgcatttcccgatctgtattttctgttgtggctgttgtcacagatctaagtgcggaatgtgctgcaagaca

SEQ ID NO: 208134 - DNA, 252 bp, Artificial Sequence
  derived and/or modified sequence
atggccctgagcagccagatctgggcagcttgcctcctgctgctgttgctgttggcctctctgaccagcggaagtgtgtttccgcagcagaccggtcaattggctgaactccagccacaggatcgcgccggagccagagcatcgtggatgcccatgtttcagcggaggcgccgccgcgacactcacttcccaatttgcatcttctgttgcggctgttgtcatcgctcgaagtgcgggatgtgctgtaaaact

SEQ ID NO: 208135 - DNA, 252 bp, Artificial Sequence
  derived and/or modified sequence
atggcgctgagcagccaaatttgggccgcttgtctactgctgctgttacttctagcttctttaacatccgggagcgtattcccgcagcagaccgggcagctggctgaattgcagccccaggaccgtgccggggctcgagcgagctggatgccaatgttccagaggcggaggcgtcgggatacccatttccccatttgcatcttttgctgcggatgctgccacaggtcaaaatgtgggatgtgctgcaagaca

SEQ ID NO: 208136 - DNA, 252 bp, Artificial Sequence
  derived and/or modified sequence
atggccctgtcatcccagatctgggctgcctgccttctgcttcttctgctgctggcctcattaaccagcggatcagtctttccgcaacagaccggacagctggcagagcttcaacctcaagacagggctggagcgcgggcgagctggatgccaatgttccagagacgtaggaggagggacactcactttcccatctgtatattctgctgcgggtgctgccacagaagcaaatgcggaatgtgttgtaagaca

SEQ ID NO: 208137 - DNA, 252 bp, Artificial Sequence
  derived and/or modified sequence
atggccctctcttctcagatttgggctgcgtgtttgttattgctcctgttgttggccagtttaaccagtgggagcgtgtttccacaacagacaggacagttggctgagttgcagccgcaggacagggcaggcgctcgtgcttcatggatgccaatgtttcagcgtcgtcgtcgacgggacacacacttcccaatctgtattttttgttgcggatgctgccaccgctcaaagtgcggaatgtgttgtaagaca

SEQ ID NO: 208138 - DNA, 252 bp, Artificial Sequence
  derived and/or modified sequence
atggcactgtcctcccaaatatgggcagcttgcctcctcctgctgctgcttcttgcctcactgacttcgggatcagtgttcccccagcaaactggacaattggcagagcttcaaccacaggatcgcgctggtgcacgtgcgtcgtggatgcctatgtttcaacgtcgaagaaggagggacacccatttcccaatctgcattttctgctgtggctgttgccatagatccaagtgcggaatgtgttgcaagact

SEQ ID NO: 208139 - DNA, 252 bp, Artificial Sequence
  derived and/or modified sequence
atggccctctcaagccaaatctgggctgcctgtctgttgctccttctgctcctggcctccctgacatcaggatctgtgttccctcagcagaccggccagctggccgagctccagccccaggacagggctggcgccagggctagttggatgcccatgttccagagaagaagaaggcgcgacacccatttcccaatctgtatcttctgctgcggctgttgtcacagatctaagtgcggtatgtgctgcaagaca

SEQ ID NO: 208140 - DNA, 252 bp, Artificial Sequence
  derived and/or modified sequence
atggctctgtctagtcagatctgggctgcctgtctactgctcctcctcttgctggctagcctgaccagcgggagcgtcttcccacagcagaccggtcagcttgctgagctgcagcctcaagaccgcgcgggggcccgtgcctcttggatgccgatgttccagcggagaaggcgccgggacacacacttcccgatttgcatcttctgttgcggctgttgccatcgctccaagtgcggtatgtgctgcaagaca

SEQ ID NO: 208141 - DNA, 252 bp, Artificial Sequence
  derived and/or modified sequence
atggctttgtcttcccagatttgggccgcttgtttgctcctcctcctgctcctggcctctcttacaagcggttccgtgtttccacagcagacaggacagctggcagagctgcaaccccaagatcgcgcaggggcacgagcatcatggatgcctatgtttcagaggaggagacgcagagacacacattttcctatctgcatcttttgctgcggatgttgccaccggtccaagtgtgggatgtgttgcaagact

SEQ ID NO: 208142 - DNA, 252 bp, Artificial Sequence
  derived and/or modified sequence
atggctttgtcctcgcagatttgggcggcatgccttctgcttcttctgcttctcgccagcctgacctcaggatcggttttccctcagcagactgggcagctggcagaactccaaccgcaagatagagcaggtgcacgcgcatcatggatgccaatgtttcaaaggcgtagacgccgagacactcattttcctatttgtatcttttgctgtggttgctgccaccgttccaaatgtggcatgtgctgtaagacc

SEQ ID NO: 208143 - DNA, 252 bp, Artificial Sequence
  derived and/or modified sequence
atggccctgtctagtcagatctgggctgcatgcctactgctgctgctgttgctggcatctttgacctcagggagtgtctttccccagcaaacgggccagttggccgaactgcagccccaggatcgggccggggcccgagccagctggatgcctatgtttcagagaaggaggcgtcgtgatacgcactttccaatttgcattttttgctgtggctgctgccacagatccaagtgcggaatgtgctgcaagaca

SEQ ID NO: 208144 - DNA, 252 bp, Artificial Sequence
  derived and/or modified sequence
atggccctctcgtcgcagatttgggcagcttgcctgctgctcctacttttactggcgtccctaacatcgggctccgtttttccacagcagacaggccagctcgcagagctgcagccacaggatcgggctggggcgagagcctcctggatgcccatgttccagagaaggagacggagggacactcacttccccatatgcatcttctgctgcggatgctgtcatagaagtaagtgtgggatgtgttgcaaaact

SEQ ID NO: 208145 - DNA, 252 bp, Artificial Sequence
  derived and/or modified sequence
atggcgctttcaagccagatctgggcagcttgcttgctgcttctgctactcctcgcatctctgacttctggatcagtgttcccccagcagaccggacagctggctgagctgcagcctcaggacagggcaggcgcaagggcgtcctggatgccaatgtttcagcggcggcgccggcgtgatactcactttccgatctgcattttttgctgtggttgctgtcaccggtcgaagtgcggcatgtgttgtaagaca

SEQ ID NO: 208146 - DNA, 252 bp, Artificial Sequence
  derived and/or modified sequence
atggcactgagctcccaaatctgggcggcatgccttcttctgcttctgctgctcgcatcgcttacttctggctcggtgttcccacagcagaccgggcaattggccgagctccaacctcaggaccgggctggtgcgcgcgcgagctggatgccaatgtttcagcgaagaaggcgacgagatacccattttcctatctgtatcttctgttgcggttgctgtcaccggagcaagtgcggaatgtgttgtaagacc

SEQ ID NO: 208147 - DNA, 252 bp, Artificial Sequence
  derived and/or modified sequence
atggcgttaagctcacagatctgggccgcctgtctgctgttgcttctgctattagccagcctgacatctggttctgtgttccctcagcaaacgggccagctagctgaattgcagcctcaggaccgcgccggcgccagggccagctggatgccgatgttccagcgccgccgccggagagatacacactttcctatttgcatcttttgctgtggatgctgccacagatcaaagtgtgggatgtgctgtaaaact

SEQ ID NO: 208148 - DNA, 252 bp, Artificial Sequence
  derived and/or modified sequence
atggccttgagctcccagatctgggctgcctgcctgctcctgcttctgctcttggccagtctcacatccggtagcgtcttcccccagcaaaccggccagctggcagagctacaacctcaggaccgagccggggctcgtgcatcttggatgccaatgtttcagaggaggaggcgacgggatacacacttcccgatttgcattttttgttgcgggtgctgtcaccgatcaaaatgtgggatgtgttgcaagact

SEQ ID NO: 208149 - DNA, 252 bp, Artificial Sequence
  derived and/or modified sequence
atggctctttcgtcacagatttgggcagcatgccttctgctgctgctgttgcttgcttcccttacttcagggtcggtgtttccccaacagactggacaacttgcagaactgcagccacaggatagagcaggagcacgagcatcatggatgcctatgtttcaacgcaggcgccgcagagacacccattttccgatttgtatattctgctgcgggtgttgccatagaagcaagtgtggaatgtgttgcaaaacc

SEQ ID NO: 208150 - DNA, 252 bp, Artificial Sequence
  derived and/or modified sequence
atggctctttcgagccagatctgggccgcttgcctgctgctgctcttgcttcttgcttcgctgacttcaggatctgtgttcccacagcagactggacagctcgccgagctccagcctcaggatcgagccggcgcacgggcttcatggatgccgatgttccagcggcgcagacggcgggacacccactttcccatctgtatcttctgttgcggatgctgtcacagaagcaagtgcggaatgtgctgcaagacc

SEQ ID NO: 208151 - DNA, 252 bp, Artificial Sequence
  derived and/or modified sequence
atggcactaagctcgcagatctgggcagcgtgtctcctgcttctccttttactagcttcactgacctccggtagcgtctttccgcagcagaccgggcaattggcggaactccagccccaggacagagccggcgcccgggcctcttggatgccaatgtttcagaggcgtaggcgtcgcgacacacactttcccatctgtattttctgctgcggctgttgtcataggtcaaaatgcggcatgtgctgcaagaca

SEQ ID NO: 208152 - DNA, 252 bp, Artificial Sequence
  derived and/or modified sequence
atggcattgagcagccaaatctgggccgcttgcctgctgttgctcctcctccttgcttctcttactagcggaagcgtgtttccacaacagacagggcagctcgcggagttgcagccacaagatcgtgccggcgctcgtgcaagttggatgcctatgttccagagaaggagaaggcgggacacccacttcccgatttgtattttctgttgcggatgttgccatcgctctaaatgtggcatgtgttgtaaaact

SEQ ID NO: 208153 - DNA, 252 bp, Artificial Sequence
  derived and/or modified sequence
atggcattgtcgtcgcaaatatgggcggcctgtctattgcttttgctgttactggctagcttgacatctggaagtgtcttcccgcagcaaacaggacagcttgccgaacttcagccacaagatcgtgccggcgcacgagcgtcgtggatgcccatgttccaaagacgcagacgtcgtgatacacattttcccatctgcattttttgttgcggctgttgtcatcgctccaaatgcgggatgtgctgtaagaca

SEQ ID NO: 208154 - DNA, 252 bp, Artificial Sequence
  derived and/or modified sequence
atggctctgtcatcgcagatctgggctgcatgcctgcttctgctcctgcttctcgcaagcctcacttccggatccgtctttccgcagcagactggacaactggccgagctgcaaccacaggatagagcaggcgctcgcgccagctggatgcctatgtttcagagacgcaggaggcgggatacccatttccctatctgcatcttttgttgtggttgctgtcacagatcaaaatgcggcatgtgctgtaagacg

SEQ ID NO: 208155 - DNA, 252 bp, Artificial Sequence
  derived and/or modified sequence
atggcactgagcagccagatctgggctgcttgcctgctactcctgctgctgttggcatcactgactagcggaagcgtgttccctcagcagacaggtcaactggccgagctacagccacaggaccgagccggcgctcgcgcttcttggatgccaatgttccagagacgccgaaggagagacactcattttccaatttgtatcttttgctgcgggtgctgccatcgctccaaatgtgggatgtgttgcaagacg

SEQ ID NO: 208156 - DNA, 252 bp, Artificial Sequence
  derived and/or modified sequence
atggctctgtcttctcaaatctgggccgcctgcctcctgctgctgttgctgctggctagtctgacctcaggatcagtttttcctcagcaaacaggccagctggcggaacttcagccccaggatagagccggcgctagagcttcatggatgccgatgtttcagcggaggcgccgccgcgacacacacttcccgatttgtatattctgttgcgggtgctgtcaccgcagtaaatgtgggatgtgctgcaaaacg

SEQ ID NO: 208157 - DNA, 252 bp, Artificial Sequence
  derived and/or modified sequence
atggctctgtcctcccaaatctgggcagcttgtctcctcttgctgctgttgctggcttcgctcacttccggatccgtgtttccgcagcaaactggacaactggcggagctgcagccacaggaccgggctggtgcccgcgcgtcttggatgccgatgtttcagcgccgcaggcggagagatacccacttcccgatctgtatcttctgctgcgggtgttgtcatcgctcaaagtgcggaatgtgctgtaagact

SEQ ID NO: 208158 - DNA, 252 bp, Artificial Sequence
  derived and/or modified sequence
atggctctctctagccagatctgggctgcatgtcttctgcttctacttctgctcgcatcactgaccagtggcagcgtgttccctcaacaaaccggccagctggctgaactccagccacaggacagagcaggggctcgtgccagctggatgcccatgtttcagagaagacggagaagagacacacatttccctatttgcattttttgttgcggatgttgccataggagcaaatgcgggatgtgctgtaagaca

SEQ ID NO: 208159 - DNA, 252 bp, Artificial Sequence
  derived and/or modified sequence
atggctctctcatcccagatctgggcagcttgtcttctgctcctcttgctgcttgccagtttgaccagcggatcagtgttcccccaacagacgggccagctggcagagctgcagccccaggaccgcgctggcgctcgggcttcttggatgcctatgttccagagaagacggagaagagacacccacttccccatctgcatcttctgttgtgggtgctgtcatcggagtaagtgtggcatgtgttgcaaaaca

SEQ ID NO: 208160 - DNA, 252 bp, Artificial Sequence
  derived and/or modified sequence
atggcgctttcatcgcaaatctgggccgcttgtctccttctcctgctccttttggcatcccttacctcgggtagcgtgttcccccaacagactggtcagctcgctgaactgcagcctcaggatcgcgcaggagcaagagctagctggatgcctatgtttcaaagacgccgccgtcgggacacccatttcccgatttgcatcttttgctgtggatgctgtcaccgatcgaagtgtggcatgtgttgtaagact

SEQ ID NO: 208161 - DNA, 252 bp, Artificial Sequence
  derived and/or modified sequence
atggccctctcgtcccagatctgggccgcttgtctccttctcctgctcttactggcgtcccttactagtggaagtgtgtttccacagcagaccggacagctcgcagagctgcaaccacaggatcgagccggagctcgagcaagctggatgcctatgtttcagaggaggaggaggagggacacacactttcctatctgtatcttttgttgcggatgctgtcatcggagtaaatgcggcatgtgttgcaaaaca

SEQ ID NO: 208162 - DNA, 252 bp, Artificial Sequence
  derived and/or modified sequence
atggccctgtcgtcacagatttgggcagcgtgtctgcttttgctcttgctccttgcctccctgacttccggatcggtgtttccgcaacaaaccggccagcttgcagagctccaacctcaggatcgggccggtgcacgtgcaagctggatgccaatgtttcaacgaaggaggcggcgcgacactcatttccctatatgcatcttttgttgcgggtgttgccatcgatcgaagtgtggtatgtgttgcaaaacc

SEQ ID NO: 208163 - DNA, 252 bp, Artificial Sequence
  derived and/or modified sequence
atggcattgagctcacagatatgggcagcatgcctgttgctgctgctactgctggcctctctcacaagtggtagtgtgttcccacagcagaccgggcagcttgccgagctgcagccgcaagatcgagccggcgcccgagctagctggatgcctatgttccagcgaaggagacgaagggacacccattttcccatctgcatcttctgttgcggctgctgtcataggtcgaaatgcggaatgtgttgcaagacg

SEQ ID NO: 208164 - DNA, 252 bp, Artificial Sequence
  derived and/or modified sequence
atggccctttcatcccagatttgggcggcttgcctgctcctgctgttgctcttggcgtccctgacttcggggtcggtgtttccgcagcagactggtcagcttgccgagctgcagcctcaagatcgcgcaggagcgcgcgcctcctggatgcctatgttccagcgccggcggcggagggatactcacttcccgatctgcatcttctgttgcggctgctgtcaccgctcgaagtgcggaatgtgctgcaagact

SEQ ID NO: 208165 - DNA, 252 bp, Artificial Sequence
  derived and/or modified sequence
atggcgttaagctctcagatatgggccgcctgcctgctcctgctactccttttggcaagtcttacgtcaggctccgtgtttcctcagcagacgggtcaactggccgagctgcagccacaggatagagccggtgctcgtgcttcctggatgcccatgtttcagagaaggaggaggcgggacacacactttccaatttgcatcttctgttgcggctgctgtcatcggtccaaatgtggaatgtgttgtaaaact

SEQ ID NO: 208166 - DNA, 252 bp, Artificial Sequence
  derived and/or modified sequence
atggccttgtcatctcagatttgggcagcctgcctccttctgctgctgcttttggcttctctcacatcaggaagcgtattcccccagcagacaggacagctggcagagctacagccccaggatcgcgctggcgcacgagcctcttggatgcctatgttccagcgacgcaggcgaagagatacccatttccccatttgtattttctgctgcggctgctgccatcgatcaaagtgcgggatgtgctgcaagacc

SEQ ID NO: 208167 - DNA, 252 bp, Artificial Sequence
  derived and/or modified sequence
atggctctgagttcgcagatttgggctgcctgcctgctcttactgttgctgctagcctccctgacaagcggttccgtattcccacagcagactgggcaattagccgagttacagccgcaggaccgcgccggggctcgcgcatcgtggatgcctatgtttcaacgccgccgacgccgagatacgcatttccctatttgtatcttctgctgtggatgttgccataggtcaaaatgtggtatgtgttgcaagacg

SEQ ID NO: 208168 - DNA, 252 bp, Artificial Sequence
  derived and/or modified sequence
atggccttgagcagtcaaatttgggccgcctgtctgttgttacttttgcttctcgccagtctcacatcagggtctgtgtttcctcagcaaaccgggcagctggctgagcttcaaccacaggaccgcgccggggctcgcgcttcttggatgcccatgtttcagagaaggcgccgaagagatacccacttcccaatctgcatcttctgctgtggctgctgccatcggtcgaaatgcggcatgtgttgtaagaca

SEQ ID NO: 208169 - DNA, 252 bp, Artificial Sequence
  derived and/or modified sequence
atggctctgtcatcacagatttgggcggcctgcctactcttactgcttttactagcaagcctcacgagcggcagtgtttttccacaacagacggggcagctggccgagttacagcctcaggaccgagctggggcacgtgcatcttggatgcctatgttccaacgccggagacgcagagacacccatttcccaatctgcattttctgttgtggctgttgccaccgctccaagtgcgggatgtgttgcaagacg

SEQ ID NO: 208170 - DNA, 252 bp, Artificial Sequence
  derived and/or modified sequence
atggctctctcttctcagatatgggcggcatgcctgctactcctcctccttcttgcctccctgacatcgggatccgtgtttccacagcagacaggacagctagctgagctgcagccacaggatagagcgggagccagggcatcttggatgcctatgtttcagcgacggaggcggcgcgacacacatttccctatatgtatattctgttgtggatgttgtcaccggtctaaatgcggaatgtgctgtaaaaca

SEQ ID NO: 208171 - DNA, 252 bp, Artificial Sequence
  derived and/or modified sequence
atggcccttagctcacagatctgggccgcctgtttgctcctcctgctcctgctggcgagcctgacgagtggttcagtgttccctcagcagactggacagctggcggagctgcagccccaggaccgagcaggcgcgcgagctagctggatgcctatgttccagaggcgcagacgtcgcgacacccattttcccatctgtatcttttgctgcggttgttgccaccgtagtaagtgcggcatgtgctgcaagacc

SEQ ID NO: 208172 - DNA, 252 bp, Artificial Sequence
  derived and/or modified sequence
atggctttgagcagccagatttgggcagcttgcctcttgctgctgctcctcctcgcttccctgacctcaggcagcgtgtttccccagcagaccggacaactcgcagaacttcaaccacaggatagagcgggcgctcgggccagttggatgccaatgttccagcgacggcgcagacgcgacacccacttccccatatgcatattttgttgtggttgctgccaccggagtaaatgcggaatgtgttgtaagacg

SEQ ID NO: 208173 - DNA, 252 bp, Artificial Sequence
  derived and/or modified sequence
atggctctgagctctcagatttgggccgcttgcctgctcctgctgttacttctagccagcctgacaagcggctcagtcttcccgcagcagacaggacaactagcggaactccagccccaagaccgggctggcgctagagcatcatggatgcccatgtttcaaaggagaagaaggagggacacacactttcccatatgcatcttctgttgtggctgctgtcaccgctcaaaatgcgggatgtgctgtaagacc

SEQ ID NO: 208174 - DNA, 252 bp, Artificial Sequence
  derived and/or modified sequence
atggccctgagttcccaaatctgggctgcctgcctgctccttcttctactccttgcgagcctcacgtccggctctgtgttcccgcagcagacagggcagttggcggagctgcagccacaggatagagccggcgctcgtgcctcatggatgccgatgtttcagcggcgcagacgcagagacacgcatttccctatttgcatattctgctgtggatgctgtcacagatccaagtgtggcatgtgttgcaagact

SEQ ID NO: 208175 - DNA, 252 bp, Artificial Sequence
  derived and/or modified sequence
atggccttgtcctcgcaaatttgggcagcatgcctgctgctgcttcttttgctggcgtcacttacttccggttcagtgttcccacaacagaccggacagctcgcagaacttcagccacaagatcgcgcaggtgcaagagcgtcgtggatgccaatgtttcaacgtcgtagacggcgcgacactcattttcctatttgcattttctgttgtgggtgttgtcaccggagcaagtgcggtatgtgctgtaagacc

SEQ ID NO: 208176 - DNA, 252 bp, Artificial Sequence
  derived and/or modified sequence
atggctctttcctcacagatctgggcagcttgtctgcttctgctattgcttttggcaagtctgacctccggaagtgtttttccacagcagaccggccagttagcagagctgcaaccacaggatagagcaggagcacgcgcctcctggatgccgatgttccagagacgccgaaggcgcgatacgcacttccccatctgcattttctgttgcggatgttgccaccggtccaaatgtggaatgtgctgcaagacc

SEQ ID NO: 208177 - DNA, 252 bp, Artificial Sequence
  derived and/or modified sequence
atggccttgagctcacagatttgggcagcgtgtctgctcctgctgctgcttctcgccagcctcacctccgggtccgtctttccgcaacaaaccggacaacttgcagaactgcagcctcaggaccgcgcgggcgcaagagcctcctggatgcctatgttccagcggcgccggagacgcgacacccacttccccatttgcatcttctgttgcggatgctgtcacagatcgaagtgcggcatgtgctgtaagacc

SEQ ID NO: 208178 - DNA, 252 bp, Artificial Sequence
  derived and/or modified sequence
atggcgctgtcctcgcagatttgggcagcctgccttctccttctgttgctgttggctagcctgacttccggatcagtgttcccccaacaaaccgggcaactggcagaacttcagcctcaagacagagcaggcgcccgagcatcatggatgccaatgtttcaacgccgtagaagaagggatacccatttccccatatgcatcttctgttgcggctgctgtcacagatccaagtgtggaatgtgttgtaagact

SEQ ID NO: 208179 - DNA, 252 bp, Artificial Sequence
  derived and/or modified sequence
atggccctgtcgagccaaatatgggccgcttgcttgctccttttgcttctcttggcctcgcttacctcaggatcggtgtttcctcagcagaccggacaactcgccgagcttcaaccgcaagatcgagcaggcgcaagagcgagctggatgcctatgttccaaaggcgacgcagacgggacacccactttccaatctgtattttctgctgtggatgttgccacaggtccaagtgtggaatgtgctgtaagact

SEQ ID NO: 208180 - DNA, 252 bp, Artificial Sequence
  derived and/or modified sequence
atggcattgtccagccagatctgggcagcatgcctcctgctcttgttgctgttggcatctttgactagtggtagtgtatttccacagcagacaggccagctggctgagttgcagccccaagatagagccggcgcgagggcatcatggatgcctatgtttcagcgcaggagacgcagggatactcatttcccgatctgcatcttttgttgcggatgctgtcatcgctctaagtgtggaatgtgttgtaaaacc

SEQ ID NO: 208181 - DNA, 252 bp, Artificial Sequence
  derived and/or modified sequence
atggctttatcttctcaaatatgggctgcttgtcttcttcttttgttacttttagcttctcttacatcaggatcagtttttccacaacaaacaggacaattagcagaattacaaccacaagacagagcaggagctagggcttcttggatgccaatgtttcaacgtagacgaagaagagatacacattttcctatatgcatattttgttgtggttgttgtcatagaagtaaatgtggaatgtgttgtaagaca

SEQ ID NO: 208182 - DNA, 252 bp, Artificial Sequence
  derived and/or modified sequence
atggcgttatcgtcgcaaatatgggcggcgtgtctattattattactactactagcgtcgttaacgtcgggttcggtatttccgcaacaaacgggtcaactagcggaactacaaccgcaagatcgtgcgggtgcgcgagcgtcgtggatgccgatgtttcaacgtcgacgtcgtcgagatacgcattttccgatatgtatattttgttgtggttgttgtcatcgttcgaaatgtggtatgtgttgtaaaacg

SEQ ID NO: 208183 - DNA, 252 bp, Artificial Sequence
  derived and/or modified sequence
atggctctcagctctcagatatgggcagcgtgtttactgttgctcttgttgctggcctcccttaccagtggttctgttttcccacagcaaactggccagctagccgagctgcagccacaggatcgcgccggtgctagggcctcttggatgccaatgttccagcgtcggcggcgcagggacacccattttccaatatgtattttttgttgcggatgctgtcaccggagcaagtgtggcatgtgctgtaagaca

SEQ ID NO: 208184 - DNA, 252 bp, Artificial Sequence
  derived and/or modified sequence
atggcccttagctcgcagatatgggcagcatgtttgctgctgcttcttctgttggcctcgctgacttcaggtagcgtgtttccacaacagaccgggcaactcgcagaactccagccgcaggatagagcaggtgcccgggcatcgtggatgcctatgttccaacggcggaggcgaagagacactcactttcctatttgcatcttttgctgtggctgttgtcataggtccaaatgtggcatgtgctgcaagacc

SEQ ID NO: 208185 - DNA, 252 bp, Artificial Sequence
  derived and/or modified sequence
atggcgctcagcagtcagatttgggcggcgtgcctcctgttgctcttgctcctggcctcgctgacctccggatccgtcttccctcagcaaaccggccaactggccgaactgcagccgcaggatcgggctggtgcgagagcaagctggatgcctatgttccagcggcgccggcgcagagacactcattttccaatttgtatcttctgttgcgggtgctgccaccggtcgaagtgcggcatgtgctgcaagact

SEQ ID NO: 208186 - DNA, 252 bp, Artificial Sequence
  derived and/or modified sequence
atggcactcagttcgcagatatgggcagcctgtctacttcttcttctactgctagcctctctcacatctgggtctgttttccctcagcagacagggcagctggcggaactacagccccaggatagggccggggctcgggcctcgtggatgcccatgtttcagagaaggagacgacgcgatactcacttccctatttgcattttctgctgtggatgttgtcaccggtccaaatgtgggatgtgttgcaaaact

SEQ ID NO: 208187 - DNA, 252 bp, Artificial Sequence
  derived and/or modified sequence
atggctctttctagccagatatgggccgcttgtttgctcctgttgctgctgctcgcgtcccttacatccggttcagtgtttcctcaacagaccggtcaacttgcggagttgcagccccaggatagagctggggcaagagcctcttggatgcctatgttccagcgtaggcgtcggcgggacactcatttcccaatctgtatcttctgttgtgggtgctgccaccgcagcaaatgtggcatgtgttgtaaaacc

SEQ ID NO: 208188 - DNA, 252 bp, Artificial Sequence
  derived and/or modified sequence
atggcactgtcctctcagatttgggcagcgtgtctgctgcttcttttgctgttggcaagccttacctcgggttcggtgttccctcagcagaccggacaacttgccgaactgcagccgcaagatcgagccggagcgcgggcttcgtggatgcctatgtttcagaggcgtagacgaagggacacgcactttccaatttgtatcttttgttgcggatgttgccatcgctcgaaatgcgggatgtgctgcaagacg

SEQ ID NO: 208189 - DNA, 252 bp, Artificial Sequence
  derived and/or modified sequence
atggctctctcgagccagatttgggccgcgtgtctgctcctgttgctgttgctcgcttcactgactagcggatctgtgttcccgcaacagactgggcagctggcagagcttcagccacaagatagagcgggggcacgagcgtcctggatgccgatgttccagagaaggcgccggcgcgacacccatttccctatctgtatcttctgctgcggttgctgtcacagatccaagtgtggtatgtgctgcaaaact

SEQ ID NO: 208190 - DNA, 252 bp, Artificial Sequence
  derived and/or modified sequence
atggctttatctagccagatatgggccgcatgcctgcttctcctgctgctcctcgctagcctaactagtggttctgttttccctcagcagacaggacagctggccgagctgcagccacaggacagagccggagctagagcgtcctggatgccaatgtttcagagacgccggagaagagatacacatttcccgatttgcatcttttgctgtggatgttgtcacagaagcaagtgcggcatgtgctgtaagaca

SEQ ID NO: 208191 - DNA, 252 bp, Artificial Sequence
  derived and/or modified sequence
atggcactgtctagtcagatttgggccgcgtgtcttctgttactcctgctcctggcctccctcacaagcggatccgtattccctcagcagaccggacaactggccgaactgcagccacaggacagagcgggcgcccgggctagctggatgcctatgtttcagcgacgtcgcagaagggacacccacttccccatctgcatcttttgttgcggttgctgtcacagatccaaatgtgggatgtgctgcaagacg

SEQ ID NO: 208192 - DNA, 252 bp, Artificial Sequence
  derived and/or modified sequence
atggctttaagcagtcagatttgggctgcctgtttacttctccttcttctattggcaagcttgacatctggctccgtgttcccccagcagacgggacagcttgccgagctgcagccacaggaccgcgccggtgcccgagcctcttggatgcctatgttccagaggcgacgtaggagggacacccatttcccgatttgcatcttttgctgtgggtgctgccaccgatctaaatgcggtatgtgttgcaaaacg

SEQ ID NO: 208193 - DNA, 252 bp, Artificial Sequence
  derived and/or modified sequence
atggcactgtcgtcgcagatctgggcggcatgcctccttctcctgctgctcctcgcgtccctgaccagcggttcggtgtttccacagcagaccggacagcttgccgagctgcagccacaagaccgggctggagccagagcaagctggatgcctatgtttcaacgccgacggaggcgcgatacccactttccgatttgcatcttctgctgcggctgttgtcatcgctcgaaatgcggaatgtgctgcaagact

SEQ ID NO: 208194 - DNA, 252 bp, Artificial Sequence
  derived and/or modified sequence
atggccctgtcttctcaaatatgggcagcatgcctgctgctgttattactgcttgccagcctgacaagcggctcagtcttccctcagcagactggccagcttgccgaactacagccccaggacagggcaggcgctcgtgcctcctggatgcccatgttccagcgccgccgccgtcgggacacccacttccctatttgtatcttttgctgtggatgctgtcacaggagcaagtgcggtatgtgctgcaaaacc

SEQ ID NO: 208195 - DNA, 252 bp, Artificial Sequence
  derived and/or modified sequence
atggcgctctcctcacagatatgggctgcttgcctgctgcttctgctcctccttgcgtcgctgacttcgggatcggtctttccacagcaaaccggacaacttgccgaactgcagccgcaagaccgcgcaggggcaagagcgtcctggatgcctatgtttcagcgtagacgccggagagatactcacttcccaatttgtattttctgttgtggatgttgtcatcgttcgaagtgtggaatgtgctgcaagacg

SEQ ID NO: 208196 - DNA, 252 bp, Artificial Sequence
  derived and/or modified sequence
atggccctgtccagtcagatatgggcagcttgcctccttctgctgttgttgctggcgagcctgacatctggatccgtgttccctcagcagaccggccagctcgctgagctccagccccaggatcgggcaggggcccgtgcttcgtggatgccgatgttccagcgccgcaggcggcgcgacacgcacttcccaatctgcatcttttgttgcggctgctgccaccgcagcaaatgtggcatgtgttgtaaaaca

SEQ ID NO: 208197 - DNA, 252 bp, Artificial Sequence
  derived and/or modified sequence
atggccctgagcagccagatctgggccgcctgcctgctgctgctgctgctgctggccagcctgaccagcggcagcgtgttcccccagcagaccggccagctggccgagctgcagccccaggaccgcgccggcgcccgcgccagctggatgcccatgttccagcgccgccgccgccgcgacacccacttccccatctgcatcttctgctgcggctgctgccaccgcagcaagtgcggcatgtgctgcaagacc

SEQ ID NO: 208198 - DNA, 255 bp, Artificial Sequence
  derived and/or modified sequence
atggccctgagcagccagatctgggccgcctgcctgctgctgctgctgctgctggccagcctgaccagcggcagcgtgttcccccagcagaccggccagctggccgagctgcagccccaggacagagccggcgccagagccagctggatgcccatgttccagagaagaagaagaagagacacccacttccccatctgcatcttctgctgcggctgctgccacagaagcaagtgcggcatgtgctgcaagacctag

SEQ ID NO: 208199 - DNA, 398 bp, Artificial Sequence
  derived and/or modified sequence
gggaaataagagagaaaagaagagtaagaagaaatataagagccaccatggctcttagttcacaaatctgggcagcgtgcctcttgctgcttctgctcttggccagcctgacctcggggtccgtgttccctcagcagactgggcagctcgcggagttgcagccccaagacagggccggagcgcgtgcatcttggatgcccatgtttcagcgcagacgacggcgggatacacattttccgatctgtattttctgctgcggatgctgtcacagatcgaaatgcggtatgtgttgtaagacgtaatgagctgccttctgcggggcttgccttctggccatgcccttcttctctcccttgcacctgtacctcttggtctttgaataaagcctgagtaggaag

SEQ ID NO: 208200 - DNA, 255 bp, Artificial Sequence
  derived and/or modified sequence
atggctctgagctcccaaatctgggcagcgtgtctgctattgcttctcctcctggcttcgctcacatctggtagcgtgttcccacaacaaacgggacagctggcagagttgcagccacaggacagagcaggcgctcgcgcctcctggatgcctatgttccagcgtcgacggcggagggatacacattttcccatttgcatcttttgctgtggctgctgtcaccggagtaaatgtggcatgtgctgcaagacctag

SEQ ID NO: 208201 - DNA, 255 bp, Artificial Sequence
  derived and/or modified sequence
atggccctgagcagccagatctgggccgcctgcctgctgctgctgctgctgctggccagcctgaccagcggctctgtgttcccccagcagacaggccagctggccgagctgcagccccaggacagagctggggcccgggcctcctggatgcccatgttccagaggagaagaagaagagacacccacttccccatctgcatcttctgctgcggctgctgccacaggagcaaatgtggcatgtgctgcaagacctag

SEQ ID NO: 208202 - DNA, 255 bp, Artificial Sequence
  derived and/or modified sequence
atggccctgagcagccagatctgggccgcctgcctgctgctgctgctcttattggcatcgctaacaagcggctctgttttcccacagcagaccgggcagctggctgaacttcagcctcaggaccgcgccggcgcccgagcttcttggatgcccatgttccagcggagaagacgtcgagacactcactttcccatatgtattttttgttgtgggtgctgtcacagatcaaaatgtggaatgtgttgtaagacatag

SEQ ID NO: 208203 - DNA, 255 bp, Artificial Sequence
  derived and/or modified sequence
atggctctctctagccagatctgggccgcatgtctgctgcttctattactgctagcctctctaacttccggttctgtgttcccacaacagaccggacagctcgctgaactacagccccaggacagagcaggggcaagagcgagctggatgcccatgtttcagcgcaggcgacgtagagacacacactttcctatctgtattttctgttgcggctgttgccatcgatcgaagtgtggcatgtgctgcaagacatag

SEQ ID NO: 208204 - DNA, 424 bp, Artificial Sequence
  derived and/or modified sequence
gactgtcactcggtcccagacaccagagcaagctcaagacccagcagtgggacagccagacagacggcacgatggcactgagctcccagatctgggccgcttgcctcctgctcctcctcctcctcgccagcctgaccagtggctctgttttcccacaacagacgggacaacttgcagagctgcaaccccaggacagagctggagccagggccagctggatgcccatgttccagaggcgaaggaggcgagacacccacttccccatctgcattttctgctgcggctgctgtcatcgatcaaagtgtgggatgtgctgcaagacgtagaacctacctgccctgcccccgtcccctcccttccttatttattcctgctgccccagaacataggtcttggaataaaatggctggttcttttgttttcc

SEQ ID NO: 208205 - DNA, 652 bp, Artificial Sequence
  derived and/or modified sequence
gagcctcccacgtggtgtggatgaggaggcagatggcagggcctgtgcatttctgtgcttgagtgggccttgaaagtggttcagcaaccaggaagaagtgttcattcctcgacaacaacatccccgggctctggtgacttggctgacactggatggccctggaatgaaaaaggcaaagaggcaaaatgtgcaagggcccatctggaaccaaggccccataaaagcgactgtcactcggtcccagacaccagagcaagctcaagacccagcagtgggacagccagacagacggcacgatggcactgagctcccagatctgggccgcttgcctcctgctcctcctcctcctcgccagcctgaccagtggctctgttttcccacaacagacgggacaacttgcagagctgcaaccccaggacagagctggagccagggccagctggatgcccatgttccagaggcgaaggaggcgagacacccacttccccatctgcattttctgctgcggctgctgtcatcgatcaaagtgtgggatgtgctgcaagacgtagaacctacctgccctgcccccgtcccctcccttccttatttattcctgctgccccagaacataggtcttggaataaaatggctggttcttttgttttccaaa

SEQ ID NO: 208206 - DNA, 255 bp, Artificial Sequence
  derived and/or modified sequence
atggccctctccagccagatctgggccgcctgcctcctgcttttgctgctactggcctcgctgacctctggtagtgtgtttccacagcaaactggacagctcgccgagttgcaacctcaggatcgagccggggctcgggcctcctggatgcctatgttccaaaggagacgccgccgagatacccatttcccaatatgcatcttttgttgtggctgttgtcataggagtaagtgcggcatgtgttgcaagacatag

SEQ ID NO: 208207 - DNA, 255 bp, Artificial Sequence
  derived and/or modified sequence
atggccctgagcagccagatctgggccgcctgcctgctgctgctgctgctgctcgccagcctgacatcaggctcagtgtttccacaacagacgggtcagctggccgaacttcagccgcaggaccgggccggcgccagggccagctggatgcccatgttccagcgtcgcaggagaagggacacacactttcccatttgcatcttctgctgcggttgttgccataggtccaaatgcggaatgtgctgtaaaacttag

SEQ ID NO: 208208 - DNA, 255 bp, Artificial Sequence
  derived and/or modified sequence
atggcgctctcatcccaaatctgggcggcttgcttactgctacttctcctgcttgcttcactgacatctggctccgtgtttcctcagcaaaccggacagctggcagaattgcagccccaggaccgtgctggcgctagagccagctggatgcctatgtttcaaaggaggaggcgcagagatacccacttcccaatctgcatcttttgttgcggctgctgccatcgaagcaaatgcgggatgtgctgcaaaacttag

SEQ ID NO: 208209 - RNA, 398 nt, Artificial Sequence
  derived and/or modified sequence
gggaaauaagagagaaaagaagaguaagaagaaauauaagagccaccauggcucuuaguucacaaaucugggcagcgugccucuugcugcuucugcucuuggccagccugaccucgggguccguguucccucagcagacugggcagcucgcggaguugcagccccaagacagggccggagcgcgugcaucuuggaugcccauguuucagcgcagacgacggcgggauacacauuuuccgaucuguauuuucugcugcggaugcugucacagaucgaaaugcgguauguguuguaagacguaaugagcugccuucugcggggcuugccuucuggccaugcccuucuucucucccuugcaccuguaccucuuggucuuugaauaaagccugaguaggaag

SEQ ID NO: 208210 - protein, 355 aa, Artificial Sequence
  derived and/or modified sequence
MDFLHRNGVLIIQHLQKDYRAYYTFLNFMSNVGDPRNIFFIYFPLCFQFNQTVGTKMIWVAVIGDWLNLIFKWILFGHRPYWWVQETQIYPNHSSPCLEQFPTTCETGPGSPSGHAMGASCVWYVMVTAALSHTVCGMDKFSITLHRLTWSFLWSVFWLIQISVCISRVFIATHFPHQVILGVIGGMLVAEAFEHTPGIQTASLGTYLKTNLFLFLFAVGFYLLLRVLNIDLLWSVPIAKKWCANPDWIHIDTTPFAGLVRNLGVLFGLGFAINSEMFLLSCRGGNNYTLSFRLLCALTSLTILQLYHFLQIPTHEEHLFYVLSFCKSASIPLTVVAFIPYSVHMLMKQSGKKSQ

SEQ ID NO: 208211 - DNA, 1068 bp, Artificial Sequence
  derived and/or modified sequence
atggatttccttcaccgcaatggagtgctaatcatccagcacttgcaaaaagattaccgggcttactacacgttccttaactttatgtccaatgtgggtgaccctcgcaacatctttttcatctacttccccctgtgctttcaattcaatcagacagttggaacaaagatgatttgggtcgcggtgatcggagactggttaaatctcatctttaagtggatcctctttgggcatcgtccatactggtgggttcaggagacccagatctaccccaatcatagttctccctgtctcgagcaatttccgacgacgtgcgagactgggcctggatccccatccggccatgctatgggggcgagctgcgtctggtacgtgatggttaccgccgccttatctcatactgtatgtggaatggacaagtttagtatcacactgcacaggctgacttggtcgtttttgtggagtgtgttttggcttattcaaatctcggtctgcatatctcgggtatttatcgctacacactttcctcaccaggtcatcctgggtgtcatcggcggcatgctggttgcggaggcctttgaacacacaccaggaattcagactgcatccttaggaacctacttaaagacaaacctctttctgttcttgttcgctgtcggcttctaccttctactgcgcgtcctaaatatcgatctgctgtggtccgtcccgatcgccaaaaagtggtgtgccaaccctgattggatacatattgacacaactccattcgctggactggttagaaacttgggagtcctgtttgggctcggattcgcaatcaattccgaaatgttcctgctatcctgtcgcggagggaacaactataccctcagcttcaggctgctttgtgccctgacgtctttgaccatcctgcagctttatcatttcctccagatccccacccacgaggagcatctcttctacgtgctgtctttttgtaaaagtgctagcatccccctgacagttgtcgccttcatcccttattccgttcacatgctgatgaaacagagcggcaaaaagagccaatag

SEQ ID NO: 208212 - DNA, 1214 bp, Artificial Sequence
  derived and/or modified sequence
tcgacatgccacaaaggcacagtataaaaacggtgggaatcagagcacttcagctccaattgctctatgtttagaattgcctctttttcaagatggatttccttcacaggaatggagtgctcataattcagcatttgcagaaggactaccgagcttactacacttttctaaattttatgtccaatgttggagaccccaggaatatctttttcatttattttccactttgttttcaatttaatcagacagttggaaccaagatgatatgggtagcagtcattggggattggttaaatcttatatttaaatggatattatttggtcatcgaccttactggtgggtccaagaaactcagatttacccaaatcactcaagtccatgccttgaacagttccctactacatgtgaaacaggtccaggaagtccatctggccatgcaatgggcgcatcctgtgtctggtatgtcatggtaaccgctgccctgagccacactgtctgtgggatggataagttctctatcactctgcacagactgacctggtcatttctttggagtgttttttggttgattcaaatcagtgtctgcatctccagagtattcatagcaacacattttcctcatcaagttattcttggagtaattggtggcatgctggtggcagaggcctttgaacacactccaggcatccaaacggccagtctgggcacatacctgaagaccaacctctttctcttcctgtttgcagttggcttttacctgcttcttagggtgctcaacattgacctgctgtggtccgtgcccatagccaaaaagtggtgtgctaaccccgactggatccacattgacaccacgccttttgctggactcgtgagaaaccttggggtcctctttggcttgggctttgcaatcaactcagagatgttcctcctgagctgccgagggggaaataactacacactgagcttccggttgctctgtgccttgacctcattgacaatactgcagctctaccatttcctccagatcccgactcacgaagagcatttattttatgtgctgtctttttgtaaaagtgcatccattcccctaactgtggttgctttcattccctactctgttcatatgttaatgaaacaaagcggaaagaagagtcagtagagtggtgcctagagttagtgctctgtgtcacagatcacccttctccatccacca

SEQ ID NO: 208213 - DNA, 1068 bp, Artificial Sequence
  derived and/or modified sequence
atggacttcctgcacagaaatggagtgctgatcatccagcacctgcagaaggactaccgggcctactacaccttcctgaacttcatgagcaatgtgggggaccccaggaacatcttcttcatctacttccccctgtgcttccagttcaaccagacagtgggcaccaagatgatctgggtggccgtgattggagactggctgaacctgatcttcaagtggatcctgtttggccaccggccctactggtgggtgcaggagacccagatctaccccaaccacagcagcccctgcctggagcagttccccaccacctgtgaaacaggccctggcagccccagcggccacgccatgggcgccagctgtgtgtggtacgtgatggtgacagctgccctgagccacacagtgtgtggcatggacaagttcagcatcaccctgcaccggctgacctggagcttcctgtggagcgtcttctggctgatccagatctctgtgtgcatcagcagggtcttcatcgccacccacttcccccaccaggtgatcctgggcgtcatcggcggcatgctggtggccgaggcctttgagcacaccccaggcatccagacagccagcctgggcacctacctgaagaccaacctcttcctgttcctgtttgctgtgggcttctacctgctgctgcgggtgctgaacatcgacctgctgtggagcgtgcccatcgccaagaagtggtgtgccaacccagactggatccacatcgacaccaccccatttgctggcctggtgaggaacctgggcgtgctgtttggcctgggctttgccatcaacagcgagatgttcctgctgagctgccggggcggcaacaactacaccctgtccttccggctgctgtgtgccctgaccagcctgaccatcctgcagctgtaccacttcctgcagatccccacccatgaggagcacctgttctacgtgctgtccttctgcaagagcgccagcatccccctgactgtggtggccttcatcccctacagcgtgcacatgctgatgaagcagagcggcaagaagagccagtag

SEQ ID NO: 208214 - DNA, 1068 bp, Artificial Sequence
  derived and/or modified sequence
atggacttcctgcaccggaacggcgtgctgatcatccagcacctgcagaaagattatcgagcttattatacatttctgaatttcatgtcaaacgtaggagatccaagaaatatcttttttatttacttccctctctgttttcagtttaatcagaccgttggcaccaagatgatctgggttgctgtcatcggagattggcttaatctaatcttcaaatggattctatttggtcaccggccatactggtgggtccaggagactcaaatttatcccaaccattcatcaccctgtctagaacagttcccgaccacctgcgagacgggacctggatcaccttctggccacgctatgggagcatcatgcgtttggtatgtaatggtgacggcggccctatctcatacggtgtgtgggatggacaaattctcgatcaccctacaccgccttacctggtctttcctgtggagcgttttctggttgatccagatatccgtttgtatctctagagtattcatcgcaacccatttcccccaccaggtgattttaggcgtgattgggggtatgttggtggcggaggcgttcgaacacacacccggcattcagaccgccagtctcggaacatatctcaaaacaaatctcttcctctttctgttcgcagtgggcttctatttactgttgagggttctgaacatagatttgctttggtcagtgccaatagctaagaaatggtgtgctaatccagattggatccatattgacaccactcctttcgcgggccttgttcgtaacctcggggtgctctttggactcggtttcgcgatcaactcagaaatgtttctgttatcctgtcgcggcggaaataactatacattgtcttttcggctgctgtgtgccctgacgtcgctcaccattctccaactgtatcacttcctccagattcccacccacgaggagcatctgttctatgtgctgtccttttgtaaaagtgccagcattcctttaactgtggtggccttcattccttacagcgtccacatgctaatgaagcagtctggaaagaagtcacagtag

SEQ ID NO: 208215 - DNA, 1068 bp, Artificial Sequence
  derived and/or modified sequence
atggactttcttcatcgcaatggtgttttgatcattcaacacctgcaaaaggattatagggcctactacacatttctgaacttcatgtctaacgttggagatcccagaaacatcttcttcatctacttccccttgtgctttcagtttaaccaaaccgtggggaccaagatgatttgggtggcagttataggagactggctgaacctgatctttaaatggatcctctttgggcatcgaccttattggtgggttcaagagacccagatctatccaaatcactcatccccttgtctggagcagttcccgacgacttgtgagactggacctggctctcctagcggacacgccatgggagctagctgtgtgtggtacgtcatggtgacggctgccctcagccacacagtgtgtggaatggataaattcagtatcacactccatagactgacttggagctttctgtggagtgtcttctggcttattcagatcagcgtctgtatttcccgagtgtttatcgcgacacactttccgcatcaagtaatcctcggtgtaataggtggcatgctggtggctgaggcattcgaacacactcccggtatccagaccgcctctttgggaacatacttgaagacaaacttgtttctgtttctgttcgccgtaggtttctaccttctcctgcgcgttctcaatattgacctgctctggagcgtgccaatcgcaaagaaatggtgcgccaaccccgactggatccatattgatacgacacccttcgcaggcttggttagaaacttaggagtgctctttgggcttggttttgcaatcaattctgaaatgttcctgctgtcatgtcggggtggcaataactatactctttcctttcggctcctgtgtgcgcttacaagccttactattctccagttgtaccacttcctgcagattcctacgcacgaggaacacctattctacgtattatcattttgtaagtcagcatcaatccctctgacagtcgtggcatttattccctactccgtacacatgttgatgaagcagtctgggaaaaagagccaatag

SEQ ID NO: 208216 - DNA, 1068 bp, Artificial Sequence
  derived and/or modified sequence
atggacttcctgcacagaaacggcgtgctgatcatccagcacctgcagaaggactacagagcctactacaccttcctgaacttcatgagcaacgtgggcgaccccagaaacatcttcttcatctacttccccctgtgcttccagttcaaccagaccgtgggcaccaagatgatctgggtggccgtgatcggcgactggctgaacctgatcttcaagtggatcctgttcggccacagaccctactggtgggtgcaggagacccagatctaccccaaccacagcagcccctgcctggagcagttccccaccacctgcgagaccggccccggcagccccagcggccacgccatgggcgccagctgcgtgtggtacgtgatggtgaccgccgccctgagccacaccgtgtgcggcatggacaagttcagcatcaccctgcacagactgacctggagcttcctgtggagcgtgttctggctgatccagatcagcgtgtgcatcagcagagtgttcatcgccacccacttcccccaccaggtgatcctgggcgtgatcggcggcatgctggtggccgaggccttcgagcacacccccggcatccagaccgccagcctgggcacctacctgaagaccaacctgttcctgttcctgttcgccgtgggcttctacctgctgctgagagtgctgaacatcgacctgctgtggagcgtgcccatcgccaagaagtggtgcgccaaccccgactggatccacatcgacaccacccccttcgccggcctggtgagaaacctgggcgtgctgttcggcctgggcttcgccatcaacagcgagatgttcctgctgagctgcagaggcggcaacaactacaccctgagcttcagactgctgtgcgccctgaccagcctgaccatcctgcagctgtaccacttcctgcagatccccacccacgaggagcacctgttctacgtgctgagcttctgcaagagcgccagcatccccctgaccgtggtggccttcatcccctacagcgtgcacatgctgatgaagcagagcggcaagaagagccagtag

SEQ ID NO: 208217 - protein, 95 aa, Artificial Sequence
  derived and/or modified sequence
MLFYSFFKSLVGKDVVVELKNDLSICGTLHSVDQYLNIKLTDISVTDPEKYPHMLSVKNCFIRGSVVRYVQLPADEVDTQLLQDAARKEALQQKQ

SEQ ID NO: 208218 - DNA, 288 bp, Artificial Sequence
  derived and/or modified sequence
atgctcttttatagttttttcaaatctttggtagggaaagacgtggtcgtcgaacttaagaatgatttgtctatctgtggcaccctgcactcggtggaccaatatctcaatataaaactcacggatatctctgtcaccgatcccgagaagtatccccacatgttgtccgtaaagaactgcttcattagaggtagtgtggtgaggtacgtgcagctgcccgcggatgaggtggacacccagctactgcaggatgcggctcgaaaagaagctctgcaacagaagcagtag

SEQ ID NO: 208219 - DNA, 288 bp, Artificial Sequence
  derived and/or modified sequence
atgttgttttacagtttcttcaaaagccttgttggaaaggatgtggtagtggagctcaagaacgatttatccatctgtggcactctgcactctgtggatcagtatctaaatattaagctaaccgacatcagtgtgacggacccagaaaaatatccacacatgctgtcagtgaagaattgtttcatccgggggtcagtcgtgcgttacgtgcaattgcccgcagacgaggtcgacactcaactgctgcaggacgccgccaggaaagaagctctccagcagaagcagtag

SEQ ID NO: 208220 - DNA, 288 bp, Artificial Sequence
  derived and/or modified sequence
atgttgttctattccttttttaaatccctcgtgggaaaagacgtagtcgtggaattaaagaatgatctgagtatttgcggcaccctgcacagcgttgaccaatatcttaatattaaattaacagacataagtgtgaccgatcctgagaaatacccgcacatgctatctgttaaaaactgctttattcgcggttccgttgttagatatgtgcaactgcccgccgacgaggttgacacccagctgctccaggatgccgccagaaaagaagccctgcagcagaagcagtag

SEQ ID NO: 208221 - DNA, 288 bp, Artificial Sequence
  derived and/or modified sequence
atgctgttttatagtttttttaagtccctagtgggcaaggatgtagtcgtggagcttaagaacgatctgagcatatgcggcacattgcactcagtcgatcagtacctgaacataaaactgacagacatctccgtcaccgaccctgagaaatacccacatatgctttctgtgaagaactgcttcatacggggctcagtcgtgcggtacgtccagctgccggctgacgaagtagacacacagctcctccaggatgccgccaggaaggaagctctccagcagaagcagtag

SEQ ID NO: 208222 - DNA, 288 bp, Artificial Sequence
  derived and/or modified sequence
atgctgttttactccttttttaagagcttagtgggaaaggacgtagtcgtcgagctgaagaacgacctctccatttgcggcacattgcactcagtcgatcaatacctgaatattaagctgacagacatctccgtgacagatcccgaaaagtacccacatatgcttagcgtgaagaactgctttatccgcgggtccgttgtgcgatatgtgcagctgccagctgatgaagtggacacgcaactgctgcaggacgctgcacgcaaggaggccctgcagcagaagcaatag

SEQ ID NO: 208223 - DNA, 288 bp, Artificial Sequence
  derived and/or modified sequence
atgttgttctattcttttttcaagtctctggtcggtaaagatgttgtagtggaactgaagaatgatctgagcatttgcggcaccctgcattctgtggatcagtacctgaatattaaattgacagatatatctgtcactgacccggagaagtatcctcatatgctgagcgtgaagaactgttttatccgggggagtgttgtaaggtacgtccagcttcctgctgatgaggtggacactcaattgttacaagatgccgcccggaaagaagcactacaacagaaacaatag

SEQ ID NO: 208224 - DNA, 288 bp, Artificial Sequence
  derived and/or modified sequence
atgctgttctacagcttcttcaagagcctggtgggcaaggatgtggtggtggagctgaagaatgacctgagcatctgtggcaccctgcacagcgtggaccagtacctgaacatcaagctgacagacatctctgtgacagatcctgagaagtacccccacatgctgtctgtgaagaactgcttcatccggggctctgtggtgcgctacgtgcagctgcctgcagatgaggtggacacccagctgctgcaggatgctgccaggaaggaggccctgcagcagaagcagtag

SEQ ID NO: 208225 - DNA, 876 bp, Artificial Sequence
  derived and/or modified sequence
ccctttcccggcttcctcctcccctctactctacccagcttgcgctccccagccgcaagtcggccgcgctttgcccgtcagcgcttggagctttctgcgtcgcttcccgctgcgcctgcgcggtcccgcctcgccccacgcgcgggctcgcgcttcggtttccccagacctgctcgcagcaccctgctgtcttcccggtccggcccgctgcccgcggcgccagcaccatgctcttctattcttttttcaagtcccttgtgggcaaggatgtggtcgtggaactaaagaatgacctgagcatctgtggaaccctccattctgtggatcagtatctcaacatcaaactaactgacatcagtgtcacagaccctgagaaataccctcacatgttatcagtgaagaactgcttcattcggggctcagtggtccgatacgtgcagctgccagcagatgaggtcgacacacagttgctacaggatgcggcaaggaaggaagccctgcagcagaaacagtgatggctcctcctcctcttcccctccctctttcattggtgacccataaccccaagtcccagcccagaacccctaacccccaatacttgaaggggttttgtttttttactaatgatggttttgtgggttttttttaagggatgagtggatgagaggagtaatagggaacagctatcctctcttgagaaggggaggataagtaggctgggaaacttcaaagccttcccagtccccagcacctgcctttctcactacttctctggagatggtaggagagtttcctaggtctttccagggcagcatgtgattcatttggggatggaaggaatctgtcccgcatcgggaataaaatttatgatgcaaa

SEQ ID NO: 208226 - DNA, 288 bp, Artificial Sequence
  derived and/or modified sequence
atgctgttctacagcttcttcaagagcctggtgggcaaggacgtggttgtggagcttaagaatgatctgagcatctgcggtaccctccactctgttgatcagtacctgaatatcaaactgactgacattagtgtcaccgaccctgagaaatatccgcacatgctctcagtcaagaactgcttcataagggggtcagttgttagatacgttcaactgccagctgacgaggtggacacacagctgctccaggacgcagcccgcaaagaggccctgcagcaaaagcaatag

SEQ ID NO: 208227 - DNA, 288 bp, Artificial Sequence
  derived and/or modified sequence
atgctgttctacagcttcttcaagagcctggtgggcaaggacgtggttgtggaacttaagaacgacctgagcatctgcgggacgctccattcagtggatcagtatctgaatattaagctcacggacattagcgtgaccgatcctgagaagtatccccacatgctatccgtcaagaactgctttattcgtggttccgttgtaagatatgtccagcttccagccgacgaggtggacacccagctcctgcaggacgctgccaggaaagaggcccttcagcagaagcagtag

SEQ ID NO: 208228 - DNA, 288 bp, Artificial Sequence
  derived and/or modified sequence
atgctgttctacagcttcttcaagagcctggtgggcaaggacgtggtcgtagagctaaagaatgatctcagtatttgtgggaccctgcatagtgtcgaccagtatcttaacataaagctgactgatatatctgtcacggaccccgagaagtacccccacatgctgagcgtgaaaaactgtttcataaggggcagcgttgtgaggtacgtgcaactgcctgccgacgaagttgatacccaattgcttcaggatgctgctagaaaagaggctctgcaacagaagcagtag

SEQ ID NO: 208229 - DNA, 288 bp, Artificial Sequence
  derived and/or modified sequence
atgctgttctacagcttcttcaagagcctggtgggcaaggacgtggtggttgagctgaagaacgatctaagcatttgtggaaccctgcactctgtcgaccaatatctaaatattaagctgactgacataagtgtgaccgaccctgaaaaatatcctcacatgctgagcgtgaagaactgcttcatcagggggagtgttgtccgctacgtgcagttgcccgctgacgaagtcgatactcagctgttacaggatgctgcacggaaagaggcgctgcagcagaagcagtag

SEQ ID NO: 208230 - DNA, 288 bp, Artificial Sequence
  derived and/or modified sequence
atgctgttctacagcttcttcaagagcctggtgggcaaggacgtggtcgtcgagttgaagaacgacttatctatctgcggcacactgcactcagtagatcagtatttaaacattaagctgacagatatatcagtgaccgaccccgagaagtacccacacatgctctcagtgaagaattgtttcatccgcgggagtgtcgttagatacgtacagctgcccgcagacgaggtggatacccaactgctccaggacgcagctcgcaaggaggcactccagcagaaacagtag

SEQ ID NO: 208231 - DNA, 288 bp, Artificial Sequence
  derived and/or modified sequence
atgctgttctacagcttcttcaagagcctggtgggcaaggacgtggtggttgagctgaaaaacgatctcagcatttgtgggactctgcactccgtggaccagtacctgaatatcaagctgaccgatatctctgtgaccgaccccgagaagtaccctcacatgttgtcagtcaaaaattgttttatccgtggcagcgttgtgaggtatgttcagttgccagcagacgaagtggatactcagttgcttcaagatgcagctcgcaaggaagccctccagcagaaacagtag

SEQ ID NO: 208232 - DNA, 288 bp, Artificial Sequence
  derived and/or modified sequence
atgctgttttactccttcttcaaatcactggttggtaaggacgtggtcgtagagctcaagaatgatctgtccatctgcggcacactgcacagtgtcgaccagtatctaaatatcaagttaaccgatatctcggtcaccgaccccgagaaataccctcatatgctcagcgtgaagaactgctttattcggggaagtgtggtgagatacgttcagctgcccgcagatgaggttgatactcagctgctccaggacgcagcaagaaaggaggccttacagcaaaaacagtag

SEQ ID NO: 208233 - DNA, 288 bp, Artificial Sequence
  derived and/or modified sequence
atgttattctactcattttttaagtccctggtgggaaaggacgtggtggtggaactgaaaaacgacctcagcatctgcggtaccctgcactcggtggatcaatacttgaacattaagctgactgatatctccgtgactgatcccgagaagtatccccatatgctaagtgtcaagaattgcttcatcaggggatcagtggtgcgttatgtgcagctgccagctgacgaagtggacacccagctgctacaagacgccgctcgcaaagaagctcttcaacagaagcaatag

SEQ ID NO: 208234 - DNA, 288 bp, Artificial Sequence
  derived and/or modified sequence
atgctgttctacagcttttttaaatccctcgtcggaaaagacgtcgtggtggagctgaaaaacgatttgtctatctgcggaactctgcattccgtggatcagtatttaaatatcaagctgacagatataagcgtcaccgaccccgagaaatatcctcatatgctatccgtaaagaattgttttatccgagggtcagtggtaagatacgtgcagctgccagcagatgaagtggatacccagctcctccaggacgcagccagaaaggaggcccttcagcagaaacagtag

SEQ ID NO: 208235 - DNA, 288 bp, Artificial Sequence
  derived and/or modified sequence
atgcttttctattcattttttaagtccctcgtcggcaaggacgtagttgtggagttgaaaaacgacttgagtatatgcggaactctgcactctgtggaccagtacttgaacatcaagctcacagacattagcgtaaccgacccagaaaagtatccacatatgttatctgtgaagaattgtttcatacggggtagcgtcgtcaggtatgtgcagctgcccgctgacgaagtggatacccagctattgcaagacgcagccagaaaggaagcactgcagcagaagcagtag

SEQ ID NO: 208236 - DNA, 288 bp, Artificial Sequence
  derived and/or modified sequence
atgctcttctattctttcttcaaatcacttgtgggcaaagatgttgtcgtcgagctaaaaaacgatctatccatctgcggtacattgcactccgttgaccaatatttgaacatcaaactcacagacatcagcgtcaccgaccctgaaaaatatcctcacatgttatccgtgaagaattgtttcatccgtggtagcgtggtgcggtacgttcagttacctgctgacgaggtcgatacacaactcttgcaggacgctgccagaaaggaagcattgcagcagaagcagtag

SEQ ID NO: 208237 - DNA, 288 bp, Artificial Sequence
  derived and/or modified sequence
atgttgttctattcatttttcaaatctcttgtgggcaaggacgtggtggtggaactgaaaaacgacttatccatttgtggaaccctccactctgttgatcagtatctgaacattaagctcacggatatcagcgtaaccgaccctgagaaatatccccatatgctgagcgtcaagaactgtttcattagaggttccgtggttcgctacgtacagctccccgcagacgaagtggacacgcagctgctgcaagacgcagccagaaaggaagccctgcagcagaaacagtag

SEQ ID NO: 208238 - DNA, 288 bp, Artificial Sequence
  derived and/or modified sequence
atgctgttctacagcttcttcaagagcctggtgggcaaggacgtggtggtggagctgaagaacgacctgagcatctgcggcaccctgcacagcgtggaccagtacctgaacatcaagctgaccgacatcagcgtgaccgaccccgagaagtacccccacatgctgagcgtgaagaactgcttcatcagaggcagcgtggtgagatacgtgcagctgcccgccgacgaggtggacacccagctgctgcaggacgccgccagaaaggaggccctgcagcagaagcagtag

SEQ ID NO: 208239 - protein, 508 aa, Artificial Sequence
  derived and/or modified sequence
MNENKDTDSKKSEEYEDDFEKDLEWLINENEKSDASIIEMACEKEENINQDLKENETVMEHTKRHSDPDKSLQDEVSPRRNDIISVPGIQPLDPISDSDSENSFQESKLESQKDLEEEEDEEVRRYIMEKIVQANKLLQNQEPVNDKRERKLKFKDQLVDLEVPPLEDTTTFKNYFENERNMFGKLSQLCISNDFGQEDVLLSLTNGSCEENKDRTILVERDGKFELLNLQDIASQGFLPPINNANSTENDPQQLLPRSSNSSVSGTKKEDSTAKIHAVTHSSTGEPLAYIAQPPLNRKTCPSSAVNSDRSKGNGKSNHRTQSAHISPVTSTYCLSPRQKELQKQLEEKREKLKREEERRKIEEEKEKKRENDIVFKAWLQKKREQVLEMRRIQRAKEIEDMNSRENRDPQQAFRLWLKKKHEEQMKERQTEELRKQEECLFFLKGTEGRERAFKQWLRRKRMEKMAEQQAVRERTRQLRLEAKRSKQLQHHLYMSEAKPFRFTDHYN

SEQ ID NO: 208240 - DNA, 1527 bp, Artificial Sequence
  derived and/or modified sequence
atgaacgagaacaaggacaccgacagcaagaagagcgaggagtacgaggacgacttcgagaaggacctggagtggctgatcaacgagaacgagaagagcgacgccagcatcatcgagatggcctgcgagaaggaggagaacatcaaccaggacctgaaggagaacgagaccgtgatggagcacaccaagagacacagcgaccccgacaagagcctgcaggacgaggtgagccccagaagaaacgacatcatcagcgtgcccggcatccagcccctggaccccatcagcgacagcgacagcgagaacagcttccaggagagcaagctggagagccagaaggacctggaggaggaggaggacgaggaggtgagaagatacatcatggagaagatcgtgcaggccaacaagctgctgcagaaccaggagcccgtgaacgacaagagagagagaaagctgaagttcaaggaccagctggtggacctggaggtgccccccctggaggacaccaccaccttcaagaactacttcgagaacgagagaaacatgttcggcaagctgagccagctgtgcatcagcaacgacttcggccaggaggacgtgctgctgagcctgaccaacggcagctgcgaggagaacaaggacagaaccatcctggtggagagagacggcaagttcgagctgctgaacctgcaggacatcgccagccagggcttcctgccccccatcaacaacgccaacagcaccgagaacgacccccagcagctgctgcccagaagcagcaacagcagcgtgagcggcaccaagaaggaggacagcaccgccaagatccacgccgtgacccacagcagcaccggcgagcccctggcctacatcgcccagccccccctgaacagaaagacctgccccagcagcgccgtgaacagcgacagaagcaagggcaacggcaagagcaaccacagaacccagagcgcccacatcagccccgtgaccagcacctactgcctgagccccagacagaaggagctgcagaagcagctggaggagaagagagagaagctgaagagagaggaggagagaagaaagatcgaggaggagaaggagaagaagagagagaacgacatcgtgttcaaggcctggctgcagaagaagagagagcaggtgctggagatgagaagaatccagagagccaaggagatcgaggacatgaacagcagagagaacagagacccccagcaggccttcagactgtggctgaagaagaagcacgaggagcagatgaaggagagacagaccgaggagctgagaaagcaggaggagtgcctgttcttcctgaagggcaccgagggcagagagagagccttcaagcagtggctgagaagaaagagaatggagaagatggccgagcagcaggccgtgagagagagaaccagacagctgagactggaggccaagagaagcaagcagctgcagcaccacctgtacatgagcgaggccaagcccttcagattcaccgaccactacaactag

SEQ ID NO: 208241 - DNA, 1071 bp, Artificial Sequence
  derived and/or modified sequence
atgaacgagaacaaggacaccgacagcaagaagagcgaggagtacgaggacgacttcgagaaggacctggagtggctgatcaacgagaacgagaagagcgacgccagcatcatcgagatggcctgcgagaaggaggagaacatcaaccaggacctgaaggagaacgagaccgtgatggagcacaccaagagacacagcgaccccgacaagagcctgcaggacgaggtgagccccagaagaaacgacatcatcagcgtgcccggcatccagcccctggaccccatcagcgacagcgacagcgagaacagcttccaggagagcaagctggagagccagaaggacctggaggaggaggaggacgaggaggtgagaagatacatcatggagaagatcgtgcaggccaacaagctgctgcagaaccaggagcccgtgaacgacaagagagagagaaagctgaagttcaaggaccagctggtggacctggaggtgccccccctggaggacaccaccaccttcaagaactacttcgagaacgagagaaacatgttcggcaagctgagccagctgtgcatcagcaacgacttcggccaggaggacgtgctgctgagcctgaccaacggcagctgcgaggagaacaaggacagaaccatcctggtggagagagacggcaagttcgagctgctgaacctgcaggacatcgccagccagggcttcctgccccccatcaacaacgccaacagcaccgagaacgacccccagcagctgctgcccagaagcagcaacagcagcgtgagcggcaccaagaaggaggacagcaccgccaagatccacgccgtgacccacagcagcaccggcgagcccctggcctacatcgcccagccccccctgaacagaaagacctgccccagcagcgccgtgaacagcgacagaagcaagggcaacggcaagagcaaccacagaacccagagcgcccacatcagccccgtgaccagcacctactgcctgagccccagacagaaggagctgcagaagcagctggaggagaagagagagaagctgaagagagagtag

SEQ ID NO: 208242 - DNA, 1527 bp, Artificial Sequence
  derived and/or modified sequence
atgaacgaaaataaagatactgactccaaaaagtccgaggagtatgaggatgacttcgagaaagacctcgagtggctgatcaatgaaaatgagaaaagcgatgcttccataatcgagatggcttgcgagaaagaagaaaatattaaccaggatttgaaagagaacgaaaccgtcatggaacacaccaaacgtcacagcgatccagataaatccttacaggacgaggtgtcaccccggaggaacgatattatatccgtgcctgggatccaacccttagaccccattagcgactctgactccgagaacagctttcaggagtctaagctggaatcgcaaaaggacctggaggaggaggaggatgaggaagtaagacgatacattatggagaagatagtccaggccaacaagttgcttcagaatcaagaaccagtgaatgataaacgcgagcggaagcttaaattcaaagatcagcttgtggatctcgaagtcccaccactggaggacactacaactttcaaaaattacttcgaaaacgagagaaatatgtttggcaagctcagtcaactgtgtattagcaacgactttggtcaggaagatgtcctcttaagcctaacaaacggctcctgtgaggagaacaaagatcggactatattggtagaacgtgacgggaagtttgaactcttgaacttgcaagacattgcgagccaaggatttctgccgccaataaataatgcaaatagcacggagaacgatccccagcagctgctgcccagatccagtaattcttccgtgtctggcaccaaaaaggaggactccacagccaaaatccacgcggtcacacactcatccacaggggaacccttggcttatatcgctcagccccctttgaatagaaagacctgcccatctagtgccgtgaattctgacagaagcaaagggaacggcaaatccaaccataggacccagagcgcacatatatctcccgtgactagcacctactgtttgtcaccccgtcagaaggagttacagaaacagctagaggaaaagagggaaaagttgaaaagagaagaagagcgacgcaagattgaggaagagaaggaaaagaaacgcgaaaacgatatcgtgttcaaggcttggctgcaaaagaagcgggaacaagtgcttgagatgcggcggatccaaagagccaaagagattgaggatatgaatagccgcgaaaacagagacccacaacaagcttttcggctgtggctgaagaaaaaacatgaggagcagatgaaggagcgccaaacggaagagctgcgtaagcaagaggagtgcctgtttttcctaaaggggactgaaggccgagagcgcgccttcaagcagtggcttaggagaaagcgaatggaaaagatggctgaacaacaggccgtacgggagaggacccgtcagctgaggctggaggccaagaggagcaaacaactgcagcaccatttgtatatgtccgaggccaagcccttccggtttacggaccactataactag

SEQ ID NO: 208243 - DNA, 1071 bp, Artificial Sequence
  derived and/or modified sequence
atgaatgaaaataaggataccgatagtaaaaaaagcgaggagtacgaggatgacttcgagaaggatttggagtggctgatcaacgagaatgagaaatccgacgccagcattattgagatggcttgcgagaaggaggagaacatcaatcaagacctgaaagagaatgagacggtgatggaacacactaaaaggcactctgatcctgataagtccctgcaggacgaagtcagtcctcggcgcaatgacattatatctgtgcctggcatacagccactcgaccctatctcagattccgactccgagaacagcttccaggagagtaagcttgaatcccagaaggatctagaggaggaagaggacgaggaggtgagacgctatattatggaaaagatcgtgcaggctaacaaacttctgcagaatcaggagcccgttaacgacaagcgtgagagaaaactgaaattcaaggaccagctggtcgaccttgaagtgccaccgctggaggacaccacaacattcaaaaattattttgagaatgagcggaatatgtttggaaagctatcgcagctgtgcattagtaacgatttcggccaggaagatgttctgctgtccctaacaaacgggtcttgtgaggagaacaaagatcgaacgatcctcgtcgagagagatggtaagtttgaactgttgaatctacaggacattgctagtcagggattcctgcctcccataaacaatgccaacagcacggagaacgatcctcagcaactgctgcctagatccagcaattcttcagtgtctggcaccaagaaggaggattctaccgccaagatccacgccgtcacccatagctccacaggtgagcccctcgcttacattgcacagcctcctctgaacagaaaaacatgcccgtcttcggcggtgaattccgatcggtctaagggcaatggcaaatctaaccaccgcacccagagcgcccacattagccctgtcacctctacatactgtctctcacccagacaaaaggaactgcagaaacagctggaggagaaaagggagaaactaaagcgcgagtag

SEQ ID NO: 208244 - DNA, 1527 bp, Artificial Sequence
  derived and/or modified sequence
atgaacgagaataaagacactgattctaaaaagtcagaagaatacgaagacgattttgagaaggaccttgagtggctgattaacgaaaatgaaaaatcagacgccagcatcatcgagatggcctgtgagaaggaagagaacatcaaccaggacttaaaagagaatgaaaccgtcatggagcacacaaagcggcattctgacccagataagtcactgcaggatgaagtgtccccccgaaggaacgatatcatttccgttcccggaatccagccgctggatcccattagcgactccgattctgaaaacagctttcaagagtccaagttggaaagtcaaaaagatttggaagaggaggaagacgaggaggtccgacgttacatcatggagaagattgttcaggccaataagctcctgcagaaccaggaaccagtcaacgacaaaagagagcgcaaattaaaatttaaggaccaactcgtggatctggaggtgcctccgctcgaagatactactacgtttaagaattattttgagaatgaacgcaatatgtttggtaagctgagccagctgtgcatctcgaacgactttggccaggaggacgtgttactgtccctgaccaatgggtcctgtgaggagaataaagatcgcacaatcttggtggaaagggacggtaagtttgagctccttaatctgcaggatatcgccagccagggtttcctgcccccaatcaataatgcaaactccacggagaatgacccacagcaattgttaccgaggtcaagcaacagttcagtgagcggcaccaaaaaagaagactcaacagctaaaatacacgctgtgactcacagcagcacaggcgagcccctcgcatacatcgcacagccacctctcaacaggaaaacctgtccgagttccgccgtgaattccgacaggagcaagggtaatggaaagtctaaccatagaacacagagcgcacatatctcacccgtgaccagtacctactgcctgtcgcctcggcagaaagagttgcagaaacagttggaggaaaaaagggagaagttaaaacgggaagaagagaggagaaaaatcgaggaagagaaagagaagaaaagagaaaacgatatcgtattcaaggcctggctgcagaagaaacgcgagcaggttttagagatgagacggattcagcgagccaaggaaattgaggacatgaattccagggaaaacagagaccctcagcaggcgttcagactctggctgaagaaaaaacatgaagaacagatgaaagagcgtcaaaccgaagagttgcgaaagcaagaggaatgcctgtttttcctgaaggggacagagggaagggaacgagccttcaagcaatggctccggaggaagcgtatggagaaaatggcagaacaacaggccgtgagagagcgaacaagacagctgagactggaggccaagaggagcaagcagttacaacatcacctgtatatgtcagaggccaaaccatttcggttcactgatcactataattag

SEQ ID NO: 208245 - DNA, 1527 bp, Artificial Sequence
  derived and/or modified sequence
atgaatgaaaacaaggacacagacagcaagaagtctgaggagtatgaagatgactttgagaaggacctggagtggctgatcaatgaaaatgagaagagtgatgccagcatcatcgagatggcctgtgagaaggaggagaacatcaaccaggacctgaaggaaaatgaaacagtgatggagcacaccaagaggcacagcgaccctgacaagagcctgcaggatgaggtgagccccaggagaaatgacatcatctctgtgcccggcatccagcccctggaccccatcagtgacagcgacagtgaaaattccttccaggagagcaagctggagagccagaaggacctggaggaggaggaggatgaggaggtgcggcgctacatcatggagaagatcgtgcaggccaacaagctgctgcagaaccaggagcctgtgaatgacaagcgggagaggaagctgaagttcaaggaccagctggtggacctggaggtgccccccctggaggacaccaccaccttcaagaactactttgaaaatgaaagaaacatgtttgggaagctgagccagctgtgcatcagcaatgactttggccaggaggatgtgctgctgagcctgaccaacggcagctgtgaggagaacaaggacaggaccatcctggtggagagagatggcaagtttgagctgctgaacctgcaggacatcgccagccagggcttcctgccccccatcaacaatgccaacagcacagaaaatgacccccagcagctgctgcccaggagcagcaacagctctgtgtctggcaccaagaaggaggacagcacagccaagatccatgctgtgacccacagcagcactggagagcccctggcctacatcgcccagccccccctgaacaggaagacctgccccagcagcgctgtgaacagcgacaggagcaaaggaaatggcaagagcaaccacaggacccagagcgcccacatcagccctgtgaccagcacctactgcctgagcccccggcagaaggagctgcagaagcagctggaggagaagcgggagaagctgaagcgggaggaggagaggaggaagattgaggaggagaaggagaagaagagagaaaatgacatcgtgttcaaggcctggctgcagaagaagcgggagcaggtgctggagatgaggcgcatccagagggccaaggagattgaggacatgaacagccgggagaacagagacccccagcaggccttccggctgtggctgaagaagaagcatgaggagcagatgaaggagcggcagacagaggagctgaggaagcaggaggagtgcctcttcttcctgaagggcacagagggccgggagcgggccttcaagcagtggctgcggaggaagaggatggagaagatggccgagcagcaggccgtgcgggagaggacccggcagctgcggctggaggccaagaggagcaagcagctgcagcaccacctgtacatgtctgaggccaagcccttccgcttcacagaccactacaactag

SEQ ID NO: 208246 - DNA, 1071 bp, Artificial Sequence
  derived and/or modified sequence
atgaatgaaaacaaggacacagacagcaagaagtctgaggagtatgaagatgactttgagaaggacctggagtggctgatcaatgaaaatgagaagagtgatgccagcatcatcgagatggcctgtgagaaggaggagaacatcaaccaggacctgaaggaaaatgaaacagtgatggagcacaccaagaggcacagcgaccctgacaagagcctgcaggatgaggtgagccccaggagaaatgacatcatctctgtgcccggcatccagcccctggaccccatcagtgacagcgacagtgaaaattccttccaggagagcaagctggagagccagaaggacctggaggaggaggaggatgaggaggtgcggcgctacatcatggagaagatcgtgcaggccaacaagctgctgcagaaccaggagcctgtgaatgacaagcgggagaggaagctgaagttcaaggaccagctggtggacctggaggtgccccccctggaggacaccaccaccttcaagaactactttgaaaatgaaagaaacatgtttgggaagctgagccagctgtgcatcagcaatgactttggccaggaggatgtgctgctgagcctgaccaacggcagctgtgaggagaacaaggacaggaccatcctggtggagagagatggcaagtttgagctgctgaacctgcaggacatcgccagccagggcttcctgccccccatcaacaatgccaacagcacagaaaatgacccccagcagctgctgcccaggagcagcaacagctctgtgtctggcaccaagaaggaggacagcacagccaagatccatgctgtgacccacagcagcactggagagcccctggcctacatcgcccagccccccctgaacaggaagacctgccccagcagcgctgtgaacagcgacaggagcaaaggaaatggcaagagcaaccacaggacccagagcgcccacatcagccctgtgaccagcacctactgcctgagcccccggcagaaggagctgcagaagcagctggaggagaagcgggagaagctgaagcgggagtag

SEQ ID NO: 208247 - DNA, 1527 bp, Artificial Sequence
  derived and/or modified sequence
atgaacgagaacaaggacaccgacagcaagaagagcgaggagtacgaggatgattttgagaaggacctcgaatggcttattaacgagaatgagaagtccgacgcctctattattgagatggcctgcgagaaagaggagaacatcaaccaggatctgaaggagaatgaaacggtgatggagcatacaaagagacattcagatccagacaaatcactacaggacgaggtctcacctcgtagaaacgacatcatctcagtgcctggaatccaacctctggaccctatatccgattcagatagtgagaacagcttccaggagtcgaaactcgagagtcaaaaagacctggaagaggaggaagatgaggaggtccggcgctatatcatggagaaaattgtgcaggcgaacaagctcttgcagaaccaggaaccagttaacgacaaacgagaacgtaagctcaagtttaaggatcagctggtcgatttggaggttcctcctctggaagacactaccacattcaaaaactacttcgagaatgaacgaaacatgtttgggaagctgtcacaactgtgcatctcaaacgatttcggtcaggaagacgtgctgctgtccctgaccaacgggtcttgcgaggagaataaagatagaacgatcctggtcgagagagatggaaagtttgagctgctgaatctccaggacattgcttcccaggggttcctgcctcctatcaacaacgccaactccaccgaaaacgatccacagcagttactgccacggagctccaatagctctgttagcggtaccaagaaggaagactctaccgcaaaaatccacgcagttacccatagctccaccggggagccgctggcctatatagcccaaccaccactgaatagaaaaacctgtcccagcagtgccgtcaacagcgaccggagcaagggcaatggaaagtccaatcatcgaacccagtctgctcatatttcccccgtgacttccacgtattgtctgtcccctcggcagaaggaactgcagaagcagttggaagagaagcgggagaagctgaaacgtgaagaggagcgtagaaaaatcgaggaagagaaggagaagaaaagggaaaatgacatcgtgtttaaagcctggttacaaaagaaacgtgagcaggtgctcgagatgcggcggatccagcgggcgaaggaaatcgaggatatgaattctagggaaaatcgtgatcctcagcaagcttttcgcctgtggctgaaaaagaagcacgaagagcaaatgaaagagaggcagaccgaggaattgcgtaagcaagaggaatgtttgttcttcctgaagggaacggaagggcgcgagagagcttttaaacaatggttgcgtcggaagaggatggagaagatggcggagcagcaggcagtcagggaacgaaccagacagctccgactggaggccaaacggtccaaacagctccaacatcacctgtacatgtctgaggccaagccttttagattcacagatcattataactag

SEQ ID NO: 208248 - DNA, 1071 bp, Artificial Sequence
  derived and/or modified sequence
atgaacgagaacaaggacaccgacagcaagaagagcgaggagtacgaagacgatttcgaaaaagatttagaatggttgatcaatgagaacgaaaaatccgatgcctccattatcgagatggcttgcgagaaggaagagaacattaaccaagaccttaaggagaatgagacagttatggagcacactaaaaggcacagtgacccagacaagtcactacaggatgaagtttcccccagacggaatgacatcatatctgtgcccgggatccagcccctagaccccattagtgattcggattcggaaaattcattccaagaatcgaaacttgagagtcagaaggacctagaagaagaagaggacgaagaggtgcggcgatatattatggagaagattgtacaagccaacaagctgctacagaatcaggaaccagtgaatgacaagcgggaacgcaaactgaagttcaaggaccaactcgtggatttggaggtaccccccctggaggacaccacaactttcaagaactattttgagaatgagagaaacatgttcgggaagttgtctcagctgtgtatcagtaatgattttgggcaggaggatgtattactgagcctgaccaacggctcctgcgaggagaacaaggaccggacaattttagttgagagagacggcaaattcgaattattgaatctccaggacattgctagccagggcttcctgccccccattaacaacgcaaacagtacagaaaatgacccacagcagctgctgcctcgcagcagtaatagctcagtgagcggaactaaaaaggaagattccactgcaaagatccacgcagtgacacattcctcgacgggggagccattagcctatatcgctcaaccccccctcaacaggaaaacttgcccaagctccgccgtcaattcggacagatctaagggcaatggtaaaagcaatcacaggacccaaagtgcccacattagcccagtgaccagcacctattgtttgtccccccgacagaaggagctgcagaaacaattggaggagaagagagagaagctgaagagagagtag

SEQ ID NO: 208249 - DNA, 1527 bp, Artificial Sequence
  derived and/or modified sequence
atgaacgagaacaaggacaccgacagcaagaagagcgaggagtacgaggatgacttcgaaaaggatcttgagtggttgatcaacgaaaacgagaaaagcgacgcgagcatcatcgaaatggcctgtgaaaaggaggagaacatcaaccaggacctgaaggagaatgaaaccgtcatggaacatacaaagcggcactccgatcctgataaaagtctccaagacgaggtgtcaccacggcggaacgacatcatctccgtgcccgggatccagcctctggatcccatatccgattccgatagcgaaaatagtttccaagagtccaaattagaatcccaaaaggatttagaagaagaggaggacgaggaagtgcggcgctacattatggaaaagatagtgcaggccaataagcttcttcaaaaccaagagccggtgaacgataagcgagagaggaagctcaaattcaaggaccaactggtcgacctggaagtgcctccccttgaggacacaaccacattcaagaattactttgagaatgagaggaatatgtttgggaaacttagtcagttatgcatttctaatgacttcggccaagaggacgtgcttttgtccttgacaaacggcagctgtgaggagaacaaggatcggacgatcctggtggagcgggacggtaagtttgagctgctcaacttgcaggatatcgcgtcccagggctttctgcctcccattaacaacgctaactctaccgagaatgacccacagcagttactgccacgttcgagcaattcgtctgtgtcgggtacaaaaaaagaggactctactgccaagattcatgccgttacccactccagcacaggcgagcctttggcgtacattgcgcagcctcccttgaacagaaagacttgtccctcctctgccgtgaactctgacagatctaaagggaacggcaagagcaatcatcggacgcagagtgcccacatctcaccagtcaccagcacctactgcttgagtccccggcagaaggagctgcaaaaacaactcgaggaaaaaagagagaaattgaagagggaggaagaaaggcggaagattgaagaagagaaggagaagaaacgcgaaaacgacatcgtgttcaaggcttggctgcagaaaaaaagagaacaggtcctagagatgcgcagaatccagcgggccaaggaaattgaagatatgaactccagagagaatagggatcctcagcaggcgtttcgactgtggctcaagaagaaacatgaagaacagatgaaggagcgccagacagaagaattgaggaagcaggaagaatgcttgttttttttgaaaggcactgagggaagagagcgcgccttcaagcagtggctcagaagaaaacggatggaaaaaatggcagagcaacaggctgtgcgcgagcggactcggcagctccgtttggaagcaaagcggtctaaacaattgcaacaccacctctacatgagtgaggcgaagccctttaggtttaccgaccactacaactag

SEQ ID NO: 208250 - DNA, 1527 bp, Artificial Sequence
  derived and/or modified sequence
atgaacgagaacaaagacaccgatagcaaaaagtccgaggagtatgaggacgacttcgagaaggacctggaatggctgattaacgagaacgaaaaatccgatgcgtccataatagaaatggcctgtgagaaggaggagaacattaaccaggatttaaaggaaaacgagaccgtcatggagcacacaaaacgacattccgatcccgataagagtcttcaggacgaagtgagcccacggaggaatgatatcatcagtgtgccgggaattcagcccctcgatccaatctctgactctgacagcgagaattctttccaggagtccaagctagaatcgcagaaagatctggaagaggaggaagatgaagaagtgcggagatacattatggaaaaaatcgtacaggccaataaactccttcagaaccaggaacctgtgaacgacaagcgagagaggaagcttaagtttaaggatcagcttgttgacctggaagtgccacccctggaagacaccaccactttcaagaactactttgagaatgagcggaatatgttcgggaaactgagtcaactctgcatatctaatgacttcggtcaggaagacgtgctgctttccctcacaaatggttcttgtgaggaaaataaagacagaacaattctggtggagcgcgacggaaagtttgaactcctaaacctacaagatatcgcctcccagggattcttacctccaataaataatgccaattctacggagaatgatccacaacagctgctccctagaagctctaattcaagcgtctccgggaccaagaaggaggactccacggcaaagatccacgctgtgacccactctagtaccggagaacccctggcctacattgcccagccacctttgaaccgcaagacctgcccctctagcgcagtaaacagcgacaggagcaaaggcaatggcaaaagcaatcacaggactcagtcagcccatatatcccccgttacgtcaacatattgcctatcacctcggcaaaaagaactgcagaagcagctggaggaaaaacgcgagaaacttaagcgtgaggaggaacgtcggaaaattgaagaggaaaaagaaaaaaagcgggagaatgatatcgtcttcaaggcttggctccaaaagaagagggagcaggtgctcgagatgaggcgaattcagcgcgcaaaagaaatcgaggatatgaatagcagagagaaccgggatccacagcaggcctttcgactttggctcaaaaaaaaacatgaagaacagatgaaggagcgacaaaccgaagagctccgaaaacaagaggaatgcctgttctttctgaaggggacggaggggagagagcgcgctttcaagcagtggctaagaagaaaaagaatggaaaaaatggcagagcagcaggcagtgagggaacggacacggcagctgaggcttgaagccaagcgtagcaaacagctgcagcatcatctttacatgtcggaggccaagccctttcgatttacggaccactacaactag

SEQ ID NO: 208251 - DNA, 1071 bp, Artificial Sequence
  derived and/or modified sequence
atgaatgaaaacaaggacacagactccaagaaatctgaagaatatgaagacgacttcgaaaaagacctcgagtggcttatcaatgagaacgagaaatccgacgctagcataattgaaatggcttgtgagaaggaggagaacatcaatcaggacctgaaggagaacgaaaccgtcatggagcacaccaaacgtcattcagacccagacaaatctctccaggatgaggtgagtcccaggcggaatgacattatctctgtaccgggtatccagcctctggatcctatttctgatagcgactccgagaatagctttcaagagtccaaactggaatctcagaaggatctcgaggaggaggaggacgaggaagtccgcagatacatcatggagaagatcgtccaagccaataagcttttgcagaatcaggaaccggtgaatgataagagagagagaaaactcaagttcaaggaccagctggtcgaccttgaggtcccccctctggaggataccactaccttcaaaaactactttgagaatgaaagaaacatgtttggcaaattatcccagctatgtatcagcaatgacttcggacaggaagacgtcctcctgtcattaaccaacggtagctgcgaagagaataaggatagaactatcttggtggagcgcgatgggaagttcgaacttcttaatctgcaggatatcgctagccaaggcttcctacccccaatcaacaacgcgaacagcacagagaatgacccccagcagcttctgccgcgaagcagcaactcctctgtttcaggcacaaagaaagaggattctaccgcgaagattcatgcggtgactcattccagtactggagagcccctcgcctacattgcacagccccctctgaataggaagacatgcccctctagcgctgtgaattccgataggtcaaaagggaacgggaagagcaatcaccgcacccagtccgcacacattagtcctgtcaccagtacttattgtctgagccctcgacagaaggagcttcaaaagcagctggaagaaaagagggagaagcttaaacgggagtag

SEQ ID NO: 208252 - DNA, 1527 bp, Artificial Sequence
  derived and/or modified sequence
atgaatgagaataaagataccgattcaaaaaaaagtgaagaatacgaggacgatttcgagaaagatctggaatggcttattaacgagaacgaaaaaagcgacgcttctatcatcgagatggcctgtgagaaagaggaaaacatcaatcaggatctgaaggaaaacgaaactgtaatggagcataccaagagacactccgacccagacaagtcgctgcaggatgaggtgtcccctcgcaggaatgatatcatctccgttcctggcatccagccacttgatcccataagtgatagcgacagtgagaactcatttcaggagtcaaagctggagtcacagaaagatctcgaggaggaggaggatgaggaggtcaggcgctacatcatggaaaagatcgtccaggcaaacaagctgctccagaatcaggagcccgtgaatgacaaaagggagcgtaaactcaaatttaaagaccagctggtggaccttgaggtcccacccctggaggacacaacgaccttcaaaaattacttcgagaacgagagaaatatgtttgggaagctgagccagctttgcatttcaaacgatttcggccaggaagacgtgctactgagtttaaccaacggatcatgtgaggagaataaagataggactatcttagtagagagagatggaaaattcgagctgctcaatcttcaggatatagcctctcaaggctttctgcctccaattaataacgctaattctactgagaacgacccccaacagctgctacccagatcttcgaatagcagcgttagcggtactaagaaagaagattctaccgccaagattcacgccgtgacacattcttcaaccggagaaccactggcctatatcgcacagcctcctttgaatcgaaaaacctgccccagttccgctgtcaatagcgataggagcaaaggaaacggaaagtcgaaccaccgtacacagtcggcacacatctcacccgtcacaagtacatactgcctgtcccccagacagaaggagctgcaaaaacaactggaagaaaagagagagaaattgaagcgagaggaggagcgccgaaagatagaggaagagaaggagaaaaagcgagagaatgatattgtgttcaaagcatggctccagaaaaaacgggaacaagtactggaaatgaggagaatccagcgggctaaggagatagaggacatgaactcccgtgaaaatcgcgatcctcagcaagcctttcggctttggctgaagaaaaagcatgaggagcagatgaaagaaaggcaaaccgaagagctacggaagcaggaagaatgtttgttctttctgaagggtaccgagggccgagaacgcgcattcaagcagtggcttagacgcaaaagaatggaaaagatggcagaacaacaggcagtgagggaaagaactcgccaactgcgactggaggctaaaaggagtaagcagctccagcatcatctctatatgagcgaggccaagccctttcggtttacagaccattataactag

SEQ ID NO: 208253 - DNA, 1914 bp, Artificial Sequence
  derived and/or modified sequence
gctctcgtagttagagaggcccggatggaggacgcagaggcacgctgttgccatggcagtgtggtcctggctgccgcggaggcaggtgccggggtctcctttgcctcaatgtgaagagcttagaaagaggaggagaggagaactcccccggccatctctgtgatcccagccgccgcattttacacagcatatttccttcacaaacagaaaatgaatgaaaataaagatactgattcaaagaaaagtgaagaatacgaagatgactttgaaaaggacctggagtggttaattaatgaaaatgaaaaaagtgatgccagcataatagagatggcttgtgagaaggaagagaatattaaccaagacttaaaagagaatgagacagtaatggagcacaccaaacggcattctgatcctgacaaatctttgcaggatgaggtctcaccaagaagaaatgacatcatttctgtaccaggtattcaacctttggatcccatatcagattcagatagtgaaaactctttccaggaatccaaactagaaagccagaaagacttggaggaggaagaggatgaggaagtaaggagatatattatggagaaaattgtacaagctaacaagcttctacagaatcaagaaccggtgaatgataaaagggagcgaaaacttaagttcaaggaccagttagttgatttggaagttcctccactagaagacactactacttttaaaaattattttgaaaacgaaaggaatatgtttgggaaactgtcacaattatgtatttccaatgattttggacaagaagatgtgctcctgtcacttactaatggaagctgtgaagaaaacaaggataggacaatactggtagagagagatggaaaatttgaacttctgaatttacaagacattgccagtcaggggtttttgcctcccattaataatgcaaatagtacagaaaatgaccctcagcagttgttacccagatcttccaactcctctgtcagtggcaccaagaaagaagattctacagcaaagattcatgctgtcactcactcatcaacaggagagccgctggcttatatcgctcagccaccactcaaccgcaagacttgtccaagctctgctgtcaactcagatcgaagtaaagggaatgggaaatctaatcacaggacacagtctgcacatatctcaccagtgacttcaacatactgtctttcccctcgacagaaagaactacaaaaacaactagaagaaaagagagaaaaactgaaaagagaggaagagcgacgaaaaatagaagaagagaaagaaaaaaagagagagaatgacatagtatttaaagcgtggttgcaaaagaaaagagagcaggtcttagaaatgaggagaattcagcgagcaaaggaaattgaagacatgaacagtagagaaaacagagatccacaacaagcttttcgattatggcttaaaaaaaagcacgaagagcagatgaaagaaagacagacagaagaactaagaaagcaagaggaatgtttattcttccttaaaggaacagaaggccgggaaagggcctttaaacaatggttaagaaggaaacggatggaaaaaatggcagagcaacaagctgtcagagagagaactagacagctccgactagaagctaagcgttctaaacagttacagcaccacctatatatgtcagaagccaaaccttttcgttttactgatcattataactgaaagtttctattaaatatttcagtgggcagctgctatcaaaattttggatatgatttcttagggtctgtgtactttggttgtattctaaattatggaaatggtatttatcttttattgacagtgaatttgtttttttaatactagaacaaaataaatttttttctcacagtgttgtaa

SEQ ID NO: 208254 - DNA, 1246 bp, Artificial Sequence
  derived and/or modified sequence
agagaggcccggatggaggacgcagaggcacgctgttgccatggcagtgtggtcctggctgccgcggaggcaggtgccggggtctcctttgcctcaatgtgaagagcttagaaagaggaggagaggagaactcccccggccatctctgtgatcccagccgccgcattttacacagaaaatgaatgaaaataaagatactgattcaaagaaaagtgaagaatacgaagatgactttgaaaaggacctggagtggttaattaatgaaaatgaaaaaagtgatgccagcataatagagatggcttgtgagaaggaagagaatattaaccaagacttaaaagagaatgagacagtaatggagcacaccaaacggcattctgatcctgacaaatctttgcaggatgaggtctcaccaagaagaaatgacatcatttctgtaccaggtattcaacctttggatcccatatcagattcagatagtgaaaactctttccaggaatccaaactagaaagccagaaagacttggaggaggaagaggatgaggaagtaaggagatatattatggagaaaattgtacaagctaacaagcttctacagaatcaagaaccggtgaatgataaaagggagcgaaaacttaagttcaaggaccagttagttgatttggaagttcctccactagaagacactactacttttaaaaattattttgaaaacgaaaggaatatgtttgggaaactgtcacaattatgtatttccaatgattttggacaagaagatgtgctcctgtcacttactaatggaagctgtgaagaaaacaaggataggacaatactggtagagagagatggaaaatttgaacttctgaatttacaagacattgccagtcaggggtttttgcctcccattaataatgcaaatagtacagaaaatgaccctcagcagttgttacccagatcttccaactcctctgtcagtggcaccaagaaagaagattctacagcaaagattcatgctgtcactcactcatcaacaggagagccgctggcttatatcgctcagccaccactcaaccgcaagacttgtccaagctctgctgtcaactcagatcgaagtaaagggaatgggaaatctaatcacaggacacagtctgcacatatctcaccagtgacttcaacatactgtctttcccctcgacagaaagaactacaaaaacaactagaagaaaagagagaaaaactgaaaagagag

SEQ ID NO: 208255 - DNA, 2035 bp, Artificial Sequence
  derived and/or modified sequence
ggggtccaatttgtgcgcgtggagtgagacagaaaacctggagcccgatctcccggccagcgactccctccttctgggtgtgcggctgaagactggaagcaggttgccttgcctgctgcaagcccgccgtacctaccccttctccgcgtgcgcccctccctgtgcctgcgcattaccggctagccggcggcgggcgctgcagcccctacgtgattctgcggctcactcccctcggatggtctttccacccgagtttttcccgggaagaggctctcaagactagccagtgcaggaggaggagtcgaactctggatagcctgtttataaagccctaactgtgccgatgttgaccgttttctgaaactcctcctccaaaacccacgccaaaccacaagatgaaggaaattcacacatcaggatgccaaaaaccatggaagacttctgatgttctgggagggttgacaaagatggaccttaaattctagcatatttccttcacaaacagaaaatgaatgaaaataaagatactgattcaaagaaaagtgaagaatacgaagatgactttgaaaaggacctggagtggttaattaatgaaaatgaaaaaagtgatgccagcataatagagatggcttgtgagaaggaagagaatattaaccaagacttaaaagagaatgagacagtaatggagcacaccaaacggcattctgatcctgacaaatctttgcaggatgaggtctcaccaagaagaaatgacatcatttctgtaccaggtattcaacctttggatcccatatcagattcagatagtgaaaactctttccaggaatccaaactagaaagccagaaagacttggaggaggaagaggatgaggaagtaaggagatatattatggagaaaattgtacaagctaacaagcttctacagaatcaagaaccggtgaatgataaaagggagcgaaaacttaagttcaaggaccagttagttgatttggaagttcctccactagaagacactactacttttaaaaattattttgaaaacgaaaggaatatgtttgggaaactgtcacaattatgtatttccaatgattttggacaagaagatgtgctcctgtcacttactaatggaagctgtgaagaaaacaaggataggacaatactggtagagagagatggaaaatttgaacttctgaatttacaagacattgccagtcaggggtttttgcctcccattaataatgcaaatagtacagaaaatgaccctcagcagttgttacccagatcttccaactcctctgtcagtggcaccaagaaagaagattctacagcaaagattcatgctgtcactcactcatcaacaggagagccgctggcttatatcgctcagccaccactcaaccgcaagacttgtccaagctctgctgtcaactcagatcgaagtaaagggaatgggaaatctaatcacaggacacagtctgcacatatctcaccagtgacttcaacatactgtctttcccctcgacagaaagaactacaaaaacaactagaagaaaagagagaaaaactgaaaagagaggaagagcgacgaaaaatagaagaagagaaagaaaaaaagagagagaatgacatagtatttaaagcgtggttgcaaaagaaaagagagcaggtcttagaaatgaggagaattcagcgagcaaaggaaattgaagacatgaacagtagagaaaacagagatccacaacaagcttttcgattatggcttaaaaaaaagcacgaagagcagatgaaagaaagacagacagaagaactaagaaagcaagaggaatgtttattcttccttaaaggaacagaaggccgggaaagggcctttaaacaatggttaagaaggaaacggatggaaaaaatggcagagcaacaagctgtcagagagagaactagacagctccgactagaagctaagcgttctaaacagttacagcaccacctatatatgtcagaagccaaaccttttcgttttactgatcattataactga

SEQ ID NO: 208256 - protein, 335 aa, Artificial Sequence
  derived and/or modified sequence
MAGSPTCLTLIYILWQLTGSAASGPVKELVGSVGGAVTFPLKSKVKQVDSIVWTFNTTPLVTIQPEGGTIIVTQNRNRERVDFPDGGYSLKLSKLKKNDSGIYYVGIYSSSLQQPSTQEYVLHVYEHLSKPKVTMGLQSNKNGTCVTNLTCCMEHGEEDVIYTWKALGQAANESHNGSILPISWRWGESDMTFICVARNPVSRNFSSPILARKLCEGAADDPDSSMVLLCLLLVPLLLSLFVLGLFLWFLKRERQEEYIEEKKRVDICRETPNICPHSGENTEYDTIPHTNRTILKEDPANTVYSTVEIPKKMENPHSLLTMPDTPRLFAYENVI

SEQ ID NO: 208257 - DNA, 1008 bp, Artificial Sequence
  derived and/or modified sequence
atggccggtagcccaacttgtctcacactcatttatatcctttggcagttgaccggatccgccgcttcgggccctgtcaaggagctggtcgggtcagtcggaggagccgtcacatttccccttaaaagcaaggttaagcaagtggactccattgtatggacatttaatacgacaccactggtgaccatccagcctgagggtggtacaattatcgtgactcagaatcgcaatcgagagcgagtcgattttccggacgggggctatagcttaaagctctccaaactcaaaaagaatgatagtggaatctattatgtgggcatatactcctcgtccctgcagcaaccctccacacaggagtacgtcttacacgtatatgagcacttgtctaagccgaaggtaacaatgggccttcaatcaaataaaaatggcacttgtgtgacaaaccttacctgttgcatggagcatggcgaagaagacgtgatctacacttggaaggctctcgggcaggccgcaaatgagagtcacaacggctctatactgcccatctcctggagatggggcgagagtgacatgacctttatatgtgtagccagaaatcccgtgagtcgcaatttctcttcccccattcttgctaggaagctgtgcgagggcgcggcggacgacccagattcgagcatggtcctcctatgcctcttgttagtgccactgctcttatcactgttcgtactcggcttgtttctctggttccttaagcgcgaacggcaagaagagtacatcgaagagaagaagagggtggacatctgccgcgaaacccctaatatctgccctcactcaggtgagaacacagaatatgacactattccacacacaaaccggactatcctgaaagaagacccagccaataccgtgtatagtaccgtggaaatacccaaaaaaatggaaaacccacatagcctactgaccatgccagacacacctcggctcttcgcttacgagaacgtgatctag

SEQ ID NO: 208258 - DNA, 1008 bp, Artificial Sequence
  derived and/or modified sequence
atggccggcagccccacctgcctgaccctcatctacatcctgtggcagctgaccggcagcgctgccagcggccctgtgaaggagctggtgggctctgtgggcggcgctgtgaccttccccctgaagagcaaggtgaagcaggtggacagcatcgtgtggaccttcaacaccacccccctggtgaccatccagcctgagggcggcaccatcatcgtgacccagaacagaaaccgggagcgggtggacttcccagatggcggctacagcctgaagctgagcaagctgaagaagaatgacagcggcatctactacgtgggcatctacagcagcagcctgcagcagcccagcacccaggagtatgtgctgcacgtgtatgagcacctgagcaagcccaaggtgaccatgggcctgcagagcaacaagaatggcacctgtgtgaccaacctgacctgctgcatggagcacggggaggaggatgtgatctacacctggaaggccctgggccaggccgccaatgaaagccacaacggcagcatcctgcccatctcctggcgctggggcgagagtgacatgaccttcatctgtgtggccaggaaccctgtgtccaggaacttcagcagccccatcctggccaggaagctgtgtgagggcgctgctgatgatcctgacagctccatggtgctgctgtgcctgctgctggtgcccctgctgctgagcctgtttgtgctgggcctcttcctgtggttcctgaagcgggagcggcaggaggagtacatcgaggagaagaagagggtggacatctgccgggagacccccaacatctgcccccacagcggggagaacacagaatatgacaccatcccccacaccaacagaaccatcctgaaggaggaccctgccaacacagtgtacagcacagtggagatccccaagaagatggagaacccccacagcctgctgaccatgccagacaccccccggctgtttgcctatgaaaatgtcatctag

SEQ ID NO: 208259 - DNA, 1008 bp, Artificial Sequence
  derived and/or modified sequence
atggccggcagccccacctgcctgaccctgatctacatcctgtggcagctgaccggatccgctgcctccgggcctgtgaaggagttagtcggtagcgtcggcggcgccgttacgtttcctctaaagagcaaggtaaagcaggtcgattcgatcgtgtggacatttaatactaccccactggttactatccagcccgaaggcggtactatcatcgttacccaaaaccgcaaccgggaaagagtcgacttccctgatggtgggtattccctgaaactttccaagctaaaaaagaatgattccggcatctactatgtcggcatttattcttcttctctgcagcagccaagcacacaagaatatgtcctccatgtctacgagcatctcagcaagccaaaagtcacaatgggcttgcaatctaataaaaacggaacatgcgtgacgaatcttacgtgctgtatggagcacggagaagaagacgttatttacacctggaaggccctcgggcaggcagccaatgaatcccacaacggaagtattctgccaattagctggaggtggggagaatcagacatgacgtttatttgcgtggcacgtaaccctgtttcgagaaacttttcctccccaattctggcgaggaaactttgcgaaggcgccgctgacgacccggactcatcaatggttctgctgtgtcttcttctagtgccgctgctactgtccctgtttgtcctcggcctgttcctttggttcctcaagagggagcggcaggaagaatatatcgaagagaagaaaagggtggacatctgcagggagacaccaaacatatgcccccactctggcgaaaacacggagtatgatacaatcccccatactaatcgaactatcctgaaggaagaccccgctaatacagtgtacagtacggtcgagattcctaaaaagatggagaacccccactctctgctcaccatgccagatacgccgcggctatttgcttacgagaacgtgatctag

SEQ ID NO: 208260 - DNA, 1008 bp, Artificial Sequence
  derived and/or modified sequence
atggcaggctctcccacgtgcttaaccctgatctatatcctgtggcagctgacgggctccgcggctagcggacccgttaaagagctggtgggtagtgtgggaggggcagtcactttccctctgaagtcaaaggtgaagcaggtggactctattgtgtggacctttaacaccaccccactcgttacaattcagcccgaaggcggaactatcatcgtgacccagaaccgaaaccgggagcgagtcgactttcctgacggcggttacagccttaaattaagcaagttgaaaaaaaatgactcaggcatttactacgtagggatttattcttcatcactgcagcagcccagtacacaagagtatgttcttcatgtctatgagcatctgtccaaacccaaagtgaccatgggcttacagtccaataagaatggaacgtgtgtcacaaacctcacctgctgcatggagcatggcgaagaagatgtcatttacacctggaaggccctggggcaggccgcaaacgagtcccacaatggatcaatactacctatttcgtggcgttggggcgaatccgacatgactttcatctgcgtagcacgtaatcctgtgagtcgaaacttttccagccctattttggcccgaaaattgtgtgagggtgccgctgatgatcctgacagtagcatggtgctcttgtgtctgttactggtaccactgctgctgagtctgtttgtgctcgggttattcctgtggtttctgaagcgtgagagacaggaagagtacatagaggagaaaaaacgagtagatatttgcagggagacacccaacatttgcccacactctggagaaaatactgagtacgataccattccccacaccaatcggactatactgaaagaagaccctgccaacactgtgtatagtacggtcgaaatccctaagaagatggagaatccccacagcctgctgaccatgcctgatactccgagattattcgcatacgagaatgtgatttag

SEQ ID NO: 208261 - DNA, 2689 bp, Artificial Sequence
  derived and/or modified sequence
gtggcttcatttcagtggctgacttccagagagcaatatggctggttccccaacatgcctcaccctcatctatatcctttggcagctcacagggtcagcagcctctggacccgtgaaagagctggtcggttccgttggtggggccgtgactttccccctgaagtccaaagtaaagcaagttgactctattgtctggaccttcaacacaacccctcttgtcaccatacagccagaagggggcactatcatagtgacccaaaatcgtaatagggagagagtagacttcccagatggaggctactccctgaagctcagcaaactgaagaagaatgactcagggatctactatgtggggatatacagctcatcactccagcagccctccacccaggagtacgtgctgcatgtctacgagcacctgtcaaagcctaaagtcaccatgggtctgcagagcaataagaatggcacctgtgtgaccaatctgacatgctgcatggaacatggggaagaggatgtgatttatacctggaaggccctggggcaagcagccaatgagtcccataatgggtccatcctccccatctcctggagatggggagaaagtgatatgaccttcatctgcgttgccaggaaccctgtcagcagaaacttctcaagccccatccttgccaggaagctctgtgaaggtgctgctgatgacccagattcctccatggtcctcctgtgtctcctgttggtgcccctcctgctcagtctctttgtactggggctatttctttggtttctgaagagagagagacaagaagagtacattgaagagaagaagagagtggacatttgtcgggaaactcctaacatatgcccccattctggagagaacacagagtacgacacaatccctcacactaatagaacaatcctaaaggaagatccagcaaatacggtttactccactgtggaaataccgaaaaagatggaaaatccccactcactgctcacgatgccagacacaccaaggctatttgcctatgagaatgttatctagacagcagtgcactcccctaagtctctgctcaaaaaaaaaacaattctcggcccaaagaaaacaatcagaagaattcactgatttgactagaaacatcaaggaagaatgaagaacgttgacttttttccaggataaattatctctgatgcttctttagatttaagagttcataattccatccactgctgagaaatctcctcaaacccagaaggtttaatcacttcatcccaaaaatgggattgtgaatgtcagcaaaccataaaaaaagtgcttagaagtattcctataaaaatgtaaatgcaaggtcacacatattaatgacagcctgttgtattaatgatggctccaggtcagtgtctggagtttcattccatcccagggcttggatgtcaggattataccaagagtcttgctaccaggagggcaagaagaccaaaacagacagacaagtccagcagaagcagatgcacctgacaaaaatggatgtattaattggctctataaactatgtgcccagcactatgctgagcttacactaattggtcagacatgctgtctgccctcatgaaattggctccaaatgaatgaactactttcatgagcagttgtagcaggcctgaccacagattcccagagggccaggtgtggatccacaggacttgaaggtcaaagttcacaaagatgaagaatcagggtagctgaccatgtttggcagatactataatggagacacagaagtgtgcatggcccaaggacaaggacctccagccaggcttcatttatgcacttgtgctgcaaaagaaaagtctaggttttaaggctgtgccagaacccatcccaataaagagaccgagtctgaagtcacattgtaaatctagtgtaggagacttggagtcaggcagtgagactggtggggcacggggggcagtgggtacttgtaaacctttaaagatggttaattcattcaatagatatttattaagaacctatgcggcccggcatggtggctcacacctgtaatcccagcactttgggaggccaaggtgggtgggtcatctgaggtcaggagttcaagaccagcctggccaacatggtgaaaccccatctctactaaagatacaaaaatttgctgagcgtggtggtgtgcacctgtaatcccagctactcgagaggccaaggcatgagaatcgcttgaacctgggaggtggaggttgcagtgagctgagatggcaccactgcactccggcctaggcaacgagagcaaaactccaatacaaacaaacaaacaaacacctgtgctaggtcagtctggcacgtaagatgaacatccctaccaatacagagctcaccatctcttatacttaagtgaaaaacatggggaaggggaaaggggaatggctgcttttgatatgttccctgacacatatcttgaatggagacctccctaccaagtgatgaaagtgttgaaaaacttaataacaaatgcttgttgggcaagaatgggattgaggattatcttctctcagaaaggcattgtgaaggaattgagccagatctctctccctactgcaaaaccctattgtagtaaaaaagtcttctttactatcttaataaaacagatattgtgagattcacatacaaaaa

SEQ ID NO: 208262 - DNA, 1008 bp, Artificial Sequence
  derived and/or modified sequence
atggccggcagccccacctgcctgaccctgatctacatcctgtggcagctgaccggcagcgccgccagcggccccgtgaaggagctggtgggcagcgtgggcggcgccgtgaccttccccctgaagagcaaggtgaagcaggtggacagcatcgtgtggaccttcaacaccacccccctggtgaccatccagcccgagggcggcaccatcatcgtgacccagaacagaaacagagagagagtggacttccccgacggcggctacagcctgaagctgagcaagctgaagaagaacgacagcggcatctactacgtgggcatctacagcagcagcctgcagcagcccagcacccaggagtacgtgctgcacgtgtacgagcacctgagcaagcccaaggtgaccatgggcctgcagagcaacaagaacggcacctgcgtgaccaacctgacctgctgcatggagcacggcgaggaggacgtgatctacacctggaaggccctgggccaggccgccaacgagagccacaacggcagcatcctgcccatcagctggagatggggcgagagcgacatgaccttcatctgcgtggccagaaaccccgtgagcagaaacttcagcagccccatcctggccagaaagctgtgcgagggcgccgccgacgaccccgacagcagcatggtgctgctgtgcctgctgctggtgcccctgctgctgagcctgttcgtgctgggcctgttcctgtggttcctgaagagagagagacaggaggagtacatcgaggagaagaagagagtggacatctgcagagagacccccaacatctgcccccacagcggcgagaacaccgagtacgacaccatcccccacaccaacagaaccatcctgaaggaggaccccgccaacaccgtgtacagcaccgtggagatccccaagaagatggagaacccccacagcctgctgaccatgcccgacacccccagactgttcgcctacgagaacgtgatctag

SEQ ID NO: 208263 - protein, 294 aa, Artificial Sequence
  derived and/or modified sequence
MFLRRLGGWLPRPWGRRKPMRPDPPYPEPRRVDSSSENSGSDWDSAPETMEDVGHPKTKDSGALRVSRAASEPSKEEPQVEQLGSKRMDSLKWDQPISSTQESGRLEAGGASPKLRWDHVDSGGTRRPGVSPEGGLSVPGPGAPLEKPGRREKLLGWLRGEPGAPSRYLGGPEECLQISTNLTLHLLELLASALLALCSRPLRAALDTLGLRGPLGLWLHGLLSFLAALHGLHAVLSLLTAHPLHFACLFGLLQALVLAVSLREPNGDEAATDWESEGLEREGEEQRGDPGKGL

SEQ ID NO: 208264 - protein, 294 aa, Artificial Sequence
  derived and/or modified sequence
MFLRRLGGWLPRPWGRRKPMRPDPPYPEPRRVDSSSENSGSDWDSAPETMEDVGHPKTKDSGALRVSGAASEPSKEEPQVEQLGSKRMDSLKWDQPISSTQESGRLEAGGASPKLRWDHVDSGGTRRPGVSPEGGLSVPGPGAPLEKPGRREKLLGWLRGEPGAPSRYLGGPEECLQISTNLTLHLLELLASALLALCSRPLRAALDTLGLRGPLGLWLHGLLSFLAALHGLHAVLSLLTAHPLHFACLFGLLQALVLAVSLREPNGDEAATDWESEGLEREGEEQRGDPGKGL

SEQ ID NO: 208265 - protein, 311 aa, Artificial Sequence
  derived and/or modified sequence
MFLRRLGGWLPRPWGRRKPMRPDPPYPEPRRVDSSSENSGSDWDSAPETMEDVGHPKTKDSGALRVSGAASEPSKEEPQVEQLGSKRMDSLKWDQPISSTQESGRLEAGGASPKLRWDHVDSGGTRRPGVSPEGGLSVPGPGAPLEKPGRREKLLGWLRGEPGAPSRYLGGPEECLQISTNLTLHLLELLASALLALCSRPLRAALDTLGLRGPLGLWLHGLLSFLAALHGLHAVLSLLTAHPLHFACLFGLLQALVLAVSGSPMGMRRPLTGRVRGWRGKVRSRGETRERGCDRGVGAKGEESVGFRRKV

SEQ ID NO: 208266 - DNA, 2473 bp, Artificial Sequence
  derived and/or modified sequence
gcagctgcttccgggcttcgcggctcccggcggctccccaaggccgcggccccgacgctgggcccgggagcggtccccgcgcacagcgcccggacgcgtaggtcccgaagtaggcccgcgctttgcttcgtaactggggatctctgaggacatcttagttctgaccttgtggaggccgcgtctctgctgcgtgttcgcgggccagtcgggccactttgtagaaatcatagccctctaaatcaagggacgaacgctgctggctggagtttgctggacactttcattccacctcctaacaaagagaattcctattccttgaggtcccttggggcagcagttaaagactacacgatccaggagcacctaggacctggggccaccttcctgcccgctttattggatggagcactgcctccccagtttctgggacaccttggggtgtggccttggtgagtgaaacttggggtgctgcctgctgggaaggaaatccggaaacgcagagaggactctctggtggtgacccaggccttgtcagatctgagattcttggaatctcagattgtgggggtgtggatggtgaatgaatttgggtatgcccccctttaccccagaactgaagaggaagcaaactacttgccacacttgaggctgcatgactattcagagaagggaggagccacttctgaattcagagtaggactgcatcaccaggcaaatacctgttctgagccagaaagactctggcttctgaggagatcctgagagtctgagtagtgccaggaagcagcctcagaatttgggggcccattacacaccccagccatgttcctgcgacggcttggtggctggctacctcgcccttggggccgccggaaaccaatgaggcctgacccgccttacccagaacccagacgggtggacagctcctcggagaattcaggaagtgactgggatagtgccccagaaaccatggaagatgtggggcatcccaagactaaggactcgggggcattgagggtttctagggctgcttccgaaccaagcaaggaggagccccaagttgagcagctagggagcaaaagaatggattccctcaagtgggaccagcctatctctagcactcaagagtctgggagactggaggctggaggggccagtcccaaactcagatgggatcatgtggattcaggtggcaccaggagaccaggggtgtcccctgaagggggactgagcgtccctgggccaggagccccattggagaaacctggtaggcgtgagaagctgttgggctggctgcggggggaaccaggagctccctcccggtacttggggggcccagaagagtgtctgcagatctccaccaacctgaccctgcatcttctggagctgctggcctctgccctgctggccctgtgctcacgaccactgcgggcagccttggacacactgggcctgcgtggaccgctgggcctctggctacatggcctactgtccttcctggctgccctgcatgggctccatgctgttctgagcctacttactgcccaccctttgcacttcgcctgcctctttggtctcctgcaggccttggtgctggctgtcagcctccgggagcccaatggggatgaggcggccactgactgggagagtgaggggttggagagggaaggtgaggagcagaggggagacccgggaaaggggctgtgaccgtggggtgggggcaaagggtgaagagagtgtgggctttaggagaaaagtgtgaggcatgacccaaattgtaagcatagggacctcagggatggggaagaaacccgagtacgagggtgcagggccccccttcatacacaggagagaacagaactatttagggtgtttgtgtttatggacagtgagggcactgctcttggattcaccagctgttatttttgcttttacttttctcccaccttcagttttttttttttttccacctccactttttaaaagcaaaaaaaaaaaaaaagtatgatggtggtgaataaagaccaaagggtcctctctacctttgaaaactctcctggggtggaggagaccagggcaggatagacagacctctgcagtaagagagtggttgggaaacccagggtgttccttggatctcaggatctgagccatcgagggaagagtggggctgctaggcaagtggattagggggtctggatagggccccacaggtgacagggagcctgcagggcggatctggtgatcatgggagccagagggagtggggacagtgcaggcagtattggcaggagggccagtgcagaagggctggtagctcaggcagtgtgggggaagcactgaagcctgtagtccccacttgggggctaggggtttgctcactcagcaataaataactgtgtcacatcaaatcctaaatataccactacaaagtgagagttactgccactctgttcttactgacaccgtccag

SEQ ID NO: 208267 - DNA, 2475 bp, Artificial Sequence
  derived and/or modified sequence
ggtgcagctgcttccgggcttcgcggctcccggcggctccccaaggccgcggccccgacgctgggcccgggagcggtccccgcgcacagcgcccggacgcgtaggtcccgaagtaggcccgcgctttgcttcgtaactggggatctctgaggacatcttagttctgaccttgtggaggccgcgtctctgctgcgtgttcgcgggccagtcgggccactttgtagaaatcatagccctctaaatcaagggacgaacgctgctggctggagtttgctggacactttcattccacctcctaacaaagagaattcctattccttgaggtcccttggggcagcagttaaagactacacgatccaggagcacctaggacctggggccaccttcctgcccgctttattggatggagcactgcctccccagtttctgggacaccttggggtgtggccttggtgagtgaaacttggggtgctgcctgctgggaaggaaatccggaaacgcagagaggactctctggtggtgacccaggccttgtcagatctgagattcttggaatctcagattgtgggggtgtggatggtgaatgaatttgggtatgcccccctttaccccagaactgaagaggaagcaaactacttgccacacttgaggctgcatgactattcagagaagggaggagccacttctgaattcagagtaggactgcatcaccaggcaaatacctgttctgagccagaaagactctggcttctgaggagatcctgagagtctgagtagtgccaggaagcagcctcagaatttgggggcccattacacaccccagccatgttcctgcgacggcttggtggctggctacctcgcccttggggccgccggaaaccaatgaggcctgacccgccttacccagaacccagacgggtggacagctcctcggagaattcaggaagtgactgggatagtgccccagaaaccatggaagatgtggggcatcccaagactaaggactcgggggcattgagggtttctagggctgcttccgaaccaagcaaggaggagccccaagttgagcagctagggagcaaaagaatggattccctcaagtgggaccagcctatctctagcactcaagagtctgggagactggaggctggaggggccagtcccaaactcagatgggatcatgtggattcaggtggcaccaggagaccaggggtgtcccctgaagggggactgagcgtccctgggccaggagccccattggagaaacctggtaggcgtgagaagctgttgggctggctgcggggggaaccaggagctccctcccggtacttggggggcccagaagagtgtctgcagatctccaccaacctgaccctgcatcttctggagctgctggcctctgccctgctggccctgtgctcacgaccactgcgggcagccttggacacactgggcctgcgtggaccgctgggcctctggctacatggcctactgtccttcctggctgccctgcatgggctccatgctgttctgagcctacttactgcccaccctttgcacttcgcctgcctctttggtctcctgcaggccttggtgctggctgtcagcctccgggagcccaatggggatgaggcggccactgactgggagagtgaggggttggagagggaaggtgaggagcagaggggagacccgggaaaggggctgtgaccgtggggtgggggcaaagggtgaagagagtgtgggctttaggagaaaagtgtgaggcatgacccaaattgtaagcatagggacctcagggatggggaagaaacccgagtacgagggtgcagggccccccttcatacacaggagagaacagaactatttagggtgtttgtgtttatggacagtgagggcactgctcttggattcaccagctgttatttttgcttttacttttctcccaccttcagttttttttttttttccacctccactttttaaaagcaaaaaaaaaaaaaagtatgatggtggtgaataaagaccaaagggtcctctctacctttgaaaactctcctggggtggaggagaccagggcaggatagacagacctctgcagtaagagagtggttgggaaacccagggtgttccttggatctcaggatctgagccatcgagggaagagtggggctgctaggcaagtggattagggggtctggatagggccccacaggtgacagggagcctgcagggcggatctggtgatcatgggagccagagggagtggggacagtgcaggcagtattggcaggagggccagtgcagaagggctggtagctcaggcagtgtgggggaagcactgaagcctgtagtccccacttgggggctaggggtttgctcactcagcaataaataactgtgtcacatcaaatcctaaatataccactacaaagtgagagttactgccactctgttcttactgacaccgtccag

SEQ ID NO: 208268 - DNA, 2475 bp, Artificial Sequence
  derived and/or modified sequence
ggtgcagctgcttccgggcttcgcggctcccggcggctccccaaggccgcggccccgacgctgggcccgggagcggtccccgcgcacagcgcccggacgcgtaggtcccgaagtaggcccgcgctttgcttcgtaactggggatctctgaggacatcttagttctgaccttgtggaggccgcgtctctgctgcgtgttcgcgggccagtcgggccactttgtagaaatcatagccctctaaatcaagggacgaacgctgctggctggagtttgctggacactttcattccacctcctaacaaagagaattcctattccttgaggtcccttggggcagcagttaaagactacacgatccaggagcacctaggacctggggccaccttcctgcccgctttattggatggagcactgcctccccagtttctgggacaccttggggtgtggccttggtgagtgaaacttggggtgctgcctgctgggaaggaaatccggaaacgcagagaggactctctggtggtgacccaggccttgtcagatctgagattcttggaatctcagattgtgggggtgtggatggtgaatgaatttgggtatgcccccctttaccccagaactgaagaggaagcaaactacttgccacacttgaggctgcatgactattcagagaagggaggagccacttctgaattcagagtaggactgcatcaccaggcaaatacctgttctgagccagaaagactctggcttctgaggagatcctgagagtctgagtagtgccaggaagcagcctcagaatttgggggcccattacacaccccagccatgttcctgcgacggcttggtggctggctacctcgcccttggggccgccggaaaccaatgaggcctgacccgccttacccagaacccagacgggtggacagctcctcggagaattcaggaagtgactgggatagtgccccagaaaccatggaagatgtggggcatcccaagactaaggactcgggggcattgagggtttctggggctgcttccgaaccaagcaaggaggagccccaagttgagcagctagggagcaaaagaatggattccctcaagtgggaccagcctatctctagcactcaagagtctgggagactggaggctggaggggccagtcccaaactcagatgggatcatgtggattcaggtggcaccaggagaccaggggtgtcccctgaagggggactgagcgtccctgggccaggagccccattggagaaacctggtaggcgtgagaagctgttgggctggctgcggggggaaccaggagctccctcccggtacttggggggcccagaagagtgtctgcagatctccaccaacctgaccctgcatcttctggagctgctggcctctgccctgctggccctgtgctcacgaccactgcgggcagccttggacacactgggcctgcgtggaccgctgggcctctggctacatggcctactgtccttcctggctgccctgcatgggctccatgctgttctgagcctacttactgcccaccctttgcacttcgcctgcctctttggtctcctgcaggccttggtgctggctgtcagcctccgggagcccaatggggatgaggcggccactgactgggagagtgaggggttggagagggaaggtgaggagcagaggggagacccgggaaaggggctgtgaccgtggggtgggggcaaagggtgaagagagtgtgggctttaggagaaaagtgtgaggcatgacccaaattgtaagcatagggacctcagggatggggaagaaacccgagtacgagggtgcagggccccccttcatacacaggagagaacagaactatttagggtgtttgtgtttatggacagtgagggcactgctcttggattcaccagctgttatttttgcttttacttttctcccaccttcagttttttttttttttccacctccactttttaaaagcaaaaaaaaaaaaaagtatgatggtggtgaataaagaccaaagggtcctctctacctttgaaaactctcctggggtggaggagaccagggcaggatagacagacctctgcagtaagagagtggttgggaaacccagggtgttccttggatctcaggatctgagccatcgagggaagagtggggctgctaggcaagtggattagggggtctggatagggccccacaggtgacagggagcctgcagggcggatctggtgatcatgggagccagagggagtggggacagtgcaggcagtattggcaggagggccagtgcagaagggctggtagctcaggcagtgtgggggaagcactgaagcctgtagtccccacttgggggctaggggtttgctcactcagcaataaataactgtgtcacatcaaatcctaaatataccactacaaagtgagagttactgccactctgttcttactgacaccgtccag

SEQ ID NO: 208269 - DNA, 2475 bp, Artificial Sequence
  derived and/or modified sequence
ggtgcagctgcttccgggcttcgcggctcccggcggctccccaaggccgcggccccgacgctgggcccgggagcggtccccgcgcacagcgcccggacgcgtaggtcccgaagtaggcccgcgctttgcttcgtaactggggatctctgaggacatcttagttctgaccttgtggaggccgcgtctctgctgcgtgttcgcgggccagtcgggccactttgtagaaatcatagccctctaaatcaagggacgaacgctgctggctggagtttgctggacactttcattccacctcctaacaaagagaattcctattccttgaggtcccttgggacagcagttaaagactacacgatccaggagcacctaggacctggggccaccttcctgcccgctttattggatggagcactgcctccccagtttctgggacaccttggggtgtggccttggtgagtgaaacttggggtgctgcctgctgggaaggaaatccggaaacgcagagaggactctctggtggtgacccaggccttgtcagatctgagattcttggaatctcagattgtgggggtgtggatggtgaatgaatttgggtatgcccccctttaccccagaactgaagaggaagcaaactacttgccacacttgaggctgcatgactattcagagaagggaggagccacttctgaattcagagtaggactgcatcaccaggcaaatacctgttctgagccagaaagactctggcttctgaggagatcctgagagtctgagtagtgccaggaagcagcctcagaatttgggggcccattacacaccccagccatgttcctgcgacggcttggtggctggctacctcgcccttggggccgccggaaaccaatgaggcctgacccgccttacccagaacccagacgggtggacagctcctcggagaattcaggaagtgactgggatagtgccccagaaaccatggaagatgtggggcatcccaagactaaggactcgggggcattgagggtttctagggctgcttccgaaccaagcaaggaggagccccaagttgagcagctagggagcaaaagaatggattccctcaagtgggaccagcctatctctagcactcaagagtctgggagactggaggctggaggggccagtcccaaactcagatgggatcatgtggattcaggtggcaccaggagaccaggggtgtcccctgaagggggactgagcgtccctgggccaggagccccattggagaaacctggtaggcgtgagaagctgttgggctggctgcggggggaaccaggagctccctcccggtacttggggggcccagaagagtgtctgcagatctccaccaacctgaccctgcatcttctggagctgctggcctctgccctgctggccctgtgctcacgaccactgcgggcagccttggacacactgggcctgcgtggaccgctgggcctctggctacatggcctactgtccttcctggctgccctgcatgggctccatgctgttctgagcctacttactgcccaccctttgcacttcgcctgcctctttggtctcctgcaggccttggtgctggctgtcagcctccgggagcccaatggggatgaggcggccactgactgggagagtgaggggttggagagggaaggtgaggagcagaggggagacccgggaaaggggctgtgaccgtggggtgggggcaaagggtgaagagagtgtgggctttaggagaaaagtgtgaggcatgacccaaattgtaagcatagggacctcagggatggggaagaaacccgagtacgagggtgcagggccccccttcatacacaggagagaacagaactatttagggtgtttgtgtttatggacagtgagggcactgctcttggattcaccagctgttatttttgcttttacttttctcccaccttcagttttttttttttttccacctccactttttaaaagcaaaaaaaaaaaaaagtatgatggtggtgaataaagaccaaagggtcctctctacctttgaaaactctcctggggtggaggagaccagggcaggatagacagacctctgcagtaagagagtggttgggaaacccagggtgttccttggatctcaggatctgagccatcgagggaagagtggggctgctaggcaagtggattagggggtctggatagggccccacaggtgacagggagcctgcagggcggatctggtgatcatgggagccagagggagtggggacagtgcaggcagtattggcaggagggccagtgcagaagggctggtagctcaggcagtgtgggggaagcactgaagcctgtagtccccacttgggggctaggggtttgctcactcagcaataaataactgtgtcacatcaaatcctaaatataccactacaaagtgagagttactgccactctgttcttactgacaccgtccag

SEQ ID NO: 208270 - DNA, 885 bp, Artificial Sequence
  derived and/or modified sequence
atgttcctgagaagactgggcggctggctgcccagaccctggggcagaagaaagcccatgagacccgaccccccctaccccgagcccagaagagtggacagcagcagcgagaacagcggcagcgactgggacagcgcccccgagaccatggaggacgtgggccaccccaagaccaaggacagcggcgccctgagagtgagcagagccgccagcgagcccagcaaggaggagccccaggtggagcagctgggcagcaagagaatggacagcctgaagtgggaccagcccatcagcagcacccaggagagcggcagactggaggccggcggcgccagccccaagctgagatgggaccacgtggacagcggcggcaccagaagacccggcgtgagccccgagggcggcctgagcgtgcccggccccggcgcccccctggagaagcccggcagaagagagaagctgctgggctggctgagaggcgagcccggcgcccccagcagatacctgggcggccccgaggagtgcctgcagatcagcaccaacctgaccctgcacctgctggagctgctggccagcgccctgctggccctgtgcagcagacccctgagagccgccctggacaccctgggcctgagaggccccctgggcctgtggctgcacggcctgctgagcttcctggccgccctgcacggcctgcacgccgtgctgagcctgctgaccgcccaccccctgcacttcgcctgcctgttcggcctgctgcaggccctggtgctggccgtgagcctgagagagcccaacggcgacgaggccgccaccgactgggagagcgagggcctggagagagagggcgaggagcagagaggcgaccccggcaagggcctgtag

SEQ ID NO: 208271 - DNA, 885 bp, Artificial Sequence
  derived and/or modified sequence
atgttcctgagaagactgggcggctggctgcccagaccctggggcagaagaaagcccatgagacccgaccccccctaccccgagcccagaagagtggacagcagcagcgagaacagcggcagcgactgggacagcgcccccgagaccatggaggacgtgggccaccccaagaccaaggacagcggcgccctgagagtgagcggcgccgccagcgagcccagcaaggaggagccccaggtggagcagctgggcagcaagagaatggacagcctgaagtgggaccagcccatcagcagcacccaggagagcggcagactggaggccggcggcgccagccccaagctgagatgggaccacgtggacagcggcggcaccagaagacccggcgtgagccccgagggcggcctgagcgtgcccggccccggcgcccccctggagaagcccggcagaagagagaagctgctgggctggctgagaggcgagcccggcgcccccagcagatacctgggcggccccgaggagtgcctgcagatcagcaccaacctgaccctgcacctgctggagctgctggccagcgccctgctggccctgtgcagcagacccctgagagccgccctggacaccctgggcctgagaggccccctgggcctgtggctgcacggcctgctgagcttcctggccgccctgcacggcctgcacgccgtgctgagcctgctgaccgcccaccccctgcacttcgcctgcctgttcggcctgctgcaggccctggtgctggccgtgagcctgagagagcccaacggcgacgaggccgccaccgactgggagagcgagggcctggagagagagggcgaggagcagagaggcgaccccggcaagggcctgtag

SEQ ID NO: 208272 - DNA, 2476 bp, Artificial Sequence
  derived and/or modified sequence
ggtgcagctgcttccgggcttcgcggctcccggcggctccccaaggccgcggccccgacgctgggcccgggagcggtccccgcgcacagcgcccggacgcgtaggtcccgaagtaggcccgcgctttgcttcgtaactggggatctctgaggacatcttagttctgaccttgtggaggccgcgtctctgctgcgtgttcgcgggccagtcgggccactttgtagaaatcatagccctctaaatcaagggacgaacgctgctggctggagtttgctggacactttcattccacctcctaacaaagagaattcctattccttgaggtcccttggggcagcagttaaagactacacgatccaggagcacctaggacctggggccaccttcctgcccgctttattggatggagcactgcctccccagtttctgggacaccttggggtgtggccttggtgagtgaaacttggggtgctgcctgctgggaaggaaatccggaaacgcagagaggactctctggtggtgacccaggccttgtcagatctgagattcttggaatctcagattgtgggggtgtggatggtgaatgaatttgggtatgcccccctttaccccagaactgaagaggaagcaaactacttgccacacttgaggctgcatgactattcagagaagggaggagccacttctgaattcagagtaggactgcatcaccaggcaaatacctgttctgagccagaaagactctggcttctgaggagatcctgagagtctgagtagtgccaggaagcagcctcagaatttgggggcccattacacaccccagccatgttcctgcgacggcttggtggctggctacctcgcccttggggccgccggaaaccaatgaggcctgacccgccttacccagaacccagacgggtggacagctcctcggagaattcaggaagtgactgggatagtgccccagaaaccatggaagatgtggggcatcccaagactaaggactcgggggcattgagggtttctggggctgcttccgaaccaagcaaggaggagccccaagttgagcagctagggagcaaaagaatggattccctcaagtgggaccagcctatctctagcactcaagagtctgggagactggaggctggaggggccagtcccaaactcagatgggatcatgtggattcaggtggcaccaggagaccaggggtgtcccctgaagggggactgagcgtccctgggccaggagccccattggagaaacctggtaggcgtgagaagctgttgggctggctgcggggggaaccaggagctccctcccggtacttggggggcccagaagagtgtctgcagatctccaccaacctgaccctgcatcttctggagctgctggcctctgccctgctggccctgtgctcacgaccactgcgggcagccttggacacactgggcctgcgtggaccgctgggcctctggctacatggcctactgtccttcctggctgccctgcatgggctccatgctgttctgagcctacttactgcccaccctttgcacttcgcctgcctctttggtctcctgcaggccttggtgctggctgtcagcctccgggagcccaatggggatgaggcggccactgactgggagagtgaggggttggagagggaaggtgaggagcagaggggagacccgggaaaggggctgtgaccgtggggtgggggcaaagggtgaagagagtgtgggctttaggagaaaagtgtgaggcatgacccaaattgtaagcatagggacctcagggatggggaagaaacccgagtacgagggtgcagggccccccttcatacacaggagagaacagaactatttagggtgtttgtgtttatggacagtgagggcactgctcttggattcaccagctgttatttttgcttttacttttctcccaccttcagttttttttttttttccacctccactttttaaaagcaaaaaaaaaaaaaaagtatgatggtggtgaataaagaccaaagggtcctctctacctttgaaaactctcctggggtggaggagaccagggcaggatagacagacctctgcagtaagagagtggttgggaaacccagggtgttccttggatctcaggatctgagccatcgagggaagagtggggctgctaggcaagtggattagggggtctggatagggccccacaggtgacagggagcctgcagggcggatctggtgatcatgggagccagagggagtggggacagtgcaggcagtattggcaggagggccagtgcagaagggctggtagctcaggcagtgtgggggaagcactgaagcctgtagtccccacttgggggctaggggtttgctcactcagcaataaataactgtgtcacatcaaatcctaaatataccactacaaagtgagagttactgccactctgttcttactgacaccgtccag

SEQ ID NO: 208273 - DNA, 936 bp, Artificial Sequence
  derived and/or modified sequence
atgttcctgagaagactgggcggctggctgcccagaccctggggcagaagaaagcccatgagacccgaccccccctaccccgagcccagaagagtggacagcagcagcgagaacagcggcagcgactgggacagcgcccccgagaccatggaggacgtgggccaccccaagaccaaggacagcggcgccctgagagtgagcggcgccgccagcgagcccagcaaggaggagccccaggtggagcagctgggcagcaagagaatggacagcctgaagtgggaccagcccatcagcagcacccaggagagcggcagactggaggccggcggcgccagccccaagctgagatgggaccacgtggacagcggcggcaccagaagacccggcgtgagccccgagggcggcctgagcgtgcccggccccggcgcccccctggagaagcccggcagaagagagaagctgctgggctggctgagaggcgagcccggcgcccccagcagatacctgggcggccccgaggagtgcctgcagatcagcaccaacctgaccctgcacctgctggagctgctggccagcgccctgctggccctgtgcagcagacccctgagagccgccctggacaccctgggcctgagaggccccctgggcctgtggctgcacggcctgctgagcttcctggccgccctgcacggcctgcacgccgtgctgagcctgctgaccgcccaccccctgcacttcgcctgcctgttcggcctgctgcaggccctggtgctggccgtgagcggcagccccatgggcatgagaagacccctgaccggcagagtgagaggctggagaggcaaggtgagaagcagaggcgagaccagagagagaggctgcgacagaggcgtgggcgccaagggcgaggagagcgtgggcttcagaagaaaggtgtag

SEQ ID NO: 208274 - DNA, 936 bp, Artificial Sequence
  derived and/or modified sequence
atgttcctgcgacggcttggtggctggctacctcgcccttggggccgccggaaaccaatgaggcctgacccgccttacccagaacccagacgggtggacagctcctcggagaattcaggaagtgactgggatagtgccccagaaaccatggaagatgtggggcatcccaagactaaggactcgggggcattgagggtttctggggctgcttccgaaccaagcaaggaggagccccaagttgagcagctagggagcaaaagaatggattccctcaagtgggaccagcctatctctagcactcaagagtctgggagactggaggctggaggggccagtcccaaactcagatgggatcatgtggattcaggtggcaccaggagaccaggggtgtcccctgaagggggactgagcgtccctgggccaggagccccattggagaaacctggtaggcgtgagaagctgttgggctggctgcggggggaaccaggagctccctcccggtacttggggggcccagaagagtgtctgcagatctccaccaacctgaccctgcatcttctggagctgctggcctctgccctgctggccctgtgctcacgaccactgcgggcagccttggacacactgggcctgcgtggaccgctgggcctctggctacatggcctactgtccttcctggctgccctgcatgggctccatgctgttctgagcctacttactgcccaccctttgcacttcgcctgcctctttggtctcctgcaggccttggtgctggctgtcagcgggagcccaatggggatgaggcggccactgactgggagagtgaggggttggagagggaaggtgaggagcagaggggagacccgggaaaggggctgtgaccgtggggtgggggcaaagggtgaagagagtgtgggctttaggagaaaagtgtga

SEQ ID NO: 208275 - DNA, 885 bp, Artificial Sequence
  derived and/or modified sequence
atgtttctgcgccggcttggcggctggcttcctcgcccttggggacgccgaaaaccaatgaggccggaccctccctatccagaacccagaagagtagatagcagcagcgagaattcaggaagtgattgggatagtgctcccgaaacaatggaggatgtcgggcaccccaagactaaggacagcggagcccttcgggtatctagggcggcttccgagccgagtaaagaagagccacaggtcgagcagctggggtcaaaacgcatggactctttaaagtgggaccagccaatctcttccacccaggagagcggcaggctggaggctgggggtgcgtcccctaaactcagatgggaccacgttgattctggaggcactagaaggccaggagtcagccccgaggggggccttagcgtcccaggaccgggcgctccccttgagaaacctggacgccgcgagaaactgctgggctggctgaggggcgagccaggcgcaccttccaggtatctggggggccccgaggaatgtttacagataagcactaacttgacactccacttattggaactgctagcctctgccctgttggccctgtgtagcaggccgctccgtgcggccctcgacaccttaggcctgagaggcccccttgggctgtggctgcatggacttctaagcttcctggccgctcttcatgggcttcacgccgtgcttagcctgcttacggcccacccactccacttcgcctgcttgtttggacttctgcaggccctggtgcttgcagttagcctgcgggaaccaaacggtgacgaggccgccactgattgggaaagcgagggactggagagggagggcgaagagcaaagaggggatccaggaaagggactgtag

SEQ ID NO: 208276 - DNA, 885 bp, Artificial Sequence
  derived and/or modified sequence
atgttcctgcggcgcttaggcgggtggctgcccaggccttgggggagacggaaaccaatgcggcccgacccgccctacccagagccacgacgggtagatagttcatccgagaacagcggcagtgactgggacagcgctcccgaaaccatggaggacgtgggacacccaaagacaaaagattcaggtgccctaagagtgtcacgcgccgcgtctgagccaagtaaggaagagcctcaggtcgagcagctagggtctaagcgaatggattctttaaagtgggaccagccaatctcatctacccaggaatccggacgactggaggctggaggggcttctccaaagctgcgatgggatcatgtcgattcggggggcacacgcagacccggggtgtctcccgagggaggtctctccgttcctggccctggcgcgcctctagaaaaacccggccgtcgagagaagctgttggggtggctgcgtggggaacccggggcgccttcccgctacttgggcggacccgaggagtgtctacagatttctacaaatttaacactccacttactcgaactactggcctctgcgctgctggcgctgtgtagccgacctcttcgcgccgccctggatacactgggtctccggggacctttggggctttggctacatggcctgctctccttcttggctgcacttcacggcttgcacgctgtgctgagtttgctgacggcccatccgttgcacttcgcctgcctgtttgggctcctgcaggcactggtcctcgctgtttccttgcgcgaacccaatggcgatgaggccgcaacagactgggaatccgagggcttagagcgggagggagaagagcagcgcggcgacccgggcaagggcctctag

SEQ ID NO: 208277 - DNA, 885 bp, Artificial Sequence
  derived and/or modified sequence
atgtttcttcgacgtctcggaggttggttgccaaggccctgggggcgccgcaagccgatgcggcccgatccaccctatcccgagcctcgccgcgtggactcctcctccgagaatagcggcagcgactgggattcagcccctgagacaatggaggatgtggggcacccgaagacaaaggacagtggagctcttagagtatccggagccgcctccgagccatccaaagaggaacctcaggttgaacagctcggaagcaagaggatggattcattgaagtgggaccagcccatcagctctacccaggaatcaggccgactagaagccgggggggcatcacccaagctgcggtgggaccacgtggactctggcggaacgcgccgccccggcgtaagtccagagggcggtctaagcgttccaggacctggagctcctttggagaagcccggaagacgggagaagttgctcggatggctgagaggagaacctggagctcctagcaggtatctgggcggtccagaggaatgcctccagatcagcactaatctcacgctgcatctgttagagctgctggcctccgctcttctagccctgtgttctagacctctgcgagccgcactggatacactcggcctccgaggaccgttaggactgtggttgcacggcttgctgtccttcctggccgcccttcacggtttgcacgctgtcttgtctctgctgacagcccatcctctgcatttcgcctgcctgttcgggctgcttcaagcactggtattggcagtaagcctgcgggaaccaaacggcgacgaagcggccaccgactgggagtctgaggggctcgaaagagaaggtgaggaacagcgcggagatcccgggaaggggctctag

SEQ ID NO: 208278 - DNA, 885 bp, Artificial Sequence
  derived and/or modified sequence
atgttcctgcgccgcctgggagggtggttaccccgaccatggggacgacggaaacccatgcggccagatccaccgtaccctgaaccacgccgagttgacagctcaagcgaaaactctggatcagattgggactctgcgcctgaaacaatggaggatgtgggacatcccaagacaaaagactcaggagccctgcgagtgtcccgggctgcgagtgaaccaagcaaagaggaaccccaagtcgaacagcttggctcaaaaaggatggattcgctgaaatgggaccaaccaatctcttccacacaggagtccgggcgccttgaggccgggggggcctcaccaaagctacgctgggaccatgtcgactccggaggtacccgcagacctggcgtttcacctgaggggggactgtccgtgccaggtccgggtgctccacttgaaaaaccaggccgccgggagaagctgctgggatggcttaggggcgaacccggggctcccagcagatacctaggagggccagaggaatgtctccaaataagtacaaatctcactcttcaccttctggaactgctagcctcagctctcttggccctgtgcagcagacccctcagagccgcactggacacactgggactccggggcccactagggctgtggctccatggcctgctctcgttcttggccgccctacatggtcttcacgcggtattgagcctcctgacagcccacccccttcatttcgcttgtttatttgggctgctgcaggccctggtgctcgcagtttcacttcgtgagccgaacggcgacgaggctgctacagactgggaatccgagggattggagcgcgaaggtgaagagcagagaggagaccccggtaagggtctgtag

SEQ ID NO: 208279 - DNA, 885 bp, Artificial Sequence
  derived and/or modified sequence
atgtttctgaggcgcttagggggatggctcccacgcccgtggggccgcagaaagcccatgcgtccggaccccccataccccgaacctaggagagtagattcatccagcgagaatagtggctccgactgggactcagcacccgagactatggaagacgtgggacatccgaaaactaaggactcgggggccctgagagtctcaagagcagccagcgagccctctaaggaagaacctcaggtggaacagttgggcagcaagcggatggactccctgaaatgggatcaacctatttctagcacgcaggagagcggcagactcgaagctggcggtgctagtcctaaattgcgttgggaccacgtagattccgggggaacgagacgccctggggtgtctcctgaagggggtttgtccgttcccggaccaggggcacccctggagaagcctggaagaagggagaagctattggggtggctgaggggcgaaccaggcgcaccaagcaggtatctgggtggacctgaagagtgccttcaaatctccaccaacctgactctgcatctcctggaactcttggcaagcgccctccttgctctctgctctcgcccattgagagctgccctcgacacactcggcctccgggggcctctgggcttgtggctccacggcttgttaagcttcctcgctgccctccacgggttgcacgcagtgttatccctgctgactgctcaccccctgcacttcgcctgtctgtttggacttctccaagctctagttttggcggtgtctctgagagaacctaacggggacgaagctgctacggactgggagtcagaagggcttgagagggaaggggaagagcagcggggagaccccggaaaggggctttag

SEQ ID NO: 208280 - DNA, 885 bp, Artificial Sequence
  derived and/or modified sequence
atgtttctcagaaggctgggagggtggcttccaagaccgtggggacggagaaaacctatgagaccggacccaccgtaccccgagccccgccgggtagacagcagtagtgagaactctgggtctgactgggacagcgcgccggagaccatggaggacgtgggacatccaaaaaccaaggacagcggagccctgagagtatcaagggcagcctccgagccttctaaggaagagccccaggtggaacagctgggttcaaaaaggatggactcactgaagtgggaccaaccaatcagctctacccaggagtcaggcagactagaagcagggggggcatcaccaaagttgagatgggatcacgtggacagcgggggcacacggaggcccggggtgtcaccggagggcggtctttccgtgcccggacccggagcgccactggaaaagccaggacgacgagaaaagctcctcgggtggttgcgaggtgagccaggagctccctctagatatctcgggggacccgaggaatgcctgcagatcagtacaaaccttactttacacctactcgagctgcttgccagcgctctattagccttatgtagccgccctctacgagccgcccttgacaccttaggtttgcggggccctttgggactgtggctccacggcctgctgtccttcctggccgccttgcatggactacacgccgttctgtcgcttttgacagctcaccctttgcacttcgcttgccttttcggacttctccaggctctggtactggctgtatccctgagggaaccaaacggcgatgaagctgcaacagactgggaaagcgaaggacttgaaagagaaggcgaggaacagcgtggggaccccgggaagggtttgtag

SEQ ID NO: 208281 - DNA, 885 bp, Artificial Sequence
  derived and/or modified sequence
atgttcttgaggcgtttgggcggttggctccccaggccttggggccggaggaagcccatgaggccggacccgccataccctgaacccaggagagtagattcctcatcagagaactccggctccgactgggacagtgctccggagaccatggaggatgtgggacaccctaagactaaagattcaggagccctccgtgtgtcaggggcagctagcgagccatcaaaggaggagccccaggttgaacagctgggctcaaaaaggatggattccttaaaatgggaccagccaatatcctccacccaggagagcggacgcctggaggccgggggagccagtccaaagttgcggtgggaccacgtcgacagtgggggaactcgtagacctggcgtatctccggaaggaggtttaagcgtaccgggacccggggcgccgctggagaaacccgggagacgggaaaagctgctgggatggctgcgtggagagcccggcgcacccagccggtatttgggagggcctgaggaatgtctgcaaatatcaactaacttaacacttcacctgctggagttgcttgcaagcgctcttctggctctctgtagccggcctctgcgagcagctctggatacccttgggttgcgaggacccttaggactgtggctgcatgggctactcagcttcctggccgctctgcacggactgcacgctgtgctctcactgttgacagcccatcctctccactttgcttgtttgttcgggctgctgcaggccttggttctagccgtctccctgcgagagcccaatggggatgaagctgccaccgattgggaaagcgagggtctggaacgggagggcgaggagcagcggggagacccaggtaaggggctctag

SEQ ID NO: 208282 - DNA, 936 bp, Artificial Sequence
  derived and/or modified sequence
atgttccttcgtagactgggtggatggctcccgaggccctggggccgaagaaaaccaatgcgaccggatcccccttaccctgagccaaggcgggtcgatagtagcagcgaaaactcagggtccgactgggacagcgccccggaaacaatggaggacgttggccaccctaaaaccaaggatagcggcgcactgagagtctctggtgctgcatctgaaccctccaaggaagaaccgcaggtcgaacagctggggtcgaagagaatggatagtctcaagtgggatcagccaatcagttccacccaggaatccggaagactggaggccggtggagccagcccaaagctgagatgggaccatgtagattcggggggtaccaggcgcccgggagtgtcacctgaaggagggctgtctgtgcctggacctggcgccccattggagaagcccggtcgtagagagaaattgctgggttggctacgaggggagcccggagcaccctcgcgatacttgggaggcccagaggagtgcctgcaaatttcaacgaacctgaccctgcatctactggagctgttagctagtgccctattggccctctgctcacgaccacttagggccgcactcgataccctgggcctcagagggccattaggcctgtggctgcacggattgttaagttttctcgcggctcttcatggacttcacgcagtccttagtctgctgaccgcgcacccactgcacttcgcatgcttgttcgggttgctgcaggcacttgtgttagcagtgtcagggtcaccaatgggcatgcgaagacctcttaccggaagggtccggggctggagaggcaaagtgaggtcgcgcggagagacaagagagcggggttgtgatcgcggagtgggggccaaaggagaggagtcagtgggattccggagaaaagtctag

SEQ ID NO: 208283 - DNA, 885 bp, Artificial Sequence
  derived and/or modified sequence
atgttcctgcggcggctgggcggctggctgccccggccctggggccgcaggaagcccatgaggccagaccccccctacccagagccccggcgggtggacagcagcagtgaaaattctggcagtgactgggacagcgcccctgagaccatggaggatgtgggccaccccaagaccaaggacagcggggccctgcgggtgtccagagctgccagcgagcccagcaaggaggagccccaggtggagcagctgggcagcaagaggatggacagcctgaagtgggaccagcccatcagcagcacccaggagagcggccgcctggaggccggcggggccagccccaagctgcgctgggaccacgtggacagcggcggcacccggcggcctggggtgtccccagagggcggcctgtctgtgcccggccctggggcccccctggagaagccaggccggcgggagaagctgctgggctggctgcggggggagcccggggcccccagccgctacctgggcggccctgaggagtgcctgcagatcagcaccaacctgaccctgcacctgctggagctgctggccagcgccctgctggccctgtgcagccggcccctgcgggccgccctggacaccctgggcctgcggggccccctgggcctgtggctgcacggcctgctgtccttcctggccgccctgcacggcctgcatgctgtgctgagcctgctgacagcccaccccctgcactttgcctgcctgtttggcctgctgcaggccctggtgctggccgtgtccctgcgggagcccaatggagatgaggccgccacagactgggagagcgagggcctggagcgggagggggaggagcagagaggagaccccgggaagggcctgtag

SEQ ID NO: 208284 - DNA, 885 bp, Artificial Sequence
  derived and/or modified sequence
atgttcctgcggcggctgggcggctggctgccccggccctggggccgcaggaagcccatgaggccagaccccccctacccagagccccggcgggtggacagcagcagtgaaaattctggcagtgactgggacagcgcccctgagaccatggaggatgtgggccaccccaagaccaaggacagcggggccctgcgggtgtctggagctgccagcgagcccagcaaggaggagccccaggtggagcagctgggcagcaagaggatggacagcctgaagtgggaccagcccatcagcagcacccaggagagcggccgcctggaggccggcggggccagccccaagctgcgctgggaccacgtggacagcggcggcacccggcggcctggggtgtccccagagggcggcctgtctgtgcccggccctggggcccccctggagaagccaggccggcgggagaagctgctgggctggctgcggggggagcccggggcccccagccgctacctgggcggccctgaggagtgcctgcagatcagcaccaacctgaccctgcacctgctggagctgctggccagcgccctgctggccctgtgcagccggcccctgcgggccgccctggacaccctgggcctgcggggccccctgggcctgtggctgcacggcctgctgtccttcctggccgccctgcacggcctgcatgctgtgctgagcctgctgacagcccaccccctgcactttgcctgcctgtttggcctgctgcaggccctggtgctggccgtgtccctgcgggagcccaatggagatgaggccgccacagactgggagagcgagggcctggagcgggagggggaggagcagagaggagaccccgggaagggcctgtag

SEQ ID NO: 208285 - DNA, 936 bp, Artificial Sequence
  derived and/or modified sequence
atgttcctgcggcggctgggcggctggctgccccggccctggggccgcaggaagcccatgaggccagaccccccctacccagagccccggcgggtggacagcagcagtgaaaattctggcagtgactgggacagcgcccctgagaccatggaggatgtgggccaccccaagaccaaggacagcggggccctgcgggtgtctggagctgccagcgagcccagcaaggaggagccccaggtggagcagctgggcagcaagaggatggacagcctgaagtgggaccagcccatcagcagcacccaggagagcggccgcctggaggccggcggggccagccccaagctgcgctgggaccacgtggacagcggcggcacccggcggcctggggtgtccccagagggcggcctgtctgtgcccggccctggggcccccctggagaagccaggccggcgggagaagctgctgggctggctgcggggggagcccggggcccccagccgctacctgggcggccctgaggagtgcctgcagatcagcaccaacctgaccctgcacctgctggagctgctggccagcgccctgctggccctgtgcagccggcccctgcgggccgccctggacaccctgggcctgcggggccccctgggcctgtggctgcacggcctgctgtccttcctggccgccctgcacggcctgcatgctgtgctgagcctgctgacagcccaccccctgcactttgcctgcctgtttggcctgctgcaggccctggtgctggccgtgtctggcagccccatgggcatgaggcggcccctgaccggccgggtgcggggctggaggggcaaggtgcgcagcagaggagagacccgggagcggggctgtgaccggggcgtgggcgccaagggggaggagagcgtgggcttccggaggaaggtgtag

SEQ ID NO: 208286 - DNA, 885 bp, Artificial Sequence
  derived and/or modified sequence
atgttcctgcggcggctgggcggctggctgccccggccctggggcagaaggaagcccatgcggccagacccgccctacccggagcctaggagagtagacagctcatccgagaacagtggaagtgactgggactctgcccccgagaccatggaggatgtgggacatcctaaaaccaaggacagcggagcactgcgcgtcagtcgtgctgccagcgaaccttcaaaggaggagccgcaggtggagcaactggggagcaagcggatggatagtttaaagtgggaccaaccaatatctagcacccaagagagcggacgactggaggcaggtggggcatctcctaagctgcgatgggaccatgtggacagcggaggtacccgtagaccgggggtttcacctgagggtgggcttagtgtacccggacccggggctccactggagaagccaggtaggcgggaaaaactcctcggctggttgcggggggagcccggtgctccctctcggtacctgggagggcctgaggaatgtttgcagattagcactaatctgacactacacctgctggagctcctggcctctgccctgttggccctgtgttcccgaccactgcgcgccgcattagatacgctcgggctgcgcggcccactgggtctttggcttcatgggctcttgagcttcctggccgctctacacggcctacacgctgtcctgagtttactgaccgcccacccactgcatttcgcctgtctcttcggcctgcttcaggccttagtgcttgctgtgtcattacgtgagcccaatggcgacgaagccgcgactgattgggagtccgagggcttagagcgcgagggagaggagcagaggggtgacccaggtaaaggcctctag

SEQ ID NO: 208287 - DNA, 885 bp, Artificial Sequence
  derived and/or modified sequence
atgttcctgcggcggctgggcggctggctgccccggccctggggccgcaggaaacctatgaggcctgatcccccctatcctgaaccccgtagagtcgactcatccagcgagaattcgggatctgactgggacagtgcgcccgagactatggaggatgtgggtcatcccaaaaccaaagactctggggccctgcgggtgagcagggccgcatctgagccctccaaggaggaacctcaggtggagcaactaggtagcaagaggatggacagcctcaagtgggatcaacccatctcaagcacgcaggagtctggtcgactggaagctggaggagcaagccccaaattaagatgggatcacgtggacagcggcggcaccagacggcccggggtgtccccagaaggaggactgtccgtgcccgggcctggggctcctctggaaaagccggggagacgagaaaagctgctgggctggctgaggggagagccaggggcaccctcacgctatttgggcggccccgaagagtgtctgcagatcagtacgaatttgaccctccacctgctggagctcttggccagcgccctgctggcactgtgtagtaggccgcttcgggcagccctcgacacactgggcctcagaggtcccttgggtttatggctacacgggttgttgtctttcctcgctgccctgcacggactccacgcagtgctgtcccttcttacagcccatcccctgcactttgcctgtctatttggccttcttcaggcattggtgctagctgtcagcctgcgggagcctaacggagacgaggcagccacagactgggagtcggagggcctggagcgcgagggcgaggagcagagaggagatcccggaaagggtctttag

SEQ ID NO: 208288 - DNA, 885 bp, Artificial Sequence
  derived and/or modified sequence
atgttcctgcggcggctgggcggctggctgccccggccctggggcagaaggaagcctatgaggccagatcctccttaccccgagcctcgtagagtcgacagttctagtgagaattcgggatcggattgggactcagcccccgaaactatggaggatgttggccaccctaaaaccaaagattcgggggcactgagagtgagcggggcggccagcgaacctagcaaagaggaaccgcaggttgagcagttggggtctaagcggatggatagcctaaagtgggatcagcctatctcctccacccaggaatccggaaggctcgaagcagggggggcctctcccaaactgcggtgggaccacgttgactccggcgggacccgtcgccctggagtgagccccgagggaggacttagcgtgcccggtcctggagcccccctggagaagcccggcaggagggaaaagttgctcggatggttgcggggagaacctggagcaccatccaggtacctcgggggtccagaggagtgcctgcagatttccaccaacctaacgcttcatttgctggagctgttagcctccgccctgctggccctgtgttctcggccgctgcgagccgcactcgataccttgggattgcgagggcccttgggcctgtggctgcacggtctgctgagctttctggctgccttacatggattgcacgccgtgctgtccctgttgaccgctcatcctttgcatttcgcttgcctcttcggtctgctccaggctttagttctggccgtcagtctgagggagcccaacggagacgaggccgccacagactgggaaagtgagggtttggaacgcgagggggaagagcagcgcggcgaccctgggaagggtttgtag

SEQ ID NO: 208289 - DNA, 885 bp, Artificial Sequence
  derived and/or modified sequence
atgttcctgcggcggctgggcggctggctgccccggccctggggcagacggaaacctatgcgtccagatcccccatatcccgaaccaagaagggtcgacagcagtagtgagaacagcggaagcgactgggattcagcgcccgaaacgatggaggatgtgggacaccccaagacaaaggattccggcgcgctgcgggtcagtcgggccgccagcgaacccagtaaggaggagccgcaggtggaacagttaggaagtaaaagaatggattcgttgaagtgggatcagccaatcagttctacccaagaatccggacgtttggaggctgggggcgcgtcccccaagttgaggtgggaccatgtggactctgggggcactcggagacctggtgtttctcccgaaggcgggcttagtgtgcctgggccgggtgcacccctcgaaaagccgggtcgccgtgaaaagttgcttggctggctgcgaggtgaaccaggcgccccttcaagatacctaggagggcccgaggagtgcctgcagatatctaccaaccttacactgcacttactggaacttctcgcgtccgcactgcttgcgctatgctctaggcccctcagggctgccttggacacactgggacttagaggacccctcggactctggctgcacggtctgctgtccttcctggccgcacttcatggactgcacgccgtgctctctttgctgacagctcatccactgcacttcgcctgtcttttcggcctgctgcaggccctggttctggccgtatcattacgcgaacccaacggcgatgaagcagctactgattgggagtccgagggactggaacgggagggtgaggaacagagaggggacccaggtaagggactatag

SEQ ID NO: 208290 - DNA, 885 bp, Artificial Sequence
  derived and/or modified sequence
atgttcctgcggcggctgggcggctggctgccccggccctggggcagacgaaaaccgatgagacccgatccaccctaccccgaaccgagaagggtcgattctagcagcgaaaatagcggtagtgactgggatagtgcccccgaaacaatggaagatgtcggtcatccaaagacaaaggactccggcgccctccgcgtaagccgagcagcctctgagccaagcaaagaggaacctcaggtggagcagctgggatccaagaggatggattctctgaaatgggaccagcccatttcaagcacacaagagtctgggcgattagaagctgggggcgctagcccgaaactgcggtgggatcatgtggattccggcggtaccaggagacccggagtgagtccagaggggggcctctctgtccctggcccaggcgcccctctggagaaacccggccggcgcgaaaaactccttggatggctcaggggcgagcctggggctccgagtcgttacttggggggccctgaggaatgtctgcaaatctcgacgaaccttaccctgcaccttcttgaactgctcgcgtctgcgctgctggccctttgctctcggcccctcagggccgcgctggacaccctgggcctcagggggccacttggtctttggttgcatggtctcctgtcctttctggcagccttgcatggcctgcacgccgtgctcagcctcctgaccgcacaccccctgcattttgcttgcctgttcggtctgcttcaggccctggtgctggccgtaagtctccgagagcccaacggggacgaggccgcaactgactgggaaagcgaaggcctagaaagagagggggaagagcagcgtggcgatccaggcaagggtctttag

SEQ ID NO: 208291 - DNA, 885 bp, Artificial Sequence
  derived and/or modified sequence
atgttcctgcggcggctgggcggctggctgccccggccctggggccgccggaagccgatgagacccgacccaccctacccagagcccagaagggtggattctagcagcgagaattcgggctctgactgggactccgcccccgagacaatggaggatgtgggccatccaaaaactaaagacagtggggccctccgcgtgagcagggctgcctctgagccttcaaaggaggaaccacaggttgagcagctgggatctaagcggatggatagtctgaaatgggaccagcccatttcctcaacacaagagagcggaagactagaggccggcggggccagtccaaaacttagatgggaccatgtagatagcggaggtacccggcggccaggtgtctcccccgaaggcggcctgagcgtgcctgggcctggcgctcctcttgagaagcctggacgaagagagaagctactggggtggttgcggggcgaacctggcgcccctagtaggtacttaggcgggccagaggaatgcttacaaatctccacgaacctgactcttcacttgctcgagttactggctagcgctctgttggcgctctgcagcagaccgcttagagctgccttggatacccttgggctgcgtgggcctctgggtctctggctccacggactgctcagtttcctggctgctctgcatggcctgcacgccgtgctcagccttctgactgcacatccgctacactttgcatgcttgtttggactccttcaggctctagtgctggcagtgtccctgcgcgaacctaacggcgacgaggccgccacggactgggagagcgaaggcctggagcgggagggcgaggaacagcggggagaccccgggaagggcctgtag

SEQ ID NO: 208292 - DNA, 885 bp, Artificial Sequence
  derived and/or modified sequence
atgttcctgcggcggctgggcggctggctgccccggccctggggccggcggaagcccatgcgtccggaccccccttatccagaaccccgccgtgttgacagtagtagtgaaaacagtggcagcgactgggattctgcccccgagacaatggaggacgtcgggcatccaaagacaaaagacagcggcgcgttgcgcgtctctggggctgcatctgagcccagcaaggaggagcctcaggtggagcagctagggagcaagcgcatggacagtctgaagtgggaccagccaatttcgtccacacaagagtctgggcgcctggaggccggtggtgcctccccgaaactgagatgggaccacgtggactcaggaggcacccgtcgaccgggagtttcccctgaagggggtctgtcggtccccgggcccggggcgccgctggagaaaccagggcgcagggagaagctccttggatggcttcggggagagcccggcgcgccatctagatatctaggaggacccgaagaatgtctacagatcagcactaacctcactctccacctccttgaactgctcgccagcgcccttctggcactgtgttcacgcccgctgagagcagcgcttgacaccttagggctcaggggacctttgggtctctggttacacgggcttctgtcctttctggcggcattgcacggcttgcacgccgtattgtctcttttgacggcccaccccctgcactttgcctgtttattcgggctattacaagccctggtgctggccgtgtcgctgcgggagccaaacggggacgaagctgctacagactgggagtcagaggggctcgaacgggaaggagaggagcaaaggggcgaccccggaaaaggcctttag

SEQ ID NO: 208293 - DNA, 936 bp, Artificial Sequence
  derived and/or modified sequence
atgttcctgcggcggctgggcggctggctgccccggccctggggcaggagaaaaccaatgcgtcccgatcctccatatcccgaaccacggagggtggattcatcaagcgagaactccggctccgactgggactcagcccctgagaccatggaggacgttggccaccctaaaaccaaggacagtggagccctgagagtgtccggggcggcctcggagcccagcaaggaggaaccgcaggtcgagcaattaggttcaaagcgaatggacagcctcaaatgggaccaaccaatttccagtacccaggagagtggaaggttggaggctggcggagcttctccgaagctccgctgggaccatgtggacagtggcggcactcggagaccgggagttagccctgagggcggcctttccgtccctggccccggagcgcccctcgaaaagcccgggaggagggaaaagctgctgggatggctaaggggcgagcccggagccccctcacggtatctgggtggacccgaggagtgtttgcagataagtacaaacttgaccttgcatctcctcgagttgttggcttccgccctgttggcgttgtgttccagaccattgcgagcagccctcgatacactcggactgcggggccctctcggcctgtggttgcatggacttcttagcttcctagctgctctgcatggcctccatgcggtcttgtcgctcctgaccgctcaccctctgcattttgcatgtctgtttggacttctgcaagctctcgttttagctgtgagtggaagccccatggggatgcggaggccactgacagggcgcgtgaggggctggagaggaaaggtaagaagtaggggggagacacgggaaagaggttgcgatcgtggcgttggtgccaaaggagaagaatctgtcggattcagacggaaggtttag

SEQ ID NO: 208294 - DNA, 885 bp, Artificial Sequence
  derived and/or modified sequence
atgttcttgcgtaggcttggaggctggctgcccaggccatggggacgtcggaaacctatgaggcccgacccaccttaccccgaaccgagacgcgtggattcctctagcgaaaatagcggctccgattgggactccgcccctgaaactatggaggatgtcggccacccaaagaccaaggattccggcgctctacgggtatcacgcgcagcatccgagccatcaaaggaagagccccaggtagaacaactgggtagcaagcggatggattctctgaagtgggatcagccgatctcatcgactcaagagtcaggccgtctggaagccggaggcgctagtcctaagttgcggtgggatcatgttgactctgggggtaccagacggcctggtgtatctccggaggggggattgtccgtcccgggaccaggggctcccctggaaaagcccggtcgtcgggaaaaactgctgggatggttacggggtgaaccaggcgctccgtctcggtacttgggagggccagaggagtgcctgcaaatatccaccaacttgaccctccaccttcttgaactcctcgcatcagcgctccttgccttgtgctcgcgccctttacgtgccgcattggatactctggggctacggggaccattggggctgtggctgcatggacttctgtcattcctcgcggcactgcacggcctgcatgccgttttaagcctcctgacagctcacccccttcattttgcatgtttattcggactcctacaggctctagtcttggccgtctccctacgggagcccaatggggatgaggcggcaacagattgggagtccgagggtctggagagagaaggagaggagcagagaggcgaccctggtaagggcttgtag

SEQ ID NO: 208295 - DNA, 885 bp, Artificial Sequence
  derived and/or modified sequence
atgtttctgcgaagattaggcggatggctgccccgaccttgggggaggagaaagccaatgcgccctgaccccccttacccagagccacgtagagtggattcatcatccgagaattccggtagcgactgggactctgctcctgagacaatggaagacgtggggcaccctaagactaaagacagcggagcccttagggttagtagggccgcatcggagccttcaaaagaggagcctcaggtcgaacagcttggcagcaaacgaatggattcccttaagtgggatcaacccattagcagcactcaggaatcaggacgcctggaagccggaggtgcatccccaaaactgcggtgggaccacgtagacagtggcggtactcgcagaccaggcgtctcacctgaagggggtctgtccgtgccaggcccaggagccccactagaaaagccgggtcgcagggaaaagttgctgggatggttacgcggagagcctggggcaccctcaagatatctgggaggcccagaagaatgccttcagatttcaacaaatctgacccttcatctcttagagctcttagccagcgccctgctcgcgctgtgctctcgcccattacgggcagccttggatactctcggccttagagggcctctcggtctgtggctccacggtctgctctccttcctcgctgcgctccacggcttgcatgcagtcctgtcactgctcactgctcacccactgcactttgcttgcctgtttggcctcctgcaggcattggtgttggcggtttctttgcgagaacctaatggagatgaggccgctactgactgggaatccgaaggtctggaaagagagggagaggagcaacggggagaccctggaaagggattgtag

SEQ ID NO: 208296 - DNA, 885 bp, Artificial Sequence
  derived and/or modified sequence
atgtttcttcgaaggctcggcggatggctaccccgaccatggggacgcagaaagcctatgagaccagatcccccttaccccgagccaaggagagtggactcaagcagcgaaaactctgggtcagattgggactcagcacccgaaaccatggaggacgtgggccaccctaagacgaaagatagcggcgctttacgtgtctctggtgccgctagcgaaccttccaaagaggaaccgcaggttgagcagctcgggagtaagaggatggattccctgaagtgggaccagccaatttcctccactcaggagtctggtcggcttgaggctggcggagccagcccaaaattaagatgggatcacgtagactccgggggtacaaggcgccctggcgtgagtcccgagggtggcctgtctgtccccggaccaggagcaccgctcgagaagcctggacgcagggaaaaactcctgggctggttacggggagagcctggagcgcctagccgatatctgggaggaccggaagagtgtctacagatctccacaaatctcacactgcacctgttagagctcctggccagcgccctactggctctgtgctcccggccactgagggccgctttggatacattaggactaagagggcctcttgggctgtggctccacggcctgttgtctttcctggctgcgcttcatggactccacgctgtgctctccctgctgactgcccaccctttgcatttcgcatgtctctttggcctgctgcaggcacttgtcctggccgtatccctgagagagccaaacggagatgaagcagcaaccgattgggaaagcgaaggtctggagagggaaggagaggagcaacgcggtgacccagggaagggtctgtag

SEQ ID NO: 208297 - DNA, 885 bp, Artificial Sequence
  derived and/or modified sequence
atgttcttacggagactgggaggttggctgccgagaccatggggcagacggaagcccatgagacccgatcctccctatcctgaaccccgtcgcgtcgatagtagtagcgaaaactccggatctgactgggattccgctcctgaaaccatggaagatgtggggcatcctaaaactaaggatagcggggctctgcgggttagccgagccgcatccgaaccttctaaagaggagcctcaggtggagcagctgggttcaaagcggatggattctctgaagtgggaccagccgatatcgtcaacacaggaatccggaagactcgaggccggtggcgctagcccaaaactccggtgggaccacgtcgatagtggcggaacccgaaggcccggagtgtcacctgaagggggactgtcagtgccgggtcctggcgctcccttggagaagccaggcagacgggagaagctgttaggctggctccggggagaacctggggcaccttcaagatacttggggggtcccgaggagtgcctccaaatcagcacgaacctgacactgcacctcctggagctgctggcgtccgcattactagctctgtgctcacggcctctgagggcagcactggacacactcggccttcgcggaccactggggttatggctgcacggcctgctcagttttttggctgcactgcatggcctgcatgctgttctgtccttgctgacggcacaccccttgcatttcgcttgtttgttcggcctgctgcaggcactagtcttagccgtatcactccgggagccgaatggcgatgaggcggctacagactgggaatcagaaggcttagagagagagggcgaagagcagagaggagaccctgggaaggggctctag

SEQ ID NO: 208298 - DNA, 885 bp, Artificial Sequence
  derived and/or modified sequence
atgttcctgcgccgattaggaggatggcttcccaggccttgggggagacgtaaacccatgcggccagatcccccttatcctgagcccagaagagtggatagttcaagtgaaaactcaggatctgattgggacagcgcccctgaaacaatggaagacgtgggtcaccctaaaacaaaggacagcggcgcacttcgggtgagcagggccgcatccgaaccctctaaggaggaaccgcaagttgagcagttggggtccaaaaggatggacagccttaaatgggatcagcccatctctagcacccaagaatcgggaagactggaggccggaggggcttcacccaaactgcggtgggaccacgtggatagtggcggtaccaggagacctggggtgtcacccgaagggggtctttccgtccccggacccggagcaccgctggagaaacccggtagacgcgagaagcttctgggatggctgcgcggtgagccaggagcacccagtaggtaccttgggggacctgaagaatgcctccagatatccactaatctgaccctacacttactggaactgcttgcttcagctctgctggccctatgctctcgccctctgcgtgcggcactggatacactgggacttcgtggtccgctgggtctgtggctacatggattactgtctttcctggcagctctgcatggtttacacgccgtgctgtcactgttaactgcacaccctctgcacttcgcttgcctgttcggcttgctccaggccttagtgctggccgttagcctgcgtgagcctaacggggacgaggccgctacggattgggagtcagaaggactcgagcgggagggcgaagagcagcggggtgaccctgggaagggactgtag

SEQ ID NO: 208299 - DNA, 885 bp, Artificial Sequence
  derived and/or modified sequence
atgttcctgagaaggctgggcggttggctcccaaggccatggggcagaagaaagccgatgcggccagaccctccttaccctgaacctagacgtgtagatagttcaagcgaaaactccgggtcagactgggattccgcacccgaaacaatggaggacgtaggacaccccaaaactaaggattccggcgctttaagggtaagtcgcgctgccagtgaacctagcaaagaggaacctcaggtagagcaactgggcagcaagaggatggactccctgaaatgggaccagcccatctcctccacacaggaatccggccgactcgaagccggtggcgcatctcctaagctgcgatgggatcacgtcgatagcggagggacccgcaggccaggcgtatcacctgaggggggactatccgtccctggacctggcgctcccctggaaaaacctgggagacgggagaaactactgggctggctcaggggcgaacccggagctccaagtcggtatctgggaggaccagaggaatgtctgcagatcagcactaatcttacactgcatcttctggaacttctggcctcagccttgttggctctctgctcacgccctcttagggcagctcttgacaccctgggactgcgaggccctctggggctgtggctgcatggactactgtcattcctggcggctttacacggtctacacgcagtgctttcactcctcactgcccaccccctgcatttcgcctgccttttcggcctcctccaggcgttagtgctggccgtttcactgagggagcccaacggcgacgaagcagccacagactgggagtctgagggcctggagcgtgaaggggaggaacaacggggagatcctggtaaaggactgtag

SEQ ID NO: 208300 - DNA, 885 bp, Artificial Sequence
  derived and/or modified sequence
atgttcctgcggaggctgggtggctggctgccacgcccatgggggaggcggaaaccaatgaggccagatccgccatatcctgagccgcgacgcgtagactccagcagtgagaacagcggaagtgattgggattcagccccagaaactatggaagatgtgggacatcccaaaaccaaagacagcggggctctccgcgttagcggagcggcaagtgagccttccaaggaggagcctcaggtggaacagcttggaagtaagaggatggatagtttaaagtgggaccagccaatctcatctacacaggagtccggacgcctcgaagccggtggtgcttcccctaaactcagatgggaccacgtcgacagcgggggaacaaggagacctggagtttctccagagggaggcctttccgtaccaggacccggtgcacccctcgaaaaacccggaagacgcgaaaaattactcggctggctcaggggcgagcccggagcaccctcacgatatctaggcggtcccgaggagtgcttacagatctcgaccaacctgacattacatttgcttgagctgctggcaagcgctttactagcactgtgcagcagacccctacgggctgcgctggataccctgggtttgcggggacccctgggtctgtggctgcacggcctcctgtcctttttggcagcactgcacggcctgcatgctgtgctttccctactgacagcgcacccattacatttcgcctgtctgttcggactgctgcaggccctggtgttggccgtgagcttgcgcgaacctaatggggatgaggctgcaaccgactgggaatctgaagggctcgaaagagagggagaagaacagcgcggagatccaggaaagggcctgtag

SEQ ID NO: 208301 - DNA, 936 bp, Artificial Sequence
  derived and/or modified sequence
atgttcctgaggagactcggcggatggctgcctcgaccttggggtaggcgcaaaccaatgaggcctgaccctccctacccagagccccgtcgagtagattcttcttctgaaaactccgggagcgactgggacagtgccccagaaacaatggaggacgtggggcatcccaagactaaggattctggcgcactaagggtttccggagcggcttctgagccaagcaaagaggaaccccaagtggagcagctggggtctaagagaatggatagcctgaagtgggatcagccaattagttctactcaggagagcggcagactcgaggctggaggcgcatcccctaagcttaggtgggaccacgtggatagcggcggaacccgcagaccaggcgtgtctcccgagggagggctatccgtgcctggacctggagcacctttggagaagcctgggagacgggaaaaactcctgggctggcttaggggggagcctggggctccatccagatacctcgggggtccggaggagtgcttacagatatcaacaaatctcacactgcatctactcgagctccttgcatcggcactattggcactctgttcacggccactgagggctgcactggataccctgggcctgcgcggtcccctggggttatggctgcacggcctgctgtcttttctcgccgcactgcacgggttacacgccgtcctgtcgcttctgaccgctcatccactacattttgcgtgcctgttcggcctgcttcaggcgctcgtcctcgccgttagtggttcacccatgggtatgagaagaccactgactggcagagtgcgtggatggaggggtaaagtgcgatcaagaggagaaacccgcgagaggggctgcgataggggcgtgggtgccaaaggagaggaaagcgtggggttcagacgaaaggtatag

SEQ ID NO: 208302 - protein, 540 aa, Artificial Sequence
  derived and/or modified sequence
MWLLRCVLLCVSLSLAVSGQHKPEAPDYSSVLHCGPWSFQFAVNLNQEATSPPVLIAWDNQGLLHELQNDSDCGTWIRKGPGSSVVLEATYSSCYVTEWDSHYIMPVGVEGAGAAEHKVVTERKLLKCPMDLLARDAPDTDWCDSIPARDRLPCAPSPISRGDCEGLGCCYSSEEVNSCYYGNTVTLHCTREGHFSIAVSRNVTSPPLLLDSVRLALRNDSACNPVMATQAFVLFQFPFTSCGTTRQITGDRAVYENELVATRDVKNGSRGSVTRDSIFRLHVSCSYSVSSNSLPINVQVFTLPPPFPETQPGPLTLELQIAKDKNYGSYYGVGDYPVVKLLRDPIYVEVSILHRTDPYLGLLLQQCWATPSTDPLSQPQWPILVKGCPYIGDNYQTQLIPVQKALDLPFPSHHQRFSIFTFSFVNPTVEKQALRGPVHLHCSVSVCQPAETPSCVVTCPDLSRRRNFDNSSQNTTASVSSKGPMILLQATKDPPEKLRVPVDSKVLWVAGLSGTLILGALLVSYLAVKKQKSCPDQMCQ

SEQ ID NO: 208303 - DNA, 120 bp, Artificial Sequence
  derived and/or modified sequence
cagaaaggtggagtggaagggaaatggcaggcagatgctgtcctgtcctggtgccctttggcttttgccgttgtcccctccaaacagcttagcgagctctggtatatatgttccgactag

SEQ ID NO: 208304 - DNA, 1623 bp, Artificial Sequence
  derived and/or modified sequence
atgtggctgctgagatgcgtgctgctgtgcgtgagcctgagcctggccgtgagcggccagcacaagcccgaggcccccgactacagcagcgtgctgcactgcggcccctggagcttccagttcgccgtgaacctgaaccaggaggccaccagcccccccgtgctgatcgcctgggacaaccagggcctgctgcacgagctgcagaacgacagcgactgcggcacctggatcagaaagggccccggcagcagcgtggtgctggaggccacctacagcagctgctacgtgaccgagtgggacagccactacatcatgcccgtgggcgtggagggcgccggcgccgccgagcacaaggtggtgaccgagagaaagctgctgaagtgccccatggacctgctggccagagacgcccccgacaccgactggtgcgacagcatccccgccagagacagactgccctgcgcccccagccccatcagcagaggcgactgcgagggcctgggctgctgctacagcagcgaggaggtgaacagctgctactacggcaacaccgtgaccctgcactgcaccagagagggccacttcagcatcgccgtgagcagaaacgtgaccagcccccccctgctgctggacagcgtgagactggccctgagaaacgacagcgcctgcaaccccgtgatggccacccaggccttcgtgctgttccagttccccttcaccagctgcggcaccaccagacagatcaccggcgacagagccgtgtacgagaacgagctggtggccaccagagacgtgaagaacggcagcagaggcagcgtgaccagagacagcatcttcagactgcacgtgagctgcagctacagcgtgagcagcaacagcctgcccatcaacgtgcaggtgttcaccctgcccccccccttccccgagacccagcccggccccctgaccctggagctgcagatcgccaaggacaagaactacggcagctactacggcgtgggcgactaccccgtggtgaagctgctgagagaccccatctacgtggaggtgagcatcctgcacagaaccgacccctacctgggcctgctgctgcagcagtgctgggccacccccagcaccgaccccctgagccagccccagtggcccatcctggtgaagggctgcccctacatcggcgacaactaccagacccagctgatccccgtgcagaaggccctggacctgcccttccccagccaccaccagagattcagcatcttcaccttcagcttcgtgaaccccaccgtggagaagcaggccctgagaggccccgtgcacctgcactgcagcgtgagcgtgtgccagcccgccgagacccccagctgcgtggtgacctgccccgacctgagcagaagaagaaacttcgacaacagcagccagaacaccaccgccagcgtgagcagcaagggccccatgatcctgctgcaggccaccaaggacccccccgagaagctgagagtgcccgtggacagcaaggtgctgtgggtggccggcctgagcggcaccctgatcctgggcgccctgctggtgagctacctggccgtgaagaagcagaagagctgccccgaccagatgtgccagtag

SEQ ID NO: 208305 - DNA, 1623 bp, Artificial Sequence
  derived and/or modified sequence
atgtggctgctcaggtgtgtcttactgtgtgtgtcactgagtctagctgtgagtggccagcacaaacctgaggctccagattacagttctgtcttacattgtggcccttggtcttttcagttcgctgtgaatctgaatcaggaggctacctcaccccccgtactgattgcctgggataaccagggactgctgcacgaacttcagaacgacagcgattgtggaacatggatcaggaagggccccgggagttcagtggtgctggaagcgacctactcctcctgctacgtcacagagtgggacagccactacataatgccagtgggtgtcgagggtgccggtgccgcagaacacaaagtagtgactgagcgtaagctgctgaaatgtcccatggatcttctagctagagatgctcccgataccgactggtgcgactccatacctgctcgcgatcggctgccttgcgcaccatctcccatcagcagaggcgactgcgaggggctgggttgctgctattcttctgaagaggtcaacagttgttattatggaaataccgtgaccctgcactgtacaagagaagggcacttctccatcgccgtctctcgcaatgtgacctcccctcccctgctcttggactccgtacgcttagccctgcgtaacgattctgcttgcaatccggtgatggctacacaggctttcgtcctgttccagtttccatttacctcatgtggtaccacccggcagataaccggcgatagagctgtctatgagaatgaactcgtggctacacgagatgtcaagaatggttcccgtggctccgtcacacgagacagtatctttcgcctccatgtgtcctgcagctattccgtgtctagcaacagtctgcccatcaacgtccaggtgttcacacttccgcctcctttccctgagactcagcctgggccattaacactcgagttacagatcgctaaggataaaaattatggcagttactatggcgtaggggattatcctgtggttaagctcctgagggacccaatctatgtcgaagtcagcatactgcaccggactgatccctacctgggactgttacttcagcagtgttgggccacaccatcaaccgatcctttgtctcagcctcagtggcctatcctggtaaaaggatgtccctatataggagacaactatcagacccagttgattcctgtccagaaggcactggatctgcccttccccagccatcatcagcgctttagcatctttacctttagctttgtcaatcccacagtggaaaaacaagcgttacgagggccagtgcatcttcactgcagcgtatccgtgtgtcagcctgccgagacacctagttgtgtcgtcacttgtccggatctgtcaagacggagaaattttgataacagtagccagaatactaccgcttcagtctcctctaaggggcccatgatcctgttacaagcaaccaaggaccctcctgaaaagctgagagtcccagtcgactccaaggtgctttgggtagccgggctgagtgggaccctaatcctcggtgccttattagtgtcatacttggccgtcaaaaagcagaaaagctgcccagatcagatgtgtcagtag

SEQ ID NO: 208306 - DNA, 1623 bp, Artificial Sequence
  derived and/or modified sequence
atgtggctgctgcgctgtgtgctgctgtgtgtgtccctgagcctggccgtgtctggccagcacaagccagaggccccagactacagctctgtgctgcactgcggcccctggagcttccagtttgctgtgaacctgaaccaggaggccaccagcccccctgtgctgattgcctgggacaaccagggcctgctgcacgagctgcagaatgacagcgactgtggcacctggatcagaaaaggacctggcagctctgtggtgctggaggccacctacagcagctgctacgtgacagagtgggacagccactacatcatgcctgtgggcgtggagggcgctggagctgctgagcacaaggtggtgacagagaggaagctgctgaagtgccccatggacctgctggccagagatgccccagacacagactggtgtgacagcatcccagcccgggaccggctgccctgtgcccccagccccatcagcagaggagactgtgagggcctgggctgctgctacagcagcgaggaggtgaacagctgctactacggcaacacagtgaccctgcactgcacccgggagggccacttcagcattgctgtgtccagaaatgtgaccagcccccccctgctgctggacagcgtgcggctggccctgagaaatgattctgcctgcaaccctgtgatggccacccaggcctttgtgctcttccagttccccttcaccagctgtggcaccacccggcagatcactggagacagagctgtgtatgaaaatgagctggtggccaccagagatgtgaagaatggcagccggggctctgtgacccgggacagcatcttccggctgcacgtgtcctgcagctacagcgtgagcagcaacagcctgcccatcaacgtgcaggtgttcaccctgcccccacccttccctgagacccagcccggccccctgaccctggagctgcagatcgccaaggacaagaactacggcagctactatggagtgggggactaccctgtggtgaagctgctgcgggaccccatctacgtggaggtgtccatcctgcacaggacagacccctacctgggcctgctgctgcagcagtgctgggccacccccagcacagaccccctgagccagccccagtggcccatcctggtgaagggctgcccctacatcggggacaactaccagacccagctgatccctgtgcagaaggccctggacctgcccttccccagccaccaccagcgcttcagcatcttcaccttctcctttgtgaaccccaccgtggagaagcaggccctgcggggccctgtgcacctgcactgcagcgtgtctgtgtgccagcctgctgagacccccagctgtgtggtgacctgcccagacctgagcagaagaagaaactttgacaacagcagccagaacaccacagcctctgtgagcagcaagggccccatgatcctgctgcaggccaccaaggaccccccagagaagctgcgggtgcctgtggacagcaaggtgctgtgggtggccggcctgagcggcaccctcatcctgggcgccctgctggtgtcctacctggccgtgaagaagcagaagagctgcccagaccagatgtgccagtag

SEQ ID NO: 208307 - DNA, 1623 bp, Artificial Sequence
  derived and/or modified sequence
atgtggctgctgcggtgcgtgctgctgtgcgtgagcctgagcctggcggtcagcggacagcacaaaccggaggcccccgattattccagtgtgctgcactgcggcccttggagctttcagtttgctgtgaacctcaaccaggaggccactagtcctcctgtactcattgcctgggacaatcagggactattgcacgagctgcaaaacgattccgactgcggtacctggatcaggaagggccctggcagctctgttgttctggaggcaacttattcttcatgctatgttactgaatgggacagccactatatcatgcctgtgggcgtcgagggcgctggagccgcagagcacaaggtggtaaccgagcgcaagctcctgaagtgcccaatggatctactagcccgcgacgcaccggacacggactggtgtgattcgattcccgctcgcgataggctaccatgtgccccatctcccatctctaggggcgactgcgagggccttggttgctgttatagctccgaggaagtgaattcctgttattatggcaacacggtaacgctgcattgcaccagagagggacatttctctatcgctgtctcgagaaatgtcacaagccctcccctcttgctggacagcgttcgacttgctctccggaatgactctgcttgcaacccagtgatggcgacgcaggctttcgttctcttccaatttcctttcactagctgcggcacaacccgccagattaccggagacagagctgtttacgaaaacgagctggtggccactcgagacgtcaaaaatggttcacggggtagtgtcacccgcgactccatattcagactgcatgtgagttgttcctattccgtaagcagcaattctttgccgatcaatgttcaggtgtttaccctgcctccaccattcccagaaacacagcccggaccactaactctcgaacttcagattgccaaagacaaaaattacggctcatactatggggtaggggattaccccgttgtgaagttgctgcgggatccgatttacgtggaggtctctatcctccataggactgacccctacttgggcttgttgctacagcagtgctgggctactcctagcacagacccactgagtcagccacagtggccaatactggtgaagggatgtccttacattggcgataactatcaaacacagttaataccggttcagaaagcccttgatctcccattcccctcccatcaccagcgcttctctatatttactttctcttttgtcaatccaaccgtcgaaaaacaagccctgcgtgggccggttcaccttcattgctccgtttcagtttgccagccagccgaaacacccagctgtgtagtcacatgccctgacctttcaaggagacggaattttgacaatagtagtcaaaatactactgcatcagtctcctcgaaggggcccatgatcttgctccaggctactaaggatcctccagaaaagctgagagtccctgtggattctaaggtgttatgggttgcaggcctgagcggcacccttatccttggggctttgctcgtgtcgtatttggctgtaaagaagcaaaaaagttgtcctgaccaaatgtgccagtag

SEQ ID NO: 208308 - DNA, 1623 bp, Artificial Sequence
  derived and/or modified sequence
atgtggcttctcaggtgtgtcctgttgtgcgtgagcctcagcctggcagtgagtggccagcataaaccagaagcaccagattactcatcagtcctccattgtggcccttggtcattccaattcgccgtcaatcttaaccaggaggctacctcgccacccgtgctgattgcctgggacaatcaagggctcctgcatgagctgcaaaatgatagcgactgtggcacgtggattcggaaggggcctggttcttcggtggtgctggaggccacttacagctcctgttacgttactgagtgggattcacattacattatgccggtgggggtggaaggcgctggcgcagccgaacataaagtcgtcaccgagaggaaactcctgaaatgccctatggacctgctggccagggacgctccggacaccgattggtgcgactccattcctgccagggatcgcctcccttgcgccccatctcccatttcccggggagactgtgaaggcctcggttgctgctactccagtgaagaagtcaacagctgctactatggcaataccgtgacgcttcactgcaccagggagggccacttttccatcgctgtgtcaaggaacgtaacctccccacccctgttgctggatagcgtgagactggcactgcgtaacgactccgcatgtaaccccgttatggctacgcaggccttcgtcctttttcagtttccatttacttcgtgcggaaccacaagacagataactggcgatcgggctgtgtacgaaaatgagctggtcgctactcgggacgtaaagaacggatcccggggtagcgttacgagggattctatcttccggctgcatgtaagttgttcgtactctgtatcttccaattccctccccatcaacgtgcaggtcttcactctgcccccaccattccccgagacacagccgggaccccttacactcgagttacaaatcgctaaagacaagaactatgggtcatactacggcgtaggcgattaccccgtcgtaaaattactcagggatcccatatatgtagaggtgtcaatattacaccgaactgatccatatctggggctgctcctgcagcagtgctgggccacccccagcactgacccccttagccagccacagtggcccattctggtgaagggctgcccctacatcggagacaattaccagacccagttgattcccgtacagaaggctctggacctgccttttccaagtcaccaccaacggttcagtatttttacattctcctttgttaatccaacagtggagaagcaagctctgaggggccctgtgcatctgcactgctctgtgagcgtctgccagccagccgagacccccagttgcgtcgtcacgtgccccgacctgagtagaaggcggaattttgacaacagctcacaaaacaccacggcctcggtcagcagcaaggggccaatgatcctgctccaggccaccaaagaccctcccgaaaagttacgggttcccgtggacagtaaagtcctctgggttgcgggactgtcaggcacattgatcctgggtgccctacttgtgagctatcttgcggtaaagaaacagaagtcctgcccagaccaaatgtgccagtag

SEQ ID NO: 208309 - DNA, 1799 bp, Artificial Sequence
  derived and/or modified sequence
gaattcccctttctgaaggcatcccacctgagtgtcacaaagatgtgcagctgaaaacaagcctgacttctgtatataaaggaatctgggcaggcagaccctcggctcttgggagaggaggcggagagtctgcagccggcaggaactcctggtagcattatgtggctgctgcggtgcgttttgctgtgtgtttcattatctcttgctgtgagtggccagcataagcctgaggcaccagattattccagtgtgctccactgtgggccgtggagcttccagtttgctgtaaacctcaaccaggaggcaacgtctcctcctgtactaatagcttgggacaaccaagggctgctgcacgagctgcagaatgactccgactgtggcacctggataagaaaaggtccaggcagctccgtggtgttggaggcaacctatagcagctgctatgtcactgagtgggactcccactacatcatgccagttggagttgaaggagcaggcgcggctgaacacaaggtggttacagagaggaagctgctcaagtgtcctatggatcttctagcccgagatgctccagatactgactggtgtgactccatcccagcacgggacagactgccatgtgcaccttcacccatctctcgaggagactgtgaagggctaggctgttgttatagctctgaagaggtgaattcctgctactatggaaacactgtgaccttgcattgtacccgagagggccatttctctattgctgtgtctcggaacgtgacctcgccaccactgctcttggattctgtgcgcttggcccttaggaatgacagtgcgtgtaaccctgtgatggcaacacaagcttttgttctgttccagtttccatttacttcctgtggcaccacaagacagatcactggagaccgagcagtatatgaaaatgaactggtggcaactagggatgtgaaaaatgggagccgtggctctgtcactcgtgacagcatcttcaggctccatgtcagctgcagctactcagtaagtagcaactctctcccaatcaatgtccaggttttcactctcccaccaccctttcctgagacccagcctggacccctcactctggaacttcagattgccaaagataaaaactatggctcttactacggtgttggtgactacccagtggtgaagttgcttcgggatcccatttacgtggaggtctccatccttcacagaacagacccctacctggggctgctcctacaacagtgttgggcaacacccagcactgaccccctgagtcagccacagtggcccatcctggtaaagggctgcccctacattggagacaactatcagacccagctgatccctgtccagaaagccttggatcttccatttccctctcaccaccagcgcttcagcatcttcaccttcagctttgtgaaccctacagtggagaaacaggccctcaggggaccggtgcatctgcactgcagcgtgtcagtctgccagcctgctgagacaccatcctgtgtggtgacctgtcctgatctcagtcgaagaagaaattttgacaacagttctcagaacactactgctagtgtttctagcaaaggccccatgattctactccaagccactaaggaccctccagaaaagctccgtgttcctgtagactcgaaagttctgtgggtggcaggcctttctgggaccttaatccttggagccttgttagtatcctacttggctgtcaagaaacagaagagttgcccagaccaaatgtgtcaataaaaccagagtgtattccc

SEQ ID NO: 208310 - protein, 524 aa, Artificial Sequence
  derived and/or modified sequence
MPQLSLSWLGLGPVAASPWLLLLLVGGSWLLARVLAWTYTFYDNCRRLQCFPQPPKQNWFWGHQGLVTPTEEGMKTLTQLVTTYPQGFKLWLGPTFPLLILCHPDIIRPITSASAAVAPKDMIFYGFLKPWLGDGLLLSGGDKWSRHRRMLTPAFHFNILKPYMKIFNKSVNIMHDKWQRLASEGSARLDMFEHISLMTLDSLQKCVFSFESNCQEKPSEYIAAILELSAFVEKRNQQILLHTDFLYYLTPDGQRFRRACHLVHDFTDAVIQERRCTLPTQGIDDFLKNKAKSKTLDFIDVLLLSKDEDGKELSDEDIRAEADTFMFEGHDTTASGLSWVLYHLAKHPEYQEQCRQEVQELLKDREPIEIEWDDLAQLPFLTMCIKESLRLHPPVPVISRCCTQDFVLPDGRVIPKGIVCLINIIGIHYNPTVWPDPEVYDPFRFDQENIKERSPLAFIPFSAGPRNCIGQAFAMAEMKVVLALTLLHFRILPTHTEPRRKPELILRAEGGLWLRVEPLGANSQ

SEQ ID NO: 208311 - protein, 454 aa, Artificial Sequence
  derived and/or modified sequence
MPQLSLSWLGLGPVAASPWLLLLLVGGSWLLARVLAWTYTFYDNCRRLQCFPQPPKQNWFWGHQGLVTPTEEGMKTLTQLVTTYPQGFKLWLGPTFPLLILCHPDIIRPITSASAAVAPKDMIFYGFLKPWLGDGLLLSGGDKWSRHRRMLTPAFHFNILKPYMKIFNKSVNIMHDKWQRLASEGSARLDMFEHISLMTLDSLQKCVFSFESNCQEKPSEYIAAILELSAFVEKRNQQILLHTDFLYYLTPDGQRFRRACHLVHDFTDAVIQERRCTLPTQGIDDFLKNKAKSKTLDFIDVLLLSKDEDGKELSDEDIRAEADTFMFEGHDTTASGLSWVLYHLAKHPEYQEQCRQEVQELLKDREPIEIEWDDLAQLPFLTMCIKESLRLHPPVPVISRCCTQDFVLPDGRVIPKGLRPLPFRPREHQGEVTSGFYSLLGRAQKLHRAGVRHG

SEQ ID NO: 208312 - DNA, 1575 bp, Artificial Sequence
  derived and/or modified sequence
atgcctcagctgtccctatcctggcttggccttggacctgtggccgcctccccttggctgctgctcctgctggttggagggagctggctgctggcccgagtcctggcatggacatatacattctatgacaattgccgtcgccttcaatgtttcccccagccgccaaagcagaactggttctgggggcaccaaggacttgtgacccctacggaggaggggatgaaaacgctgacacagttggtgaccacttaccctcaggggtttaaactctggctgggcccaacattcccactccttatcctctgccatcccgatattattcgaccaatcactagcgcgtcagccgctgtcgcccccaaggacatgattttctatgggtttcttaagccatggctaggggacggattgttgctgagtggcggagataaatggtcccgacatagacgaatgctcactcccgccttccacttcaatatcctgaagccctacatgaagatctttaacaagagcgttaacattatgcacgataaatggcagaggctcgcatcagaagggtcagccagattggacatgttcgagcacattagccttatgacgctcgacagcttgcaaaaatgcgttttttcattcgaatcaaattgccaggagaaacccagcgaatatatcgctgcaatcctggagttgtccgcgttcgttgagaagcggaaccagcagattctactgcataccgacttcctgtactacctgacacccgacggacagcggtttcggcgcgcctgccacctagtgcatgacttcaccgatgctgtcatccaagagaggaggtgcaccctccccactcagggcatcgatgattttctgaagaacaaggctaaatcaaagacgctggatttcatcgacgtgctcctgttgagcaaagatgaggatgggaaggaattgtcagatgaggatatccgtgctgaggctgacacatttatgtttgagggacacgacacaactgcttctggattgtcatgggtgctctatcacctagcaaaacaccccgaatatcaggagcagtgccggcaggaggtccaggagctccttaaagatagagagccgattgagattgagtgggatgacctggcccagctgccattccttactatgtgtatcaaggaaagcctgcgcctgcatccaccagtccccgtgatttctaggtgttgcactcaggattttgtgttgccagacggtagggtaattccaaaaggtatcgtatgcctaattaacattattggtatacactacaaccccacagtctggcccgatccagaggtatacgaccccttcaggttcgaccaagagaacatcaaagaaaggagtcccctggccttcattcctttctctgccggccctagaaactgcattggccaggccttcgccatggcagagatgaaagtggtgctggcactcaccctgctgcattttaggatcctgcccacgcacacggaaccgagacgaaagccagagctaatactgcgggccgaggggggactctggttgcgcgttgaaccactcggagccaactcccagtag

SEQ ID NO: 208313 - DNA, 1365 bp, Artificial Sequence
  derived and/or modified sequence
atgccacaactcagcttatcttggcttgggctgggacccgtcgctgcctcgccgtggttgctgctactcctggttggggggtcctggctactggcacgcgtgctggcgtggacttatacattttacgacaactgcaggaggctgcagtgcttcccacagcctcctaagcaaaactggttctgggggcaccagggtctagtcactccgaccgaagaaggaatgaaaactctcacacaattggtcacaacatatcctcagggattcaagctgtggcttggcccaacatttccactcctcattctgtgtcacccagacattatcaggccgatcacaagcgcatcagcagctgtagccccaaaggatatgatcttctacgggtttctaaaaccctggctgggcgatggtcttctgctgtcgggtggagataagtggagcaggcaccgacggatgctgacaccagcctttcacttcaatattctgaagccctatatgaagatatttaataagtcggtgaacatcatgcacgacaagtggcagcgccttgcaagtgaaggatcggcccggttagacatgttcgagcatatcagcctcatgacgttagactctctgcagaagtgcgtgttctcgttcgaatccaattgtcaggaaaagccctcagagtatatcgcggctatcctcgagctttctgcgttcgtggaaaagaggaaccagcagatcctgctgcacaccgattttctttattacctgacgcccgatggacagaggttcagaagagcctgccatctcgtgcacgattttaccgatgcggtgatccaggagcggaggtgcacgctccccacgcaaggcatcgacgattttctgaagaataaagctaaaagcaaaacgctggattttattgacgtgctactgttgtcaaaggatgaggatggcaaggaattgtctgatgaagatattcgcgccgaagccgatacgttcatgttcgagggccacgatacaacagcaagcggtctaagctgggttttgtaccatctggcaaaacaccccgagtatcaagagcagtgccgccaggaggtgcaagaactcctaaaagatcgcgagccaatcgaaatagaatgggacgaccttgcacagcttccatttctgactatgtgtatcaaggagagcctgcgccttcacccccctgtaccagtcatctcacgttgctgcacccaggactttgtcttacctgacggtagagttattccaaaaggtctccgacctttgccgtttcggccaagagaacatcagggcgaggtgacatccggcttctattccctgctgggtcgcgcacagaaactgcacagggcgggtgtccgacacggctag

SEQ ID NO: 208314 - DNA, 1575 bp, Artificial Sequence
  derived and/or modified sequence
atgccgcaactttcactttcgtggctcgggctcggccctgtagccgccagtccctggttactcctgctcctggttgggggctcatggcttctggcccgggttcttgcgtggacctacacattctatgataattgtcgcagactgcagtgctttccgcagcctcccaaacagaattggttctggggacaccaggggttagtgacacccacagaggaaggcatgaaaacactaactcaacttgtaaccacctacccacaaggattcaagctttggttgggccccacattccctctgttgatactttgtcatcccgacataatccgtcccattacctctgcctcagctgccgtcgcacccaaagacatgattttctacgggtttcttaagccctggctaggcgacggtcttttactctccggcggagataagtggtcaagacacaggcgcatgctcacaccagccttccactttaatattctgaagccctacatgaagatcttcaacaagtccgttaacattatgcacgataagtggcaacggttggcttctgaggggtccgcccgactggacatgttcgagcacatctcccttatgaccctcgacagcctccagaaatgtgtcttctcattcgagtccaactgccaagagaaaccctcagagtacatcgctgcaatcctggagctatcagcatttgtagagaaaagaaatcaacagattctgctacataccgattttctgtactacttgacccccgatggtcagagattcagacgcgcatgtcacctcgtgcatgatttcacagatgccgtaatacaggagcgtcggtgtactctaccgactcagggtattgatgatttcctgaaaaataaagccaagtccaagactctggatttcattgatgtgttgttgctctctaaggatgaagacggaaaggagctgtcagacgaagacattagagcagaggccgacacgttcatgtttgaaggacacgatactaccgcatcaggcttgtcgtgggtgttgtatcacttggccaaacaccccgaataccaagaacagtgcaggcaagaggtccaggaattactcaaggatcgggaaccaatcgagattgagtgggacgacttggcacagctgccctttctaacgatgtgtattaaagaaagccttcggctacacccgcccgtgccggtgatttctagatgctgcacacaggacttcgtgctgcctgacggccgagtgattcccaagggcatcgtctgtcttattaatatcatcggaatacattacaaccccacagtctggcccgatcctgaagtttacgaccctttcaggttcgaccaagagaatatcaaagagagaagcccgctcgcattcatcccattctctgctggtcctaggaattgcattgggcaggcttttgccatggccgaaatgaaagtagtcctggctctgacactcctccactttcggattcttcctacccataccgaacccagaagaaaaccggaactaatccttcgcgcggaagggggcctgtggctcagagtggaaccactgggagcaaattcccagtag

SEQ ID NO: 208315 - DNA, 1575 bp, Artificial Sequence
  derived and/or modified sequence
atgccccagctgagcctgtcctggctgggcctgggccctgtggccgccagcccctggctgctgctgctgctggtgggcggctcctggctgctggcccgggtgctggcctggacctacaccttctatgacaactgccggcggctgcagtgcttcccccagccccccaagcagaactggttctggggccaccagggcctggtgacccccacagaggagggcatgaagaccctgacccagctggtgaccacctacccccagggcttcaagctgtggctgggccccaccttccccctgctgatcctgtgccacccagacatcatccggcccatcaccagcgccagcgctgctgtggcccccaaggacatgatcttctacggcttcctgaagccctggctgggagatggcctgctgctgtctggaggagacaagtggagccgccacaggaggatgctgaccccagccttccacttcaacatcctgaagccctacatgaagatcttcaacaagtctgtgaacatcatgcatgacaagtggcagaggctggccagcgagggcagcgcccggctggacatgtttgagcacatcagcctgatgaccctggacagcctgcagaagtgtgtgttctcctttgagagcaactgccaggagaagcccagcgagtacatcgccgccatcctggagctgagcgcctttgtggagaagaggaaccagcagatcctgctgcacacagacttcctgtactacctgaccccagatggccagcgcttcagaagagcctgccacctggtgcatgacttcacagatgctgtgatccaggagcggcgctgcaccctgcccacccagggcattgatgacttcctgaagaacaaggccaagagcaagaccctggacttcattgatgtgctgctgctgagcaaggatgaagatggcaaggagctgagtgatgaggacatccgggcagaggccgacaccttcatgtttgagggccatgacaccacagccagcggcctgtcctgggtgctgtaccacctggccaagcaccctgagtaccaggagcagtgccggcaggaggtgcaggagctgctgaaggaccgggagcccatcgagattgagtgggatgacctggcccagctgcccttcctgaccatgtgcatcaaggagagcctgcggctgcacccccctgtgcctgtgatcagccgctgctgcacccaggactttgtgctgcctgatggccgggtcatccccaagggcatcgtgtgcctgatcaacatcatcggcatccactacaaccccaccgtgtggccagaccctgaggtgtatgaccccttccgctttgaccaggagaacatcaaggagaggagccccctggccttcatccccttctctgctggccccaggaactgcatcggccaggcctttgccatggccgagatgaaggtggtgctggccctgaccctgctgcacttccgcatcctgcccacccacacagagcccaggaggaagccagagctgatcctgcgggcagagggcggcctgtggctgcgggtggagcccctgggcgccaacagccagtag

SEQ ID NO: 208316 - DNA, 1365 bp, Artificial Sequence
  derived and/or modified sequence
atgccccagctgagcctgtcctggctgggcctgggccctgtggccgccagcccctggctgctgctgctgctggtgggcggctcctggctgctggcccgggtgctggcctggacctacaccttctatgacaactgccggcggctgcagtgcttcccccagccccccaagcagaactggttctggggccaccagggcctggtgacccccacagaggagggcatgaagaccctgacccagctggtgaccacctacccccagggcttcaagctgtggctgggccccaccttccccctgctgatcctgtgccacccagacatcatccggcccatcaccagcgccagcgctgctgtggcccccaaggacatgatcttctacggcttcctgaagccctggctgggagatggcctgctgctgtctggaggagacaagtggagccgccacaggaggatgctgaccccagccttccacttcaacatcctgaagccctacatgaagatcttcaacaagtctgtgaacatcatgcatgacaagtggcagaggctggccagcgagggcagcgcccggctggacatgtttgagcacatcagcctgatgaccctggacagcctgcagaagtgtgtgttctcctttgagagcaactgccaggagaagcccagcgagtacatcgccgccatcctggagctgagcgcctttgtggagaagaggaaccagcagatcctgctgcacacagacttcctgtactacctgaccccagatggccagcgcttcagaagagcctgccacctggtgcatgacttcacagatgctgtgatccaggagcggcgctgcaccctgcccacccagggcattgatgacttcctgaagaacaaggccaagagcaagaccctggacttcattgatgtgctgctgctgagcaaggatgaagatggcaaggagctgagtgatgaggacatccgggcagaggccgacaccttcatgtttgagggccatgacaccacagccagcggcctgtcctgggtgctgtaccacctggccaagcaccctgagtaccaggagcagtgccggcaggaggtgcaggagctgctgaaggaccgggagcccatcgagattgagtgggatgacctggcccagctgcccttcctgaccatgtgcatcaaggagagcctgcggctgcacccccctgtgcctgtgatcagccgctgctgcacccaggactttgtgctgcctgatggccgggtcatccccaagggcctgcggcccctgcccttccggccccgggagcaccagggcgaggtgaccagcggcttctacagcctgctgggccgggcccagaagctgcacagagctggggtgagacatggatag

SEQ ID NO: 208317 - DNA, 1575 bp, Artificial Sequence
  derived and/or modified sequence
atgccccagctgagcctgagctggctgggcctgggccccgtggccgcgagtccatggctcctgttgcttctggtgggtggatcttggctgctggcacgcgtgctagcttggacatacactttttacgacaactgcagaaggctccagtgcttcccccagccaccaaaacagaactggttttggggacatcagggcttagtgacccctacagaggaaggcatgaaaaccctcacacagctggttacaacataccctcagggctttaagctttggctgggtcctacctttcccctgttaatcctgtgtcatcctgacataatccgacctattacttcagcaagcgccgctgtggcacctaaagacatgatattttacggcttcctgaaaccctggttaggggacgggttgctcctgtcaggaggcgacaagtggagtcgccaccggcgcatgctgaccccggcatttcacttcaacatcctcaaaccgtacatgaaaattttcaacaagagtgtaaacatcatgcacgataaatggcagagacttgcttctgaggggagcgcacgcttagatatgttcgaacacatcagcctgatgacactggacagcctgcagaagtgcgtcttttcttttgagagtaactgtcaagagaagccatctgagtacatcgccgccatccttgagctgagcgctttcgtagaaaagcggaatcagcagatcctgctgcatactgattttctctactacctcactcctgatggacagagatttagaagagcatgtcacctggtacacgattttactgatgctgtaattcaggagagaagatgtacgttgcccacacagggtatagatgacttcctgaagaataaagccaagtccaaaacacttgacttcattgacgtcttactactgtccaaggacgaggacggaaaggagctgtcagatgaggacatccgagccgaagcagacacatttatgttcgaagggcacgataccactgcctccggcctgtcttgggtcctctaccacctcgctaaacatccagaataccaggaacagtgtagacaggaagttcaagagctgctcaaggaccgcgaaccaattgaaatcgagtgggacgatctcgctcagctacctttcctcaccatgtgcatcaaggagtcccttcggctgcaccctccagttcctgtgataagcaggtgctgcacacaggattttgttttacctgatgggagagtgatcccaaaagggattgtgtgccttatcaacatcattggcattcattacaaccctacagtgtggcctgacccggaggtctacgatcctttcaggtttgatcaggagaacatcaaggagcggagcccgttggcctttatccctttctccgccgggcctcgcaactgtatcggtcaggctttcgcaatggctgaaatgaaggtcgtacttgccctgaccttgctgcacttccgtatcttaccaactcacactgagccccggagaaaacctgaattgatcctgcgcgcagagggcgggctgtggctgagagttgaaccactgggtgccaactcgcaatag

SEQ ID NO: 208318 - DNA, 1365 bp, Artificial Sequence
  derived and/or modified sequence
atgccccagctgagcctgagctggctgggcctgggccccgtggccgcctccccctggctgctcttgctgctcgtgggcggcagttggcttctcgcccgcgtgctcgcttggacatataccttctacgacaactgtcggcggcttcagtgctttccacagcctccaaaacaaaattggttctggggccaccagggtttagtgactcctaccgaagaggggatgaaaaccttaacgcaactggttaccacataccctcaggggttcaaactgtggctgggccctacctttccgctcctaattctgtgccacccggacatcattagacctattacttctgcctctgccgctgttgccccaaaggatatgattttctacggatttctgaaaccatggctcggcgatggtctcctgctttccggaggagacaagtggtcacgccaccgcagaatgctcaccccagcttttcattttaacattctgaaaccgtatatgaaaatttttaacaagtctgtgaatattatgcacgacaagtggcagcggttagcgtccgaaggctccgcaagattagatatgtttgagcatatctccctaatgactctggactccctccaaaaatgtgtgttcagctttgaaagcaactgccaagagaaaccttctgaatatattgcagcaatcttggaattgtccgccttcgtggagaagagaaaccaacagatcctgttacatactgacttcctgtactatttgacaccggacggtcagagatttagaagggcctgtcacctggttcacgatttcacggatgccgtgatccaggaacggcgttgtacacttcctacccagggcattgacgacttcctgaagaacaaggctaaaagtaaaaccttggacttcatcgatgtcctgctgctaagtaaagatgaggatgggaaagaactctccgacgaggatatcagagctgaggccgatacctttatgtttgaaggccatgacaccactgctagtgggctgtcctgggtcctgtaccacttggcaaaacaccctgaatatcaagaacagtgcagacaggaggtccaggaactgttaaaggatcgggagcccatcgagatagagtgggatgacctggcccagctgccatttctgactatgtgcattaaagagagcctcagactgcatcccccagtacccgtgatctcccgctgttgcactcaggatttcgtgcttccagatggcagagttattccaaaaggactccggccgttaccattcaggcccagagagcaccagggtgaggtgactagtggtttctatagccttcttggtagagcccagaaacttcacagggccggggtgaggcacggatag

SEQ ID NO: 208319 - DNA, 1575 bp, Artificial Sequence
  derived and/or modified sequence
atgccccagctgagcctgagctggctgggcctgggccccgtggccgcttcaccctggttactgctgctgctagttggaggatcttggctcctcgcacgcgtgcttgcttggacgtatacattttatgacaactgtaggcgactgcaatgttttccccagccgcctaagcaaaactggttttggggccaccagggtctcgtgactcctactgaagaaggtatgaaaactctgacacagctcgtcactacctaccctcaagggttcaaactatggcttggcccgacatttcccctgctgatcctatgccatcccgatattattcgccctattacctctgcaagcgctgcggtagcccccaaggacatgatcttttacgggttcctgaagccctggttgggtgacgggcttctgttgagcggcggcgacaagtggagcaggcacagaaggatgttaacccccgcgtttcacttcaatattctgaagccatacatgaagatctttaacaagtctgtgaatattatgcacgacaaatggcaaaggttggcaagcgaaggtagtgccagactcgatatgttcgagcatatttccttgatgacgctagactccctgcagaagtgtgttttctccttcgagagcaactgccaggaaaaaccctcagagtatatagctgccatccttgagctttcagcctttgttgagaaacggaaccaacagatactcctgcacacagactttctctattacctgacccccgacggccagaggtttagacgggcctgccatctagttcacgatttcacagatgcagtgatccaggagcgaagatgtacccttcctacgcagggaatcgacgactttttgaagaacaaggcaaagtccaaaacacttgattttatagacgtcttactgctgtcgaaggatgaagacggaaaagaactgtctgatgaagatattcgggcggaggctgataccttcatgtttgagggccacgataccaccgctagcggactgtcatgggtactgtaccacctggcaaagcatcccgaatatcaagaacagtgtcgacaagaggtccaagagcttttgaaagaccgagagcctattgaaatcgaatgggacgatctcgcgcagcttccgtttctgactatgtgtataaaagaaagcttgcggcttcacccaccagtacccgtaatcagtcgctgttgtacccaagatttcgttctcccagatggccgtgtaattcccaagggcatagtttgcctgatcaacatcatcggtatacactataatccgacagtctggcctgaccctgaggtgtatgatccctttcgctttgaccaggagaatataaaagagagatcccctctagccttcattcccttttctgccggtcctcgaaactgtatcggccaggcctttgcaatggccgaaatgaaagtagtactcgccctgacccttctccacttcagaatactgcctacacacacggagcccaggaggaagccggaactaatccttagggccgagggtggattgtggcttagagtggagccattgggggccaattcacagtag

SEQ ID NO: 208320 - DNA, 1575 bp, Artificial Sequence
  derived and/or modified sequence
atgccacagctctcgttgtcctggctcggtctcggacctgtggctgcttcgccctggctgctgctcttactcgtggggggttcctggctcctcgctcgtgtccttgcctggacctatacgttctacgacaactgcagaaggctccagtgttttccccagccccctaaacaaaactggttttgggggcatcaaggtctggtcacacctacggaggaaggtatgaaaactcttacacagctcgttactacataccctcagggcttcaagctctggctcggtccaacctttccccttttaatcctgtgtcacccagacattatccgcccaatcacctcagctagtgccgctgtggctcccaaagatatgatattctacgggtttcttaagccctggctgggagatggcctgttgctaagcggcggagataaatggtctcgtcatcggagaatgctcacccccgcatttcactttaatatcctgaaaccctatatgaagatttttaataaatccgttaatatcatgcacgacaagtggcagaggctcgcctcagaggggtccgcccgtctcgatatgttcgaacatattagtctgatgaccctcgatagcctgcagaagtgcgtgttctctttcgagtcaaactgtcaggaaaagccctccgaatatatcgccgcaattctggagctgagcgcgtttgtggaaaaaaggaaccaacagattctactccacacggattttctctattatttgacacctgatggtcaacgattccggagggcttgccacctcgtccacgactttaccgatgctgtgatacaggagagacggtgcacgctgccaacccagggcattgatgatttccttaagaataaggccaagtcaaagactctggactttatagatgtgctgctgctgagcaaagatgaagatgggaaggagttatccgacgaggatatcagggccgaagccgataccttcatgttcgagggacacgacaccacggcttctggtttgtcgtgggtcctttaccaccttgccaaacaccctgagtaccaggaacaatgtcgtcaggaggttcaggagctcctgaaggacagggagcccatcgagattgagtgggacgacttggcccagctgcctttcctcacgatgtgtattaaggagagtctcaggctccacccgccagtacccgtaatctctagatgttgcacacaggatttcgttttgcccgacgggagggtgattcccaaagggattgtctgcctcatcaacataatcggtatccactataatccaactgtctggcccgacccggaggtatatgatccttttcgctttgatcaggaaaatattaaggaacgctccccgctcgcattcatacccttctcagcgggtccacgaaattgcattggtcaggcctttgctatggccgaaatgaaagtcgtgctggccctaaccctgttacacttccggatcctgcctacgcacactgagccaagaaggaagccagagcttatcctcagagccgaaggcggactgtggctccgagtggagccgctgggggcaaactcccagtag

SEQ ID NO: 208321 - DNA, 1365 bp, Artificial Sequence
  derived and/or modified sequence
atgccacagcttagtttgagctggttagggctgggcccagtggccgctagcccatggctccttctcctgctggtaggaggctcatggctactggcccgagtgctagcatggacctatacattctatgacaactgcaggaggctgcagtgcttcccgcagccgcctaagcagaattggttctggggccatcagggtctagtgactcctacggaggaggggatgaagacactaacacagctggttactacctacccccaagggtttaagttgtggctgggaccaacctttcccctgctgatcctttgccatccagacattatccgtcccatcacgtcggcctccgctgccgtggccccaaaagacatgatcttttacggtttcctgaagccatggctgggagacgggctgctgctgagcggcggagacaagtggtctaggcatagacgcatgctcacccccgcatttcatttcaatatcctgaaaccttacatgaagatattcaataagtctgtcaatatcatgcacgacaaatggcagaggctggcttctgaaggatcagctcgattggatatgttcgagcacatctctctgatgaccttggattctcttcagaaatgtgtgttctcctttgaaagcaattgtcaagaaaagccatcagaatatatcgccgcaatcctggagctgtcggcctttgtggagaagcgcaatcagcagattctcctgcatacggattttctgtactatttgactccggacgggcagaggtttaggagagcatgtcacctcgtgcatgacttcaccgacgctgtgatccaagagaggcgctgcactctgcccacccaggggatagacgatttcctaaagaataaagcaaagtccaagaccttggactttattgatgtgttgttgttgagcaaagatgaggatggaaaggaactctccgacgaagacatccgcgctgaagctgatacattcatgttcgagggccatgataccacagcctctggtcttagctgggtattataccacctagccaagcaccccgagtatcaggagcaatgtcggcaagaggtccaggagctgctgaaagaccgtgaaccgatagagatagagtgggacgatctcgcccagttgccctttcttacaatgtgcattaaggaatcgttacgattgcacccgcctgtgcccgtgatcagccgttgctgcactcaggatttcgtcctcccggacgggagagttataccgaaaggattaaggccacttccattccgccctcgtgagcatcagggggaagtgacgtccggtttctattcactgctgggcagagcccagaagctccacagagccggagtgcgacacggatag

SEQ ID NO: 208322 - DNA, 1575 bp, Artificial Sequence
  derived and/or modified sequence
atgccgcagctcagtctttcctggctgggtctgggcccagtggccgcatcaccatggttgctgctgctactggtggggggttcctggctattggctagagtgcttgcctggacttatacattttatgacaattgcaggagacttcagtgtttccctcaacctcctaaacagaactggttctggggtcatcagggcctggtgaccccaacagaagagggaatgaaaacactcacacagctcgtgaccacttatccacagggctttaagctgtggctaggccctacttttccgctgctgatcctttgtcatccagacatcatccgacccatcaccagcgcctctgccgcagtcgctcccaaggatatgattttctatggtttcctaaaaccctggctaggagatggattactcttgagcggaggcgacaaatggtcacggcatagacgtatgctgactccagctttccatttcaatattttgaaaccctacatgaaaatattcaacaaatcggtgaacattatgcatgataagtggcagcgcctcgcatcagagggatcggctaggctggacatgtttgagcacatttcgctgatgaccctcgatagtctccagaaatgcgtcttcagttttgagagcaactgccaggagaagccttccgagtatatcgccgcaatccttgagttgtcagcatttgtggagaagagaaaccagcagattctactacatactgattttctgtattacttaactccggatgggcagaggtttagacgggcttgtcacttggttcacgacttcacagacgccgtcatccaggagaggcgctgtaccttgcctacacagggaattgacgatttcctgaagaataaagcaaagagcaagacactggatttcattgacgttcttctcctcagcaaggacgaggatggcaaggagttatctgacgaggatatccgggcagaggccgacacattcatgttcgaagggcatgatacaacagcatctggcctgtcttgggttctgtatcatttagccaagcaccccgagtaccaggagcaatgtagacaggaggttcaggagctgcttaaagaccgcgaacctattgagattgaatgggacgatctggctcagcttcccttccttacaatgtgcatcaaggagtcacttcgactgcatccacccgtgccggtcatatccagatgttgcactcaggacttcgtcctgcccgatgggagagttatccccaaagggatcgtgtgtctgattaatattatcggtatccactacaacccaacagtttggccagaccctgaggtgtacgacccctttagatttgatcaggagaatataaaggagagatcccccttggcctttatcccttttagcgccggacccagaaattgtatcggccaggcgtttgcaatggcagagatgaaagttgtgcttgctctgaccttattacatttcaggatactccccacgcataccgagccacggcgtaagccagaattgatactgcgagccgagggcggtctgtggttaagggtagagcccctgggggctaactcccagtag

SEQ ID NO: 208323 - DNA, 2973 bp, Artificial Sequence
  derived and/or modified sequence
gaggcaaagacctcctagcagagggggagaggagggatgccgcagctgagcctgtcctggctgggcctcgggcccgtggcagcatccccgtggctgcttctgctgctggttggaggctcctggctcctggcccgcgtcctggcctggacctacaccttctatgacaactgccgccgcctccagtgttttcctcaacccccgaaacagaactggttttggggacaccagggcctggtcactcccacggaagagggcatgaagacattgacccagctggtgaccacatatccccagggctttaagttgtggctgggtcctaccttccccctcctcattttatgccaccctgacattatccggcctatcaccagtgcctcagctgctgtcgcacccaaggatatgattttctatggcttcctgaagccctggctgggggatgggctcctgctgagtggtggtgacaagtggagccgccaccgtcggatgttgacgcctgccttccatttcaacatcttgaagccttatatgaagattttcaacaagagtgtgaacatcatgcacgacaagtggcagcgcctggcctcagagggcagcgccagactggacatgtttgaacacatcagcctcatgaccttggacagtctgcagaaatgtgtcttcagctttgaaagcaattgtcaggagaagcccagtgaatatattgccgccatcttggagctcagtgcctttgtagaaaagagaaaccagcagattctcttgcacacggacttcctgtattatctcactcctgatgggcagcgcttccgcagggcctgccacctggtgcacgacttcacagatgccgtcatccaggagcggcgctgcaccctccccactcagggtattgatgatttcctcaagaacaaggcaaagtccaagactttagacttcattgatgtgcttctgctgagcaaggatgaagatgggaaggaattgtctgatgaggacataagagcagaagctgacaccttcatgtttgagggccatgacactacagccagtggtctctcctgggtcctataccaccttgcaaagcacccagaataccaggaacagtgccggcaagaagtgcaagagcttctgaaggaccgtgaacctatagagattgaatgggacgacctggcccagctgcccttcctgaccatgtgcattaaggagagcctgcggttgcatcccccagtcccggtcatctcccgatgttgcacgcaggactttgtgctcccagacggccgcgtcatccccaaaggcattgtctgcctcatcaatattatcgggatccattacaacccaactgtgtggccagaccctgaggtctacgaccccttccgtttcgaccaagagaacatcaaggagaggtcacctctggcttttattcccttctcggcagggcccagaaactgcatcgggcaggcgttcgccatggctgagatgaaggtggtcctggcgctcaccctgctgcacttccgcatcctgccgacccacactgaaccccgcaggaaacccgagctgatattgcgcgcagagggtggactttggctgcgggtggagcccctgggtgcgaactcacagtgactgtcctacccacccacccacctctgtagagtcccagaaacaaaactatgctgacacctctgcttgagcctcgttgacagccagcatggggctcctggggactggtgggatctaagaaagggaggtgagtgggtggaggcagggtgacgtctctgaacccaaaaccctgacggcctctctggctgagcacagggcatctaggcccttagtgggttctcccagagcccaagtaaaaactttatcctgtgggcagtagggagccctgggaggtgtttgagcaggagagggaacaggattaagaatgggtttaaggagcaagactgagactctgattcagcgagaaacaaccataggggcagatcccttcatctgtcctgggaatgtcctcccaagactggagtcctcagctcagaacaaagggaaaggggtgcagcttccaccctggcaggctctcagaaatttttagttcctttttccaccaacttcccacccctgtttctccccctcccagtgcgttctctctgtgactctcttcccttactttcagaggcataggatctggagccagactgcttgggctcaagtcctggctctgctgcgtgacttgagcaagttaattcctctctctgtgcctcggttccctcaaccatataatggagacaacagcattacctatatcagggttttcctgaggtctcaatataagggactcagagctgtgcctggcacacaatgaatgctaaatatatggagccattattatttcctgtctcagaaagtctggctgttaaagaatgttgtctttcaagatcgttatttctaccacgactttaaaggctgtgttttggaactcaaaggcaaaaattctaatatctgtgctccttgaacaacctcttctcctagagggctgtgcatataagatatgtatatatatatatatattatatatatatatatatacacacacacacacacacacacacacatatatacatatacacacacacacacacacacacacacacacacacacatatatatatatatatatttttttttttttcctgaggatggtgaaggtacctgactgtgtgaggtggtaggagaatgagagaaacctcagtcagtgtctcaaaataaaatcctgctacaaacattgatctcttttcatagcctaagggatgttgcatcgctaaaccctgttgacttctctaatctcttctgtagctgatctccttcccttgctacactcggttactctggccttgattctgatctccaaatacattatattttttatttgggaccatcgtattgcctttgcacctttatcaaatataagttgcctatatttatttggat

SEQ ID NO: 208324 - DNA, 2872 bp, Artificial Sequence
  derived and/or modified sequence
ggatgccgcagctgagcctgtcctggctgggcctcgggcccgtggcagcatccccgtggctgcttctgctgctggttggaggctcctggctcctggcccgcgtcctggcctggacctacaccttctatgacaactgccgccgcctccagtgttttcctcaacccccgaaacagaactggttttggggacaccagggcctggtcactcccacggaagagggcatgaagacattgacccagctggtgaccacatatccccagggctttaagttgtggctgggtcctaccttccccctcctcattttatgccaccctgacattatccggcctatcaccagtgcctcagctgctgtcgcacccaaggatatgattttctatggcttcctgaagccctggctgggggatgggctcctgctgagtggtggtgacaagtggagccgccaccgtcggatgttgacgcctgccttccatttcaacatcttgaagccttatatgaagattttcaacaagagtgtgaacatcatgcacgacaagtggcagcgcctggcctcagagggcagcgccagactggacatgtttgaacacatcagcctcatgaccttggacagtctgcagaaatgtgtcttcagctttgaaagcaattgtcaggagaagcccagtgaatatattgccgccatcttggagctcagtgcctttgtagaaaagagaaaccagcagattctcttgcacacggacttcctgtattatctcactcctgatgggcagcgcttccgcagggcctgccacctggtgcacgacttcacagatgccgtcatccaggagcggcgctgcaccctccccactcagggtattgatgatttcctcaagaacaaggcaaagtccaagactttagacttcattgatgtgcttctgctgagcaaggatgaagatgggaaggaattgtctgatgaggacataagagcagaagctgacaccttcatgtttgagggccatgacactacagccagtggtctctcctgggtcctataccaccttgcaaagcacccagaataccaggaacagtgccggcaagaagtgcaagagcttctgaaggaccgtgaacctatagagattgaatgggacgacctggcccagctgcccttcctgaccatgtgcattaaggagagcctgcggttgcatcccccagtcccggtcatctcccgatgttgcacgcaggactttgtgctcccagacggccgcgtcatccccaaaggtctacgaccccttccgtttcgaccaagagaacatcaaggagaggtcacctctggcttttattcccttctcggcagggcccagaaactgcatcgggcaggcgttcgccatggctgagatgaaggtggtcctggcgctcaccctgctgcacttccgcatcctgccgacccacactgaaccccgcaggaaacccgagctgatattgcgcgcagagggtggactttggctgcgggtggagcccctgggtgcgaactcacagtgactgtcctacccacccacccacctctgtagagtcccagaaacaaaactatgctgacacctctgcttgagcctcgttgacagccagcatggggctcctggggactggtgggatctaagaaagggaggtgagtgggtggaggcagggtgacgtctctgaacccaaaaccctgacggcctctctggctgagcacagggcatctaggcccttagtgggttctcccagagcccaagtaaaaactttatcctgtgggcagtagggagccctgggaggtgtttgagcaggagagggaacaggattaagaatgggtttaaggagcaagactgagactctgattcagcgagaaacaaccataggggcagatcccttcatctgtcctgggaatgtcctcccaagactggagtcctcagctcagaacaaagggaaaggggtgcagcttccaccctggcaggctctcagaaatttttagttcctttttccaccaacttcccacccctgtttctccccctcccagtgcgttctctctgtgactctcttcccttactttcagaggcataggatctggagccagactgcttgggctcaagtcctggctctgctgcgtgacttgagcaagttaattcctctctctgtgcctcggttccctcaaccatataatggagacaacagcattacctatatcagggttttcctgaggtctcaatataagggactcagagctgtgcctggcacacaatgaatgctaaatatatggagccattattatttcctgtctcagaaagtctggctgttaaagaatgttgtctttcaagatcgttatttctaccacgactttaaaggctgtgttttggaactcaaaggcaaaaattctaatatctgtgctccttgaacaacctcttctcctagagggctgtgcatataagatatgtatatatatatatatattatatatatatatatatacacacacacacacacacacacacacatatatacatatacacacacacacacacacacacacacacacacacacatatatatatatatatatttttttttttttcctgaggatggtgaaggtacctgactgtgtgaggtggtaggagaatgagagaaacctcagtcagtgtctcaaaataaaatcctgctacaaacattgatctcttttcatagcctaagggatgttgcatcgctaaaccctgttgacttctctaatctcttctgtagctgatctccttcccttgctacactcggttactctggccttgattctgatctccaaatacattatattttttatttgggaccatcgtattgcctttgcacctttatcaaatataagttgcctatatttatttgg

SEQ ID NO: 208325 - DNA, 3395 bp, Artificial Sequence
  derived and/or modified sequence
gaggcaaagacctcctagcagagggggagaggagggtatgtgggacaagctgcttctgataggagccaggctggcagtggcagggctggagggtcctggcctgggatggggaggggactgcccaaggttggggtgggtcaaggctgctggcctgggagactggtgatttcctggtaactggacccctggcaacctcccagtgattcaggctgggcctttttggattctaatcagcctctctctctctttccctttctgtgtaactggaggccacttggctgctggttttcattgggcatttctggactttagatctcagctcttgtttacccatctcagagccttccctgatctgcctccagcactgcccatccttgcccctttccactgtccttggagcttcctgggcccttccctgggcctcaggatcccaccctccatcccgtctgccctgcaggatgccgcagctgagcctgtcctggctgggcctcgggcccgtggcagcatccccgtggctgcttctgctgctggttggaggctcctggctcctggcccgcgtcctggcctggacctacaccttctatgacaactgccgccgcctccagtgttttcctcaacccccgaaacagaactggttttggggacaccagggcctggtcactcccacggaagagggcatgaagacattgacccagctggtgaccacatatccccagggctttaagttgtggctgggtcctaccttccccctcctcattttatgccaccctgacattatccggcctatcaccagtgcctcagctgctgtcgcacccaaggatatgattttctatggcttcctgaagccctggctgggggatgggctcctgctgagtggtggtgacaagtggagccgccaccgtcggatgttgacgcctgccttccatttcaacatcttgaagccttatatgaagattttcaacaagagtgtgaacatcatgcacgacaagtggcagcgcctggcctcagagggcagcgccagactggacatgtttgaacacatcagcctcatgaccttggacagtctgcagaaatgtgtcttcagctttgaaagcaattgtcaggagaagcccagtgaatatattgccgccatcttggagctcagtgcctttgtagaaaagagaaaccagcagattctcttgcacacggacttcctgtattatctcactcctgatgggcagcgcttccgcagggcctgccacctggtgcacgacttcacagatgccgtcatccaggagcggcgctgcaccctccccactcagggtattgatgatttcctcaagaacaaggcaaagtccaagactttagacttcattgatgtgcttctgctgagcaaggatgaagatgggaaggaattgtctgatgaggacataagagcagaagctgacaccttcatgtttgagggccatgacactacagccagtggtctctcctgggtcctataccaccttgcaaagcacccagaataccaggaacagtgccggcaagaagtgcaagagcttctgaaggaccgtgaacctatagagattgaatgggacgacctggcccagctgcccttcctgaccatgtgcattaaggagagcctgcggttgcatcccccagtcccggtcatctcccgatgttgcacgcaggactttgtgctcccagacggccgcgtcatccccaaaggcattgtctgcctcatcaatattatcgggatccattacaacccaactgtgtggccagaccctgaggtctacgaccccttccgtttcgaccaagagaacatcaaggagaggtcacctctggcttttattcccttctcggcagggcccagaaactgcatcgggcaggcgttcgccatggctgagatgaaggtggtcctggcgctcaccctgctgcacttccgcatcctgccgacccacactgaaccccgcaggaaacccgagctgatattgcgcgcagagggtggactttggctgcgggtggagcccctgggtgcgaactcacagtgactgtcctacccacccacccacctctgtagagtcccagaaacaaaactatgctgacacctctgcttgagcctcgttgacagccagcatggggctcctggggactggtgggatctaagaaagggaggtgagtgggtggaggcagggtgacgtctctgaacccaaaaccctgacggcctctctggctgagcacagggcatctaggcccttagtgggttctcccagagcccaagtaaaaactttatcctgtgggcagtagggagccctgggaggtgtttgagcaggagagggaacaggattaagaatgggtttaaggagcaagactgagactctgattcagcgagaaacaaccataggggcagatcccttcatctgtcctgggaatgtcctcccaagactggagtcctcagctcagaacaaagggaaaggggtgcagcttccaccctggcaggctctcagaaatttttagttcctttttccaccaacttcccacccctgtttctccccctcccagtgcgttctctctgtgactctcttcccttactttcagaggcataggatctggagccagactgcttgggctcaagtcctggctctgctgcgtgacttgagcaagttaattcctctctctgtgcctcggttccctcaaccatataatggagacaacagcattacctatatcagggttttcctgaggtctcaatataagggactcagagctgtgcctggcacacaatgaatgctaaatatatggagccattattatttcctgtctcagaaagtctggctgttaaagaatgttgtctttcaagatcgttatttctaccacgactttaaaggctgtgttttggaactcaaaggcaaaaattctaatatctgtgctccttgaacaacctcttctcctagagggctgtgcatataagatatgtatatatatatatatattatatatatatatatatacacacacacacacacacacacacacatatatacatatacacacacacacacacacacacacacacacacacacatatatatatatatatatttttttttttttcctgaggatggtgaaggtacctgactgtgtgaggtggtaggagaatgagagaaacctcagtcagtgtctcaaaataaaatcctgctacaaacattgatctcttttcatagcctaagggatgttgcatcgctaaaccctgttgacttctctaatctcttctgtagctgatctccttcccttgctacactcggttactctggccttgattctgatctccaaatacattatattttttatttgggaccatcgtattgcctttgcacctttatcaaatataagttgcctatatttatttggat

SEQ ID NO: 208326 - DNA, 1575 bp, Artificial Sequence
  derived and/or modified sequence
atgccccagctgagcctgagctggctgggcctgggccccgtggccgccagcccctggctgctgctgctgctggtgggcggcagctggctgctggccagagtgctggcctggacctacaccttctacgacaactgcagaagactgcagtgcttcccccagccccccaagcagaactggttctggggccaccagggcctggtgacccccaccgaggagggcatgaagaccctgacccagctggtgaccacctacccccagggcttcaagctgtggctgggccccaccttccccctgctgatcctgtgccaccccgacatcatcagacccatcaccagcgccagcgccgccgtggcccccaaggacatgatcttctacggcttcctgaagccctggctgggcgacggcctgctgctgagcggcggcgacaagtggagcagacacagaagaatgctgacccccgccttccacttcaacatcctgaagccctacatgaagatcttcaacaagagcgtgaacatcatgcacgacaagtggcagagactggccagcgagggcagcgccagactggacatgttcgagcacatcagcctgatgaccctggacagcctgcagaagtgcgtgttcagcttcgagagcaactgccaggagaagcccagcgagtacatcgccgccatcctggagctgagcgccttcgtggagaagagaaaccagcagatcctgctgcacaccgacttcctgtactacctgacccccgacggccagagattcagaagagcctgccacctggtgcacgacttcaccgacgccgtgatccaggagagaagatgcaccctgcccacccagggcatcgacgacttcctgaagaacaaggccaagagcaagaccctggacttcatcgacgtgctgctgctgagcaaggacgaggacggcaaggagctgagcgacgaggacatcagagccgaggccgacaccttcatgttcgagggccacgacaccaccgccagcggcctgagctgggtgctgtaccacctggccaagcaccccgagtaccaggagcagtgcagacaggaggtgcaggagctgctgaaggacagagagcccatcgagatcgagtgggacgacctggcccagctgcccttcctgaccatgtgcatcaaggagagcctgagactgcacccccccgtgcccgtgatcagcagatgctgcacccaggacttcgtgctgcccgacggcagagtgatccccaagggcatcgtgtgcctgatcaacatcatcggcatccactacaaccccaccgtgtggcccgaccccgaggtgtacgaccccttcagattcgaccaggagaacatcaaggagagaagccccctggccttcatccccttcagcgccggccccagaaactgcatcggccaggccttcgccatggccgagatgaaggtggtgctggccctgaccctgctgcacttcagaatcctgcccacccacaccgagcccagaagaaagcccgagctgatcctgagagccgagggcggcctgtggctgagagtggagcccctgggcgccaacagccagtag

SEQ ID NO: 208327 - DNA, 1365 bp, Artificial Sequence
  derived and/or modified sequence
atgccccagctgagcctgagctggctgggcctgggccccgtggccgccagcccctggctgctgctgctgctggtgggcggcagctggctgctggccagagtgctggcctggacctacaccttctacgacaactgcagaagactgcagtgcttcccccagccccccaagcagaactggttctggggccaccagggcctggtgacccccaccgaggagggcatgaagaccctgacccagctggtgaccacctacccccagggcttcaagctgtggctgggccccaccttccccctgctgatcctgtgccaccccgacatcatcagacccatcaccagcgccagcgccgccgtggcccccaaggacatgatcttctacggcttcctgaagccctggctgggcgacggcctgctgctgagcggcggcgacaagtggagcagacacagaagaatgctgacccccgccttccacttcaacatcctgaagccctacatgaagatcttcaacaagagcgtgaacatcatgcacgacaagtggcagagactggccagcgagggcagcgccagactggacatgttcgagcacatcagcctgatgaccctggacagcctgcagaagtgcgtgttcagcttcgagagcaactgccaggagaagcccagcgagtacatcgccgccatcctggagctgagcgccttcgtggagaagagaaaccagcagatcctgctgcacaccgacttcctgtactacctgacccccgacggccagagattcagaagagcctgccacctggtgcacgacttcaccgacgccgtgatccaggagagaagatgcaccctgcccacccagggcatcgacgacttcctgaagaacaaggccaagagcaagaccctggacttcatcgacgtgctgctgctgagcaaggacgaggacggcaaggagctgagcgacgaggacatcagagccgaggccgacaccttcatgttcgagggccacgacaccaccgccagcggcctgagctgggtgctgtaccacctggccaagcaccccgagtaccaggagcagtgcagacaggaggtgcaggagctgctgaaggacagagagcccatcgagatcgagtgggacgacctggcccagctgcccttcctgaccatgtgcatcaaggagagcctgagactgcacccccccgtgcccgtgatcagcagatgctgcacccaggacttcgtgctgcccgacggcagagtgatccccaagggcctgagacccctgcccttcagacccagagagcaccagggcgaggtgaccagcggcttctacagcctgctgggcagagcccagaagctgcacagagccggcgtgagacacggctag

SEQ ID NO: 208328 - protein, 425 aa, Artificial Sequence
  derived and/or modified sequence
MLPDDTTNHSNSSKEVPSSAVLRSLRVNVGPDGEETRAQTVQKSPEFLSTSESSSLLQDLQPSDSTSFILLNLTRAGLGSSAEHLVFVQDEAEDSGNDFLSSESTDSSIPWFLRVQELAHDSLIAATRAQLAKNAKTSSNGENVHLGSGDGQSKDSGPLPQVEKKLKCTVEGCDRTFVWPAHFKYHLKTHRNDRSFICPAEGCGKSFYVLQRLKVHMRTHNGEKPFMCHESGCGKQFTTAGNLKNHRRIHTGEKPFLCEAQGCGRSFAEYSSLRKHLVVHSGEKPHQCQVCGKTFSQSGSRNVHMRKHHLQLGAAGSQEQEQTAEPLMGSSLLEEASVPSKNLVSMNSQPSLGGESLNLPNTNSILGVDDEVLAEGSPRSLSSVPDVTHHLVTMQSGRQSYEVSVLTAVNPQELLNQGDLTERRT

SEQ ID NO: 208329 - protein, 467 aa, Artificial Sequence
  derived and/or modified sequence
MLSDELESKPELLVQFVQNTSIPLGQGLVESEAKDITCLSLLPVTEASECSRLMLPDDTTNHSNSSKEVPSSAVLRSLRVNVGPDGEEFLSTSESSSLLQDLQPSDSTSFILLNLTRAGLGSSAEHLVFVQDEAEDSGNDFLSSESTDSSIPWFLRVQELAHDSLIAATRAQLAKNAKTSSNGENVHLGSGDGQSKDSGPLPQVEKKLKCTVEGCDRTFVWPAHFKYHLKTHRNDRSFICPAEGCGKSFYVLQRLKVHMRTHNGEKPFMCHESGCGKQFTTAGNLKNHRRIHTGEKPFLCEAQGCGRSFAEYSSLRKHLVVHSGEKPHQCQVCGKTFSQSGSRNVHMRKHHLQLGAAGSQEQEQTAEPLMGSSLLEEASVPSKNLVSMNSQPSLGGESLNLPNTNSILGVDDEVLAEGSPRSLSSVPDVTHHLVTMQSGRQSYEVSVLTAVNPQELLNQGDLTERRT

SEQ ID NO: 208330 - protein, 478 aa, Artificial Sequence
  derived and/or modified sequence
MLSDELESKPELLVQFVQNTSIPLGQGLVESEAKDITCLSLLPVTEASECSRLMLPDDTTNHSNSSKEVPSSAVLRSLRVNVGPDGEETRAQTVQKSPEFLSTSESSSLLQDLQPSDSTSFILLNLTRAGLGSSAEHLVFVQDEAEDSGNDFLSSESTDSSIPWFLRVQELAHDSLIAATRAQLAKNAKTSSNGENVHLGSGDGQSKDSGPLPQVEKKLKCTVEGCDRTFVWPAHFKYHLKTHRNDRSFICPAEGCGKSFYVLQRLKVHMRTHNGEKPFMCHESGCGKQFTTAGNLKNHRRIHTGEKPFLCEAQGCGRSFAEYSSLRKHLVVHSGEKPHQCQVCGKTFSQSGSRNVHMRKHHLQLGAAGSQEQEQTAEPLMGSSLLEEASVPSKNLVSMNSQPSLGGESLNLPNTNSILGVDDEVLAEGSPRSLSSVPDVTHHLVTMQSGRQSYEVSVLTAVNPQELLNQGDLTERRT

SEQ ID NO: 208331 - protein, 272 aa, Artificial Sequence
  derived and/or modified sequence
MLSDELESKPELLVQFVQNTSIPLGQGLVESEAKDITCLSLLPVTEASECSRLMLPDDTTNHSNSSKEVPSSAVLRSLRVNVGPDGEETRAQTVQKSPEFLSTSESSSLLQDLQPSDSTSFILLNLTRAGLGSSAEHLVFVQDEAEDSGNDFLSSESTDSSIPWFLRVQELAHDSLIAATRAQLAKNAKTSSNGENVHLGSGDGQSKDSGPLPQVEKKLKCTVEGCDRTFVWPAHFKYHLKTHRRLWEKLLCAAEAEGAHEDPQWREALYVP

SEQ ID NO: 208332 - DNA, 2207 bp, Artificial Sequence
  derived and/or modified sequence
actgacggccggccggcttcccggaactggaaggttacattgattacccacctagtacaacatcttacgggaagagcatagtatttcctagaggaatatgaacataacaggaaggtatcattggctctgaattaaatttgaacttgtcccctgaatagctacaggttttggaagctgaatcaatgttatcagatgagttagaatccaaaccagagctcctggtacagtttgttcagaatacgtccatcccattgggacaggggcttgtagaatcagaagctaaagatattacttgcttgtccctccttcccgtgactgaagcctcagaatgcagtcggctaatgttaccagatgatactacaaatcattctaactcctccaaggaggtcccttcctcagctgttttgagaagccttcgggtgaatgtgggtccagacggagaggagacgagagctcagactgtacagaaatccccggagtttttgtccacttcagagtcttctagcttgttgcaagatctacagccaagtgatagcacttcttttattcttcttaacctaacaagagcaggtctgggctcttcagctgagcacttagtgtttgtacaggatgaggcagaagattcagggaatgatttcctctccagtgagagcacagacagtagcattccatggttcctccgggttcaggagttggcccatgacagtttgattgctgctactcgtgcacaactggcaaagaatgcaaaaaccagcagcaatggagaaaatgtccaccttggttctggtgatgggcagtcaaaagattctgggccccttcctcaagtggaaaagaagctcaagtgtacagttgaaggttgtgaccggacatttgtatggccagctcactttaaataccacctcaagactcatcgaaatgaccgctccttcatctgtcctgcagaaggttgtgggaaaagcttctatgtgctgcagaggctgaaggtgcacatgaggacccacaatggagagaagccctttatgtgccatgagtctggctgtggtaagcagtttactacagctggaaacctgaagaaccaccggcgcatccacacaggagagaaacctttcctttgtgaagcccaaggatgtggccgttcctttgctgagtattctagcctccgaaaacatctggtggttcactcaggagagaagcctcatcagtgccaagtctgtgggaagaccttctctcagagtggaagcaggaatgtgcatatgagaaagcatcacctgcagctgggagcagctgggagtcaagagcaggagcaaactgctgagccactaatgggcagtagtttgcttgaagaggcttcagtacccagtaaaaacctggtgtctatgaattcccagcccagccttggtggagagtccttgaacctaccaaataccaattctatcctgggagttgatgatgaggtgcttgctgaaggatccccacgttccctgtcttcagtgcctgatgtgacacatcacctggtgaccatgcagtcagggaggcaatcatatgaagtttctgtcttaactgcagtaaatccacaagagttactaaaccaaggagatttaactgaaagacggacatgagcgtgggtgctgactcctggaagagcaactctatctgatctcaaaatgcgtatactgggaacaggatgccttagcccacaacagaaccagaatgaatctttgaaggcacaagactctgcttttgccactcttcctctttcctggtatagaagatggatgtaggagagcttcttttctaactaccatctgatcagacaaggaatgaagcaatgactgtgggctgggaaactgtacctacctctcttcccactgcaaatttctgggatagaccaaaagtgaatttgattatgtgttggctgaagttcttcattctgactgttgaggggaggttttcctttgaagagttttcatcccagactcagctgtcttttcacatggatgaaataattcctgctaccaacaacagagcttcaccaggaagttgagttttcaagatgccttgttgctttgaagaagggagtgatgtcaattctcttgttacattctccctttagcaacctgagtaagagactctctgccactgggctgcaaaaaaataaattacttgaatctccccttgaaaaaaaaaaaaaaaaaaaaaaaaaaaaa

SEQ ID NO: 208333 - DNA, 1278 bp, Artificial Sequence
  derived and/or modified sequence
atgctgcccgacgacaccaccaaccacagcaacagcagcaaggaggtgcccagcagcgccgtgctgagaagcctgagagtgaacgtgggccccgacggcgaggagaccagagcccagaccgtgcagaagagccccgagttcctgagcaccagcgagagcagcagcctgctgcaggacctgcagcccagcgacagcaccagcttcatcctgctgaacctgaccagagccggcctgggcagcagcgccgagcacctggtgttcgtgcaggacgaggccgaggacagcggcaacgacttcctgagcagcgagagcaccgacagcagcatcccctggttcctgagagtgcaggagctggcccacgacagcctgatcgccgccaccagagcccagctggccaagaacgccaagaccagcagcaacggcgagaacgtgcacctgggcagcggcgacggccagagcaaggacagcggccccctgccccaggtggagaagaagctgaagtgcaccgtggagggctgcgacagaaccttcgtgtggcccgcccacttcaagtaccacctgaagacccacagaaacgacagaagcttcatctgccccgccgagggctgcggcaagagcttctacgtgctgcagagactgaaggtgcacatgagaacccacaacggcgagaagcccttcatgtgccacgagagcggctgcggcaagcagttcaccaccgccggcaacctgaagaaccacagaagaatccacaccggcgagaagcccttcctgtgcgaggcccagggctgcggcagaagcttcgccgagtacagcagcctgagaaagcacctggtggtgcacagcggcgagaagccccaccagtgccaggtgtgcggcaagaccttcagccagagcggcagcagaaacgtgcacatgagaaagcaccacctgcagctgggcgccgccggcagccaggagcaggagcagaccgccgagcccctgatgggcagcagcctgctggaggaggccagcgtgcccagcaagaacctggtgagcatgaacagccagcccagcctgggcggcgagagcctgaacctgcccaacaccaacagcatcctgggcgtggacgacgaggtgctggccgagggcagccccagaagcctgagcagcgtgcccgacgtgacccaccacctggtgaccatgcagagcggcagacagagctacgaggtgagcgtgctgaccgccgtgaacccccaggagctgctgaaccagggcgacctgaccgagagaagaacctag

SEQ ID NO: 208334 - DNA, 1404 bp, Artificial Sequence
  derived and/or modified sequence
atgctgagcgacgagctggagagcaagcccgagctgctggtgcagttcgtgcagaacaccagcatccccctgggccagggcctggtggagagcgaggccaaggacatcacctgcctgagcctgctgcccgtgaccgaggccagcgagtgcagcagactgatgctgcccgacgacaccaccaaccacagcaacagcagcaaggaggtgcccagcagcgccgtgctgagaagcctgagagtgaacgtgggccccgacggcgaggagttcctgagcaccagcgagagcagcagcctgctgcaggacctgcagcccagcgacagcaccagcttcatcctgctgaacctgaccagagccggcctgggcagcagcgccgagcacctggtgttcgtgcaggacgaggccgaggacagcggcaacgacttcctgagcagcgagagcaccgacagcagcatcccctggttcctgagagtgcaggagctggcccacgacagcctgatcgccgccaccagagcccagctggccaagaacgccaagaccagcagcaacggcgagaacgtgcacctgggcagcggcgacggccagagcaaggacagcggccccctgccccaggtggagaagaagctgaagtgcaccgtggagggctgcgacagaaccttcgtgtggcccgcccacttcaagtaccacctgaagacccacagaaacgacagaagcttcatctgccccgccgagggctgcggcaagagcttctacgtgctgcagagactgaaggtgcacatgagaacccacaacggcgagaagcccttcatgtgccacgagagcggctgcggcaagcagttcaccaccgccggcaacctgaagaaccacagaagaatccacaccggcgagaagcccttcctgtgcgaggcccagggctgcggcagaagcttcgccgagtacagcagcctgagaaagcacctggtggtgcacagcggcgagaagccccaccagtgccaggtgtgcggcaagaccttcagccagagcggcagcagaaacgtgcacatgagaaagcaccacctgcagctgggcgccgccggcagccaggagcaggagcagaccgccgagcccctgatgggcagcagcctgctggaggaggccagcgtgcccagcaagaacctggtgagcatgaacagccagcccagcctgggcggcgagagcctgaacctgcccaacaccaacagcatcctgggcgtggacgacgaggtgctggccgagggcagccccagaagcctgagcagcgtgcccgacgtgacccaccacctggtgaccatgcagagcggcagacagagctacgaggtgagcgtgctgaccgccgtgaacccccaggagctgctgaaccagggcgacctgaccgagagaagaacctag

SEQ ID NO: 208335 - DNA, 1437 bp, Artificial Sequence
  derived and/or modified sequence
atgctgagcgacgagctggagagcaagcccgagctgctggtgcagttcgtgcagaacaccagcatccccctgggccagggcctggtggagagcgaggccaaggacatcacctgcctgagcctgctgcccgtgaccgaggccagcgagtgcagcagactgatgctgcccgacgacaccaccaaccacagcaacagcagcaaggaggtgcccagcagcgccgtgctgagaagcctgagagtgaacgtgggccccgacggcgaggagaccagagcccagaccgtgcagaagagccccgagttcctgagcaccagcgagagcagcagcctgctgcaggacctgcagcccagcgacagcaccagcttcatcctgctgaacctgaccagagccggcctgggcagcagcgccgagcacctggtgttcgtgcaggacgaggccgaggacagcggcaacgacttcctgagcagcgagagcaccgacagcagcatcccctggttcctgagagtgcaggagctggcccacgacagcctgatcgccgccaccagagcccagctggccaagaacgccaagaccagcagcaacggcgagaacgtgcacctgggcagcggcgacggccagagcaaggacagcggccccctgccccaggtggagaagaagctgaagtgcaccgtggagggctgcgacagaaccttcgtgtggcccgcccacttcaagtaccacctgaagacccacagaaacgacagaagcttcatctgccccgccgagggctgcggcaagagcttctacgtgctgcagagactgaaggtgcacatgagaacccacaacggcgagaagcccttcatgtgccacgagagcggctgcggcaagcagttcaccaccgccggcaacctgaagaaccacagaagaatccacaccggcgagaagcccttcctgtgcgaggcccagggctgcggcagaagcttcgccgagtacagcagcctgagaaagcacctggtggtgcacagcggcgagaagccccaccagtgccaggtgtgcggcaagaccttcagccagagcggcagcagaaacgtgcacatgagaaagcaccacctgcagctgggcgccgccggcagccaggagcaggagcagaccgccgagcccctgatgggcagcagcctgctggaggaggccagcgtgcccagcaagaacctggtgagcatgaacagccagcccagcctgggcggcgagagcctgaacctgcccaacaccaacagcatcctgggcgtggacgacgaggtgctggccgagggcagccccagaagcctgagcagcgtgcccgacgtgacccaccacctggtgaccatgcagagcggcagacagagctacgaggtgagcgtgctgaccgccgtgaacccccaggagctgctgaaccagggcgacctgaccgagagaagaacctag

SEQ ID NO: 208336 - DNA, 1278 bp, Artificial Sequence
  derived and/or modified sequence
atgctgccggacgataccacgaaccacagtaacagttctaaagaggttccatcgtcagcagtgcttcgctctctccgggttaacgtaggacccgatggagaggagaccagagcacagaccgtacagaagtctcctgagttcctgtccacaagtgagagttcctcgttgctccaggatttacaaccgagtgattctacatcctttattctgttgaatctgactcgcgcaggcttggggtccagcgcagagcatctcgtgtttgtgcaggatgaggccgaggacagcggcaatgactttctgagttcagagtctacggatagtagcattccttggtttctccgggtccaagagctggctcacgattctcttatcgccgccacacgcgctcaactggccaagaacgctaagaccagttctaacggcgagaacgtgcatctgggttccggcgatggacagtcaaaagattccggccccctcccgcaggtggagaaaaaacttaaatgcaccgtggagggatgcgatcggacgtttgtctggcctgcacattttaagtaccatctgaagacccaccggaatgacaggagctttatttgccccgccgaggggtgtgggaagagcttttatgtgttacaacgtcttaaagtgcatatgagaacacataatggggagaagccattcatgtgtcatgaaagcggctgtgggaagcaatttactactgcggggaacctgaagaatcatcggcggattcatactggtgagaaaccgttcctgtgcgaggcccaggggtgcggccgtagtttcgctgagtactcatctttaaggaagcatctggtagtgcattcaggtgaaaagcctcatcagtgccaggtgtgcgggaaaacattttctcagagtggctcaaggaatgtgcacatgcggaaacatcatctgcagctaggggccgcaggttcccaggaacaagagcaaactgcagagcctcttatgggaagctctctgttggaagaggcttcagttccaagcaagaatctcgtcagcatgaactcacagccatcactgggcggagaatcgctgaatctgccaaacacaaatagcatactaggagtcgatgacgaggttctggccgaggggtccccccgctcgctttcatcagtcccggatgtgacccaccacctggttaccatgcagtccggaagacagagttatgaggtgtctgtcctcacagccgtgaatccccaagagcttctgaaccagggagacctgacagagcgtcggacctag

SEQ ID NO: 208337 - DNA, 1404 bp, Artificial Sequence
  derived and/or modified sequence
atgctgagtgatgaacttgagtccaagcccgagctcctggtgcaattcgtccaaaacacctccattcccctgggacaggggctggtcgaaagcgaggcgaaggatattacctgtctgtccttactcccagtgaccgaagcgagcgagtgcagtcgtcttatgttgccagacgacactacaaaccattctaattccagcaaggaggtaccaagctcggcggtgctccgaagcctgcgcgttaatgtgggcccagacggagaggagtttctgtccacgtctgagtcatcctccctcctgcaagatctccaaccttccgacagtacatccttcatcttattaaatctgacaagagctggtcttgggtcttcagctgagcatctcgtgtttgttcaagacgaggccgaagactcaggcaatgacttcctctcttctgagtcaacggatagtagcattccatggtttttaagggtccaggagctggcacacgatagcctgattgccgctacacgggcccagcttgccaagaacgcaaagacatcgtccaatggagaaaacgtacatttaggatccggcgatggacagtccaaggactccggtcccctgccccaagttgaaaagaagctgaagtgcactgtcgagggctgcgatcgaaccttcgtctggcccgcgcattttaagtaccacctgaaaacgcaccggaatgatcggagctttatctgccctgcagaaggctgtgggaaaagcttttacgttttacagcgactgaaagtgcacatgaggacccataacggcgagaaaccctttatgtgtcacgagtctggatgcggcaagcaattcacaaccgctggcaatcttaaaaatcatcggcggatccacaccggggaaaaaccatttctttgtgaggcccaaggatgcggacggtcatttgccgagtacagttctctgcgcaaacacctggttgtgcatagcggggaaaaaccgcatcagtgccaagtttgcgggaagacgtttagccaatccggaagccgcaacgtccatatgcggaagcatcatttgcaacttggggccgccggatcccaggagcaggagcagactgcagagccgttaatggggtcatcacttctcgaagaggccagcgttcctagcaaaaatctcgtttctatgaattctcagcctagccttgggggagaatcattgaatctgccaaacaccaacagtattcttggagtcgatgacgaggtccttgccgagggcagtccgcggtctctcagcagcgtgccagatgtcactcaccaccttgtgacgatgcagtcaggacgtcagtcatatgaggtgtctgttttgacagctgtgaacccccaggagctcctgaatcagggcgatctgacggagaggaggacatag

SEQ ID NO: 208338 - DNA, 1437 bp, Artificial Sequence
  derived and/or modified sequence
atgctgtcggatgaattggagtccaagcctgaattgttggtgcagttcgtgcagaacactagcatccctttaggccaaggcctggtcgagtccgaggcaaaggatatcacttgtctgtcccttctccccgtgactgaggcaagcgaatgttctaggctgatgcttccagatgacacgactaaccacagcaacagtagtaaagaggtgccgagctccgcggtgctccgatcgttacgggtgaatgtgggccctgatggggaagaaacacgcgctcagaccgtccagaaaagccccgaattcctgagcacgagcgagtcatcaagcttactccaagacctgcagccctccgattccacctcattcatcttgctgaacctgaccagagcaggcttaggcagcagtgcagaacacctggtgtttgtccaggacgaagcagaggacagcgggaacgactttctgtctagcgagagtaccgattcaagcatcccttggttcctgagagtgcaggagctggcccacgattctctcatcgccgcgaccagggcccaactggcaaagaacgcgaaaacgagttctaatggcgaaaatgttcatttaggttctggagacgggcagtctaaggactcaggccctctcccacaagtggagaaaaaattaaagtgtacggtggaggggtgcgaccgaacatttgtgtggccagcccacttcaaatatcatctgaaaacacatagaaatgatcgatctttcatttgccccgccgaagggtgcggtaaaagtttctatgtgcttcagagactgaaggtacatatgagaactcacaacggggagaagcctttcatgtgccatgaatctgggtgcggcaagcagtttaccacggctggaaacctgaaaaaccatcggagaatccacacaggagagaagcccttcttatgcgaagcacagggctgcggtagatcttttgcagagtactccagtctgaggaagcatctggtggtgcacagcggtgagaagccccaccagtgccaagtatgtggcaaaacttttagtcagagcggttctaggaatgtgcacatgagaaagcatcatctccagctcggcgccgcaggatctcaggagcaggagcaaacggctgaaccactcatgggcagttccctacttgaggaagcctccgtaccctcaaaaaacctcgtctctatgaattctcagccatcgctggggggagagagcctcaacttaccaaataccaatagtatcctcggggtcgacgatgaagtcctggccgagggtagtccgaggtccctgagcagcgtcccggacgtcactcatcatttggttacaatgcagtcagggcggcaatcctatgaagtctcggtgttgacagcggtcaatccacaggagctgctgaaccagggtgatctcaccgaaagacgtacatag

SEQ ID NO: 208339 - DNA, 1278 bp, Artificial Sequence
  derived and/or modified sequence
atgctgcctgatgacaccaccaaccacagcaacagcagcaaggaggtgcccagcagcgctgtgctgcggagcctgcgggtgaatgtgggcccagatggagaggagacccgggcccagacagtgcagaagagccctgagttcctgagcaccagcgagagcagcagcctgctgcaggacctgcagcccagcgacagcaccagcttcatcctgctgaacctgacccgggccggcctgggcagcagcgctgagcacctggtgtttgtgcaggatgaagcagaagattctggaaatgacttcctgagcagcgagagcacagacagcagcatcccctggttcctgcgggtgcaggagctggcccatgacagcctgattgctgccacccgggcccagctggccaagaatgccaagaccagcagcaatggagaaaatgtgcacctgggcagcggagatggccagagcaaggacagcggccccctgccccaggtggagaagaagctgaagtgcaccgtggagggctgtgacaggacctttgtgtggccagcccacttcaagtaccacctgaagacccacagaaatgaccgctccttcatctgcccagctgagggctgcggcaagagcttctacgtgctgcagaggctgaaggtgcacatgaggacccacaatggagagaagcccttcatgtgccatgaaagtggctgcggcaagcagttcaccacagctggcaacctgaagaaccaccggcgcatccacactggagagaagcccttcctgtgtgaggcccagggctgcggccgcagctttgctgagtacagcagcctgaggaagcacctggtggtgcacagcggggagaagccccaccagtgccaggtgtgtgggaagaccttcagccagagcggcagcagaaatgtgcacatgaggaagcaccacctgcagctgggcgctgctggcagccaggagcaggagcagacagctgagcccctgatgggcagcagcctgctggaggaggcctctgtgcccagcaagaacctggtgtccatgaacagccagcccagcctgggcggggagagcctgaacctgcccaacaccaacagcatcctgggcgtggatgatgaggtgctggccgagggcagccccaggagcctgagctctgtgcctgatgtgacccaccacctggtgaccatgcagagcggccggcagagctatgaggtgtctgtgctgacagctgtgaacccccaggagctgctgaaccagggcgacctgacagaaagaagaacatag

SEQ ID NO: 208340 - DNA, 1404 bp, Artificial Sequence
  derived and/or modified sequence
atgctgagtgatgagctggagagcaagccagagctgctggtgcagtttgtgcagaacaccagcatccccctgggccagggcctggtggagagcgaggccaaggacatcacctgcctgagcctgctgcctgtgacagaggcctctgaatgttcccggctgatgctgcctgatgacaccaccaaccacagcaacagcagcaaggaggtgcccagcagcgctgtgctgcggagcctgcgggtgaatgtgggcccagatggagaggagttcctgagcaccagcgagagcagcagcctgctgcaggacctgcagcccagcgacagcaccagcttcatcctgctgaacctgacccgggccggcctgggcagcagcgctgagcacctggtgtttgtgcaggatgaagcagaagattctggaaatgacttcctgagcagcgagagcacagacagcagcatcccctggttcctgcgggtgcaggagctggcccatgacagcctgattgctgccacccgggcccagctggccaagaatgccaagaccagcagcaatggagaaaatgtgcacctgggcagcggagatggccagagcaaggacagcggccccctgccccaggtggagaagaagctgaagtgcaccgtggagggctgtgacaggacctttgtgtggccagcccacttcaagtaccacctgaagacccacagaaatgaccgctccttcatctgcccagctgagggctgcggcaagagcttctacgtgctgcagaggctgaaggtgcacatgaggacccacaatggagagaagcccttcatgtgccatgaaagtggctgcggcaagcagttcaccacagctggcaacctgaagaaccaccggcgcatccacactggagagaagcccttcctgtgtgaggcccagggctgcggccgcagctttgctgagtacagcagcctgaggaagcacctggtggtgcacagcggggagaagccccaccagtgccaggtgtgtgggaagaccttcagccagagcggcagcagaaatgtgcacatgaggaagcaccacctgcagctgggcgctgctggcagccaggagcaggagcagacagctgagcccctgatgggcagcagcctgctggaggaggcctctgtgcccagcaagaacctggtgtccatgaacagccagcccagcctgggcggggagagcctgaacctgcccaacaccaacagcatcctgggcgtggatgatgaggtgctggccgagggcagccccaggagcctgagctctgtgcctgatgtgacccaccacctggtgaccatgcagagcggccggcagagctatgaggtgtctgtgctgacagctgtgaacccccaggagctgctgaaccagggcgacctgacagaaagaagaacatag

SEQ ID NO: 208341 - DNA, 1437 bp, Artificial Sequence
  derived and/or modified sequence
atgctgagtgatgagctggagagcaagccagagctgctggtgcagtttgtgcagaacaccagcatccccctgggccagggcctggtggagagcgaggccaaggacatcacctgcctgagcctgctgcctgtgacagaggcctctgaatgttcccggctgatgctgcctgatgacaccaccaaccacagcaacagcagcaaggaggtgcccagcagcgctgtgctgcggagcctgcgggtgaatgtgggcccagatggagaggagacccgggcccagacagtgcagaagagccctgagttcctgagcaccagcgagagcagcagcctgctgcaggacctgcagcccagcgacagcaccagcttcatcctgctgaacctgaccagggctggcctgggcagcagcgctgagcacctggtgtttgtgcaggatgaagctgaggacagcggaaatgacttcctgagcagcgagagcacagacagcagcatcccctggttcctgcgggtgcaggagctggcccatgacagcctgattgctgccacccgggcccagctggccaagaatgccaagaccagcagcaatggagaaaatgtgcacctgggcagcggagatggccagagcaaggacagcggccccctgccccaggtggagaagaagctgaagtgcaccgtggagggctgtgacaggacctttgtgtggccagcccacttcaagtaccacctgaagacccacagaaatgacaggagcttcatctgcccagctgagggctgtgggaagagcttctacgtgctgcagaggctgaaggtgcacatgaggacccacaacggggagaagcccttcatgtgccacgagagcggctgtgggaagcagttcaccacagctggcaacctgaagaaccaccggcgcatccacactggagagaagcccttcctgtgtgaggcccagggctgcggccgcagctttgctgagtacagcagcctgaggaagcacctggtggtgcacagcggggagaagccccaccagtgccaggtgtgtgggaagaccttcagccagagcggcagcagaaatgtgcacatgaggaagcaccacctgcagctgggcgccgccggcagccaggagcaggagcagacagctgagcccctgatgggcagcagcctgctggaggaggcctctgtgcccagcaagaacctggtgtccatgaacagccagcccagcctgggcggggagagcctgaacctgcccaacaccaacagcatcctgggcgtggatgatgaggtgctggccgagggcagccccaggagcctgagctctgtgcctgatgtgacccaccacctggtgaccatgcagagcggccggcagagctatgaggtgtctgtgctgacagctgtgaacccccaggagctgctgaaccagggcgacctgacagagaggagaacatag

SEQ ID NO: 208342 - DNA, 1278 bp, Artificial Sequence
  derived and/or modified sequence
atgctgcccgacgacaccaccaaccacagcaacagcagcaaggaggtgccttcaagtgccgtcctaaggtctttgagagtgaacgtcggacctgatggcgaggaaacccgcgcccaaactgtgcaaaagagcccagagttcctgtccacctctgagtcatcgtcacttctgcaggacttgcagccgtctgattccaccagttttattcttctgaacctgacccgagcgggcctgggctccagtgccgagcacttagtcttcgttcaggacgaagcggaggactcagggaacgattttttaagctccgaatcaacggattcgtcaataccatggttcctccgcgtgcaggagttggcccacgattctctcattgctgctacaagagcgcagctggccaaaaacgccaagactagctcaaacggagagaacgtacatcttggcagcggagacggacagagtaaggactccggtccattaccacaggtagagaagaagttgaagtgtaccgtggaaggctgcgatcgtacttttgtgtggcctgcccactttaaataccacctcaaaacccacaggaacgaccgatccttcatttgcccggccgaaggatgtggcaaatccttctacgtcctccagcggcttaaggtccacatgcgaacccataacggggagaaaccatttatgtgccatgaatctggctgcggaaaacagtttacaacagcagggaacctgaagaatcacagaagaatccacaccggcgagaagccgttcctctgcgaagcacaaggctgcggcagaagcttcgccgagtatagttcactaagaaagcacctcgttgtgcacagcggtgaaaaaccgcaccaatgtcaggtctgcggcaagaccttttcacaatctggatcccgaaacgtacacatgcgaaagcatcacttgcagctcggcgccgccggatcacaggagcaggagcagaccgccgagccactgatgggctcgagtctactggaagaggccagtgtgccctcaaagaatctcgtatctatgaacagccaaccctccctgggaggcgaatctctcaatctgccaaacaccaactccattcttggagttgatgacgaggttctcgccgagggatctccccgctcactgagcagcgtgccagacgtcacccaccacttggtcactatgcaaagcggacggcagtcctatgaggtgtctgtgctgaccgctgtgaatcctcaggagctcctgaatcagggcgatctgacagagcgcaggacatag

SEQ ID NO: 208343 - DNA, 1404 bp, Artificial Sequence
  derived and/or modified sequence
atgctgagcgacgagctggagagcaagcccgagctgctggtgcagttcgtccagaatacttctattccgcttggacaggggctggttgaatcagaagccaaagacattacctgtctgagccttctgccagtcacagaggccagcgaatgctcacgtctcatgctcccagacgatactacaaatcactccaattcaagcaaggaggtccctagtagcgcagttctgagatctctgcgtgtgaatgtgggcccagatggtgaagagtttctatccacgagcgagagctcttccctccttcaggacctgcagccctcagactccaccagtttcattctgctgaatcttacacgggcaggcttgggcagctctgccgaacatttggtcttcgtacaggatgaagcagaggactctgggaatgacttcctctccagcgagtctaccgactctagtatcccctggttcctgcgcgtgcaagaacttgcacacgacagccttatagccgcaactcgcgcgcagctggcaaaaaatgcaaagacgtcgtcaaacggggaaaacgtccatctgggcagcggagacggacaatctaaagactccggacctctcccacaggtggaaaaaaaactcaagtgcacagtggaaggctgtgacagaaccttcgtctggcccgcacattttaaataccaccttaaaacccataggaatgaccgtagcttcatctgccctgctgaagggtgcggtaaaagtttctatgtcctacagagactgaaggtgcatatgagaactcacaatggcgagaaacccttcatgtgccatgagtcagggtgtggcaaacagtttaccacagcgggcaatctgaagaaccataggcgcatccataccggagaaaagccgttcctctgcgaggcccaaggatgcggcagatctttcgcagagtattctagcctgcgcaagcatcttgtagtgcacagcggcgagaagccccatcagtgtcaggtgtgcgggaaaacattctcacaatccggcagtagaaacgtccatatgcgcaagcaccatctgcagctcggggccgcaggcagccaggagcaggagcagaccgctgagccgctaatgggtagcagcctgctggaggaggctagtgtcccgtccaagaacctcgtgtctatgaacagccagccttctttaggcggcgaaagcctcaaccttccaaatactaattctatactgggggtcgacgacgaggtgctagccgaaggcagtccgcgcagcctgtcctcagtccccgacgtgactcaccacctggtgaccatgcagagtggaagacagtcttacgaggtaagtgtgctgacggctgtgaatccccaagaactgctgaatcaaggcgacctgacagagcgtcgcacttag

SEQ ID NO: 208344 - DNA, 1437 bp, Artificial Sequence
  derived and/or modified sequence
atgctgagcgacgagctggagagcaagcccgagctgctggtgcagttcgtgcaaaacacaagtataccactggggcaggggctggtcgagtcggaagctaaagatatcacttgtctgagcctactgcccgtaacagaggcctccgagtgcagcagacttatgttgcccgatgacactacaaatcatagcaattcttccaaagaagtgccatcgtctgccgtgttgcggagcctgagagtgaacgtagggcccgatggtgaggagacccgggcccagactgtgcaaaaaagccccgagttcttgagtacgtcggagtcttcaagcctgctccaggatctccagccctcggactctacaagcttcatcctgcttaatctaacaagggcaggcttaggcagctcggcagagcatctagtgtttgtgcaggacgaggccgaggattccggaaacgacttcctcagctctgagagcaccgacagctccattccttggtttctgcgggtgcaggagctggcgcatgattccctaatagccgccacaagggcacagctcgcaaaaaatgctaagacaagttctaacggagaaaacgttcatttggggagcggcgatggccaatcgaaggatagcgggccactgccgcaggttgaaaagaagttgaaatgcacagtggagggttgtgatcggactttcgtgtggccagcacattttaagtaccacctgaaaacgcaccgcaacgacaggtccttcatatgccctgctgaagggtgtggcaaatccttctacgtgctgcagaggctcaaggtccatatgaggacacacaacggagaaaagcccttcatgtgtcacgaaagtgggtgcggaaagcagtttacaactgctgggaatctgaaaaaccacaggaggatccatacaggagaaaaacctttcctgtgcgaagcgcagggctgcggccgatcttttgctgagtactcatcgcttcgtaaacacttagtggtgcacagtggagagaagccccatcaatgtcaggtctgcggaaagactttttcccagtctgggtctaggaatgtgcatatgcgtaagcatcacctgcaactcggtgccgccggatcacaggagcaggagcagaccgccgagccgttgatgggttcatcccttctcgaagaagcaagcgtgcctagcaagaatctggtttcaatgaattcacaacccagcctgggaggcgaaagtctcaatttgcccaatacgaatagcatattgggcgtggatgatgaggtgttggccgaaggctcacctaggagcctgtcatcagtgcctgacgtgacacaccatctggtaacaatgcagtcgggtaggcagtcgtacgaggtgagcgtgttaactgccgtcaaccctcaggaactgctgaatcagggcgatctaactgaacggaggacctag

SEQ ID NO: 208345 - DNA, 1278 bp, Artificial Sequence
  derived and/or modified sequence
atgttgcctgacgacaccacgaaccacagtaactcctcaaaagaagtgccgagctctgctgtgctgagaagtttgcgagtaaacgtaggacccgatggagaagagacacgtgcacaaaccgtccaaaaaagtccagagttcctctctacttccgagtccagcagcttgcttcaagatttgcagcccagcgactctacaagctttatcctgctgaacctcacacgggcaggactcggctcatctgcggaacatctcgtgtttgtgcaggatgaggcagaggattctggcaacgacttcctcagcagtgaatccaccgactctagcatcccgtggtttttgcgcgtgcaggaactagctcacgactcactcatcgccgcaaccagggcccagcttgccaagaacgctaagacttccagcaatggggaaaatgttcatttaggttccggcgatgggcagtccaaggatagcggcccattgcctcaggtggaaaagaagttaaagtgcaccgttgagggctgcgatagaacctttgtgtggcctgcccatttcaagtaccatctgaaaacccatagaaatgaccgcagcttcatatgtcctgctgaagggtgcggaaaaagcttctacgtgctgcagaggctgaaagtccacatgcgcacacacaacggagagaaaccgttcatgtgtcatgaatctgggtgtggtaagcagtttaccacagctggcaatttaaagaatcatcgcagaatacacactggcgaaaagccatttctgtgtgaagcacaaggctgcggtaggagtttcgccgaatatagttccctgaggaaacacttggtggtccacagtggcgagaaaccacaccagtgtcaagtttgtgggaaaactttttcccaaagcggaagcagaaatgtgcatatgcgtaaacaccacctgcagctgggcgcagctggtagccaagaacaggagcagaccgccgaaccactgatgggaagcagcttgcttgaggaagccagcgtgcccagcaagaatttagtttcaatgaattcacagccttcccttgggggagagagcttgaacctgcctaacaccaactcaatactgggcgtagatgacgaagtcctagccgaggggagtcccagaagtctatcctccgtgcccgacgtgactcatcacctcgtcaccatgcagtcaggaagacagtcgtatgaggtaagtgttcttaccgccgtaaatcctcaggagctgttaaaccagggtgatttgacagaaagacggacctag

SEQ ID NO: 208346 - DNA, 1404 bp, Artificial Sequence
  derived and/or modified sequence
atgctgagtgatgaattggagagtaaaccagagcttcttgtgcaatttgttcaaaacacctcaatcccattaggccaaggattagtggagagtgaggctaaggacatcacatgcctttctctgctgcccgtaaccgaggcgtccgagtgttctcgccttatgctgcctgacgatactacgaatcatagcaacagctctaaggaggtaccgagtagtgcggtgctgcggtccctgagagtgaatgtgggtcccgacggcgaggaatttttgagtaccagtgaatcaagttcccttttgcaagatcttcagccttccgattccacttcttttattctcctcaacctgacccgggcaggcctcggtagctccgcagagcacctggtattcgtgcaggacgaagctgaggatagcggcaatgattttctgtcctcagagtctacagattctagtattccatggttccttagagttcaggagttggcacatgattcgctgatcgctgctacgagagcacagctggctaaaaacgctaaaacatcaagtaacggtgaaaatgtgcacctggggagtggcgatggacagtccaaagatagtggcccactaccccaggtcgaaaagaaacttaagtgcacagtggaggggtgcgatcggaccttcgtttggcccgcacatttcaaataccatctgaagacgcaccggaatgataggagctttatctgccccgctgaagggtgcggcaaatcattctacgtccttcagagactgaaagtccacatgcggacccacaatggtgagaagccctttatgtgccacgaaagtggttgtgggaagcagttcactaccgctggcaatttgaaaaatcacagacggatacacactggcgagaagccctttctgtgcgaggctcaaggttgtgggcgttccttcgcagaatacagcagtctccgcaagcacttggtagtccacagcggcgagaaacctcaccagtgccaagtctgcggcaaaacattctctcagagcgggagccgcaatgtacatatgcgaaagcaccatttgcagttgggtgcagccggatcccaagagcaagagcagactgcagagcctctcatggggagttcccttcttgaggaggcctcagttcccagtaagaacctagtgtctatgaatagccagccatctttggggggagagtcgttaaacctgcccaatactaatagtattcttggtgttgatgacgaagtgttagccgaggggtcacctcgctccttgtctagcgttcccgacgtgacccatcacctggtgacaatgcagtcaggtcggcagagttacgaagtctccgtgctgacggctgttaatccacaggaactgttgaatcaaggcgacctaacggagaggagaacctag

SEQ ID NO: 208347 - DNA, 1437 bp, Artificial Sequence
  derived and/or modified sequence
atgttgtccgatgagctggagtccaagcccgagttactggtccaattcgtgcagaacacaagcattccattggggcagggcttagttgaatcggaagcgaaagacattacttgccttagtctcctgcccgtgactgaagcaagcgagtgtagccggctcatgctccctgacgacaccactaaccattcaaactcatctaaagaggtaccatcaagcgcggttttgcgaagtcttcgagtcaacgtgggccctgatggcgaggagactagagctcagaccgtgcagaaaagtccagagtttctgtcaacaagcgagagcagctctcttctccaggacttgcagccttctgattctacctctttcatcctcctgaacttgactagggccggacttggctcatctgcagagcacctcgtcttcgtgcaggatgaagcggaggactcgggaaatgacttcctctcatccgagagcaccgactcatccatcccatggttcttgcgagtgcaagagttggcacatgattccctcattgcggctacacgggcacagttagccaagaacgccaagacctcctcgaatggggaaaacgtgcacctcggcagcggcgacggtcagagcaaagatagtggtccactgccacaggtggagaagaagttaaagtgcaccgtggaaggatgtgaccggacttttgtgtggcccgcacactttaaataccatttgaaaactcatcgcaacgaccgttccttcatatgtcccgcagaaggatgtggaaagtcattctatgtactgcagagactgaaagtgcatatgcgcacacataacggagagaaaccttttatgtgtcacgaatcaggttgcgggaagcagttcactacggctggtaacctgaagaaccatagaagaatccacacaggtgaaaaaccatttctgtgcgaggctcagggctgcggcaggtcgttcgcggagtactcttctctacggaagcatctggtggtgcattctggcgagaagcctcatcagtgtcaagtgtgtggcaaaaccttctcacagtcaggctcccggaatgtgcacatgcggaagcaccacctccagttgggtgccgctgggtcccaggagcaggaacagaccgctgaacccctgatggggagtagtctgctggaggaagcgtctgtccccagtaagaatttggtgagcatgaattcacagccctctttaggaggcgaaagcctaaacctgcctaacaccaatagcattctgggcgttgacgatgaagtcctcgcagaggggtctcccaggagcctcagctctgtacccgatgttacccatcacttggtgactatgcagtcaggacgccagtcttacgaggtgtctgttctgaccgcggtgaatccccaggagctactaaaccagggtgacctgactgagcgacgcacctag

SEQ ID NO: 208348 - DNA, 2193 bp, Artificial Sequence
  derived and/or modified sequence
aggttacattgattacccacctagtacaacatcttacgggaagagcatagtatttcctagaggaatatgaacataacaggaagctcctggtacagtttgttcagaatacgtccatcccattgggacaggggcttgtagaatcagaagctaaagatattacttgcttgtccctccttcccgtgactgaagcctcagaatgcagtcggctaatgttaccagatgatactacaaatcattctaactcctccaaggaggtcccttcctcagctgttttgagaagccttcgggtgaatgtgggtccagacggagaggagacgagagctcagactgtacagaaatccccggagtttttgtccacttcagagtcttctagcttgttgcaagatctacagccaagtgatagcacttcttttattcttcttaacctaacaagagcaggtctgggctcttcagctgagcacttagtgtttgtacaggatgaggcagaagattcagggaatgatttcctctccagtgagagcacagacagtagcattccatggttcctccgggttcaggagttggcccatgacagtttgattgctgctactcgtgcacaactggcaaagaatgcaaaaaccagcagcaatggagaaaatgtccaccttggttctggtgatgggcagtcaaaagattctgggccccttcctcaagtggaaaagaagctcaagtgtacagttgaaggttgtgaccggacatttgtatggccagctcactttaaataccacctcaagactcatcgaaatgaccgctccttcatctgtcctgcagaaggttgtgggaaaagcttctatgtgctgcagaggctgaaggtgcacatgaggacccacaatggagagaagccctttatgtgccatgagtctggctgtggtaagcagtttactacagctggaaacctgaagaaccaccggcgcatccacacaggagagaaacctttcctttgtgaagcccaaggatgtggccgttcctttgctgagtattctagcctccgaaaacatctggtggttcactcaggagagaagcctcatcagtgccaagtctgtgggaagaccttctctcagagtggaagcaggaatgtgcatatgagaaagcatcacctgcagctgggagcagctgggagtcaagagcaggagcaaactgctgagccactaatgggcagtagtttgcttgaagaggcttcagtacccagtaaaaacctggtgtctatgaattcccagcccagccttggtggagagtccttgaacctaccaaataccaattctatcctgggagttgatgatgaggtgcttgctgaaggatccccacgttccctgtcttcagtgcctgatgtgacacatcacctggtgaccatgcagtcagggaggcaatcatatgaagtttctgtcttaactgcagtaaatccacaagagttactaaaccaaggagatttaactgaaagacggacatgagcgtgggtgctgactcctggaagagcaactctatctgatctcaaaatgcgtatactgggaacaggatgccttagcccacaacagaaccagaatgaatctttgaaggcacaagactctgcttttgccactcttcctctttcctggtatagaagatggatgtaggagagcttcttttctaactaccatctgatcagacaaggaatgaagcaatgactgtgggctgggaaactgtacctacctctcttcccactgcaaatttctgggatagaccaaaagtgaatttgattatgtgttggctgaagttcttcattctgactgttgaggggaggttttcctttgaagagttttcatcccagactcagctgtcttttcacatggatgaaataattcctgctaccaacaacagagcttcaccaggaagttgagttttcaagatgccttgttgctttgaagaagggagtgatgtcaattctcttgttacattctccctttagcaacctgagtaagagactctctgccactgggctgcaaaaaaataaattacttgaatctccccttggcccaggctgaggtactatcttgtcctatacacttctacttggtcactttgctttcttcgttaatggaacatacagtagcatgttaagagggatttcatgtttttgtttttttaaagttaaaaattacatgatgcagagattcaggt

SEQ ID NO: 208349 - DNA, 2063 bp, Artificial Sequence
  derived and/or modified sequence
gtgtgtggacggaattcgggaccgactgacggccggccggcttcccggaactggaaggttacattgattacccacctagtacaacatcttacgggaagagcatagtatttcctagaggaatatgaacataacaggaaggtatcattggctctgaattaaatttgaacttgtcccctgaatagctacaggttttggaagctgaatcaatgttatcagatgagttagaatccaaaccagagctcctggtacagtttgttcagaatacgtccatcccattgggacaggggcttgtagaatcagaagctaaagatattacttgcttgtccctccttcccgtgactgaagcctcagaatgcagtcggctaatgttaccagatgatactacaaatcattctaactcctccaaggaggtcccttcctcagctgttttgagaagccttcgggtgaatgtgggtccagacggagaggagtttttgtccacttcagagtcttctagcttgttgcaagatctacagccaagtgatagcacttcttttattcttcttaacctaacaagagcaggtctgggctcttcagctgagcacttagtgtttgtacaggatgaggcagaagattcagggaatgatttcctctccagtgagagcacagacagtagcattccatggttcctccgggttcaggagttggcccatgacagtttgattgctgctactcgtgcacaactggcaaagaatgcaaaaaccagcagcaatggagaaaatgtccaccttggttctggtgatgggcagtcaaaagattctgggccccttcctcaagtggaaaagaagctcaagtgtacagttgaaggttgtgaccggacatttgtatggccagctcactttaaataccacctcaagactcatcgaaatgaccgctccttcatctgtcctgcagaaggttgtgggaaaagcttctatgtgctgcagaggctgaaggtgcacatgaggacccacaatggagagaagccctttatgtgccatgagtctggctgtggtaagcagtttactacagctggaaacctgaagaaccaccggcgcatccacacaggagagaaacctttcctttgtgaagcccaaggatgtggccgttcctttgctgagtattctagcctccgaaaacatctggtggttcactcaggagagaagcctcatcagtgccaagtctgtgggaagaccttctctcagagtggaagcaggaatgtgcatatgagaaagcatcacctgcagctgggagcagctgggagtcaagagcaggagcaaactgctgagccactaatgggcagtagtttgcttgaagaggcttcagtacccagtaaaaacctggtgtctatgaattcccagcccagccttggtggagagtccttgaacctaccaaataccaattctatcctgggagttgatgatgaggtgcttgctgaaggatccccacgttccctgtcttcagtgcctgatgtgacacatcacctggtgaccatgcagtcagggaggcaatcatatgaagtttctgtcttaactgcagtaaatccacaagagttactaaaccaaggagatttaactgaaagacggacatgagcgtgggtgctgactcctggaagagcaactctatctgatctcaaaatgcgtatactgggaacaggatgccttagcccacaacagaaccagaatgaatctttgaaggcacaagactctgcttttgccactcttcctctttcctggtatagaagatggatgtaggagagcttcttttctaactaccatctgatcagacaaggaatgaagcaatgactgtgggctgggaaactgtacctacctctcttcccactgcaaatttctgggatagaccaaaagtgaatttgattatgtgttggctgaagttcttcattctgactgttgaggggaggttttcctttgaagagttttcatcccagactcagctgtcttttcacatggatgaaataattcctgctaccaacaacagagcttcaccaggaagttgagttttcaagatgccttgttgctttgaag

SEQ ID NO: 208350 - DNA, 2601 bp, Artificial Sequence
  derived and/or modified sequence
aattcgggaccgactgacggccggccggcttcccggaactggaaggttacattgattacccacctagtacaacatcttacgggaagagcatagtatttcctagaggaatatgaacataacaggaaggtatcattggctctgaattaaatttgaacttgtcccctgaatagctacaggttttggaagctgaatcaatgttatcagatgagttagaatccaaaccagagctcctggtacagtttgttcagaatacgtccatcccattgggacaggggcttgtagaatcagaagctaaagatattacttgcttgtccctccttcccgtgactgaagcctcagaatgcagtcggctaatgttaccagatgatactacaaatcattctaactcctccaaggaggtcccttcctcagctgttttgagaagccttcgggtgaatgtgggtccagacggagaggagacgagagctcagactgtacagaaatccccggagtttttgtccacttcagagtcttctagcttgttgcaagatctacagccaagtgatagcacttcttttattcttcttaacctaacaagagcaggtctgggctcttcagctgagcacttagtgtttgtacaggatgaggcagaagattcagggaatgatttcctctccagtgagagcacagacagtagcattccatggttcctccgggttcaggagttggcccatgacagtttgattgctgctactcgtgcacaactggcaaagaatgcaaaaaccagcagcaatggagaaaatgtccaccttggttctggtgatgggcagtcaaaagattctgggccccttcctcaagtggaaaagaagctcaagtgtacagttgaaggttgtgaccggacatttgtatggccagctcactttaaataccacctcaagactcatcgaaatgaccgctccttcatctgtcctgcagaaggttgtgggaaaagcttctatgtgctgcagaggctgaaggtgcacatgaggacccacaatggagagaagccctttatgtgccatgagtctggctgtggtaagcagtttactacagctggaaacctgaagaaccaccggcgcatccacacaggagagaaacctttcctttgtgaagcccaaggatgtggccgttcctttgctgagtattctagcctccgaaaacatctggtggttcactcaggagagaagcctcatcagtgccaagtctgtgggaagaccttctctcagagtggaagcaggaatgtgcatatgagaaagcatcacctgcagctgggagcagctgggagtcaagagcaggagcaaactgctgagccactaatgggcagtagtttgcttgaagaggcttcagtacccagtaaaaacctggtgtctatgaattcccagcccagccttggtggagagtccttgaacctaccaaataccaattctatcctgggagttgatgatgaggtgcttgctgaaggatccccacgttccctgtcttcagtgcctgatgtgacacatcacctggtgaccatgcagtcagggaggcaatcatatgaagtttctgtcttaactgcagtaaatccacaagagttactaaaccaaggagatttaactgaaagacggacatgagcgtgggtgctgactcctggaagagcaactctatctgatctcaaaatgcgtatactgggaacaggatgccttagcccacaacagaaccagaatgaatctttgaaggcacaagactctgcttttgccactcttcctctttcctggtatagaagatggatgtaggagagcttcttttctaactaccatctgatcagacaaggaatgaagcaatgactgtgggctgggaaactgtacctacctctcttcccactgcaaatttctgggatagaccaaaagtgaatttgattatgtgttggctgaagttcttcattctgactgttgaggggaggttttcctttgaagagttttcatcccagactcagctgtcttttcacatggatgaaataattcctgctaccaacaacagagcttcaccaggaagttgagttttcaagatgccttgttgctttgaagaagggagtgatgtcaattctcttgttacattctccctttagcaacctgagtaagagactctctgccactgggctgcaaaaaaataaattacttgaatctccccttggcccaggctgaggtactatcttgtcctatacacttctacttggtcactttgctttcttcgttaatggaacatacagtagcatgttaagagggatttcatgtttttgtttttttaaagttaaaaattacatgatgcagagattcaggttttcctttaaataaacaaaacagcccagtcagttctttggctcttgttttatacaaaatttgttttcttagagattaagaatttaatctttccctttaaaatagtgtattgatttacccttaggattccataccagtaaaactgaaccgaggagtcttaggaaacaacaagaacatcttcatttcttaagcccaggtgatagttactctgtcaccaccaaaaaagacgcatctgagaaaatggcaataaaaacagatacttctg

SEQ ID NO: 208351 - protein, 432 aa, Artificial Sequence
  derived and/or modified sequence
MGAPAASLLLLLLLFACCWAPGGANLSQDGYWQEQDLELGTLAPLDEAISSTVWSSPDMLASQDSQPWTSDETVVAGGTVVLKCQVKDHEDSSLQWSNPAQQTLYFGEKRALRDNRIQLVTSTPHELSISISNVALADEGEYTCSIFTMPVRTAKSLVTVLGIPQKPIITGYKSSLREKDTATLNCQSSGSKPAARLTWRKGDQELHGEPTRIQEDPNGKTFTVSSSVTFQVTREDDGASIVCSVNHESLKGADRSTSQRIEVLYTPTAMIRPDPPHPREGQKLLLHCEGRGNPVPQQYLWEKEGSVPPLKMTQESALIFPFLNKSDSGTYGCTATSNMGSYKAYYTLNVNDPSPVPSSSSTYHAIIGGIVAFIVFLLLIMLIFLGHYLIRHKGTYLTHEAKGSDDAPDADTAIINAEGGQSGGDDKKEYFI

SEQ ID NO: 208352 - DNA, 1299 bp, Artificial Sequence
  derived and/or modified sequence
atgggcgcccccgccgccagcctgctgctgctgctgctgctgttcgcctgctgctgggcccccggcggcgccaacctgagccaggacggctactggcaggagcaggacctggagctgggcaccctggcccccctggacgaggccatcagcagcaccgtgtggagcagccccgacatgctggccagccaggacagccagccctggaccagcgacgagaccgtggtggccggcggcaccgtggtgctgaagtgccaggtgaaggaccacgaggacagcagcctgcagtggagcaaccccgcccagcagaccctgtacttcggcgagaagagagccctgagagacaacagaatccagctggtgaccagcaccccccacgagctgagcatcagcatcagcaacgtggccctggccgacgagggcgagtacacctgcagcatcttcaccatgcccgtgagaaccgccaagagcctggtgaccgtgctgggcatcccccagaagcccatcatcaccggctacaagagcagcctgagagagaaggacaccgccaccctgaactgccagagcagcggcagcaagcccgccgccagactgacctggagaaagggcgaccaggagctgcacggcgagcccaccagaatccaggaggaccccaacggcaagaccttcaccgtgagcagcagcgtgaccttccaggtgaccagagaggacgacggcgccagcatcgtgtgcagcgtgaaccacgagagcctgaagggcgccgacagaagcaccagccagagaatcgaggtgctgtacacccccaccgccatgatcagacccgaccccccccaccccagagagggccagaagctgctgctgcactgcgagggcagaggcaaccccgtgccccagcagtacctgtgggagaaggagggcagcgtgccccccctgaagatgacccaggagagcgccctgatcttccccttcctgaacaagagcgacagcggcacctacggctgcaccgccaccagcaacatgggcagctacaaggcctactacaccctgaacgtgaacgaccccagccccgtgcccagcagcagcagcacctaccacgccatcatcggcggcatcgtggccttcatcgtgttcctgctgctgatcatgctgatcttcctgggccactacctgatcagacacaagggcacctacctgacccacgaggccaagggcagcgacgacgcccccgacgccgacaccgccatcatcaacgccgagggcggccagagcggcggcgacgacaagaaggagtacttcatctag

SEQ ID NO: 208353 - DNA, 1299 bp, Artificial Sequence
  derived and/or modified sequence
atgggagctccagctgcgtctttgttgctgttactcctgctgtttgcctgctgctgggcacctggtggtgctaaccttagtcaggatgggtactggcaggagcaagatctcgagctgggtacactggccccattggacgaggcaatctcatcgacagtatggtctagtccagatatgttggccagccaggattcgcagccctggacctcagatgagactgtggtggcaggcggaacagtggtcctcaagtgccaagtgaaggaccacgaggacagtagtctgcaatggagtaatccagctcaacagacactttacttcggagagaagcgggcactccgagataacaggatccagttagtgacatccactccccatgaactgtccattagcattagtaacgtcgctctggcagacgaaggagaatacacgtgcagcatattcactatgccagtaagaaccgcaaagagtctcgttactgtgctgggcattccgcaaaagccaatcatcacaggctataagtcttccctccgcgagaaggataccgccacgctaaactgtcagtcttccgggagtaaaccggcagccaggctgacatggagaaaaggcgatcaggagctgcacggggagcccactcgtatccaggaggatccgaacgggaagactttcaccgtgtccagctctgtcacattccaggtcacgcgagaggacgatggtgcctcaatcgtatgctcggtgaatcacgagtctctgaaaggagcagatcgcagcaccagccagcgcatcgaggtcttgtatacgccaacagcaatgatacgccccgatcctcctcacccccgcgagggccagaagttactccttcactgtgagggccggggaaatcccgtgcctcagcagtacctatgggagaaggagggatccgtcccacctctcaagatgacgcaggaatccgctctcattttccccttcttgaacaaaagcgattctggaacctatgggtgcacagctacgagcaatatggggtcttacaaggcctactatacacttaacgtgaacgatccaagtccagtgccatcgagttcttccacgtatcacgctattattgggggaattgttgcctttatcgtttttcttctactgattatgttaatatttctgggccattacctgatcaggcacaagggaacgtatttgacacatgaggccaaggggtctgatgacgcacctgatgctgatacagctataataaacgccgagggcgggcagtccggtggagatgataaaaaagagtactttatctag

SEQ ID NO: 208354 - DNA, 1299 bp, Artificial Sequence
  derived and/or modified sequence
atgggcgccccagctgccagcctgctgctgctgctgctgctgtttgcctgctgctgggcccctggaggagccaacctgagccaggacggctactggcaggagcaggacctggagctgggcaccctggcccccctggatgaggccatcagcagcacagtgtggagcagcccagacatgctggccagccaggacagccagccctggaccagtgatgaaacagtggtggccggcggcaccgtggtgctgaagtgccaggtgaaggaccacgaggacagcagcctgcagtggagcaacccagcccagcagaccctgtactttggagagaagagggccctgcgggacaaccgcatccagctggtgaccagcacccctcatgagctgagcatcagcatcagcaatgtggccctggctgatgaaggagagtacacctgcagcatcttcaccatgcctgtgaggacagccaagagcctggtgacagtgctgggcatcccccagaagcccatcatcaccggctacaagagcagcctgcgggagaaggacacagccaccctgaactgccagagcagcggcagcaagccagctgcccggctgacctggaggaaaggagaccaggagctgcatggagagcccacccgcatccaggaggaccccaacgggaagaccttcaccgtgagcagctctgtgaccttccaggtgaccagagaagatgatggagccagcatcgtgtgcagcgtgaaccacgagagcctgaagggagctgacaggagcaccagccagagaattgaggtgctgtacacccccacagccatgatccggccagaccccccccacccccgggagggccagaagctgctgctgcactgtgagggccggggcaaccctgtgccccagcagtacctgtgggagaaggagggctctgtgccccccctgaagatgacccaggagagcgccctgatcttccccttcctgaacaagagtgacagcggcacctacggctgcacagccaccagcaacatgggcagctacaaggcctactacaccctgaatgtgaatgaccccagccctgtgcccagcagcagcagcacctaccacgccatcattggaggcatcgtggccttcatcgtgttcctgctgctgatcatgctgatcttcctgggccactacctgatccgccacaagggcacctacctgacccatgaggccaagggcagtgatgatgccccagatgctgacacagccatcatcaatgctgagggcggccagagcggaggagatgacaagaaggagtacttcatctag

SEQ ID NO: 208355 - DNA, 1299 bp, Artificial Sequence
  derived and/or modified sequence
atgggcgcccccgccgccagcctgctgctgctgctgctgctgttcgcatgttgttgggcccctgggggcgcaaatctgtcgcaagacggctattggcaggaacaggacctggaactggggacactcgcccccctggacgaggccatcagtagcactgtctggtcttcccctgatatgctcgccagtcaagattctcagccatggacctccgacgaaacagtggtcgcgggtggaacagtggttctcaagtgccaagtgaaagatcatgaggactcctcacttcaatggtccaatcccgcacaacagactctgtactttggcgagaagagagcactgcgagacaacagaattcaattagtgacttccacccctcatgagctatccatcagcatctccaatgtggccctggccgatgagggtgaatatacttgttcaatatttactatgcccgtgcgcaccgcaaagtccctggtgaccgtactcgggatacctcagaaaccgatcatcacaggatataagtcctcactgagagaaaaggatacagctacactcaactgtcagagctcgggcagcaagcccgccgcccgtctgacatggcggaagggggaccaggaactgcacggagagcctacgcgtattcaggaagacccaaatggtaagacattcacagtgtccagtagtgtcacttttcaggttactcgggaggatgacggggcatcgattgtctgtagcgtcaaccatgagagcttaaagggcgcagatcgcagcaccagccaaaggatcgaagttctgtacacacccactgctatgatccggcccgacccacctcacccgagagagggtcagaagttgctgctccattgcgaaggaagagggaaccccgttccccagcaatacctctgggaaaaggaaggctctgttcccccgctcaagatgacccaggagagcgcactgatcttcccttttctgaacaagagcgattccggaacctatggttgtactgctacttccaatatgggatcctacaaggcttactacacactgaacgtgaatgatccaagccctgtcccctcctcctcatccacctatcacgctattatcggtggaatcgttgctttcatcgtcttcctcttgctcatcatgctaatctttttgggtcattacctgattcggcacaaaggaacgtatcttactcacgaagccaaaggtagtgatgacgcccccgacgctgacacagcgatcatcaacgccgaaggtggccaatcaggcggcgatgacaagaaagaatacttcatttag

SEQ ID NO: 208356 - DNA, 1299 bp, Artificial Sequence
  derived and/or modified sequence
atgggtgcaccagcagctagcttgttgttgctactgctgctcttcgcctgttgctgggcccctggaggagcaaacttgtctcaggacggctactggcaggaacaggatctggaactgggcacactcgcaccattggacgaggcaatctcctccacagtgtggtcatctcccgacatgctggcttctcaggactcacaaccttggactagcgacgagactgtagtggctggtggtaccgttgtgctgaaatgccaggttaaagaccacgaagactcctccttgcaatggtccaacccagcccagcaaactctctacttcggcgaaaagcgggctttacgagacaatcgcatacagctagtcacaagcacacctcatgagttatctatctctatctccaatgtagccctggccgatgagggcgagtatacttgctccatttttactatgccagtccgcacggccaaaagccttgtgaccgtgcttgggatcccccagaaacctatcattactggttataagagctcacttcgtgagaaggatacagccacgttgaattgccagtcttccggatcaaagcctgccgcaaggctgacctggagaaaaggggaccaggagctgcatggtgaaccaacacgcatccaagaggatcccaacggaaagacattcacggtcagcagttctgtcacatttcaggtgacaagagaagatgacggggctagtattgtgtgttccgtcaaccacgagtctctgaaaggggctgaccgaagtactagtcaaaggatcgaagttctttacaccccaactgcaatgattagaccggatccccctcaccccagagaaggccagaagttgctcctgcactgcgagggaagaggaaatcctgttccacagcagtacctgtgggaaaaggagggctcagtcccacccctgaaaatgacgcaagagagcgcccttatctttccatttttgaataagagcgacagtggcacgtacggttgcaccgccacgtccaacatgggcagctacaaagcctactatacactgaatgtgaacgatcctagccccgtgcctagtagctcaagcacataccatgcgattataggtggcatcgtggcgttcattgtatttcttctgcttattatgttgatttttctgggtcactatttgatcaggcataaggggacctacctcacccacgaagctaagggcagcgatgacgccccagacgcagatacggctattattaacgccgaaggtggccagtctggaggggacgataaaaaggagtacttcatctag

SEQ ID NO: 208357 - DNA, 2546 bp, Artificial Sequence
  derived and/or modified sequence
agcgccggctccctcccggtccccacctcggccccgggctccgaagcggctcgggggcgccctttcggtcaacatcgtagtccaccccctccccatccccagcccccggggattcaggctcgccagcgcccagccagggagccggccgggaagcgcgatgggggccccagccgcctcgctcctgctcctgctcctgctgttcgcctgctgctgggcgcccggcggggccaacctctcccaggacggctactggcaggagcaggatttggagctgggaactctggctccactcgacgaggccatcagctccacagtctggagcagccctgacatgctggccagtcaagacagccagccctggacatctgatgaaacagtggtggctggtggcaccgtggtgctcaagtgccaagtgaaagatcacgaggactcatccctgcaatggtctaaccctgctcagcagactctctactttggggagaagagagcccttcgagataatcgaattcagctggttacctctacgccccacgagctcagcatcagcatcagcaatgtggccctggcagacgagggcgagtacacctgctcaatcttcactatgcctgtgcgaactgccaagtccctcgtcactgtgctaggaattccacagaagcccatcatcactggttataaatcttcattacgggaaaaagacacagccaccctaaactgtcagtcttctgggagcaagcctgcagcccggctcacctggagaaagggtgaccaagaactccacggagaaccaacccgcatacaggaagatcccaatggtaaaaccttcactgtcagcagctcggtgacattccaggttacccgggaggatgatggggcgagcatcgtgtgctctgtgaaccatgaatctctaaagggagctgacagatccacctctcaacgcattgaagttttatacacaccaactgcgatgattaggccagaccctccccatcctcgtgagggccagaagctgttgctacactgtgagggtcgcggcaatccagtcccccagcagtacctatgggagaaggagggcagtgtgccacccctgaagatgacccaggagagtgccctgatcttccctttcctcaacaagagtgacagtggcacctacggctgcacagccaccagcaacatgggcagctacaaggcctactacaccctcaatgttaatgaccccagtccggtgccctcctcctccagcacctaccacgccatcatcggtgggatcgtggctttcattgtcttcctgctgctcatcatgctcatcttccttggccactacttgatccggcacaaaggaacctacctgacacatgaggcaaaaggctccgacgatgctccagacgcggacacggccatcatcaatgcagaaggcgggcagtcaggaggggacgacaagaaggaatatttcatctagaggcgcctgcccacttcctgcgccccccaggggccctgtggggactgctggggccgtcaccaacccggacttgtacagagcaaccgcagggccgcccctcccgcttgctccccagcccacccacccccctgtacagaatgtctgctttgggtgcggttttgtactcggtttggaatggggagggaggagggcggggggaggggagggttgccctcagccctttccgtggcttctctgcatttgggttattattatttttgtaacaatcccaaatcaaatctgtctccaggctggagaggcaggagccctggggtgagaaaagcaaaaaacaaacaaaaaacaaaaccctggagtgttaggaggagagtgaaggtagaggggtgaggaagggtaaggggcagggctggtttcagctgggggctctcaccagccctcctttcagcctctacaacagagcagcttcccagacttctccaggaacccagaaacgggatggttgtcggcaaaggttgggagtggcttttcctctggtagccacacacctgagcactacggacagggaggcaggtgccaccttgacacctctcttccatagcaatgggaaagtgatgagtgcgggagtcctgaggagatgtggcctgcagacaacatgcagccatgcagggacccaggactgtaacctggggaggacgcgggtccctgcaaggaagagtagatttggagaggaaggatggaggtggactctcaccccattccccccggaaatgaacaaagccgggccctttccataggaactgcccttggagatagcagagtgtggctgcccctccttgctccagcagcagtgggagaggcactgctctggggcctgaactgcctctgcttccccccctgaggggcccctcactcttacccaagactctggattgttgcacggcaaccactcctcccatggcattgctcagcaactacttctcccttcccggccaccctgtgcccccttcctggtcccaacgccagcccttcatccttcctccctcagcagccaggcagacataacaacaaaactactaaaaggagcttcactgca

SEQ ID NO: 208358 - protein, 331 aa, Artificial Sequence
  derived and/or modified sequence
MSKTFVKSKEMGELVNTPSWMDKGLGSQNEVKEEESRPGTYGMLSSLTEEHDSIEEEEEEEEDGEKPKRRGPKKKKMTKARLERFRARRVKANARERTRMHGLNDALDNLRRVMPCYSKTQKLSKIETLRLARNYIWALSEVLETGQTPEGKGFVEMLCKGLSQPTSNLVAGCLQLGPQSVLLEKHEDKSPICDSAISVHNFNYQSPGLPSPPYGHMETHLLHLKPQVFKSLGESSFGSHLPDCSTPPYEGPLTPPLSISGNFSLKQDGSPDLEKSYSFMPHYPSSSLSSGHVHSTPFQAGTPRYDVPIDMSYDSYPHHGIGTQLNTVFTE

SEQ ID NO: 208359 - DNA, 3971 bp, Artificial Sequence
  derived and/or modified sequence
aaaactgcagcaagtcagaggctccggccagagagcaggagctgcccagaggcttgtggtcctgaaagctcctctccggggagctaaccagggagaggaggtactgaagagcgactaaactggctgcagcggagagatcagcccgaaggcgtccttgaggagcatacggaactccaaggaaggagtagaataaggagcaggcagagaaaccagacccggtggaatctctaagaggtaacaaccgggtttgacatggatcgctgaaagcgtctcttctaccatctggatggtcagggagacttggcttctctgactgtcctctaagacgcagattcacagagttcactccaggaacggccagtgaccgagagtctggaaatgtcaaaaacttttgtaaaatccaaggagatgggagagctagtcaacacaccatcctggatggataaaggtctgggctcccaaaatgaggtgaaggaggaagagagcagaccaggtacttatgggatgctcagcagcttaactgaagagcatgacagtattgaggaagaagaagaagaggaagaagatggggagaaacctaagagaaggggtcccaagaaaaagaagatgaccaaagctcgccttgagagattcagggctcgaagagtcaaggctaatgccagagaacggacccggatgcatggcctgaatgacgccctggataacctgaggcgagtcatgccatgctactctaaaacccaaaaactttccaagatagagactcttagactggccaggaactatatttgggctttatctgaagtcctggagactggccagacacctgaagggaaaggctttgtggagatgctgtgtaaagggctctctcagcccacaagcaacctggtggctggatgtctccaactgggccctcagtctgtcctcctggagaagcacgaggataaatctcctatttgtgactctgccatctctgtccacaacttcaactatcagtctccggggcttcctagccctccttatggtcatatggaaacacatctccttcatctcaagccccaagtattcaagagtttgggagaatcgtcctttgggagccatctgcctgactgcagtacacccccttatgagggcccactcactccacccctgagcatcagtgggaacttctccttgaagcaagatgggtctcctgacctagaaaaatcctacagcttcatgccacattacccttcttcaagtctaagctcagggcatgtgcattcaactccttttcaggctggtaccccccgttatgatgttcctatagacatgtcctatgattcctacccccatcatggtattgggacccaactcaatacagtcttcactgagtgaggcagttaagttcaatgtttcagagaatgacgtggagacattttccataattcaagtggttgagctaaagattcaatgaccttaaaggatccctatggatatatatcaaacaatagttcaagtccatttaggctttccttcacctatcacctcttttctcatcaccttctcacattgcattgatttctttatagagtcctcaagtgaaaatatttgatgatttaacaaccatgtgaaaatagaacagaagacctgggccctattccagtggtgccaaaaactcattgcataatctgtgccaattaattttccatttctggcctttgtttatttactagcaattgtaaataaacaaattgtatttatatgaggcaactattctaagtccagatgatttctaaagtccttcacagttctgaaatgctataactgtggtgatcactcttgacaatttcttgaaactgaaagaatagagaaataataggaaagggatgctatgcatagaatgatcaaattgaattatcagagggatcacaaggtacatgtctcttggctcacagaatgcaaagcttgtttggatttaatgataggacctctttgtatctattgaaaaatagcttctggaagctaaaagtctaacatggctgtcactgtgaagaacaaaacatgttcgttaagagactaactctatttgttattagactaaaagttgaacatatcttccttatgatttgaagaaccataatagagaaccataatagaggcctcatgccaactttattcttgataatatttcaaaaccatttttctcagtactagaggtagggcaaacaagtcactgaagcctcagactcctataactaatgggacatagagaagtcttttagaccatgacctccataaccagagggctctggaacttctgatgaagctcaggtgctgctgttagaatcagcacacaacacaggtttatattaaagagcaataaaatagctattggctataataactactatagttcagggactctctccagctcacagttgcccatgggaaaaaccaatggatttttttttaagcaagatgaatttcatttggttaaacgtgattaaaaccatccacctctgtccacaccaatatattttccagaagcacaagcaccaatcaatttattgatcaaggttaaatttttccaacatatatgtagttccttatctctccccctacactaattgttacctcttcctcacttctaagatagaatatgttattatatattgtaaataacatttcaggtgaccaaacttaaggatgcagaaatgaaatccaaggttggtgaatatttttaccaactatgtcttcatcacaggtttaacccaatttgcagagtgtttatttttctttatgtaactcctttttcctttatatcaatgctaacttcatcaaatttgtattttttttcagaaaatgggacctgagaaattttcctatcttgttcaatcagccaggacagttatttaagtcaaaccagagcctgaatggcttatttgatagtagattaggtcctgctcctgccagaaaggataagtttaacatgcagggtacatcaatagggccaatttaaaaaatgataacacatattagtatgtcattttctatagctcagctatcccctaaaatctgccaactatatgtgtatcttgtctgtttacctctcttatttattatctccatacagtataagttattttttttccattttgctctcagcacttaccctgctgtattttgcacccttggtttgtaaattcacttgaaagtagccttgcagagagatcttaagccccatcagtcaccaaagtggttcccttcatcacaatctgccctagaggaaataggcaagtaaaatgatatataaagccatactatgtgctttctgagtatatactgcacttacctttgtgagcggctgtaggagggtctatcctcgaagctagcattttctggcatttaagtttgtagataatcactgttgtttgagttatttattagatattatttatttaatttatttctctcttcctttcacgaaaattcctttagccccatagatgtgcttgcaaacccttcctaaaattttatttggaaagtagctcataattttgctaagaactgctgagttttggagtgaggggaaaggaaaaaatagagaattacctctgtgataatttttataaaaagcagcaataattcgaatggctatgcaagttaatgtttttagagtcttttcttcagtctaaaatgagccagagttattctttaataatctgctgtttatgcctttggggagtatggtacccatgagccaagcctccctgaaattgtacagagggattttataattgaattaaaatttaggaatgcaatagcttgtaaagagcctgctctccaacatagggtggtctcattcttctggagacttttttagataaagtaaaataattgtttaaatattttgtttaaaatatgactgtttttcctccctttttcctagcagaaataaagctgtaagtcttattagaaaaaaaaaaaaaaaa

SEQ ID NO: 208360 - DNA, 996 bp, Artificial Sequence
  derived and/or modified sequence
atgtctaaaacgtttgtcaaaagcaaagagatgggcgagctcgtcaacaccccctcctggatggataagggcctaggctctcagaacgaggttaaggaggaggaatcaagaccaggcacatacggcatgctcagctctctgacagaagaacacgatagcatagaagaagaggaagaggaagaagaagatggggaaaagcccaaacgcaggggacctaaaaagaagaagatgactaaggcccggttggagcggttcagagcgcgtcgagtaaaagccaacgcgcgcgaacgaactaggatgcacgggctgaatgatgccctcgacaatctgcggagagtcatgccctgttacagcaagacacaaaaactgtccaaaatagagacgctccgcctcgcacgcaactatatatgggccctctccgaagtgcttgaaacaggacagactcccgaagggaagggatttgtggagatgctctgtaagggtttgtcccagcccacctccaaccttgtggctgggtgcctccaactgggcccacagtctgtgctcctagagaaacatgaggacaagtcaccaatctgtgattcagcaatttccgttcacaactttaattaccaaagcccaggattaccgtcacccccctacggacatatggagactcatctgctgcatctcaaaccccaagtgtttaaatccctgggagaatccagttttgggtcgcacctgccagattgctcaacgcccccctatgaaggcccactaacccctcctctgagcatctccggaaatttcagccttaagcaggacgggtcacccgatttggaaaaatcctattcattcatgccacactacccatcaagttcattgagtagcggtcatgtacactcaactcctttccaagccggtacacctcgctatgacgtgcccatcgacatgtcctatgacagctatccgcaccacggaatcggtacgcaactgaacacggtgtttacggagtag

SEQ ID NO: 208361 - DNA, 996 bp, Artificial Sequence
  derived and/or modified sequence
atgagcaagacctttgtgaagagcaaggagatgggagagctggtgaacacccccagctggatggacaagggcctgggcagccagaatgaggtgaaggaggaggagagccggcccggcacctacggcatgctgagcagcctgacagaggagcatgacagcattgaggaggaggaggaggaggaggaggatggagagaagcccaagagaagaggccccaagaagaagaagatgaccaaggcccggctggagcgcttccgggcccggcgggtgaaggccaatgcccgggagaggaccaggatgcacggcctgaatgatgccctggacaacctgcggcgggtgatgccctgctacagcaagacccagaagctgagcaagattgagaccctgcggctggccaggaactacatctgggccctgtctgaggtgctggagaccggccagaccccagagggcaagggctttgtggagatgctgtgcaagggcctgagccagcccaccagcaacctggtggccggctgcctgcagctgggcccccagagcgtgctgctggagaagcatgaggacaagagccccatctgtgacagcgccatctctgtgcacaacttcaactaccagagccctggcctgcccagccccccctacggccacatggagacccacctgctgcacctgaagccccaggtgttcaagagcctgggggagagcagctttggcagccacctgcctgactgcagcaccccaccctatgagggccccctgaccccacccctgagcatcagcggcaacttcagcctgaagcaggacggcagcccagacctggagaagagctacagcttcatgccccactaccccagcagcagcctgagcagcggccacgtgcacagcacccccttccaggccggcacccccaggtatgatgtgcccatcgacatgtcctatgacagctacccccaccacggcatcggcacccagctgaacacagtgttcacagaatag

SEQ ID NO: 208362 - DNA, 996 bp, Artificial Sequence
  derived and/or modified sequence
atgagcaagaccttcgtgaagagcaaggagatgggcgagctggtgaacaccccaagctggatggacaagggccttggcagccagaatgaagtgaaagaggaggaatcacgacccggcacctacgggatgctttcttcactgaccgaagagcatgattctatcgaggaagaagaggaagaggaggaagatggtgagaaacccaaaagacgggggcctaaaaagaaaaaaatgaccaaggctagattggagcgattccgagcccggcgcgtgaaagctaacgctcgcgaacggacccggatgcacggtctgaacgacgccctggataacctgcgaagggttatgccatgttacagcaaaacccaaaagctctccaaaatagaaacactccggctggcgaggaattatatttgggccctcagtgaagtgctcgagacaggacagactcccgaaggtaagggatttgtggagatgctctgcaaaggcctgtcccagcctaccagcaacctggtggctggctgtctccaattgggtccgcagtctgtgctccttgagaaacacgaagataaatcccccatttgtgatagcgctatctctgtgcataattttaactatcaatccccgggacttccctctcctccatacggacacatggaaacccacctgctgcacctaaagccccaggtctttaagtctctgggagagtcctctttcggtagtcacctgcctgactgctcaacgcccccctatgaaggcccactaactcctcctctgagtatcagcgggaatttttcgctcaaacaagacggaagtcctgacctcgaaaagtcttattccttcatgccacactacccatccagctctttgtcgtcaggtcacgtccatagcacaccattccaagccggcacccctcgctatgatgtgcctatcgatatgtcttatgactcatatccccaccacggaatagggacacagcttaataccgtatttacggaatag

SEQ ID NO: 208363 - DNA, 3953 bp, Artificial Sequence
  derived and/or modified sequence
aaaactgcagcaagtcagaggctccggccagagagcaggagctgcccagaggcttgtggtcctgaaagctcctctccggggagctaaccagggagaggaggtactgaagagcgactaaactggctgcagcggagagatcagcccgaaggcgtccttgaggagcatacggaactccaaggaaggagtagaataaggagcaggcagagaaaccagacccggtggaatctctaagaggtaacaaccgggtttgacatggatcgctgaaagcgtctcttctaccatctggatggtcagggagacttggcttctctgactgtcctctaagacgcagattcacagagttcactccaggaacggccagtgaccgagagtctggaaatgtcaaaaacttttgtaaaatccaaggagatgggagagctagtcaacacaccatcctggatggataaaggtctgggctcccaaaatgaggtgaaggaggaagagagcagaccaggtacttatgggatgctcagcagcttaactgaagagcatgacagtattgaggaagaagaagaagaggaagaagatggggagaaacctaagagaaggggtcccaagaaaaagaagatgaccaaagctcgccttgagagattcagggctcgaagagtcaaggctaatgccagagaacggacccggatgcatggcctgaatgacgccctggataacctgaggcgagtcatgccatgctactctaaaacccaaaaactttccaagatagagactcttagactggccaggaactatatttgggctttatctgaagtcctggagactggccagacacctgaagggaaaggctttgtggagatgctgtgtaaagggctctctcagcccacaagcaacctggtggctggatgtctccaactgggccctcagtctgtcctcctggagaagcacgaggataaatctcctatttgtgactctgccatctctgtccacaacttcaactatcagtctccggggcttcctagccctccttatggtcatatggaaacacatctccttcatctcaagccccaagtattcaagagtttgggagaatcgtcctttgggagccatctgcctgactgcagtacacccccttatgagggcccactcactccacccctgagcatcagtgggaacttctccttgaagcaagatgggtctcctgacctagaaaaatcctacagcttcatgccacattacccttcttcaagtctaagctcagggcatgtgcattcaactccttttcaggctggtaccccccgttatgatgttcctatagacatgtcctatgattcctacccccatcatggtattgggacccaactcaatacagtcttcactgagtgaggcagttaagttcaatgtttcagagaatgacgtggagacattttccataattcaagtggttgagctaaagattcaatgaccttaaaggatccctatggatatatatcaaacaatagttcaagtccatttaggctttccttcacctatcacctcttttctcatcaccttctcacattgcattgatttctttatagagtcctcaagtgaaaatatttgatgatttaacaaccatgtgaaaatagaacagaagacctgggccctattccagtggtgccaaaaactcattgcataatctgtgccaattaattttccatttctggcctttgtttatttactagcaattgtaaataaacaaattgtatttatatgaggcaactattctaagtccagatgatttctaaagtccttcacagttctgaaatgctataactgtggtgatcactcttgacaatttcttgaaactgaaagaatagagaaataataggaaagggatgctatgcatagaatgatcaaattgaattatcagagggatcacaaggtacatgtctcttggctcacagaatgcaaagcttgtttggatttaatgataggacctctttgtatctattgaaaaatagcttctggaagctaaaagtctaacatggctgtcactgtgaagaacaaaacatgttcgttaagagactaactctatttgttattagactaaaagttgaacatatcttccttatgatttgaagaaccataatagagaaccataatagaggcctcatgccaactttattcttgataatatttcaaaaccatttttctcagtactagaggtagggcaaacaagtcactgaagcctcagactcctataactaatgggacatagagaagtcttttagaccatgacctccataaccagagggctctggaacttctgatgaagctcaggtgctgctgttagaatcagcacacaacacaggtttatattaaagagcaataaaatagctattggctataataactactatagttcagggactctctccagctcacagttgcccatgggaaaaaccaatggatttttttttaagcaagatgaatttcatttggttaaacgtgattaaaaccatccacctctgtccacaccaatatattttccagaagcacaagcaccaatcaatttattgatcaaggttaaatttttccaacatatatgtagttccttatctctccccctacactaattgttacctcttcctcacttctaagatagaatatgttattatatattgtaaataacatttcaggtgaccaaacttaaggatgcagaaatgaaatccaaggttggtgaatatttttaccaactatgtcttcatcacaggtttaacccaatttgcagagtgtttatttttctttatgtaactcctttttcctttatatcaatgctaacttcatcaaatttgtattttttttcagaaaatgggacctgagaaattttcctatcttgttcaatcagccaggacagttatttaagtcaaaccagagcctgaatggcttatttgatagtagattaggtcctgctcctgccagaaaggataagtttaacatgcagggtacatcaatagggccaatttaaaaaatgataacacatattagtatgtcattttctatagctcagctatcccctaaaatctgccaactatatgtgtatcttgtctgtttacctctcttatttattatctccatacagtataagttattttttttccattttgctctcagcacttaccctgctgtattttgcacccttggtttgtaaattcacttgaaagtagccttgcagagagatcttaagccccatcagtcaccaaagtggttcccttcatcacaatctgccctagaggaaataggcaagtaaaatgatatataaagccatactatgtgctttctgagtatatactgcacttacctttgtgagcggctgtaggagggtctatcctcgaagctagcattttctggcatttaagtttgtagataatcactgttgtttgagttatttattagatattatttatttaatttatttctctcttcctttcacgaaaattcctttagccccatagatgtgcttgcaaacccttcctaaaattttatttggaaagtagctcataattttgctaagaactgctgagttttggagtgaggggaaaggaaaaaatagagaattacctctgtgataatttttataaaaagcagcaataattcgaatggctatgcaagttaatgtttttagagtcttttcttcagtctaaaatgagccagagttattctttaataatctgctgtttatgcctttggggagtatggtacccatgagccaagcctccctgaaattgtacagagggattttataattgaattaaaatttaggaatgcaatagcttgtaaagagcctgctctccaacatagggtggtctcattcttctggagacttttttagataaagtaaaataattgtttaaatattttgtttaaaatatgactgtttttcctccctttttcctagcagaaataaagctgtaagtcttatt

SEQ ID NO: 208364 - DNA, 996 bp, Artificial Sequence
  derived and/or modified sequence
atgagcaaaactttcgtcaagtccaaagagatgggtgaattagttaacacaccaagttggatggacaaagggctgggctcccagaatgaagttaaggaagaggaatcccggcctgggacttatggaatgctatcttctctgacggaagagcacgactctattgaggaagaggaggaagaagaagaagacggagaaaagcctaagagacgcggtccgaaaaaaaaaaaaatgacaaaagccaggcttgaacggttccgtgcgaggcgcgtgaaggccaatgctagggagcgaacaaggatgcacggactgaatgatgcgttagacaacctaagaagagtcatgccctgctactccaaaacgcagaaactttccaaaatcgagacactgcggctggctagaaattacatatgggcccttagcgaagtccttgagaccgggcagactcctgaaggtaagggtttcgtggaaatgctctgtaaaggcctgagccagccaactagcaatctggtggccggatgcctacagctcggtccacagagcgtactgttggagaaacatgaagataagtccccaatctgcgattccgctattagcgtacataacttcaattaccagagccctggactcccctcgcccccttatggccacatggagacccatctgttacacctcaagccccaggtcttcaagtcactgggcgaatcaagtttcggatcgcacctgccggattgctctactcctccgtatgaagggcctctgacgccacccttgtccatatccggcaatttttcattaaagcaggacggtagccccgacctggagaaatcctattctttcatgccccattatccctccagctccctcagcagcggccatgtgcacagcacgcctttccaggctgggacccctcggtatgacgtccccattgatatgtcgtacgacagttatccccatcatggcatagggacacagcttaacaccgtattcactgaatag

SEQ ID NO: 208365 - DNA, 996 bp, Artificial Sequence
  derived and/or modified sequence
atgagcaagaccttcgtgaagagcaaggagatgggcgagctggtgaacacccccagctggatggacaagggcctgggcagccagaacgaggtgaaggaggaggagagcagacccggcacctacggcatgctgagcagcctgaccgaggagcacgacagcatcgaggaggaggaggaggaggaggaggacggcgagaagcccaagagaagaggccccaagaagaagaagatgaccaaggccagactggagagattcagagccagaagagtgaaggccaacgccagagagagaaccagaatgcacggcctgaacgacgccctggacaacctgagaagagtgatgccctgctacagcaagacccagaagctgagcaagatcgagaccctgagactggccagaaactacatctgggccctgagcgaggtgctggagaccggccagacccccgagggcaagggcttcgtggagatgctgtgcaagggcctgagccagcccaccagcaacctggtggccggctgcctgcagctgggcccccagagcgtgctgctggagaagcacgaggacaagagccccatctgcgacagcgccatcagcgtgcacaacttcaactaccagagccccggcctgcccagccccccctacggccacatggagacccacctgctgcacctgaagccccaggtgttcaagagcctgggcgagagcagcttcggcagccacctgcccgactgcagcacccccccctacgagggccccctgaccccccccctgagcatcagcggcaacttcagcctgaagcaggacggcagccccgacctggagaagagctacagcttcatgccccactaccccagcagcagcctgagcagcggccacgtgcacagcacccccttccaggccggcacccccagatacgacgtgcccatcgacatgagctacgacagctacccccaccacggcatcggcacccagctgaacaccgtgttcaccgagtag

SEQ ID NO: 208366 - protein, 338 aa, Artificial Sequence
  derived and/or modified sequence
MNDFDECGQSAASMYLPGCAYYVAPSDFASKPSFLSQPSSCQMTFPYSSNLAPHVQPVREVAFRDYGLERAKWPYRGGGGGGSAGGGSSGGGPGGGGGGAGGYAPYYAAAAAAAAAAAAAEEAAMQRELLPPAGRRPDVLFKAPEPVCAAPGPPHGPAGAASNFYSAVGRNGILPQGFDQFYEAAPGPPFAGPQPPPPPAPPQPEGAADKGDPRTGAGGGGGSPCTKATPGSEPKGAAEGSGGDGEGPPGEAGAEKSSSAVAPQRSRKKRCPYTKYQIRELEREFFFNVYINKEKRLQLSRMLNLTDRQVKIWFQNRRMKEKKLNRDRLQYFTGNPLF

SEQ ID NO: 208367 - protein, 159 aa, Artificial Sequence
  derived and/or modified sequence
MYLPGCAYYVAPSDFASKPSFLSQPSSCQMTFPYSSNLAPGGGSPCTKATPGSEPKGAAEGSGGDGEGPPGEAGAEKSSSAVAPQRSRKKRCPYTKYQIRELEREFFFNVYINKEKRLQLSRMLNLTDRQVKIWFQNRRMKEKKLNRDRLQYFTGNPLF

SEQ ID NO: 208368 - DNA, 1463 bp, Artificial Sequence
  derived and/or modified sequence
atgaacgactttgacgagtgcggccagagcgcagccagcatgtacctgccgggctgcgcctactatgtggccccgtctgacttcgctagcaagccttcgttcctttcccaaccgtcgtcctgccagatgactttcccctactcttccaacctggctccgcacgtccagcccgtgcgcgaagtggccttccgcgactacggcctggagcgcgccaagtggccgtaccgcggcggcggcggcggcggcagcgcggggggcggcagcagcgggggcggccccggcgggggcggcggcggcgcggggggctacgctccctactacgcggcggcggcggcggcggctgcggcggccgcggcggccgaggaggcggccatgcaacgcgagcttctcccgcccgcgggccgccggccggacgtgctcttcaaggcgcctgagccggtgtgcgctgcgccggggccgccgcacggccccgcgggcgccgcctccaacttctacagcgcggtgggccgcaatggcatcttgccacagggcttcgaccagttctacgaggcagcgcccgggcccccgttcgccgggccgcagcccccgccgccacccgcgccgccacagcccgagggcgcagccgacaagggcgaccccaggaccggggctggtggcggcgggggcagtccctgcaccaaggcgacccctggctcggagcccaagggggcagcagaaggcagcggtggcgacggcgagggccccccgggagaggcgggggccgagaagagcagcagcgcagttgccccccagcggtcccggaaaaagcgctgtccctataccaagtaccagatccgcgaactggaacgcgagtttttctttaacgtgtacataaacaaagagaaaagacttcaactctctcggatgctcaacctcactgaccggcaagtcaaaatctggttccagaatcgcaggatgaaagaaaagaaactgaacagagaccgtctgcagtatttcactggaaaccccttattttgagagctccaggaagcgccctcaccccagccccactcacccaccctccttcccaccagcctgctctccgcaggcccactgtccttgggtttaatgacgtctcttctctgtggaacttcacgattccttcccacggtcaactcgggacctcccagcgaccactgcagcctgcggacgaggccgggacttggccgagcggatcctaataaggggaaaatggtaaatgcaaacgtcccgttacaattttaccgccagtgtgctgtcgttccccctccccctctccgagtcctcgtggggacacggcggggtctgtaggaagttgggccgggttgggggttgctagaaggcgctggtgttttgctctgagttttaagagatcccttccttcctcttcggtgaatgcaggttatttaaactttgggaaatgtacttttagtctgtcatatcaa

SEQ ID NO: 208369 - DNA, 1017 bp, Artificial Sequence
  derived and/or modified sequence
atgaatgattttgacgaatgcggccagagcgccgcatccatgtacctgcccggctgtgcttactacgtcgcgccatccgatttcgctagcaaaccaagcttcttgagtcaaccgtcaagttgccagatgacgttcccgtactcctccaatttagcccctcacgtgcagcctgtgcgggaagttgccttccgagactatgggttggaaagagcgaaatggccatatagaggtggcggcgggggaggctctgctggcggaggcagtagcggagggggccccgggggtggaggcgggggagctggcgggtatgcaccttattatgccgcagccgccgccgccgccgcagccgccgccgctgctgaggaagccgcaatgcagcgggagttgctgccacccgccggccggagacctgacgttctttttaaagcgcccgagcctgtatgtgcagcccccggcccaccccatggccccgccggggcagcgagcaatttttacagcgctgtcggcaggaatggcatccttcctcaggggttcgaccagttctatgaagcggctccaggacccccttttgcaggacctcagccccctccgcctccggcccccccccagccggaaggggccgccgataaaggggatcccaggacaggagcaggaggcggcggggggtcgccctgtacaaaggccactccgggcagtgagccgaagggcgccgcagaggggtccggcggcgatggggagggcccccctggcgaagccggggccgagaagtctagtagcgctgttgccccacagcggtccagaaagaagcgatgtccttataccaaataccagattcgggagttagagcgcgagttttttttcaatgtgtacatcaataaggagaagcggctgcagttgagccgaatgctgaatctgacggatcgtcaggtgaagatctggttccagaatcgcagaatgaaggaaaagaaattgaatagagacagactccaatatttcaccggcaaccccctgttttag

SEQ ID NO: 208370 - DNA, 480 bp, Artificial Sequence
  derived and/or modified sequence
atgtacctaccaggttgtgcatactatgtggccccttccgattttgcttccaagccatccttcctgtcccagccgtcaagctgccagatgactttcccgtactcttcgaacctggcgcctgggggtggctccccatgcactaaagctaccccaggaagcgaacctaagggagctgccgaaggctccggaggcgatggcgagggccctcctggggaggcgggggcggaaaaaagtagctctgcggtagcaccacagaggtctcggaagaagcggtgcccttatacaaaatatcagattcgcgagctcgagcgtgagttctttttcaatgtttatattaacaaggagaaacgtctgcaacttagcagaatgctcaacctgaccgacaggcaggtgaaaatatggttccagaatcggcggatgaaagagaagaaattgaacagagatagactacagtacttcaccggcaatccactcttttag

SEQ ID NO: 208371 - DNA, 1939 bp, Artificial Sequence
  derived and/or modified sequence
tgcaatcgatggctcaggttggctgcgcggggagcggccagaggctcgctggcgcgcacgccgcggagtcatgaacgactttgacgagtgcggccagagcgcagccagcatgtacctgccgggctgcgcctactatgtggccccgtctgacttcgctagcaagccttcgttcctttcccaaccgtcgtcctgccagatgactttcccctactcttccaacctggctccgcacgtccagcccgtgcgcgaagtggccttccgcgactacggcctggagcgcgccaagtggccgtaccgcggcggcggcggcggcggcagcgcggggggcggcagcagcgggggcggccccggcgggggcggcggcggcgcggggggctacgctccctactacgcggcggcggcggcggcggctgcggcggccgcggcggccgaggaggcggccatgcaacgcgagcttctcccgcccgcgggccgccggccggacgtgctcttcaaggcgcctgagccggtgtgcgctgcgccggggccgccgcacggccccgcgggcgccgcctccaacttctacagcgcggtgggccgcaatggcatcttgccacagggcttcgaccagttctacgaggcagcgcccgggcccccgttcgccgggccgcagcccccgccgccacccgcgccgccacagcccgagggcgcagccgacaagggcgaccccaggaccggggctggtggcggcgggggcagtccctgcaccaaggcgacccctggctcggagcccaagggggcagcagaaggcagcggtggcgacggcgagggccccccgggagaggcgggggccgagaagagcagcagcgcagttgccccccagcggtcccggaaaaagcgctgtccctataccaagtaccagatccgcgaactggaacgcgagtttttctttaacgtgtacataaacaaagagaaaagacttcaactctctcggatgctcaacctcactgaccggcaagtcaaaatctggttccagaatcgcaggatgaaagaaaagaaactgaacagagaccgtctgcagtatttcactggaaaccccttattttgagagctccaggaagcgccctcaccccagccccactcacccaccctccttcccaccagcctgctctccgcaggcccactgtccttgggtttaatgacgtctcttctctgtggaacttcacgattccttcccacggtcaactcgggacctcccagcgaccactgcagcctgcggacgaggccgggacttggccgagcggatcctaataaggggaaaatggtaaatgcaaacgtcccgttacaattttaccgccagtgtgctgtcgttccccctccccctctccgagtcctcgtggggacacggcggggtctgtaggaagttgggccgggttgggggttgctagaaggcgctggtgttttgctctgagttttaagagatcccttccttcctcttcggtgaatgcaggttatttaaactttgggaaatgtacttttagtctgtcatatcaaggcatgagtcactgtctttttttgtgtgaataaatggtttctagtaaaatggaggttacagcttcaatacactgtatgaattctcctctttgaggtttagtgcctccttaggatattttagtggccagaacccatgcaactgaaaatcgaatgaaatactttttagtcccactaaaatagtagtcgtaccctcccaccacctctaggttacactggttttaaaaatcatgttagtgatgaatttctgaattgacgatgtgaccaagcaatgctggcgctgccttctccaggcagtaaggctggggcagcaggaacctaagaagaaaactcccacccccaccactagtctagtgaacttgggatttctgaaaagacagcaaccatttttaaaaactggttagaaaat

SEQ ID NO: 208372 - DNA, 926 bp, Artificial Sequence
  derived and/or modified sequence
atgtacctgccgggctgcgcctactatgtggccccgtctgacttcgctagcaagccttcgttcctttcccaaccgtcgtcctgccagatgactttcccctactcttccaacctggctcccggcgggggcagtccctgcaccaaggcgacccctggctcggagcccaagggggcagcagaaggcagcggtggcgacggcgagggccccccgggagaggcgggggccgagaagagcagcagcgcagttgccccccagcggtcccggaaaaagcgctgtccctataccaagtaccagatccgcgaactggaacgcgagtttttctttaacgtgtacataaacaaagagaaaagacttcaactctctcggatgctcaacctcactgaccggcaagtcaaaatctggttccagaatcgcaggatgaaagaaaagaaactgaacagagaccgtctgcagtatttcactggaaaccccttattttgagagctccaggaagcgccctcaccccagccccactcacccaccctccttcccaccagcctgctctccgcaggcccactgtccttgggtttaatgacgtctcttctctgtggaacttcacgattccttcccacggtcaactcgggacctcccagcgaccactgcagcctgcggacgaggccgggacttggccgagcggatcctaataaggggaaaatggtaaatgcaaacgtcccgttacaattttaccgccagtgtgctgtcgttccccctccccctctccgagtcctcgtggggacacggcggggtctgtaggaagttgggccgggttgggggttgctagaaggcgctggtgttttgctctgagttttaagagatcccttccttcctcttcggtgaatgcaggttatttaaactttgggaaatgtacttttagtctgtcatatcaa

SEQ ID NO: 208373 - DNA, 1017 bp, Artificial Sequence
  derived and/or modified sequence
atgaatgactttgatgaatgtggccagagcgctgcctccatgtacctgcccggctgtgcctactacgtggcccccagcgactttgccagcaagcccagcttcctgagccagcccagcagctgccagatgaccttcccctacagcagcaacctggccccccacgtgcagcctgtgcgggaggtggccttccgggactatggcctggagcgggccaagtggccctacagaggaggcggcggcggcggcagcgctgggggcggcagcagcggcggcggccctgggggcggcggcggcggggccggcggctacgccccctactatgctgctgctgctgctgctgctgctgctgctgctgctgctgaggaggccgccatgcagcgggagctgctgcccccagctggaagaagaccagatgtgctcttcaaggcccctgagcctgtgtgtgccgcccctggcccccctcatggccctgctggggccgccagcaacttctacagcgctgtgggcagaaatggcatcctgccccagggctttgaccagttctatgaggccgcccctggccccccatttgctggcccccagcccccacctcctccagccccaccccagcctgagggcgctgctgacaagggggaccccaggactggagctgggggcggcggcggcagcccctgcaccaaggccaccccaggcagcgagcccaagggagctgctgagggcagcggaggagatggagagggccccccaggagaggccggggctgagaagagcagcagcgctgtggccccccagaggagcaggaagaagcgctgcccctacaccaagtaccagatccgggagctggagcgggagttcttcttcaacgtgtacatcaacaaggagaagaggctgcagctgagcaggatgctgaacctgacagaccggcaggtgaagatctggttccagaacagaaggatgaaggagaagaagctgaacagagaccggctgcagtacttcaccggcaaccccctcttctag

SEQ ID NO: 208374 - DNA, 480 bp, Artificial Sequence
  derived and/or modified sequence
atgtacctgcccggctgtgcctactacgtggcccccagcgactttgccagcaagcccagcttcctgagccagcccagcagctgccagatgaccttcccctacagcagcaacctggcccctgggggcggcagcccctgcaccaaggccaccccaggcagcgagcccaagggagctgctgagggcagcggaggagatggagagggccccccaggagaggccggggctgagaagagcagcagcgctgtggccccccagaggagcaggaagaagcgctgcccctacaccaagtaccagatccgggagctggagcgggagttcttcttcaacgtgtacatcaacaaggagaagaggctgcagctgagcaggatgctgaacctgacagaccggcaggtgaagatctggttccagaacagaaggatgaaggagaagaagctgaacagagaccggctgcagtacttcaccggcaaccccctcttctag

SEQ ID NO: 208375 - DNA, 1017 bp, Artificial Sequence
  derived and/or modified sequence
atgaacgacttcgacgagtgcggccagagcgccgccagcatgtacctgccaggctgcgcctactatgttgcaccctctgacttcgcttccaaaccaagctttctgtcccagccatcttcctgtcaaatgacattcccatatagcagcaacctggctccgcatgttcagcctgtcagagaagtggcatttagagattatggactggaacgggcgaaatggccctatcggggtggtggtgggggaggtagcgccggcggagggtcctcgggcgggggtcccggaggcggtggggggggggcaggaggatatgctccttactatgccgccgccgccgccgctgccgccgcggccgccgctgccgaggaagctgcgatgcagagggagcttctacctccggccggacgaagacccgatgttctgtttaaagcaccagaaccagtgtgcgctgccccagggcctcctcacgggcccgcaggtgccgcctcaaacttctatagtgccgtcggtcgaaacggtatcctgccgcagggattcgaccaattttacgaggccgctcctggcccgccctttgccggtcctcagccaccaccccctccagccccaccgcaacccgagggcgcagcagataagggtgaccctcgcactggtgccgggggcggaggcgggagcccttgcactaaggcaacaccagggagcgagccaaaaggcgctgccgagggatccggcggggacggtgaggggccgcctggcgaagcaggagccgagaaaagttctagcgcggtcgctccacagagaagccgcaaaaagcgctgtccttatacaaaatatcagatcagggaactagagcgagagttcttcttcaatgtttacattaacaaagaaaagcgcctgcaactgagcagaatgcttaacctgactgatcgtcaggtcaagatctggtttcagaatcgaaggatgaaagagaaaaaactgaatcgcgacagactgcagtatttcaccggtaatcctctgttctag

SEQ ID NO: 208376 - DNA, 480 bp, Artificial Sequence
  derived and/or modified sequence
atgtacctgcccggctgcgcctactacgtggcccccagcgacttcgcttccaaaccaagctttctgagtcagccaagctcatgtcagatgacttttccctactccagtaacctggctcccggaggaggctccccatgtaccaaggctacacccgggtcggagccaaagggggccgcagagggctctggaggcgatggggaggggcccccaggagaggccggagctgaaaaatcgtcatcggcggttgccccgcagcgaagccggaagaaacggtgcccttacacaaagtatcaaattcgggagctggaaagagagtttttcttcaatgtctatattaacaaagagaagcggctgcagctaagcagaatgttaaatttgactgacaggcaggtaaagatatggttccagaatcgacgcatgaaagaaaagaagctgaatcgggatagattgcagtattttaccggcaatcctctgttttag

SEQ ID NO: 208377 - DNA, 1017 bp, Artificial Sequence
  derived and/or modified sequence
atgaacgattttgacgaatgcggccagtccgccgctagcatgtaccttcctgggtgtgcatattatgttgcgccatcggacttcgcctccaagccctccttcctgtcacagccctcttcatgtcagatgacgttcccgtatagttccaacctcgctccccatgtgcagccagttagggaggttgcgtttagggactacggattggaaagagccaagtggccatatcgcggaggaggaggaggaggaagtgccggtggcggatcgtccggaggagggccaggcggagggggaggcggagcgggtggttatgcaccctactacgccgctgctgccgcagctgccgcagcagcggcagccgctgaagaagccgcaatgcagcgcgagctgctgccaccagctggccgtcgaccagatgtgctctttaaagcccctgaaccagtctgcgctgcacctggtccccctcacggcccagcgggagcagccagcaatttttacagcgccgtgggtaggaatggcattctgccccaggggttcgatcagttttatgaagccgcacccggtcccccttttgccggtcctcaaccaccacccccaccagcccctccccagcctgagggggcagctgacaagggagatcccagaactggcgctggaggtggcggtggcagcccgtgtacaaaagccactccgggatccgaaccgaagggggctgctgaaggctccggcggtgacggagaggggcctcccggtgaagcaggcgcagagaaaagctcctccgctgtggctccgcagcgctcacggaagaagcggtgcccctataccaagtaccagattcgggaactcgagagggaattctttttcaatgtctacatcaacaaggagaaaaggctgcagctcagccggatgttaaacctgacggataggcaagtcaaaatctggtttcaaaaccggaggatgaaggaaaaaaagctcaatagagaccgattgcaatacttcacgggcaatccgctgttctag

SEQ ID NO: 208378 - DNA, 480 bp, Artificial Sequence
  derived and/or modified sequence
atgtatctgcccggatgcgcctattacgtagctcctagcgatttcgctagcaagccctcctttctgagccagccatcttcctgtcagatgacctttccttactctagcaacctggcccctggaggaggttccccctgtacaaaggctacccccggatcagaacctaaaggcgctgccgagggaagtggaggggatggggaaggccctcctggggaggcaggcgcagaaaagagctcctccgccgttgcaccccagcgcagtaggaagaagcgctgcccctacacgaagtaccagatccgggaattggaacgggagttctttttcaacgtgtacatcaacaaggagaagcgtctccagctctccaggatgctaaaccttactgaccggcaggtcaaaatctggttccagaacaggaggatgaaagaaaagaaactaaatcgagataggctccagtactttactggtaaccctctattttag

SEQ ID NO: 208379 - DNA, 1017 bp, Artificial Sequence
  derived and/or modified sequence
atgaacgacttcgacgagtgcggccagagcgccgccagcatgtacctgcccggctgcgcctactacgtggcccccagcgacttcgccagcaagcccagcttcctgagccagcccagcagctgccagatgaccttcccctacagcagcaacctggccccccacgtgcagcccgtgagagaggtggccttcagagactacggcctggagagagccaagtggccctacagaggcggcggcggcggcggcagcgccggcggcggcagcagcggcggcggccccggcggcggcggcggcggcgccggcggctacgccccctactacgccgccgccgccgccgccgccgccgccgccgccgccgccgaggaggccgccatgcagagagagctgctgccccccgccggcagaagacccgacgtgctgttcaaggcccccgagcccgtgtgcgccgcccccggccccccccacggccccgccggcgccgccagcaacttctacagcgccgtgggcagaaacggcatcctgccccagggcttcgaccagttctacgaggccgcccccggcccccccttcgccggcccccagcccccccccccccccgcccccccccagcccgagggcgccgccgacaagggcgaccccagaaccggcgccggcggcggcggcggcagcccctgcaccaaggccacccccggcagcgagcccaagggcgccgccgagggcagcggcggcgacggcgagggcccccccggcgaggccggcgccgagaagagcagcagcgccgtggccccccagagaagcagaaagaagagatgcccctacaccaagtaccagatcagagagctggagagagagttcttcttcaacgtgtacatcaacaaggagaagagactgcagctgagcagaatgctgaacctgaccgacagacaggtgaagatctggttccagaacagaagaatgaaggagaagaagctgaacagagacagactgcagtacttcaccggcaaccccctgttctag

SEQ ID NO: 208380 - DNA, 480 bp, Artificial Sequence
  derived and/or modified sequence
atgtacctgcccggctgcgcctactacgtggcccccagcgacttcgccagcaagcccagcttcctgagccagcccagcagctgccagatgaccttcccctacagcagcaacctggcccccggcggcggcagcccctgcaccaaggccacccccggcagcgagcccaagggcgccgccgagggcagcggcggcgacggcgagggcccccccggcgaggccggcgccgagaagagcagcagcgccgtggccccccagagaagcagaaagaagagatgcccctacaccaagtaccagatcagagagctggagagagagttcttcttcaacgtgtacatcaacaaggagaagagactgcagctgagcagaatgctgaacctgaccgacagacaggtgaagatctggttccagaacagaagaatgaaggagaagaagctgaacagagacagactgcagtacttcaccggcaaccccctgttctag

SEQ ID NO: 208381 - protein, 270 aa, Artificial Sequence
  derived and/or modified sequence
MCERSLYRAGYVGSLLNLQSPDSFYFSNLRPNGGQLAALPPISYPRGALPWAATPASCAPAQPAGATAFGGFSQPYLAGSGPLGLQPPTAKDGPEEQAKFYAPEAAAGPEERGRTRPSFAPESSLAPAVAALKAAKYDYAGVGRATPGSTTLLQGAPCAPGFKDDTKGPLNLNMTVQAAGVASCLRPSLPDGLPWGAAPGRARKKRKPYTKQQIAELENEFLVNEFINRQKRKELSNRLNLSDQQVKIWFQNRRMKKKRVVLREQALALY

SEQ ID NO: 208382 - DNA, 813 bp, Artificial Sequence
  derived and/or modified sequence
atgtgtgagcgcagtctctacagagcgggctatgtgggctcgcttctgaatctgcagtcgccagactctttctacttctccaacctgaggccgaatggcggccagttggccgcgcttccccctatctcctacccgcgcggcgcgctgccctgggccgccacgcccgcctcctgcgcccccgcgcagcctgcgggcgccactgccttcggcggcttctcgcagccctacctggctggctccgggcctctcggcctgcagcccccaacagccaaagacggacccgaagagcaggctaagttctatgcgcccgaagcggccgctgggccagaggagcgcggtcgtacccggccgtccttcgcccccgagtctagcctggctcctgcagtggctgctctcaaagcggccaagtatgactacgctggtgtgggtcgtgccacgccgggctccacgaccctgctccagggggctccctgcgcccctggcttcaaggacgacaccaagggcccgctcaacttgaacatgacagtgcaggcggcgggcgttgcctcttgcctgcgaccttcactgcccgacggcctgccgtggggggcggccccggggagggcccgcaagaagcggaaaccctacacgaagcagcagattgcggagttggagaacgaattcctcgtcaacgaattcatcaacaggcagaaacgcaaggaattgtccaataggctgaacctcagcgaccagcaagtcaaaatctggttccagaacaggcgtatgaagaagaagcgcgtggtgcttcgggagcaggcgctggcgctctactag

SEQ ID NO: 208383 - DNA, 813 bp, Artificial Sequence
  derived and/or modified sequence
atgtgcgagcggtcgttgtatcgggctggttacgtgggatccctgctgaaccttcagtcccctgacagcttctacttttccaacttaaggccaaatggcggacagcttgccgcgctgccccctatatcgtacccccgcggagctcttccatgggctgccacccccgcttcctgcgcaccagcccagcctgccggagccaccgctttcggcggattttcgcaaccttacctagccgggtctgggcccctggggcttcagccgccaacagctaaggacggtccggaagaacaggcaaagttctacgcccccgaagctgccgctggacctgaagagcgcggccgcacacgccctagcttcgcccccgagagttcactcgcccccgcagtggctgccctgaaggccgctaaatacgactacgccggcgtgggcagagcaactcctgggtctacaaccctgctccagggggctccatgcgctcccgggttcaaggacgacacaaaagggcctcttaatctgaatatgaccgtgcaagctgccggggtggcctcctgcctgcgaccttccttgccagacggactaccttggggcgcggcaccaggccgagctcggaagaaacgtaagccttacaccaagcaacagatcgccgagctggaaaatgagttcctggtcaacgagttcatcaaccggcagaaaaggaaggaactcagtaatagactgaacctctctgaccagcaagtgaagatttggtttcagaacaggcggatgaaaaagaaacgtgtagtgctacgggagcaggctctcgccctgtactag

SEQ ID NO: 208384 - DNA, 1805 bp, Artificial Sequence
  derived and/or modified sequence
tctgagcctgtcctcttattcccggttgtaactaaatactgttgcgagcgcagccgaagccctttgttggagatgtgtgagcgcagtctctacagagcgggctatgtgggctcgcttctgaatctgcagtcgccagactctttctacttctccaacctgaggccgaatggcggccagttggccgcgcttccccctatctcctacccgcgcggcgcgctgccctgggccgccacgcccgcctcctgcgcccccgcgcagcctgcgggcgccactgccttcggcggcttctcgcagccctacctggctggctccgggcctctcggcctgcagcccccaacagccaaagacggacccgaagagcaggctaagttctatgcgcccgaagcggccgctgggccagaggagcgcggtcgtacccggccgtccttcgcccccgagtctagcctggctcctgcagtggctgctctcaaagcggccaagtatgactacgctggtgtgggtcgtgccacgccgggctccacgaccctgctccagggggctccctgcgcccctggcttcaaggacgacaccaagggcccgctcaacttgaacatgacagtgcaggcggcgggcgttgcctcttgcctgcgaccttcactgcccgacggcctgccgtggggggcggccccggggagggcccgcaagaagcggaaaccctacacgaagcagcagattgcggagttggagaacgaattcctcgtcaacgaattcatcaacaggcagaaacgcaaggaattgtccaataggctgaacctcagcgaccagcaagtcaaaatctggttccagaacaggcgtatgaagaagaagcgcgtggtgcttcgggagcaggcgctggcgctctactagccgcgcgcgtggccagggccgggttggatctgcccttttggacagaggccttgtttggggagggggatctggggctaaggctaaggcttttccttcggttccttctctgctggccccagaagccaccaagagatttacagaccaggccagttgggcctccttgctttcctcagtccctgagaagcccgtgagaaacgtgcggaagtaccagtgcaactctggctggccttaaggcttccacgttgggggactgaggccaactctccttgctcctggctggggcatttgcacccaccgctcattcttgctccccggtacctggatttttctgtttccacccaattcgttctccctttccccctctctccagccccttcagcgtatagcagtcgcctagttagggctcagagtggaaggcctcctgagggaatggaaaggactgtgggtacaattaggtctctgcagcagaagccctttgtggcaaggccaggatcttcactctggagaaaggaaagggcaccatccaccctccaccctcctgtctgccctggctgatttgagagaacaaaagccacactagatcttcagactttgggaggaaaagggagggaaggggaggggctgggtagtggggtaaacttggagatatctcgaaatgagaaatgcgaaataggctggcctatttccagctgggtagaatatgtggaaccttcatttcctgagatgggatgagagagactgggactccagacaagtgccatctccagacaagactggcaaacattgccctactcccaccttctcaaacatgcctaggccaggcctatgaaccctgtaactggatccccagaggctagctctggtgaaaggagctgttggtctgctttgaagctctgttgcacagggagagggaaaaatat

SEQ ID NO: 208385 - DNA, 813 bp, Artificial Sequence
  derived and/or modified sequence
atgtgtgagaggagcctgtacagagctggctacgtgggcagcctgctgaacctgcagagcccagacagcttctacttcagcaacctgcggcccaacggcggccagctggccgccctgccccccatctcctaccccaggggggccctgccctgggccgccaccccagccagctgtgccccagcccagcctgctggggccacagcctttggaggcttcagccagccctacctggccggcagcggccccctgggcctgcagcccccaacagccaaggatggccctgaggagcaggccaagttctacgcccctgaggccgctgctggccctgaggagcggggccgcacccggcccagctttgcccctgagagcagcctggccccagctgtggccgccctgaaggccgccaagtatgactatgctggggtgggccgggccaccccaggcagcaccaccctgctgcagggcgccccctgtgcccctggcttcaaggatgacaccaagggccccctgaacctgaacatgacagtgcaggccgccggcgtggccagctgcctgcggcccagcctgcctgatggcctgccctggggcgccgcccctggccgggccaggaagaagaggaagccctacaccaagcagcagattgctgagctggagaatgagttcctggtgaatgagttcatcaaccggcagaagaggaaggagctgagcaaccggctgaacctgagtgaccagcaggtgaagatctggttccagaacagaaggatgaagaagaagagggtggtgctgcgggagcaggccctggccctgtactag

SEQ ID NO: 208386 - DNA, 813 bp, Artificial Sequence
  derived and/or modified sequence
atgtgcgagcggagcctgtaccgggccggctacgtgggcagcctgcttaacctccaatcccccgattccttctattttagtaacctgagacctaatggtggacagctagcggcactcccacctatcagctacccgaggggcgctctgccatgggccgccactcctgcatcttgcgcgcctgctcaacctgccggcgccaccgcatttgggggattcagtcagccctacctcgccgggagcggtccactggggctccaaccacccacagcaaaggacggaccagaggaacaggctaagttttacgccccagaggccgccgcaggacccgaagagcggggtagaacgaggccatcatttgccccagaaagttctcttgctcccgcagtggccgcactgaaagcagccaagtatgactacgctggggtcggccgagctacgcctggatccacgactttgctacagggagccccgtgtgcgcccggttttaaggacgatactaaggggccgcttaatctgaatatgaccgtacaggccgcaggtgtggctagttgccttcgacccagtctaccagatggactgccgtggggagccgccccaggaagggcccggaaaaaaagaaaaccatacacaaaacaacaaatcgctgagctggagaatgaattcctggtcaacgagttcatcaatcgtcaaaagagaaaggagctaagtaatcgactcaatttaagtgatcaacaggtgaagatttggtttcaaaataggagaatgaagaagaagcgagtcgtgctaagggaacaggctcttgccctttactag

SEQ ID NO: 208387 - DNA, 813 bp, Artificial Sequence
  derived and/or modified sequence
atgtgcgagcgctccctttaccgcgctggttatgtgggatctctgttaaatctccagtccccggatagtttctatttctccaacctgcgaccaaatggcggacagttggccgctctgcccccaatttcttacccccgaggggctcttccatgggcggctacccccgcttcatgcgcccctgctcaacccgcaggggctacggcctttggcggattctcccagccatatttagcgggatccgggcctttgggcctccagccccctacagcaaaagacggaccggaggaacaggcaaaattctacgctccggaggctgccgctggaccagaagaaaggggccgtactcggccttctttcgctcccgagtcgtccctggcaccagctgtcgcagccttgaaggccgcaaaatacgattatgctggggtcggacgggctacaccaggatccactactcttttgcagggcgcaccttgtgcccctggtttcaaggatgatactaaaggaccgctcaatcttaacatgacagtccaggccgctggtgtcgcttcctgtcttcggccttctttaccagatgggctcccttggggcgcagccccaggccgtgccagaaagaaacggaagccttatacaaaacagcagatcgcagaacttgagaatgaattcctggtgaatgaattcataaaccggcagaagaggaaagagctgagtaatcgattgaatctgagtgaccagcaggtcaagatctggttccaaaatcgcaggatgaagaagaagagagtggtcctacgtgaacaagccctcgctctatactag

SEQ ID NO: 208388 - DNA, 813 bp, Artificial Sequence
  derived and/or modified sequence
atgtgcgagagaagcctgtacagagccggctacgtgggcagcctgctgaacctgcagagccccgacagcttctacttcagcaacctgagacccaacggcggccagctggccgccctgccccccatcagctaccccagaggcgccctgccctgggccgccacccccgccagctgcgcccccgcccagcccgccggcgccaccgccttcggcggcttcagccagccctacctggccggcagcggccccctgggcctgcagccccccaccgccaaggacggccccgaggagcaggccaagttctacgcccccgaggccgccgccggccccgaggagagaggcagaaccagacccagcttcgcccccgagagcagcctggcccccgccgtggccgccctgaaggccgccaagtacgactacgccggcgtgggcagagccacccccggcagcaccaccctgctgcagggcgccccctgcgcccccggcttcaaggacgacaccaagggccccctgaacctgaacatgaccgtgcaggccgccggcgtggccagctgcctgagacccagcctgcccgacggcctgccctggggcgccgcccccggcagagccagaaagaagagaaagccctacaccaagcagcagatcgccgagctggagaacgagttcctggtgaacgagttcatcaacagacagaagagaaaggagctgagcaacagactgaacctgagcgaccagcaggtgaagatctggttccagaacagaagaatgaagaagaagagagtggtgctgagagagcaggccctggccctgtactag

SEQ ID NO: 208389 - protein, 507 aa, Artificial Sequence
  derived and/or modified sequence
MGCWGRNRGRLLCMLALTFMFMVLEVVVSRVTSSLAMLSDSFHMLSDVLALVVALVAERFARRTHATQKNTFGWIRAEVMGALVNAIFLTGLCFAILLEAIERFIEPHEMQQPLVVLGVGVAGLLVNVLGLCLFHHHSGFSQDSGHGHSHGGHGHGHGLPKGPRVKSTRPGSSDINVAPGEQGPDQEETNTLVANTSNSNGLKLDPADPENPRSGDTVEVQVNGNLVREPDHMELEEDRAGQLNMRGVFLHVLGDALGSVIVVVNALVFYFSWKGCSEGDFCVNPCFPDPCKAFVEIINSTHASVYEAGPCWVLYLDPTLCVVMVCILLYTTYPLLKESALILLQTVPKQIDIRNLIKELRNVEGVEEVHELHVWQLAGSRIIATAHIKCEDPTSYMEVAKTIKDVFHNHGIHATTIQPEFASVGSKSSVVPCELACRTQCALKQCCGTLPQAPSGKDAEKTPAVSISCLELSNNLEKKPRRTKAENIPAVVIEIKNMPNKQPESSL

SEQ ID NO: 208390 - DNA, 1524 bp, Artificial Sequence
  derived and/or modified sequence
atgggatgctgggggcgaaatcgtggcaggcttctctgtatgctggccctgacatttatgtttatggtcctggaggtggtagtgagccgggttacttcatctctggcgatgttatccgatagtttccatatgctgagtgatgtcctggccctggtggtcgccttggtggccgaacggttcgcacggcgtactcacgccacacagaagaatacttttgggtggattcgcgcagaggtgatgggggcgcttgtcaatgcaatatttttgaccgggctatgctttgctatactcctggaagccatcgaacgtttcatcgagcctcatgaaatgcagcagcccctcgtggttcttggggtaggcgttgctggactgctcgtgaacgtgttgggtctctgcctgttccaccatcacagtggattctcacaggacagtggacatggtcatagccacggggggcatgggcacgggcatggtctgcccaaagggccaagggtaaaatctaccaggccaggctcatctgatatcaacgtcgcgcccggggaacaggggcctgaccaagaagaaaccaatacccttgtggccaatacttccaacagtaacggacttaagctggacccagcagaccccgagaacccgcgttccggggacactgtcgaggtccaggttaacggaaacctggtgcgtgagcctgaccacatggagctggaggaagacagggcgggccagttgaatatgagaggagtgtttctgcatgtactgggagatgcccttggctccgtgatcgtcgttgtgaatgccctggttttttattttagctggaagggttgttctgaaggcgacttttgcgtgaatccgtgtttcccagatccctgtaaagcctttgttgaaatcatcaacagcacccatgcctccgtctatgaggcagggccctgctgggtgctgtatttagacccaaccctttgcgtagtcatggtctgtatccttctttacaccacttatcccctgttaaaagaatccgcgcttatcttactgcagacagtcccgaaacagatcgatatacggaatcttatcaaggaactcaggaacgtcgagggagtggaagaggttcatgagttgcacgtgtggcagctcgccggctcaaggataatcgctaccgcacacattaagtgtgaggatccaacctcttacatggaagtcgcaaagacaatcaaagacgtgtttcacaatcacggcatccacgccactaccattcaacctgagttcgctagtgtagggagtaaatcatccgttgtgccctgtgaactggcttgccgtacccagtgtgccttaaaacaatgctgcggtacgttaccacaagcgccttccggaaaggacgctgaaaaaacgccggccgttagtatctcttgcttagagctgtccaacaatctcgagaagaaaccaagacggaccaaggccgaaaacatccctgcagtcgtgatcgaaattaaaaacatgccaaacaagcagcctgagagttccttatag

SEQ ID NO: 208391 - DNA, 1524 bp, Artificial Sequence
  derived and/or modified sequence
atgggctgctggggcaggaacagaggccgcctgctgtgcatgctggccctgaccttcatgttcatggtgctggaggtggtggtgtcccgggtgaccagcagcctggccatgctgagtgacagcttccacatgctgagtgatgtgctggccctggtggtggccctggtggccgagagatttgcccggaggacccacgccacccagaagaacaccttcggctggatccgggcagaggtgatgggcgccctggtgaatgccatcttcctgaccggcctgtgctttgccatcctgctggaggccatcgagcgcttcatcgagccccatgagatgcagcagcccctggtggtgctgggcgtgggcgtggccggcctgctggtgaatgtgctgggcctgtgcctcttccaccaccacagcggcttcagccaggacagcggccacggccacagccacggcggccacggccacggccacggcctgcccaagggcccccgggtgaagagcacccggcccggcagcagtgacatcaacgtggcccctggagagcagggccctgaccaggaggagaccaacaccctggtggccaacaccagcaacagcaatggcctgaagctggaccctgctgaccctgagaaccccaggtctggggacacagtggaggtgcaggtgaatggaaacctggtgcgggagccagaccacatggagctggaggaggaccgggccggccagctgaacatgagaggagtcttcctgcacgtgctgggagatgccctgggctctgtgattgtggtggtgaatgccctggtgttctacttctcctggaagggctgcagcgagggggacttctgtgtgaacccctgcttcccagacccctgcaaggcctttgtggagatcatcaacagcacccacgcctctgtgtatgaggccggcccctgctgggtgctgtacctggaccccaccctgtgtgtggtgatggtgtgcatcctgctgtacaccacctaccccctgctgaaggagagcgccctgatcctgctgcagacagtgcccaagcagattgacatccggaacctgatcaaggagctgagaaatgtggagggcgtggaggaggtgcatgagctgcacgtgtggcagctggccggcagccgcatcatcgccacagcccacatcaagtgtgaggaccccaccagctacatggaggtggccaagaccatcaaggatgtgttccacaaccacggcatccacgccaccaccatccagcctgagtttgcctctgtgggcagcaagagctctgtggtgccctgtgagctggcctgcaggacccagtgtgccctgaagcagtgctgcggcaccctgccccaggcccccagcggcaaggatgctgagaagaccccagctgtgtccatcagctgcctggagctgagcaacaacctggagaagaagcccaggaggaccaaggccgagaacatcccagctgtggtgattgagatcaagaacatgcccaacaagcagcctgagagcagcctgtag

SEQ ID NO: 208392 - DNA, 1524 bp, Artificial Sequence
  derived and/or modified sequence
atgggctgctggggccggaaccggggccggctgctgtgcatgctggccctgacctttatgttcatggtgttggaagtcgtcgtgtctcgggtaactagcagtctagctatgttgtctgactccttccatatgctttctgacgtccttgctctggttgtagcactggtggctgagaggttcgcaagacgcacacatgccacacaaaagaacacatttgggtggatacgggccgaagtaatgggtgcgctcgtgaatgctatctttttgacaggcctgtgcttcgcaattttactggaagcaatcgaaaggtttatcgagccacacgaaatgcagcaacctctggttgtccttggggtgggcgtcgcggggctgttagtgaacgtgttgggattatgtctttttcaccaccattccggcttcagccaggacagtgggcacggtcatagccatggcggccatgggcatggacacggtctgcctaaggggccccgtgtgaaatcgacgcggccgggctcctcggatattaatgtggctcccggtgagcaaggcccggatcaagaagaaacaaacactctggttgctaatacatcaaatagcaatggactgaaattagacccggcggaccctgaaaaccctcgttctggagacacggtggaagtgcaagtaaacggcaacttggtgagagaacctgaccacatggaactggaagaggatcgcgctgggcagctgaacatgagaggagttttcctccacgtgctcggggacgccctcggcagcgttatcgtggtggttaatgctctggtgttttactttagctggaaaggctgctctgaaggggacttttgcgtgaacccttgctttcccgacccctgcaaagcattcgttgaaatcatcaacagcacacatgcaagcgtgtacgaggcaggcccatgctgggtcctctacctcgaccctaccttatgcgttgtgatggtgtgcattttgttgtatacaacctacccactattgaaagagagtgccttgatcttgttgcaaacagtgcccaagcagatcgacataaggaacttaattaaggaacttcggaacgttgaaggagtagaagaagttcatgaactgcacgtgtggcagcttgcgggtagcaggatcatcgccacagctcatataaagtgcgaagatccaacaagttatatggaggtcgctaagaccatcaaagatgtttttcacaaccatgggattcacgctacaaccattcagccagagttcgcctcagttggctcaaaaagctccgtggtcccgtgcgaacttgcctgtcgaacccaatgtgccctgaagcagtgctgcggcacactgccgcaggcgccaagcggcaaggacgcagaaaaaacgccggcagtgtccatcagctgccttgagctgtctaacaacctggaaaaaaaacccaggcggactaaggccgaaaacattcctgccgttgttatcgaaattaaaaatatgcctaataagcaacctgagtcctctctctag

SEQ ID NO: 208393 - DNA, 1524 bp, Artificial Sequence
  derived and/or modified sequence
atgggttgctggggtagaaacaggggcagactgttgtgcatgttggccctcacctttatgtttatggttttggaggtcgtggtcagcagggtcacctcctctctcgcgatgctatcagactcattccacatgctgagtgatgtgttggcactggtggtggcactcgtggctgaacgcttcgcacgaagaacacacgcaactcagaaaaacacatttggatggataagagccgaggttatgggtgcactggtgaacgccatcttcttgaccggtctgtgcttcgccatcctgctggaggcaatcgagcgcttcatcgagccacacgagatgcagcagcccctggtggttctcggagtgggtgttgcaggactgctggttaatgttttgggcctgtgcctgttccatcaccattctggcttttcgcaagactctgggcatggccattcacacggtggtcacggccatggccatggcctgccaaaagggcctcgtgttaaaagcacgcggcctgggagctcagacatcaatgtggctcctggagagcagggtcccgaccaggaggagaccaatactctcgttgccaatacgtctaatagcaacggattgaaactggaccccgcagatcccgaaaaccctaggagtggagacacagtggaagtccaggtcaatggaaacctagtgagggagccagatcatatggagctggaggaagaccgcgctggacagctcaatatgcggggagtttttctgcacgttctcggcgatgccctgggtagtgtcatcgtcgtggtgaatgccctcgtgttctattttagctggaagggttgttcagaaggcgatttctgtgtgaatccatgctttccagatccctgcaaggcttttgtggagatcatcaattccacccacgcatccgtatacgaagctgggccatgctgggtcctctacctcgaccctaccttgtgcgttgtcatggtgtgtatcttgctatatacaacctatccactcctcaaggagagcgcgctgattttactgcaaacggtgccaaaacagattgacatacgcaacctaattaaagaactacggaacgtggaaggggtagaagaggtccatgaactacacgtctggcagcttgctggaagtaggataattgctaccgcccatattaaatgtgaggatccaacatcctatatggaggtggcgaagacaatcaaagatgtcttccacaaccacggaattcacgccaccaccatccagcctgaatttgccagcgtaggatcaaagtcttccgtcgtgccgtgcgagcttgcctgtcgtacacagtgcgctttgaaacagtgctgcggcaccctgccacaggccccatcgggcaaagatgctgagaagaccccagcggtgtcaatttcctgcctggaactgtcaaacaacttagagaaaaaaccacgcaggaccaaagccgaaaatatcccagctgtcgtcatcgagattaagaacatgcccaataaacagccagaaagtagcctgtag

SEQ ID NO: 208394 - DNA, 5474 bp, Artificial Sequence
  derived and/or modified sequence
cctcagcggtttcccgaacggcccgactcgggcgctcctccgtgtcgcggtcgccgaccctccgcgtcccgccaacgccgccgctgcaccagtctccgggccgggctcggcgggccccgcagccgcagccatggggtgttggggtcggaaccggggccggctgctgtgcatgctggcgctgaccttcatgttcatggtgctggaggtggtggtgagccgggtgacctcgtcgctggcgatgctctccgactccttccacatgctgtcggacgtgctggcgctggtggtggcgctggtggccgagcgcttcgcccggcggacccacgccacccagaagaacacgttcggctggatccgagccgaggtaatgggggctctggtgaacgccatcttcctgactggcctctgtttcgccatcctgctggaggccatcgagcgcttcatcgagccgcacgagatgcagcagccgctggtggtccttggggtcggcgtggccgggctgctggtcaacgtgctggggctctgcctcttccaccatcacagcggcttcagccaggactccggccacggccactcgcacgggggtcacggccacggccacggcctccccaaggggcctcgcgttaagagcacccgccccgggagcagcgacatcaacgtggccccgggcgagcagggtcccgaccaggaggagaccaacaccctggtggccaataccagcaactccaacgggctgaaattggaccccgcagacccagaaaaccccagaagtggtgatacagtggaagtacaagtgaatggaaatcttgtcagagaacctgaccatatggaactggaagaagatagggctggacaacttaacatgcgtggagtttttctgcatgtccttggagatgccttgggttcagtgattgtagtagtaaatgccttagtcttttacttttcttggaaaggttgttctgaaggggatttttgtgtgaatccatgtttccctgacccctgcaaagcatttgtagaaataattaatagtactcatgcatcagtttatgaggctggtccttgctgggtgctatatttagatccaactctttgtgttgtaatggtttgtatacttctttacacaacctatccattacttaaggaatctgctcttattcttctacaaactgttcctaaacaaattgatatcagaaatttgataaaagaacttcgaaatgttgaaggagttgaggaagttcatgaattacatgtttggcaacttgctggaagcagaatcattgccactgctcacataaaatgtgaagatccaacatcatacatggaggtggctaaaaccattaaagacgtttttcataatcacggaattcacgctactaccattcagcctgaatttgctagtgtaggctctaaatcaagtgtagttccgtgtgaacttgcctgcagaacccagtgtgctttgaagcaatgttgtgggacactaccacaagccccttctggaaaggatgcagaaaagaccccagcagttagcatttcttgtttagaacttagtaacaatctagagaagaagcccaggaggactaaagctgaaaacatccctgctgttgtgatagagattaaaaacatgccaaacaaacaacctgaatcatctttgtgagtcttgaaaaagatgtgatatttgacttttgctttaaactgcaagaggaaaaagactccactgaaattctaagtttgccaagtagtgtaattgaagtccttgtctggtcacacagtttaattctatttttgtaagaacataatgggactgcataacagagttctatattacaattttgtgattattagtacagagtacagctatgctgtgactgttttggaaagccagttttaacactatgttacatttttgtttaaagtaagttaaaccttatataacataatgacatttgatttctggatttttcccatgataaaaattagggggataaataaaattgttactggaatttctctgcttttcttttcccccagtgttatactttattagaattataattgatagaactttaaaatcatcaacagtttgtttcctttgacattttaggtgatattgccctttgagatcattacatagcataatggcagcatattttaagagtgactcatggctattagtaggaaataagatcagttactatcctgtattctgtattgctggctattaaacagtaagataattaacaaattgaactacagtttacacacaatggggcaaatggggtagtaagagcaaggaagaaagtttaccaaactaaatatttaggttattgtatgataatattgagactacatttctaaattattttgagaatttcaactttttattctaccaaagttaatctgaaacttggacatgttcaccagcattactttctttgaaagattggtataaaaacattgagctgcaagtttatttacaaaatatataagtatttttaaggatgttgacacctaataattacatgctaaacgcaaacgattaatgtaatcttttaaaccgggcgtttgaaaaaaaattttcaaggtcatttcatgataaccaatcatgaatggatttaaatggagctttttgagcacaaccagcaatgtttgtgctttctaagagtcactgacttgagaggaaagaaaaccagaaggttaatgcagtttggatattaaattcttagcaaaattaataattaaagcaaaattaattaagattttgtaagtcatcctgtcttcacatactcagatcttccaatagtggcttattttgcaagatgccacaatatctacacagaaaattgtggctatttcattattgctatagatttcaaatccaacacaaatatttaagggtgtttaagttatatttttcttgatagagggtatgctttgtgacaaaattagatttttgtccttgaaaggattaatattagcatcagttatgtatagctctatttttctagaaacaaggtattctgactacttttatagctgactacttttgggatggctacgttttgggatttaaaatagttcattgtttaatgggttgtaagaggaaaaagtgttaggatttgacagttactttttaaagggatgatcttttgtggtgtgtgtttttcctagtataagcctattgctggcgatgggcctatttaagaacagctgattttttccagtgaaaatatggtaattttaggaacacagtttgtaagttcacatttactataatgggccaaaaccataacctgccagtttgcaatacatcttgatcttttaatattcttatctgatattgtgtaattcaattcctaaactgatagttaccttgaattttgcgaaaaggtttgggtggttttttttaaacatgaaattgagggatctcatctgggcgaacaagaagagaaagctgtgaattgtactgtatcatgtacattcctgatttaatactttacagaacattttattcagatatcaatttgttacataaacatttcagcaatgatacaaagataactgataaaatatattacattcaatgaggttttctttacaaatgctctacttgaggtctgtgtcttaaagatggcatgacacctaagtacaagacatcaactgaatgaggattttaaaaaatggtatataagcataggacaagggctatgtttgtttgtttttcaaaagtgctttgaagataacagcctttaggtttgagttatttcacttttcataatttttaagtagcttatatataatggtggtaccataggattttcttttttcaaatgactgtcggcagaaacagtgggcactgactcaccttttgagttttagcagagaattatttatttctttacaatgcactttctaacccattgtagctatattagcattatcttttaaaaaagacatgcttttgtatttaaatattgtaggatttaagtgtctttctcaaaatagcttattcctttctgaaagaaaatgagggaaatactctgaattattaggagacttaaacccaatatttaaatatgctattttataacactgcatcagttttaggagttgcatctctcctgctggctcttttatatttgagcaagatcagtgtagaatatgtgtttagaaacttgtctgttgtctcagtttagtgaaaaggaggtgctgcatgtgcctgaattaaaaccaagaaatttttccaagccaaatgcagccttagtgatgagagatttaattctccattgtcaccttttagcttttatgattgcttagttttttctgaaggatgtctgcattgtaaaactatggactaaaacctaaaaaacagaatcctcaaaaactttgctgtatgtgttttaacattttagagaacagtatgttgaataactaaggtatgtaacttgaataggaaaaatgtccatcaaatgcaccttggaaaatcacagtaggtagaaggctgtgttaaccgtttgtgtcttattaacatccttaagttaattttgaatttttgacagttttgagggaaaagacctatggaacctaatgtgaagtatttcgtatgttaactggtgttgagttgaagatttttactgtgtataagcagatatcatttgaatgataaaaatgtcattaacctgctgtcttaagatgttcacacaaatatggagagtaattctacaatataaaaatatttattttaatactgagtttcagttaagtcataaacagtgttaaaactcttgggaaggtgtaggggttttttgtttgtcatttttaaaattgaaactgtgtcatacagtgtttcacgtctctgaaattgggattataatagcactattttgatgtagctctaccgatactatgtggtaatgctattttgttttactaacaagctctggaatatttagcagtcattttcactggcacaagagccttttgtatgttattcaatttaaacttttaaaccaaaaattttatggtccagtgtctttggcaaaaagatgctggagggaatgtaacatacaattaatatgtggttatatatatatataaaaagacacaaattgccatgttatggttctgccttgaaacagcacaatgaagtgtatcagtatattctgtgattatgaaacttatatgttgtgttgttttgtgtcttctgttgcctgtcctttgggccagatgtgggccagttaaatgcagttatcatctcattaaatacagatgcagataaaatatctttagtgctgcaacattttacctaactttttgtatgttttcatgactgtgtgttattttccaaagctgttcctacctcaccatgaggctttatggattgttatgtattataaatgttctatatgagacagactactgtgtttcttctcatttattaaaagttaagtagaaaaataaactaattttaatatcta

SEQ ID NO: 208395 - DNA, 1524 bp, Artificial Sequence
  derived and/or modified sequence
atgggctgctggggcagaaacagaggcagactgctgtgcatgctggccctgaccttcatgttcatggtgctggaggtggtggtgagcagagtgaccagcagcctggccatgctgagcgacagcttccacatgctgagcgacgtgctggccctggtggtggccctggtggccgagagattcgccagaagaacccacgccacccagaagaacaccttcggctggatcagagccgaggtgatgggcgccctggtgaacgccatcttcctgaccggcctgtgcttcgccatcctgctggaggccatcgagagattcatcgagccccacgagatgcagcagcccctggtggtgctgggcgtgggcgtggccggcctgctggtgaacgtgctgggcctgtgcctgttccaccaccacagcggcttcagccaggacagcggccacggccacagccacggcggccacggccacggccacggcctgcccaagggccccagagtgaagagcaccagacccggcagcagcgacatcaacgtggcccccggcgagcagggccccgaccaggaggagaccaacaccctggtggccaacaccagcaacagcaacggcctgaagctggaccccgccgaccccgagaaccccagaagcggcgacaccgtggaggtgcaggtgaacggcaacctggtgagagagcccgaccacatggagctggaggaggacagagccggccagctgaacatgagaggcgtgttcctgcacgtgctgggcgacgccctgggcagcgtgatcgtggtggtgaacgccctggtgttctacttcagctggaagggctgcagcgagggcgacttctgcgtgaacccctgcttccccgacccctgcaaggccttcgtggagatcatcaacagcacccacgccagcgtgtacgaggccggcccctgctgggtgctgtacctggaccccaccctgtgcgtggtgatggtgtgcatcctgctgtacaccacctaccccctgctgaaggagagcgccctgatcctgctgcagaccgtgcccaagcagatcgacatcagaaacctgatcaaggagctgagaaacgtggagggcgtggaggaggtgcacgagctgcacgtgtggcagctggccggcagcagaatcatcgccaccgcccacatcaagtgcgaggaccccaccagctacatggaggtggccaagaccatcaaggacgtgttccacaaccacggcatccacgccaccaccatccagcccgagttcgccagcgtgggcagcaagagcagcgtggtgccctgcgagctggcctgcagaacccagtgcgccctgaagcagtgctgcggcaccctgccccaggcccccagcggcaaggacgccgagaagacccccgccgtgagcatcagctgcctggagctgagcaacaacctggagaagaagcccagaagaaccaaggccgagaacatccccgccgtggtgatcgagatcaagaacatgcccaacaagcagcccgagagcagcctgtag

SEQ ID NO: 208396 - protein, 220 aa, Artificial Sequence
  derived and/or modified sequence
MASAGMQILGVVLTLLGWVNGLVSCALPMWKVTAFIGNSIVVAQVVWEGLWMSCVVQSTGQMQCKVYDSLLALPQDLQAARALCVIALLVALFGLLVYLAGAKCTTCVEEKDSKARLVLTSGIVFVISGVLTLIPVCWTAHAIIRDFYNPLVAEAQKRELGASLYLGWAASGLLLLGGGLLCCTCPSGGSQGPSHYMARYSTSAPAISRGPSEYPTKNYV

SEQ ID NO: 208397 - DNA, 1369 bp, Artificial Sequence
  derived and/or modified sequence
cgacactcggcctaggaatttcccttatctccttcgcagtgcagctccttcaacctcgccatggcctctgccggaatgcagatcctgggagtcgtcctgacactgctgggctgggtgaatggcctggtctcctgtgccctgcccatgtggaaggtgaccgctttcatcggcaacagcatcgtggtggcccaggtggtgtgggagggcctgtggatgtcctgcgtggtgcagagcaccggccagatgcagtgcaaggtgtacgactcactgctggcgctgccacaggacctgcaggctgcacgtgccctctgtgtcatcgccctccttgtggccctgttcggcttgctggtctaccttgctggggccaagtgtaccacctgtgtggaggagaaggattccaaggcccgcctggtgctcacctctgggattgtctttgtcatctcaggggtcctgacgctaatccccgtgtgctggacggcgcatgccatcatccgggacttctataaccccctggtggctgaggcccaaaagcgggagctgggggcctccctctacttgggctgggcggcctcaggccttttgttgctgggtggggggttgctgtgctgcacttgcccctcgggggggtcccagggccccagccattacatggcccgctactcaacatctgcccctgccatctctcgggggccctctgagtaccctaccaagaattacgtctgacgtggaggggaatgggggctccgctggcgctagagccatccagaagtggcagtgcccaacagctttgggatgggttcgtaccttttgtttctgcctcctgctatttttcttttgactgaggatatttaaaattcatttgaaaactgagccaaggtgttgactcagactctcacttaggctctgctgtttctcacccttggatgatggagccaaagaggggatgctttgagattctggatcttgacatgcccatcttagaagccagtcaagctatggaactaatgcggaggctgcttgctgtgctggctttgcaacaagacagactgtccccaagagttcctgctgctgctgggggctgggcttccctagatgtcactggacagctgccccccatcctactcaggtctctggagctcctctcttcacccctggaaaaacaaatgatctgttaacaaaggactgcccacctccggaacttctgacctctgtttcctccgtcctgataagacgtccaccccccagggccaggtcccagctatgtagacccccgcccccacctccaacactgcacccttctgccctgcccccctcgtctcaccccctttacactcacatttttatcaaataaagcatgttttgttagtgc

SEQ ID NO: 208398 - DNA, 1739 bp, Artificial Sequence
  derived and/or modified sequence
cgaacggccggacgcggtggctcacgcctttaatcccatcagtttgggagtctgaggcaggcggattacgagagtaggaaacgaaggctcgggaaggttaggtgagttccccatgtcaccgcgctgcttaagtggtgaagcggagtctcaagctctgttctaccctaagcctggcgccctcaccctgggtgagtctggacgtctgccagcccgaggcgggcccagcgaccccagcctccagcgcccccctctgacaagcctgggattcgcacgcccgctgccgtcagggacagggtctctgcccctcctccggggcggtggtccagtgacgtcaccgcttctttaagacccccgcctccgcccctgtcccgacactcggcctaggaatttcccttatctccttcgcagtgcagctccttcaacctcgccatggcctctgccggaatgcagatcctgggagtcgtcctgacactgctgggctgggtgaatggcctggtctcctgtgccctgcccatgtggaaggtgaccgctttcatcggcaacagcatcgtggtggcccaggtggtgtgggagggcctgtggatgtcctgcgtggtgcagagcaccggccagatgcagtgcaaggtgtacgactcactgctggcgctgccacaggacctgcaggctgcacgtgccctctgtgtcatcgccctccttgtggccctgttcggcttgctggtctaccttgctggggccaagtgtaccacctgtgtggaggagaaggattccaaggcccgcctggtgctcacctctgggattgtctttgtcatctcaggggtcctgacgctaatccccgtgtgctggacggcgcatgccatcatccgggacttctataaccccctggtggctgaggcccaaaagcgggagctgggggcctccctctacttgggctgggcggcctcaggccttttgttgctgggtggggggttgctgtgctgcacttgcccctcgggggggtcccagggccccagccattacatggcccgctactcaacatctgcccctgccatctctcgggggccctctgagtaccctaccaagaattacgtctgacgtggaggggaatgggggctccgctggcgctagagccatccagaagtggcagtgcccaacagctttgggatgggttcgtaccttttgtttctgcctcctgctatttttcttttgactgaggatatttaaaattcatttgaaaactgagccaaggtgttgactcagactctcacttaggctctgctgtttctcacccttggatgatggagccaaagaggggatgctttgagattctggatcttgacatgcccatcttagaagccagtcaagctatggaactaatgcggaggctgcttgctgtgctggctttgcaacaagacagactgtccccaagagttcctgctgctgctgggggctgggcttccctagatgtcactggacagctgccccccatcctactcaggtctctggagctcctctcttcacccctggaaaaacaaatgatctgttaacaaaggactgcccacctccggaacttctgacctctgtttcctccgtcctgataagacgtccaccccccagggccaggtcccagctatgtagacccccgcccccacctccaacactgcacccttctgccctgcccccctcgtctcaccccctttacactcacatttttatcaaataaagcatgttttgttagtgca

SEQ ID NO: 208399 - DNA, 663 bp, Artificial Sequence
  derived and/or modified sequence
atggccagcgccggcatgcagatcctgggcgtggtgctgaccctgctgggctgggtgaacggcctggtgagctgcgccctgcccatgtggaaggtgaccgccttcatcggcaacagcatcgtggtggcccaggtggtgtgggagggcctgtggatgagctgcgtggtgcagagcaccggccagatgcagtgcaaggtgtacgacagcctgctggccctgccccaggacctgcaggccgccagagccctgtgcgtgatcgccctgctggtggccctgttcggcctgctggtgtacctggccggcgccaagtgcaccacctgcgtggaggagaaggacagcaaggccagactggtgctgaccagcggcatcgtgttcgtgatcagcggcgtgctgaccctgatccccgtgtgctggaccgcccacgccatcatcagagacttctacaaccccctggtggccgaggcccagaagagagagctgggcgccagcctgtacctgggctgggccgccagcggcctgctgctgctgggcggcggcctgctgtgctgcacctgccccagcggcggcagccagggccccagccactacatggccagatacagcaccagcgcccccgccatcagcagaggccccagcgagtaccccaccaagaactacgtgtag

SEQ ID NO: 208400 - DNA, 663 bp, Artificial Sequence
  derived and/or modified sequence
atggcttccgccggcatgcagatcctgggagtagtgttaacactgcttggctgggtgaatggattagtaagttgcgccctccccatgtggaaagtaaccgcgtttattggcaacagcatcgtggtggcacaggtggtgtgggagggcttgtggatgagctgtgtggtccagtccactggccagatgcagtgcaaagtgtatgacagtttgctggcactgccacaggacctgcaggctgcgagagctctttgtgtgatcgctctacttgtggccctgtttggtctgctggtctacctagctggagccaagtgtacgacatgcgtggaggaaaaggattcaaaggccagacttgtcctgaccagcgggattgtgttcgtgattagcggtgtgttgaccttaattcctgtgtgttggaccgcacatgccattatcagagatttttataatcctctcgtggctgaggcccagaagcgagagttaggcgctagcctatacctgggatgggccgcctctgggctgctgcttctcggcggcggtctcctctgttgtacttgcccttcaggcgggtcgcagggcccctcccactacatggccaggtactccaccagcgctcccgctatcagcaggggccctagcgagtaccccactaagaattacgtttag

SEQ ID NO: 208401 - DNA, 663 bp, Artificial Sequence
  derived and/or modified sequence
atggcatctgctggaatgcaaatcctaggagtagtgctgacccttctcggttgggtcaatggactggtgtcctgcgccctgcctatgtggaaggtcacagccttcattggcaactcaattgtagttgcacaggtggtttgggaggggctgtggatgtcttgcgtagtccaaagtacgggccagatgcaatgtaaggtgtacgatagcctgcttgctctgcctcaggatttgcaggcagctagagctctgtgcgtcatagctttactggtcgctctgtttggactcttagtttatctggcaggcgccaagtgtaccacctgcgtggaagagaaggactctaaggctcggttggtgcttaccagtggcattgtcttcgtgatctccggcgtgctgaccctcattccagtgtgctggactgcgcatgctatcattagagacttctacaaccctctagtggctgaggcgcagaagagagaacttggggcctccctttacctggggtgggctgcaagcggcctactgctccttggcgggggtctcttatgctgcacttgcccatcaggtggttcacagggaccctctcactacatggctagatactccacaagcgccccggccatttctagaggaccttctgagtaccccaccaagaattatgtatag

SEQ ID NO: 208402 - DNA, 663 bp, Artificial Sequence
  derived and/or modified sequence
atggccagcgctggcatgcagatcctgggcgtggtgctgaccctgctgggctgggtgaatggcctggtgtcctgtgccctgcccatgtggaaggtgacagccttcatcggcaacagcatcgtggtggcccaggtggtgtgggagggcctgtggatgagctgtgtggtgcagagcacaggccagatgcagtgcaaggtgtatgacagcctgctggccctgccccaggacctgcaggccgcccgggccctgtgtgtgattgccctgctggtggccctgtttggcctgctggtgtacctggccggggccaagtgcaccacctgtgtggaggagaaggacagcaaggcccggctggtgctgaccagcggcatcgtgtttgtgatcagcggcgtgctgaccctcatccctgtgtgctggacagcccacgccatcatccgggacttctacaaccccctggtggccgaggcccagaagcgggagctgggcgccagcctgtacctgggctgggccgccagcggcctgctgctgctgggcggcggcctgctgtgctgcacctgccccagcggcggcagccagggccccagccactacatggcccgctacagcaccagcgccccagccatcagccggggccccagcgagtaccccaccaagaactacgtgtag

SEQ ID NO: 208403 - DNA, 663 bp, Artificial Sequence
  derived and/or modified sequence
atggccagcgccggcatgcagatcctgggcgtggtgctgaccctgcttggctgggtaaacggactggttagctgtgcactgcctatgtggaaggtgaccgcattcatcggaaactcaatcgtggtagcccaggtggtctgggagggcttgtggatgtcttgcgtcgtccaaagtaccggtcagatgcagtgtaaggtctatgattccctactggccttgccccaagatctccaggccgccagagctctctgtgttatcgctctgctagtagcgctgttcgggttgctggtgtaccttgctggcgccaagtgcaccacgtgcgtggaggaaaaagattctaaggcaaggcttgtactcaccagcgggattgtattcgtgatttctggcgtactgaccttgattcctgtgtgttggacagctcatgcaataatcagagatttctataaccctctggtggctgaagcacagaagagggagctgggtgcttccctgtacttgggctgggccgcgagcgggctgctgcttctgggaggaggtctgctgtgctgcacttgtcctagcgggggaagccaggggccgagccattatatggctaggtattccacgagtgctcccgctatatcacgggggccaagtgagtacccgacaaagaattacgtgtag

SEQ ID NO: 208404 - DNA, 663 bp, Artificial Sequence
  derived and/or modified sequence
atggccagcgccggcatgcagatcctgggcgtggtgctgaccctgctgggatgggtaaacgggcttgtgagctgcgcgctgcctatgtggaaggtgactgcttttatcggcaatagtattgttgtggcacaagtggtgtgggaaggtctctggatgtcctgcgtagtacagagcaccgggcagatgcaatgtaaagtttatgattctctgctcgcactaccccaggatcttcaggcagcccgagccctgtgtgtgatcgccttgctggtcgctctgttcggtttactggtttatctggcaggcgcaaagtgcacaacctgcgtggaagaaaaggacagcaaagcgaggctggttcttacttctggcatagtgttcgtgataagcggagttctcaccttgattcctgtatgttggactgcacacgccattatacgcgacttctataatcccctggttgcggaggctcagaaaagggagttgggtgccagtttgtacttgggctgggccgcttccgggttattgctcttaggtgggggcctgctgtgttgtacttgccccagcgggggctctcagggcccttcccattacatggccaggtatagtacaagcgcaccagccatcagccgtggaccttcagaatatccgaccaagaattacgtatag

SEQ ID NO: 208405 - DNA, 663 bp, Artificial Sequence
  derived and/or modified sequence
atggcctcggctgggatgcagattctcggcgtcgttttaacactactaggttgggtgaacggactggtttcatgtgccctgcccatgtggaaagtcaccgcatttattggtaatagcatagtcgttgcccaggtagtatgggaggggctgtggatgagctgcgtcgtccagtcaaccggccaaatgcagtgtaaggtctatgattcgctcctggccttgccccaggatctccaagctgcccgtgctctttgcgtgatcgcattacttgtcgcactcttcggcctgttagtgtatttagcaggagcgaagtgtactacctgtgtggaggagaaggatagcaaggctaggttagtgcttacatcgggcatcgtgtttgtgattagcggggtactgaccctgattccagtgtgttggacggcgcacgcaataattcgagacttttataacccactggtggccgaggcgcaaaagcgtgaactgggggcatccctgtacctgggctgggcagcgagcggcttactactgttgggagggggactgctctgctgcacctgtcctagcggcggttcccaagggccaagccattatatggctcggtacagcacttctgccccagcgatcagccggggaccatccgagtaccctacgaaaaactatgtgtag

SEQ ID NO: 208406 - DNA, 663 bp, Artificial Sequence
  derived and/or modified sequence
atggcgtcagccggtatgcagattcttggggtggtgcttactctgctaggttgggtaaatggcctggtcagctgcgccctccccatgtggaaagtcaccgcattcatcggcaattccattgtagtggcccaggtggtgtgggaagggttatggatgtcctgtgtggtgcagagcaccgggcagatgcagtgcaaagtctacgacagtttgctggctttgccccaagatctgcaggcagccagagctctctgtgtgattgcgcttttggtagctttgttcggcctcctcgtatacctcgcaggtgccaaatgtactacctgtgtggaagagaaggacagcaaagcgaggctagtgctaactagcggcatcgtgttcgtgatcagtggtgttctgacgctaatcccggtgtgctggactgcacatgctatcattagggacttctataatccacttgtcgctgaggcccagaagcgagaactaggggctagtctttacctgggatgggctgcctccgggttgctcttgttgggtgggggactcctatgctgtacttgcccttctggcggatctcaggggcctagtcattacatggccagatattccacctcggctcccgcaatctcccgcggtccctccgagtatcccaccaaaaattatgtatag

SEQ ID NO: 208407 - protein, 1137 aa, Artificial Sequence
  derived and/or modified sequence
MKVKEEKAGVGKLDHTNHRRRFPDQKECPPIHIGLPVPTYPQRKTDQKGHLSGLQKVHWGLRPDQPQQELTGPGSGASSQDSSMDLISRTRSPAAEQLQDILGEEDEAPNPTLFTEMDTLQHDGDQMEWKESARWIKFEEKVEEGGERWSKPHVSTLSLHSLFELRTCLQTGTVLLDLDSGSLPQIIDDVIEKQIEDGLLRPELRERVSYVLLRRHRHQTKKPIHRSLADIGKSVSTTNRSPARSPGAGPSLHHSTEDLRMRQSANYGRLCHAQSRSMNDISLTPNTDQRKNKFMKKIPKDSEASNVLVGEVDFLDQPFIAFVRLIQSAMLGGVTEVPVPTRFLFILLGPSGRAKSYNEIGRAIATLMVDDLFSDVAYKARNREDLIAGIDEFLDEVIVLPPGEWDPNIRIEPPKKVPSADKRKSVFSLAELGQMNGSVGGGGGAPGGGNGGGGGGGSGGGAGSGGAGGTSSGDDGEMPAMHEIGEELIWTGRFFGGLCLDIKRKLPWFPSDFYDGFHIQSISAILFIYLGCITNAITFGGLLGDATDNYQGVMESFLGTAMAGSLFCLFSGQPLIILSSTGPILIFEKLLFDFSKGNGLDYMEFRLWIGLHSAVQCLILVATDASFIIKYITRFTEEGFSTLISFIFIYDAIKKMIGAFKYYPINMDFKPNFITTYKCECVAPDTVNTTVFNASAPLAPDTNASLYNLLNLTALDWSLLSKKECLSYGGRLLGNSCKFIPDLALMSFILFFGTYSMTLTLKKFKFSRYFPTKVRALVADFSIVFSILMFCGIDACFGLETPKLHVPSVIKPTRPDRGWFVAPFGKNPWWVYPASILPALLVTILIFMDQQITAVIVNRKENKLKKAAGYHLDLFWVGILMALCSFMGLPWYVAATVISIAHIDSLKMETETSAPGEQPQFLGVREQRVTGIIVFILTGISVFLAPILKCIPLPVLYGVFLYMGVASLNGIQMGTGGSEFKIQKKLTPFWERCKLFLMPAKHQPDHAFLRHVPLRRIHLFTLVQILCLAVLWILKSTVAAIIFPVMILGLIIVRRLLDFIFSQHDLAWIDNILPEKEKKETDKKRKRKKGAHEDCDEEPQFPPPSVIKIPMESVQSDPQNGIHCIARKRSSSWSYSL

SEQ ID NO: 208408 - protein, 129 aa, Artificial Sequence
  derived and/or modified sequence
MKVKEEKAGVGKLDHTNHRRRFPDQKECPPIHIGLPVPTYPQRKTDQKGHLSGLQKVHWGLRPDQPQQELTGPGSGASSQDSSMDLISRTRSPAAEQLQDILGEEDEAPNPTLFTEMDTLQHDGDQMEW

SEQ ID NO: 208409 - protein, 1142 aa, Artificial Sequence
  derived and/or modified sequence
MKVKEEKAGVGKLDHTNHRRRFPDQKECPPIHIGLPVPTYPQRKTDQKGHLSGLQKVHWGLRPDQPQQELTGPGSGASSQDSSMDLISRTRSPAAEQLQDILGEEDEAPNPTLFTEMDTLQHDGDQMEWKESARWIKFEEKVEEGGERWSKPHVSTLSLHSLFELRTCLQTGTVLLDLDSGSLPQIIDDVIEKQIEDGLLRPELRERVSYVLLRRHRHQTKKPIHRSLADIGKSVSTTNRSPARSPGAGPSLHHSTEDLRMRQSANYGRLCHAQSRSMNDISLTPNTDQRKNKFMKKIPKDSEASNVLVGEVDFLDQPFIAFVRLIQSAMLGGVTEVPVPTRFLFILLGPSGRAKSYNEIGRAIATLMVDDLFSDVAYKARNREDLIAGIDEFLDEVIVLPPGEWDPNIRIEPPKKVPSADKRKSVFSLAELGQMNGSVGGGGGAPGGGNGGGGGGGSGGGAGSGGAGGTSSGDDGEMPAMHEIGEELIWTGRFFGGLCLDIKRKLPWFPSDFYDGFHIQSISAILFIYLGCITNAITFGGLLGDATDNYQGVMESFLGTAMAGSLFCLFSGQPLIILSSTGPILIFEKLLFDFSKGNGLDYMEFRLWIGLHSAVQCLILVATDASFIIKYITRFTEEGFSTLISFIFIYDAIKKMIGAFKYYPINMDFKPNFITTYKCECVAPDTVNTTVFNASAPLAPDTNASLYNLLNLTALDWSLLSKKECLSYGGRLLGNSCKFIPDLALMSFILFFGTYSMTLTLKKFKFSRYFPTKVRALVADFSIVFSILMFCGIDACFGLETPKLHVPSVIKPTRPDRGWFVAPFGKNPWWVYPASILPALLVTILIFMDQQITAVIVNRKENKLKKAAGYHLDLFWVGILMALCSFMGLPWYVAATVISIAHIDSLKMETETSAPGEQPQFLGVREQRVTGIIVFILTGISVFLAPILKCIPLPVLYGVFLYMGVASLNGIQMGTGGSEFKIQKKLTPFWERCKLFLMPAKHQPDHAFLRHVPLRRIHLFTLVQILCLAVLWILKSTVAAIIFPVMSLSTTDLGLIIVRRLLDFIFSQHDLAWIDNILPEKEKKETDKKRKRKKGAHEDCDEEPQFPPPSVIKIPMESVQSDPQNGIHCIARKRSSSWSYSL

SEQ ID NO: 208410 - DNA, 3123 bp, Artificial Sequence
  derived and/or modified sequence
atgaaggtgaaggaggagaaggccggcgtgggcaagctggaccacaccaaccacagaagaagattccccgaccagaaggagtgcccccccatccacatcggcctgcccgtgcccacctacccccagagaaagaccgaccagaagggccacctgagcggcctgcagaaggtgcactggggcctgagacccgaccagccccagcaggagctgaccggccccggcagcggcgccagcagccaggacagcagcatggacctgatcagcagaaccagaagccccgccgccgagcagctgcaggacatcctgggcgaggaggacgaggcccccaaccccaccctgttcaccgagatggacaccctgcagcacgacggcgaccagatggagtggaaggagagcgccagatggatcaagttcgaggagaaggtggaggagggcggcgagagatggagcaagccccacgtgagcaccctgagcctgcacagcctgttcgagctgagaacctgcctgcagaccggcaccgtgctgctggacctggacagcggcagcctgccccagatcatcgacgacgtgatcgagaagcagatcgaggacggcctgctgagacccgagctgagagagagagtgagctacgtgctgctgagaagacacagacaccagaccaagaagcccatccacagaagcctggccgacatcggcaagagcgtgagcaccaccaacagaagccccgccagaagccccggcgccggccccagcctgcaccacagcaccgaggacctgagaatgagacagagcgccaactacggcagactgtgccacgcccagagcagaagcatgaacgacatcagcctgacccccaacaccgaccagagaaagaacaagttcatgaagaagatccccaaggacagcgaggccagcaacgtgctggtgggcgaggtggacttcctggaccagcccttcatcgccttcgtgagactgatccagagcgccatgctgggcggcgtgaccgaggtgcccgtgcccaccagattcctgttcatcctgctgggccccagcggcagagccaagagctacaacgagatcggcagagccatcgccaccctgatggtggacgacctgttcagcgacgtggcctacaaggccagaaacagagaggacctgatcgccggcatcgacgagttcctggacgaggtgatcgtgctgccccccggcgagtgggaccccaacatcagaatcgagccccccaagaaggtgcccagcgccgacaagagaaagagcgtgttcagcctggccgagctgggccagatgaacggcagcgtgggcggcggcggcggcgcccccggcggcggcaacggcggcggcggcggcggcggcagcggcggcggcgccggcagcggcggcgccggcggcaccagcagcggcgacgacggcgagatgcccgccatgcacgagatcggcgaggagctgatctggaccggcagattcttcggcggcctgtgcctggacatcaagagaaagctgccctggttccccagcgacttctacgacggcttccacatccagagcatcagcgccatcctgttcatctacctgggctgcatcaccaacgccatcaccttcggcggcctgctgggcgacgccaccgacaactaccagggcgtgatggagagcttcctgggcaccgccatggccggcagcctgttctgcctgttcagcggccagcccctgatcatcctgagcagcaccggccccatcctgatcttcgagaagctgctgttcgacttcagcaagggcaacggcctggactacatggagttcagactgtggatcggcctgcacagcgccgtgcagtgcctgatcctggtggccaccgacgccagcttcatcatcaagtacatcaccagattcaccgaggagggcttcagcaccctgatcagcttcatcttcatctacgacgccatcaagaagatgatcggcgccttcaagtactaccccatcaacatggacttcaagcccaacttcatcaccacctacaagtgcgagtgcgtggcccccgacaccgtgaacaccaccgtgttcaacgccagcgcccccctggcccccgacaccaacgccagcctgtacaacctgctgaacctgaccgccctggactggagcctgctgagcaagaaggagtgcctgagctacggcggcagactgctgggcaacagctgcaagttcatccccgacctggccctgatgagcttcatcctgttcttcggcacctacagcatgaccctgaccctgaagaagttcaagttcagcagatacttccccaccaaggtgagagccctggtggccgacttcagcatcgtgttcagcatcctgatgttctgcggcatcgacgcctgcttcggcctggagacccccaagctgcacgtgcccagcgtgatcaagcccaccagacccgacagaggctggttcgtggcccccttcggcaagaacccctggtgggtgtaccccgccagcatcctgcccgccctgctggtgaccatcctgatcttcatggaccagcagatcaccgccgtgatcgtgaacagaaaggagaacaagctgaagaaggccgccggctaccacctggacctgttctgggtgggcatcctgatggccctgtgcagcttcatgggcctgccctggtacgtggccgccaccgtgatcagcatcgcccacatcgacagcctgaagatggagaccgagaccagcgcccccggcgagcagccccagttcctgggcgtgagagagcagagagtgaccggcatcatcgtgttcatcctgaccggcatcagcgtgttcctggcccccatcctgaagatcctgggcctgatcatcgtgagaagactgctggacttcatcttcagccagcacgacctggcctggatcgacaacatcctgcccgagaaggagaagaaggagaccgacaagaagagaaagagaaagaagggcgcccacgaggactgcgacgaggagccccagttccccccccccagcgtgatcaagatccccatggagagcgtgcagagcgacccccagaacggcatccactgcatcgccagaaagagaagcagcagctggagctacagcctgtag

SEQ ID NO: 208411 - DNA, 3414 bp, Artificial Sequence
  derived and/or modified sequence
atgaaggtgaaggaggagaaggccggcgtgggcaagctggaccacaccaaccacagaagaagattccccgaccagaaggagtgcccccccatccacatcggcctgcccgtgcccacctacccccagagaaagaccgaccagaagggccacctgagcggcctgcagaaggtgcactggggcctgagacccgaccagccccagcaggagctgaccggccccggcagcggcgccagcagccaggacagcagcatggacctgatcagcagaaccagaagccccgccgccgagcagctgcaggacatcctgggcgaggaggacgaggcccccaaccccaccctgttcaccgagatggacaccctgcagcacgacggcgaccagatggagtggaaggagagcgccagatggatcaagttcgaggagaaggtggaggagggcggcgagagatggagcaagccccacgtgagcaccctgagcctgcacagcctgttcgagctgagaacctgcctgcagaccggcaccgtgctgctggacctggacagcggcagcctgccccagatcatcgacgacgtgatcgagaagcagatcgaggacggcctgctgagacccgagctgagagagagagtgagctacgtgctgctgagaagacacagacaccagaccaagaagcccatccacagaagcctggccgacatcggcaagagcgtgagcaccaccaacagaagccccgccagaagccccggcgccggccccagcctgcaccacagcaccgaggacctgagaatgagacagagcgccaactacggcagactgtgccacgcccagagcagaagcatgaacgacatcagcctgacccccaacaccgaccagagaaagaacaagttcatgaagaagatccccaaggacagcgaggccagcaacgtgctggtgggcgaggtggacttcctggaccagcccttcatcgccttcgtgagactgatccagagcgccatgctgggcggcgtgaccgaggtgcccgtgcccaccagattcctgttcatcctgctgggccccagcggcagagccaagagctacaacgagatcggcagagccatcgccaccctgatggtggacgacctgttcagcgacgtggcctacaaggccagaaacagagaggacctgatcgccggcatcgacgagttcctggacgaggtgatcgtgctgccccccggcgagtgggaccccaacatcagaatcgagccccccaagaaggtgcccagcgccgacaagagaaagagcgtgttcagcctggccgagctgggccagatgaacggcagcgtgggcggcggcggcggcgcccccggcggcggcaacggcggcggcggcggcggcggcagcggcggcggcgccggcagcggcggcgccggcggcaccagcagcggcgacgacggcgagatgcccgccatgcacgagatcggcgaggagctgatctggaccggcagattcttcggcggcctgtgcctggacatcaagagaaagctgccctggttccccagcgacttctacgacggcttccacatccagagcatcagcgccatcctgttcatctacctgggctgcatcaccaacgccatcaccttcggcggcctgctgggcgacgccaccgacaactaccagggcgtgatggagagcttcctgggcaccgccatggccggcagcctgttctgcctgttcagcggccagcccctgatcatcctgagcagcaccggccccatcctgatcttcgagaagctgctgttcgacttcagcaagggcaacggcctggactacatggagttcagactgtggatcggcctgcacagcgccgtgcagtgcctgatcctggtggccaccgacgccagcttcatcatcaagtacatcaccagattcaccgaggagggcttcagcaccctgatcagcttcatcttcatctacgacgccatcaagaagatgatcggcgccttcaagtactaccccatcaacatggacttcaagcccaacttcatcaccacctacaagtgcgagtgcgtggcccccgacaccgtgaacaccaccgtgttcaacgccagcgcccccctggcccccgacaccaacgccagcctgtacaacctgctgaacctgaccgccctggactggagcctgctgagcaagaaggagtgcctgagctacggcggcagactgctgggcaacagctgcaagttcatccccgacctggccctgatgagcttcatcctgttcttcggcacctacagcatgaccctgaccctgaagaagttcaagttcagcagatacttccccaccaaggtgagagccctggtggccgacttcagcatcgtgttcagcatcctgatgttctgcggcatcgacgcctgcttcggcctggagacccccaagctgcacgtgcccagcgtgatcaagcccaccagacccgacagaggctggttcgtggcccccttcggcaagaacccctggtgggtgtaccccgccagcatcctgcccgccctgctggtgaccatcctgatcttcatggaccagcagatcaccgccgtgatcgtgaacagaaaggagaacaagctgaagaaggccgccggctaccacctggacctgttctgggtgggcatcctgatggccctgtgcagcttcatgggcctgccctggtacgtggccgccaccgtgatcagcatcgcccacatcgacagcctgaagatggagaccgagaccagcgcccccggcgagcagccccagttcctgggcgtgagagagcagagagtgaccggcatcatcgtgttcatcctgaccggcatcagcgtgttcctggcccccatcctgaagtgcatccccctgcccgtgctgtacggcgtgttcctgtacatgggcgtggccagcctgaacggcatccagatgggcaccggcggcagcgagttcaagatccagaagaagctgacccccttctgggagagatgcaagctgttcctgatgcccgccaagcaccagcccgaccacgccttcctgagacacgtgcccctgagaagaatccacctgttcaccctggtgcagatcctgtgcctggccgtgctgtggatcctgaagagcaccgtggccgccatcatcttccccgtgatgatcctgggcctgatcatcgtgagaagactgctggacttcatcttcagccagcacgacctggcctggatcgacaacatcctgcccgagaaggagaagaaggagaccgacaagaagagaaagagaaagaagggcgcccacgaggactgcgacgaggagccccagttccccccccccagcgtgatcaagatccccatggagagcgtgcagagcgacccccagaacggcatccactgcatcgccagaaagagaagcagcagctggagctacagcctgtag

SEQ ID NO: 208412 - DNA, 2982 bp, Artificial Sequence
  derived and/or modified sequence
atgaaggtgaaggaggagaaggccggcgtgggcaagctggaccacaccaaccacagaagaagattccccgaccagaaggagtgcccccccatccacatcggcctgcccgtgcccacctacccccagagaaagaccgaccagaagggccacctgagcggcctgcagaaggtgcactggggcctgagacccgaccagccccagcaggagctgaccggccccggcagcggcgccagcagccaggacagcagcatggacctgatcagcagaaccagaagccccgccgccgagcagctgcaggacatcctgggcgaggaggacgaggcccccaaccccaccctgttcaccgagatggacaccctgcagcacgacggcgaccagatggagtggaaggagagcgccagatggatcaagttcgaggagaaggtggaggagggcggcgagagatggagcaagccccacgtgagcaccctgagcctgcacagcctgttcgagctgagaacctgcctgcagaccggcaccgtgctgctggacctggacagcggcagcctgccccagatcatcgacgacgtgatcgagaagcagatcgaggacggcctgctgagacccgagctgagagagagagtgagctacgtgctgctgagaagacacagacaccagaccaagaagcccatccacagaagcctggccgacatcggcaagagcgtgagcaccaccaacagaagccccgccagaagccccggcgccggccccagcctgcaccacagcaccgaggacctgagaatgagacagagcgccaactacggcagactgtgccacgcccagagcagaagcatgaacgacatcagcctgacccccaacaccgaccagagaaagaacaagttcatgaagaagatccccaaggacagcgaggccagcaacgtgctggtgggcgaggtggacttcctggaccagcccttcatcgccttcgtgagactgatccagagcgccatgctgggcggcgtgaccgaggtgcccgtgcccaccagattcctgttcatcctgctgggccccagcggcagagccaagagctacaacgagatcggcagagccatcgccaccctgatggtggacgacctgttcagcgacgtggcctacaaggccagaaacagagaggacctgatcgccggcatcgacgagttcctggacgaggtgatcgtgctgccccccggcgagtgggaccccaacatcagaatcgagccccccaagaaggtgcccagcgccgacaagagaaagagcgtgttcagcctggccgagctgggccagatgaacggcagcgtgggcggcggcggcggcgcccccggcggcggcaacggcggcggcggcggcggcggcagcggcggcggcgccggcagcggcggcgccggcggcaccagcagcggcgacgacggcgagatgcccgccatgcacgagatcggcgaggagctgatctggaccggcagattcttcggcggcctgtgcctggacatcaagagaaagctgccctggttccccagcgacttctacgacggcttccacatccagagcatcagcgccatcctgttcatctacctgggctgcatcaccaacgccatcaccttcggcggcctgctgggcgacgccaccgacaactaccagggcgtgatggagagcttcctgggcaccgccatggccggcagcctgttctgcctgttcagcggccagcccctgatcatcctgagcagcaccggccccatcctgatcttcgagaagctgctgttcgacttcagcaagggcaacggcctggactacatggagttcagactgtggatcggcctgcacagcgccgtgcagtgcctgatcctggtggccaccgacgccagcttcatcatcaagtacatcaccagattcaccgaggagggcttcagcaccctgatcagcttcatcttcatctacgacgccatcaagaagatgatcggcgccttcaagtactaccccatcaacatggacttcaagcccaacttcatcaccacctacaagtgcgagtgcgtggcccccgacaccgtgaacaccaccgtgttcaacgccagcgcccccctggcccccgacaccaacgccagcctgtacaacctgctgaacctgaccgccctggactggagcctgctgagcaagaaggagtgcctgagctacggcggcagactgctgggcaacagctgcaagttcatccccgacctggccctgatgagcttcatcctgttcttcggcacctacagcatgaccctgaccctgaagaagttcaagttcagcagatacttccccaccaaggtgagagccctggtggccgacttcagcatcgtgttcagcatcctgatgttctgcggcatcgacgcctgcttcggcctggagacccccaagctgcacgtgcccagcgtgatcaagcccaccagacccgacagaggctggttcgtggcccccttcggcaagaacccctggtgggtgtaccccgccagcatcctgcccgccctgctggtgaccatcctgatcttcatggaccagcagatcaccgccgtgatcgtgaacagaaaggagaacaagctgaagggcaccgagagcaacagacaccacagactgcaccccgacggcaacctgtgcctgcccggcagccaccccaaggtgtacccccccgccggcgccgtgagaagcctgcccctgcacggcagaggcctgcccgagtggcaccccgtgctgggcaccctgcaggccctgcccgacgccagccaggcccccgccggcccctgcctgcccgccgccagagccgccgcccccgacccccccctgcaccccggcgccgaccccctgcccggcggcgccctggacccccagatccacggcggctgccaccacctgcccggccacgaccccggcccccaccacagaagcaaggccagcggcttccacctgttccccgccagacccggcctggactag

SEQ ID NO: 208413 - DNA, 2895 bp, Artificial Sequence
  derived and/or modified sequence
atgaaggtgaaggaggagaaggccggcgtgggcaagctggaccacaccaaccacagaagaagattccccgaccagaaggagtgcccccccatccacatcggcctgcccgtgcccacctacccccagagaaagaccgaccagaagggccacctgagcggcctgcagaaggtgcactggggcctgagacccgaccagccccagcaggagctgaccggccccggcagcggcgccagcagccaggacagcagcatggacctgatcagcagaaccagaagccccgccgccgagcagctgcaggacatcctgggcgaggaggacgaggcccccaaccccaccctgttcaccgagatggacaccctgcagcacgacggcgaccagatggagtggaaggagagcgccagatggatcaagttcgaggagaaggtggaggagggcggcgagagatggagcaagccccacgtgagcaccctgagcctgcacagcctgttcgagctgagaacctgcctgcagaccggcaccgtgctgctggacctggacagcggcagcctgccccagatcatcgacgacgtgatcgagaagcagatcgaggacggcctgctgagacccgagctgagagagagagtgagctacgtgctgctgagaagacacagacaccagaccaagaagcccatccacagaagcctggccgacatcggcaagagcgtgagcaccaccaacagaagccccgccagaagccccggcgccggccccagcctgcaccacagcaccgaggacctgagaatgagacagagcgccaactacggcagactgtgccacgcccagagcagaagcatgaacgacatcagcctgacccccaacaccgaccagagaaagaacaagttcatgaagaagatccccaaggacagcgaggccagcaacgtgctggtgggcgaggtggacttcctggaccagcccttcatcgccttcgtgagactgatccagagcgccatgctgggcggcgtgaccgaggtgcccgtgcccaccagattcctgttcatcctgctgggccccagcggcagagccaagagctacaacgagatcggcagagccatcgccaccctgatggtggacgacctgttcagcgacgtggcctacaaggccagaaacagagaggacctgatcgccggcatcgacgagttcctggacgaggtgatcgtgctgccccccggcgagtgggaccccaacatcagaatcgagccccccaagaaggtgcccagcgccgacaagagaaagagcgtgttcagcctggccgagctgggccagatgaacggcagcgtgggcggcggcggcggcgcccccggcggcggcaacggcggcggcggcggcggcggcagcggcggcggcgccggcagcggcggcgccggcggcaccagcagcggcgacgacggcgagatgcccgccatgcacgagatcggcgaggagctgatctggaccggcagattcttcggcggcctgtgcctggacatcaagagaaagctgccctggttccccagcgacttctacgacggcttccacatccagagcatcagcgccatcctgttcatctacctgggctgcatcaccaacgccatcaccttcggcggcctgctgggcgacgccaccgacaactaccagggcgtgatggagagcttcctgggcaccgccatggccggcagcctgttctgcctgttcagcggccagcccctgatcatcctgagcagcaccggccccatcctgatcttcgagaagctgctgttcgacttcagcaagggcaacggcctggactacatggagttcagactgtggatcggcctgcacagcgccgtgcagtgcctgatcctggtggccaccgacgccagcttcatcatcaagtacatcaccagattcaccgaggagggcttcagcaccctgatcagcttcatcttcatctacgacgccatcaagaagatgatcggcgccttcaagtactaccccatcaacatggacttcaagcccaacttcatcaccacctacaagtgcgagtgcgtggcccccgacaccgtgaacaccaccgtgttcaacgccagcgcccccctggcccccgacaccaacgccagcctgtacaacctgctgaacctgaccgccctggactggagcctgctgagcaagaaggagtgcctgagctacggcggcagactgctgggcaacagctgcaagttcatccccgacctggccctgatgagcttcatcctgttcttcggcacctacagcatgaccctgaccctgaagaagttcaagttcagcagatacttccccaccaagcccaccagacccgacagaggctggttcgtggcccccttcggcaagaacccctggtgggtgtaccccgccagcatcctgcccgccctgctggtgaccatcctgatcttcatggaccagcagatcaccgccgtgatcgtgaacagaaaggagaacaagctgaagggcaccgagagcaacagacaccacagactgcaccccgacggcaacctgtgcctgcccggcagccaccccaaggtgtacccccccgccggcgccgtgagaagcctgcccctgcacggcagaggcctgcccgagtggcaccccgtgctgggcaccctgcaggccctgcccgacgccagccaggcccccgccggcccctgcctgcccgccgccagagccgccgcccccgacccccccctgcaccccggcgccgaccccctgcccggcggcgccctggacccccagatccacggcggctgccaccacctgcccggccacgtgagcctgcaccacagaagctgggccagcagcagcttcgagggcttctggatcagcagcttccccagcaccacctggcccggcctgaccaccagctag

SEQ ID NO: 208414 - DNA, 3429 bp, Artificial Sequence
  derived and/or modified sequence
atgaaggtgaaggaggagaaggccggcgtgggcaagctggaccacaccaaccacagaagaagattccccgaccagaaggagtgcccccccatccacatcggcctgcccgtgcccacctacccccagagaaagaccgaccagaagggccacctgagcggcctgcagaaggtgcactggggcctgagacccgaccagccccagcaggagctgaccggccccggcagcggcgccagcagccaggacagcagcatggacctgatcagcagaaccagaagccccgccgccgagcagctgcaggacatcctgggcgaggaggacgaggcccccaaccccaccctgttcaccgagatggacaccctgcagcacgacggcgaccagatggagtggaaggagagcgccagatggatcaagttcgaggagaaggtggaggagggcggcgagagatggagcaagccccacgtgagcaccctgagcctgcacagcctgttcgagctgagaacctgcctgcagaccggcaccgtgctgctggacctggacagcggcagcctgccccagatcatcgacgacgtgatcgagaagcagatcgaggacggcctgctgagacccgagctgagagagagagtgagctacgtgctgctgagaagacacagacaccagaccaagaagcccatccacagaagcctggccgacatcggcaagagcgtgagcaccaccaacagaagccccgccagaagccccggcgccggccccagcctgcaccacagcaccgaggacctgagaatgagacagagcgccaactacggcagactgtgccacgcccagagcagaagcatgaacgacatcagcctgacccccaacaccgaccagagaaagaacaagttcatgaagaagatccccaaggacagcgaggccagcaacgtgctggtgggcgaggtggacttcctggaccagcccttcatcgccttcgtgagactgatccagagcgccatgctgggcggcgtgaccgaggtgcccgtgcccaccagattcctgttcatcctgctgggccccagcggcagagccaagagctacaacgagatcggcagagccatcgccaccctgatggtggacgacctgttcagcgacgtggcctacaaggccagaaacagagaggacctgatcgccggcatcgacgagttcctggacgaggtgatcgtgctgccccccggcgagtgggaccccaacatcagaatcgagccccccaagaaggtgcccagcgccgacaagagaaagagcgtgttcagcctggccgagctgggccagatgaacggcagcgtgggcggcggcggcggcgcccccggcggcggcaacggcggcggcggcggcggcggcagcggcggcggcgccggcagcggcggcgccggcggcaccagcagcggcgacgacggcgagatgcccgccatgcacgagatcggcgaggagctgatctggaccggcagattcttcggcggcctgtgcctggacatcaagagaaagctgccctggttccccagcgacttctacgacggcttccacatccagagcatcagcgccatcctgttcatctacctgggctgcatcaccaacgccatcaccttcggcggcctgctgggcgacgccaccgacaactaccagggcgtgatggagagcttcctgggcaccgccatggccggcagcctgttctgcctgttcagcggccagcccctgatcatcctgagcagcaccggccccatcctgatcttcgagaagctgctgttcgacttcagcaagggcaacggcctggactacatggagttcagactgtggatcggcctgcacagcgccgtgcagtgcctgatcctggtggccaccgacgccagcttcatcatcaagtacatcaccagattcaccgaggagggcttcagcaccctgatcagcttcatcttcatctacgacgccatcaagaagatgatcggcgccttcaagtactaccccatcaacatggacttcaagcccaacttcatcaccacctacaagtgcgagtgcgtggcccccgacaccgtgaacaccaccgtgttcaacgccagcgcccccctggcccccgacaccaacgccagcctgtacaacctgctgaacctgaccgccctggactggagcctgctgagcaagaaggagtgcctgagctacggcggcagactgctgggcaacagctgcaagttcatccccgacctggccctgatgagcttcatcctgttcttcggcacctacagcatgaccctgaccctgaagaagttcaagttcagcagatacttccccaccaaggtgagagccctggtggccgacttcagcatcgtgttcagcatcctgatgttctgcggcatcgacgcctgcttcggcctggagacccccaagctgcacgtgcccagcgtgatcaagcccaccagacccgacagaggctggttcgtggcccccttcggcaagaacccctggtgggtgtaccccgccagcatcctgcccgccctgctggtgaccatcctgatcttcatggaccagcagatcaccgccgtgatcgtgaacagaaaggagaacaagctgaagaaggccgccggctaccacctggacctgttctgggtgggcatcctgatggccctgtgcagcttcatgggcctgccctggtacgtggccgccaccgtgatcagcatcgcccacatcgacagcctgaagatggagaccgagaccagcgcccccggcgagcagccccagttcctgggcgtgagagagcagagagtgaccggcatcatcgtgttcatcctgaccggcatcagcgtgttcctggcccccatcctgaagtgcatccccctgcccgtgctgtacggcgtgttcctgtacatgggcgtggccagcctgaacggcatccagatgggcaccggcggcagcgagttcaagatccagaagaagctgacccccttctgggagagatgcaagctgttcctgatgcccgccaagcaccagcccgaccacgccttcctgagacacgtgcccctgagaagaatccacctgttcaccctggtgcagatcctgtgcctggccgtgctgtggatcctgaagagcaccgtggccgccatcatcttccccgtgatgagcctgagcaccaccgacctgggcctgatcatcgtgagaagactgctggacttcatcttcagccagcacgacctggcctggatcgacaacatcctgcccgagaaggagaagaaggagaccgacaagaagagaaagagaaagaagggcgcccacgaggactgcgacgaggagccccagttccccccccccagcgtgatcaagatccccatggagagcgtgcagagcgacccccagaacggcatccactgcatcgccagaaagagaagcagcagctggagctacagcctgtag

SEQ ID NO: 208415 - DNA, 3123 bp, Artificial Sequence
  derived and/or modified sequence
atgaaggtgaaggaggagaaggccggcgtggggaaacttgaccacacaaaccaccggcggcgcttccccgatcaaaaagaatgccctcccattcacattggactgccggtgcccacctacccgcagagaaagacagaccagaagggacatctgagtgggctgcagaaggtgcattggggactgaggccagatcagcctcagcaggagttaacaggtccaggaagtggggcctctagccaggacagctctatggacttgatcagccggactaggagccccgccgcagaacagctgcaggatatcttaggggaggaagacgaggctccgaatccaaccctcttcacagagatggatacccttcagcacgatggggaccagatggagtggaaggagtctgccagatggattaagttcgaagaaaaagtggaagagggcggtgagagatggagtaagccgcatgttagcacactttccctgcacagcctctttgaattgcggacgtgtctccagacgggaaccgtgctgctggatctggactctgggagcttgcctcagattattgacgatgtcatcgaaaaacagatagaagatgggcttcttagacccgagctgcgcgaaagagtgagctacgtactgctacgccgccatcgtcatcagactaaaaagccaattcaccgatccctggcggacatcgggaagtcagtgagtaccacaaacagaagccctgctcgctctccaggagcaggtccttctttgcatcatagtacagaggatcttagaatgcggcagtcagccaattatggaagactctgccacgctcagtcacggagcatgaacgatatctctctcacccccaatacagatcagaggaagaacaagttcatgaaaaaaatccctaaggacagcgaagcatcaaatgtcctcgtgggcgaggtagactttctggatcagccctttatcgctttcgttcgcttaattcaatccgctatgttagggggtgtgaccgaggtgccagtgccaaccaggtttctcttcattctgttagggccctcaggacgggcaaagtcctacaacgagattggaagagctattgcgacgctgatggtcgatgatttgttcagcgacgtagcatacaaggctcgcaacagggaggatttaattgctgggatcgatgagttcttagatgaggttattgtcctcccacctggggagtgggacccgaatatcaggatcgaaccaccaaagaaagtgccctccgcggacaaaagaaaatccgttttcagccttgctgaactcggacaaatgaatggatccgtggggggcggcggcggcgcgcctggcgggggtaacggcggggggggtggaggggggtcgggggggggcgctggctccggcggagccggtggtacaagttccggcgatgatggcgaaatgcctgccatgcacgagattggggaggagctcatctggaccggcaggttcttcggcggcctgtgtctcgatatcaaaagaaagctgccttggttcccttccgacttctacgatgggttccatattcagtccatctccgccatcctgttcatctatctgggctgtatcacgaacgcaatcacatttgggggcttgctcggtgatgcaactgacaattatcagggcgtcatggaatctttcctgggtactgcaatggcgggcagcctgttttgtctgttcagtggacagcccctgataattttgtcttctaccggacccattctaatcttcgaaaagctgttatttgatttttctaaaggcaacggcctagactacatggaattccgcctgtggattgggctgcatagcgcagttcagtgtcttatactggtggcaacggacgccagcttcatcattaaatacatcaccaggttcaccgaagagggcttctccacactgatttcgttcatctttatctacgatgcgattaaaaagatgatcggtgcttttaaatattatcctatcaatatggatttcaagcccaacttcattacaacctataaatgcgagtgtgtcgcccctgacacagtgaatacaaccgtgtttaacgctagtgcccctctggctccggatacaaatgcgtcactgtataacttgctcaacctgaccgctctggactggtcgctcctgagtaagaaggagtgtctgtcatacgggggcaggttgttaggtaacagctgtaaatttatccctgaccttgctctgatgagctttatcctcttttttggaacttactccatgacactcactttgaaaaagtttaaattctccagatatttcccaactaaagtgcgcgccctggtcgccgatttttccatcgtcttctccatcttgatgttttgcgggattgatgcctgtttcggccttgaaaccccaaaactgcacgtgccaagcgttataaagcccaccagacctgatagagggtggtttgtggcaccgttcggaaagaacccatggtgggtataccccgcgagcatcttgcccgcactattggtcactatcttgattttcatggaccagcaaattactgctgttatcgtcaatagaaaagagaataagctcaaaaaagcagccggataccacctggatttgttttgggttggcatcctgatggctctatgttccttcatggggctcccatggtacgtcgcagccacagtcatcagtatcgcccatattgacagcctgaaaatggagaccgagaccagcgcccctggggagcagccccagtttttgggagtccgagaacagcgagttaccggaattatcgtttttattctgacggggatctctgtgttccttgctccgatcctaaaaatactcggcctaatcatagtcagaagattgcttgactttattttcagtcagcacgacttggcgtggatcgataatatactacccgaaaaggaaaagaaggaaactgacaagaagcgcaaacggaaaaagggggcgcacgaagactgcgacgaagaaccccagttcccacccccaagtgtcataaagattccaatggagtctgtccaaagcgatcctcagaatggaatacactgtattgccagaaaaagatcgtcctcctggtcatactctctctag

SEQ ID NO: 208416 - DNA, 3414 bp, Artificial Sequence
  derived and/or modified sequence
atgaaggtcaaagaggagaaggcaggcgtcgggaagctcgatcataccaaccaccggagacgctttcccgaccagaaagaatgtccccccatccacattggccttccagttccgacgtacccacaacggaagaccgaccaaaaggggcacctctcgggcctgcagaaagtgcattggggattgagacctgatcagcctcaacaggagctgactggccccggatctggggccagcagccaagatagctccatggacctcatcagccgcactcgcagtcctgctgccgagcagctgcaggacattctgggcgaagaggatgaggcaccaaacccgacactcttcacagagatggataccctgcagcatgatggcgaccagatggagtggaaagagagcgccaggtggattaagttcgaagaaaaagttgaagaagggggtgagcgctggagcaagccccatgtaagcactttatccctgcatagcctgttcgagctaagaacctgcctgcaaaccgggacagtactgctggatctggattcgggctcactcccccagatcattgacgatgttatcgagaagcagatagaagacgggttgctcaggcccgagctgagagaaagggtctcctacgtgctgcttaggcgccatcggcaccagacaaagaagccgatccacagatcgcttgctgatattggaaaaagtgtgtctacaacaaacagatccccggcaagatcaccaggagccggaccgtcgcttcatcattcaacagaggacctgcgtatgcggcagagtgcaaactatggccgcctctgccatgcgcaaagtaggagtatgaacgacatctccctaacccccaacactgaccagaggaagaataaattcatgaagaagatccccaaggacagcgaagcttctaatgtgctggtcggtgaagtagatttcctagaccagcctttcatcgcattcgttagactgatccaaagcgcaatgctggggggcgtgacagaggttcctgtcccaacccgatttctatttattctgctgggccccagcgggagagctaagtcctataacgaaatcgggagagcgatcgcaaccttgatggtagacgatctgttttctgatgtggcgtacaaggcccggaatagagaggatctgatcgccggcatcgacgaattcctcgatgaagtcatagtactgcccccaggagaatgggatcctaatatcaggatcgagcctcccaagaaagtcccctcggctgataagcggaaatctgtattctctctggccgaattgggccagatgaatggatcagtggggggtggcgggggcgcccctggcgggggcaacggcggcggtggaggtggggggagcggtggcggggcaggatctgggggtgcgggagggacctcttctggagatgatggggagatgccagcaatgcatgaaatcggcgaggaactcatctggaccgggcgcttcttcggcggtctctgcctggacatcaaacgaaagctgccttggtttccgtcggatttctacgatgggttccacatacaatcgattagtgccatcctctttatctatttagggtgtatcactaacgcaatcacattcggcggtctcttgggggacgctaccgacaattaccagggcgtaatggagagttttctgggaacagccatggccggttcattgttttgtctcttttctggacagccgctgataatactctcttctacaggaccgatcctcatttttgaaaaactcctctttgacttctctaaaggtaacggattggactatatggagtttaggttgtggatcgggttgcacagtgcagtgcagtgtttgatcttggtggccaccgacgctagtttcatcatcaagtatatcaccagatttaccgaggaaggatttagtacactcatctctttcatctttatctatgatgcaattaagaaaatgatcggcgctttcaagtactaccccataaacatggacttcaagcccaattttataacaacatataaatgtgaatgtgtagcacccgatactgtgaacacgaccgtgtttaatgccagcgcccccctcgcccccgacaccaacgccagtctttataacctcctgaacctgactgcactggactggtcactcctgtctaaaaaagagtgccttagctacggaggaaggctgctcggcaactcctgcaagtttatccccgacttggccttaatgtcattcatcctgtttttcgggacatactctatgactctgacactgaagaaattcaagttcagcagatacttcccgactaaggtgcgtgctctcgtggctgactttagtattgtcttttcaatactgatgttctgcggcattgatgcctgtttcggcctagagaccccaaagctgcatgtcccctctgtgatcaagccaacaagacctgatagaggttggttcgtagctccgtttgggaagaacccctggtgggtgtatcccgctagcatcctgccagcactgctggtgacaatcttgatcttcatggatcaacagatcaccgccgtgattgttaatagaaaggagaataagttgaagaaggccgctggctatcacctggacctcttctgggtggggatcctgatggccttatgctccttcatggggctaccctggtacgtcgcggcgaccgttatcagtattgcgcatattgactctcttaaaatggagactgagaccagcgcgccaggggagcagccacagtttctcggcgtgcgcgaacagcgtgtcaccggaattatcgtgttcatcctcaccggtatctctgttttcctggcgccaatcctgaagtgcatcccattaccggtactgtatggtgtgtttctatacatgggcgtcgcctccctgaacggcatccagatgggtactgggggtagcgagtttaagatccaaaaaaagcttacacccttctgggaacggtgcaaactctttcttatgccagctaagcaccagcccgaccatgctttcctcagacacgttcctctaagacggatccatctttttacactagtgcagattctgtgcctggcagtgctctggatcctgaagagcaccgtggcagcaattatcttccccgttatgatcctgggcctgataattgttcgaagactgctcgacttcattttctcccaacatgatctagcatggatcgataatatcctgccggaaaaagagaaaaaagaaaccgataaaaaacgcaaacgtaagaaaggcgcccacgaggactgcgacgaggaaccacagtttcctcctcccagcgtcataaagattcccatggaatccgtgcagtccgatccccagaacggaattcattgtatagcccgtaaacgaagctcgagctggagttattcattatag

SEQ ID NO: 208417 - DNA, 3123 bp, Artificial Sequence
  derived and/or modified sequence
atgaaggtgaaagaggagaaggccggggtgggaaaactagaccacaccaaccaccggcgcaggttccctgaccagaaggagtgccctcctatccacattggactgcccgtgccgacatatccacagcgcaagaccgaccagaagggtcacctttcgggcctccagaaggtccactggggtctcagacccgaccagccccagcaggaacttaccggacctggttctggcgcctcctcacaggactcaagcatggacctgatatccaggacccgttctccagctgccgaacagctacaagacatcttgggagaagaggacgaagcacctaacccaacgctattcacagaaatggataccctacagcacgacggcgaccagatggaatggaaagagtcagcacggtggataaagtttgaagagaaagtcgaagagggtggtgaaagatggtctaaaccacatgtgagcactctgagtctacacagcctattcgagcttcgcacatgcctgcagacaggtactgttctgctcgatctggattccggttctcttcctcagattatagatgacgtaatcgagaaacagatcgaggatggcctcctgaggcctgagctccgcgagcgagtgtcctacgttttgttaagacggcatcggcaccaaactaagaagccaatccatagaagtctggccgatattggaaagtctgtgagcactactaaccggtctcctgccaggtcccccggggccgggccaagtctccaccatagtacggaagacctgagaatgaggcaatcagccaactacggcaggctctgtcatgcacaaagccgttcaatgaacgatatatcgctcacacccaatacagaccagcggaaaaataaattcatgaagaaaattcctaaggactccgaggcttctaacgtgttggtcggtgaggttgacttcctggatcaacctttcatcgcgtttgtgaggctgattcagtctgctatgcttggaggtgtaactgaggtccctgtgccaacaaggttcttattcatcctcctaggccctagtggccgagcaaagtcttataatgaaatcggccgcgctatagccacactgatggttgacgacctctttagcgacgtcgcctataaggcccggaatcgagaggatttaattgcaggtatagatgagttcctggacgaggtaattgtgctgccccctggcgagtgggaccccaatataaggattgagccgcccaagaaggtgccttcagccgacaaacgcaaaagcgtgttcagcctggcagaattgggtcaaatgaacgggtccgtgggaggaggcgggggcgccccagggggaggcaatgggggtggtggcggcggcggaagcggaggcggtgcaggttcaggaggagcaggaggaacctcctcgggcgacgacggcgaaatgccagccatgcatgaaattggtgaggagctaatctggacgggcaggtttttcggtggactttgtctggatatcaagcggaaactgccgtggtttccatccgacttctatgatggcttccacatacaaagcatctctgctattttgttcatttatctgggctgcatcacaaatgctatcacatttggggggctgctcggagacgcgacagataattaccagggcgttatggaatccttcttgggtaccgccatggctggctctctgttctgcctcttctcagggcagccgttaatcatcctgagcagcaccggccccattctgatttttgagaagctgctcttcgattttagcaagggcaacggcctggattatatggaattccgactctggatcggactgcatagtgcagtccagtgtctcattctggtggctacagatgcttcgtttattattaaatacattacccgattcactgaagaaggatttagcacgctcatctcattcatctttatttatgacgccataaagaagatgataggtgcctttaagtactaccctatcaacatggacttcaaacctaattttattacaacgtacaaatgtgagtgcgtagcacctgacactgttaacaccactgtcttcaatgcttccgcgccgctcgcacccgataccaacgcgtcactgtataacctccttaacctcactgccctggactggtcgctgctgagcaaaaaagaatgtctgtcttacggggggcggctgctggggaactcctgtaaatttattccagatctcgcactcatgtccttcatacttttttttggtacttactctatgacactgactcttaaaaagtttaaattcagccgatactttcctaccaaggtgcgggctctggtggccgacttctctattgtgttttctattttaatgttctgtggaatcgacgcctgttttggtttagagactccgaagctgcacgttccttcagtgatcaagcctacgagacccgacagaggatggttcgtcgctccatttggtaaaaacccttggtgggtgtatcctgcatccattctcccagcactgctcgtgactattctgattttcatggaccagcagatcactgctgttattgtgaaccgcaaggaaaacaagttgaagaaagcagccggctaccatttggacctcttttgggtggggattctaatggctctgtgctccttcatggggctgccttggtacgttgctgccaccgtaattagcattgcccacatcgattccctaaaaatggagacagagacttccgccccaggggagcagccacagtttctgggagtgcgagaacagcgagtgaccggaattattgtgtttatcctgaccggtatatccgtatttctggcaccaattttaaagatcctggggctgatcattgtaagacgtctgctagatttcatattcagtcaacatgatttagcctggattgataatatcctgcccgagaaggaaaagaaagaaactgataagaagcgcaagcgcaagaagggagcccacgaagactgcgacgaggagccgcagttcccccctccatctgtcatcaaaatccccatggagtccgttcaaagcgacccacagaacggcatccactgcatcgctagaaaaagaagtagctcttggtcatactcactctag

SEQ ID NO: 208418 - DNA, 3414 bp, Artificial Sequence
  derived and/or modified sequence
atgaaagtgaaggaggaaaaggcgggcgtcggcaagcttgaccatactaaccatagaaggaggttccccgatcaaaaggaatgcccaccgatacacataggcctccctgttccgacctacccgcagagaaagacggaccaaaaggggcatctgagcggactgcaaaaggtccattggggtttgaggccagaccaaccccagcaggagttgaccggaccgggatcgggcgctagttcccaggattcgtccatggatcttatcagtcgcacaaggtcacccgctgccgagcagctgcaggacattctcggagaggaggacgaagcccctaacccaaccctgtttacagaaatggacactctgcagcacgacggggaccagatggaatggaaggagtcggctagatggattaagtttgaggagaaggttgaggagggcggtgagaggtggagcaaaccacacgtcagtaccctgagtctgcactcactctttgaacttaggacctgcttgcagaccgggaccgtcctgctagacctggatagcggttcccttccccagataattgacgatgtcatagagaagcagatcgaggacggcctgttacgacctgaacttcgagagcgggtcagttatgtgctgctgagacgtcacagacaccagacaaaaaaacccatccaccgtagcctggctgacatcggcaagtcggtgtccaccaccaatcgctcccccgcgcgcagcccaggagccggcccaagcttgcaccactccacggaagacttgaggatgcgtcagtcagcaaactacggtcgactgtgtcacgctcagtctagaagcatgaatgatataagcctgactcccaacacagatcagaggaaaaataagtttatgaagaagattccaaaggacagtgaggccagcaatgttttggtcggagaagtggacttcctggaccagcccttcatcgcattcgtccgccttattcagtccgcaatgctcggtggcgtaactgaggtcccagtgccaacccggttcctgtttatactcctgggcccaagcggacgggcaaagtcgtacaatgagataggacgcgccatcgccacactgatggtggacgatctctttagcgatgttgcatacaaggcaaggaacagagaggacctcatcgcaggcatcgacgagttccttgatgaggtaatagtccttccccctggcgagtgggacccaaatattagaatcgagcctccaaagaaggtaccctccgcagataagaggaagagcgtgttctcattagccgagcttgggcaaatgaatggcagcgtgggaggcggtgggggggccccaggcggcgggaacggtgggggagggggaggaggtagcggcggaggtgctggctctgggggggccgggggaacgagcagtggggacgacggagagatgcctgctatgcacgaaatcggggaagaactaatctggaccggcaggttctttggcgggttgtgcctggacattaaacggaaactgccatggttcccttccgacttctacgatggtttccacatccagagtatcagtgcgatcctgttcatctacttgggctgtataaccaatgctatcaccttcggcggcttgcttggcgacgcgacagacaactatcagggagtaatggagagctttctcggtacagctatggcaggcagtctgttctgtctttttagtggacagcctctcataatcctgtcgagcacaggcccaatactgatcttcgaaaagctgctcttcgatttctccaagggcaacggtctggattatatggagtttaggctgtggattgggctccacagcgctgttcagtgtctgatcttagtggcgactgacgcttcatttattatcaagtacattacacgatttaccgaggaaggattcagcacccttattagctttatatttatatatgatgcgattaaaaaaatgataggtgccttcaagtattaccctatcaatatggatttcaaacccaatttcatcactacctacaagtgtgaatgcgtcgccccagatacagtgaatactacggttttcaatgcaagcgcgccacttgcccctgataccaatgcctccctctacaatttgcttaatctgacagccttggattggtcactcctatcaaagaaagaatgtttatcgtacggtgggcgactcctggggaactcctgtaagtttatcccagatctggccctgatgagtttcatactgtttttcgggacctatagcatgacacttacccttaagaagtttaaattctcaaggtattttccgactaaggtccgtgccttagtggccgactttagtatcgtgttttccatcctcatgttctgcggtatcgatgcttgttttggattggaaacacctaagctccacgtgcccagcgtgataaaacctacccgcccagacagaggctggttcgtcgcgccattcgggaagaacccttggtgggtatatccagccagcatactcccagccctgctagtaacaatacttatattcatggaccagcagatcaccgcagttatcgttaaccggaaggaaaataagttgaaaaaagctgcaggctatcatctggatctcttttgggttggtatactgatggccttgtgcagttttatggggctgccttggtatgtcgccgccaccgtaatcagtattgctcatatcgattctctgaaaatggagacggagacgagtgcacccggtgagcagccacagtttttaggcgtccgggaacaacgtgtgacagggatcatagtttttatactgacgggcataagcgtgttcctggcacccattttgaagtgcatccccttgccggttctttacggtgtctttctgtacatgggagtggcttcgttgaacgggattcagatgggcacaggaggctccgaattcaagatccagaagaaactaacaccattttgggagcgatgcaaactctttctaatgcccgctaagcaccagccggaccacgcgtttctgaggcatgtgccattgcgccgtattcacctgtttaccctggtgcagattctgtgtctggccgtgctgtggattctcaagagcaccgtcgccgccataatctttccagtcatgattctggggcttatcattgtccgccggctcttggacttcatcttcagccagcacgacttggcttggatcgataacatcctgccagagaaagagaagaaggagacagataaaaaacggaaaagaaagaagggtgctcacgaagactgcgacgaggagcctcagtttccccccccatctgtgatcaagatccctatggaaagcgtgcagtccgatccacagaatggaatccactgtattgcgaggaagcgtagcagcagttggtcttatagcctgtag

SEQ ID NO: 208419 - DNA, 2982 bp, Artificial Sequence
  derived and/or modified sequence
atgaaagtcaaggaggaaaaggccggcgtcggcaagctcgatcacacaaaccatcgcagacggttcccagaccagaaagagtgtcctcccatccacattggactgcctgtgcccacatacccccaaagaaaaacagatcagaagggtcacctgtctggtctgcaaaaagtgcactggggactgcggcctgatcagcctcagcaggagctgactgggccaggtagcggcgcctcaagccaggacagctctatggacctgatctctagaactcggagcccagctgctgaacagctccaagatattttaggagaggaagatgaagcccccaaccccacactgttcaccgaaatggatacattacaacacgacggagaccaaatggagtggaaggaatccgccagatggatcaagttcgaggagaaagtcgaagagggaggagaacgatggtcaaaaccacacgttagcactctctccctccacagcctttttgagctacggacctgtttacagaccggcactgtgctccttgatctggactccggtagcttgccacagattatcgacgacgtcatcgaaaaacagattgaggacggtctgcttaggcctgagttaagggagcgcgttagctacgttttgctgcggcggcatagacaccaaacaaagaaaccgatacacagaagcctcgctgacattggcaagtcggtctccacaacgaatcgatctcccgcccgaagtccgggggctgggccatctcttcaccattccacagaagacctgagaatgagacagtccgcaaactatgggcgactctgccacgcgcagagcagaagtatgaatgatattagcctgaccccaaataccgaccagaggaaaaacaagttcatgaagaaaatccccaaggactccgaggccagcaacgttctcgtgggagaagttgatttcctggaccagcctttcatcgccttcgtgcgactcattcagagcgccatgctgggcggcgtaactgaggtaccagtacctactcgattcctcttcatcctgctgggcccctctggcagagcaaagtcctataacgagatcggtagagcaattgcaacactcatggtcgatgatctgttcagtgacgttgcatacaaagccaggaatcgcgaggatttgatcgccgggatcgacgagtttctggatgaggttattgttctgcccccaggcgaatgggatccgaatattagaattgaacctcccaaaaaagtaccaagcgccgataagcgaaagagcgtgttctccctggcggaacttggccagatgaacggaagcgttggcggcggcgggggcgcccccggtgggggcaatggcggaggcggcggcggaggtagtggcggaggcgcgggcagtggaggggccggaggcacgtcgtccggagacgacggagaaatgccagctatgcacgaaattggcgaggaacttatatggacggggcggttttttggcggtctgtgtctggatataaagcgtaaactgccttggtttccttcagatttctatgatggatttcacatacagagcatatccgcaatactgttcatttaccttggttgtatcaccaacgcaataacctttggggggctcctgggcgatgccaccgataattaccagggcgtgatggaatccttcctgggaactgccatggccggctccttgttttgtctgttctctgggcagcctctgattatcctgtcatccactggccctatactgatcttcgaaaagctgctctttgacttctcaaaaggaaacggcctggactacatggagtttaggctgtggattggtctgcactcagccgttcagtgcctgattttagttgccacggacgcaagcttcatcatcaagtacattacaaggttcacagaggaaggattttccactctcatatcctttatttttatttacgatgcaatcaaaaagatgataggagcatttaagtattaccccattaacatggacttcaagcccaatttcattaccacctacaaatgtgaatgcgtggccccagatacagtgaacactactgtgtttaatgcctccgccccgttggccccagacactaacgccagtctttataatctcctgaacctgacggcactggactggtccttgctgtccaagaaagaatgtctgagttacggaggccgcctcctcggcaattcatgtaaattcattcccgaccttgccctcatgtccttcatcttgttcttcggcacttattcaatgactctcaccctgaaaaaatttaagttctctaggtacttcccaacaaaagttcgggccctggttgccgacttttccatagttttcagtatccttatgttttgtggaatcgatgcatgctttggcctcgagacacctaagctgcacgtaccttccgtcataaagccaacccgccccgaccgagggtggtttgttgccccttttggaaagaacccttggtgggtgtaccccgcgtctattctgccagcgctgctggttaccattttaatctttatggatcaacaaatcacagccgttatcgtaaatcgtaaagagaataaactgaagggcactgaatctaatagacaccaccggctgcatcccgacggaaacttgtgcctgcctggaagccacccgaaagtgtatccaccagcaggcgcggttcgtagtttacctctccacggacgagggctgccagagtggcatccagtcttggggaccctgcaggcactgcctgatgcctcccaggcccccgccggaccgtgcctgcctgccgcccgggctgccgccccagatcctccccttcacccaggtgccgaccccctcccaggcggcgcgcttgatccccagatccacgggggctgccaccacctgcctgggcatgaccctgggcctcatcacaggtcaaaagccagtggctttcatctttttcctgcacgcccagggctggattag

SEQ ID NO: 208420 - DNA, 2895 bp, Artificial Sequence
  derived and/or modified sequence
atgaaggtcaaggaagaaaaagccggggttgggaagctggaccacaccaatcaccggaggcgcttccccgaccagaaggaatgccctcccatccacattggactcccagtgcctacatatccccagcgtaaaacggatcagaaggggcacttgtccgggttgcaaaaagtgcattgggggcttcgtccagatcaaccccaacaggaattaaccggccctgggtccggagcaagcagccaagacagttcaatggatctaattagccgcacacgcagtccggccgctgaacagctgcaggatatcctgggagaggaagatgaggctcccaaccctactctgttcacagagatggacacactccagcatgacggcgaccagatggaatggaaggagtcagctaggtggatcaaatttgaggagaaagtggaagagggaggagaacgttggagcaaaccacacgtgtccaccctgagcctccactccctttttgagctgagaacctgtctgcagacaggcaccgtgcttctggacttggacagcggttcacttccacaaatcatcgatgacgttattgaaaagcaaattgaggatggccttctccggccagagttgcgagagcgcgtttcatacgtgctcctgcgaaggcatcggcaccagacgaagaagcccatccatagatcacttgccgatatcgggaaatcagtgagtactactaacaggtcacccgcgagaagccccggtgccggacctagcctgcatcattccactgaggacttgcgtatgagacagtctgccaattacggccgcctctgtcacgctcagagcagaagcatgaatgatataagccttacaccgaacacagatcaacgcaagaacaaattcatgaaaaaaatccctaaggattcagaggcctcgaatgtgttggtaggagaggtggacttcctcgaccagccttttatcgccttcgtgaggctgatccaatcagcaatgttgggcggcgtcacagaggtgccagtacccactcggttcctgttcattctgctcgggccttccggaagagctaagtcgtacaatgaaataggacgggccatcgccacgctgatggtcgatgatctcttctctgacgtggcttacaaggccagaaatcgagaggacctcatcgccgggatagacgagtttcttgacgaagtcattgttctgcctcccggtgagtgggatccaaacatccgaatcgagccgccaaagaaagtaccctctgccgataagcgaaagtccgttttctcacttgctgaactcgggcagatgaacggatccgtgggggggggcgggggcgccccagggggaggcaatggaggcggcggtgggggagggtccggggggggggctggcagcggcggcgccgggggtacatcatcaggcgatgacggtgaaatgcctgctatgcacgagataggtgaagaattgatatggaccggcaggtttttcggtggactctgtctggacattaagcgtaagctgccctggtttccgtctgacttctacgacgggtttcacattcagtctatatccgccattctcttcatttacttaggttgcatcactaacgcaatcacattcggcggcctgctgggcgatgccacggataactatcagggagtgatggagagcttcctgggcactgccatggccggttcattgttctgtctcttctcggggcagccactgattatacttagcagcacgggccctatcctgattttcgagaagctgttgtttgacttcagcaaggggaatgggctcgattacatggagtttaggctttggattgggttgcacagcgccgtgcagtgtcttatcctggtggccacagacgctagttttatcattaaatacataactcgatttacagaggaagggttcagtacgttaatctcatttatcttcatctatgatgccattaaaaaaatgatcggcgcgtttaagtactaccccataaacatggactttaagccgaacttcattactacctacaagtgcgagtgtgtagctcccgacacggtgaacactactgtgtttaacgcatctgccccgctcgcacctgatactaacgcaagcctgtacaatctgttaaacttgaccgcactagactggagtttgctgtccaaaaaagagtgtttgtcttacggcgggcgcttattgggaaattcatgcaagtttataccagacctggccctgatgagtttcatactgttcttcggcacctactccatgactttaactttgaaaaaattcaagttcagccgttactttcccactaaaccaacacgccccgaccgaggctggtttgttgcccctttcgggaaaaacccatggtgggtatacccggcctctatattacccgccctgctggtgactatcttgatcttcatggaccaacagattacagccgtcatagttaataggaaagagaacaaacttaaagggaccgagagcaaccggcatcataggttacatcctgacggaaacctatgtctgcctggaagtcatcctaaggtctacccacccgcaggggcagtacggtctctgcctcttcacggtcgaggcctccctgagtggcatcccgttttgggaactctgcaggctctgccggatgcttcccaggccccggctggaccctgcctgcctgctgctagggctgctgccccagacccacctctccaccccggggccgatcccctgcccggaggggctctggaccctcaaatccatgggggctgccaccacctgccaggccatgtgtcactacaccaccgctcttgggcatcttcatcgttcgagggattttggatcagcagcttcccatccacgacctggccgggtttaactactagttag

SEQ ID NO: 208421 - DNA, 3429 bp, Artificial Sequence
  derived and/or modified sequence
atgaaggttaaagaggagaaggcgggagtcggcaagctggatcataccaatcatcggcggagatttccagatcagaaggaatgtcccccaatccatatcgggcttcccgttcctacgtaccctcagcgaaaaaccgaccaaaagggccatttgtccggtcttcagaaagtccactgggggttgagaccggaccaaccacagcaggagctgaccggacccggctccggggcatcctctcaggacagcagcatggatctcattagccgtacccggtccccagccgcggagcagctgcaggatatcttgggagaggaggacgaggccccaaatcccactctgtttactgagatggatacgctccagcacgatggcgaccaaatggaatggaaggagtccgctcgctggattaaatttgaggaaaaagtggaagaggggggagagaggtggtctaaaccccacgtgagtacattgtctttgcattctttgttcgagcttaggacttgcttgcagaccggcacggttttgctggatttggactccgggtcactcccacaaatcatcgacgatgtgatcgaaaaacagatcgaagacggtttactccggcctgaactgcgagagcgggtttcttacgtcttgctcaggcggcaccggcatcagaccaagaaacctattcacaggagcttagcggatatagggaaatccgtgagcacgacaaacaggtccccggctcgttctcctggagctggtccgtctctacatcactccacagaggatctgcgcatgcggcagagcgccaactacggaaggctgtgtcatgcgcagagcagaagtatgaatgacatttccctgaccccgaatacagaccagaggaagaacaagttcatgaagaagatcccaaaggactcagaagcaagtaacgtcctcgttggcgaggttgatttcctggatcagcccttcatcgccttcgtccgcctcattcagtcagccatgctaggtggcgtcacggaggtgcccgttcccacaagattcctgtttattctcctgggcccgtcaggccgggctaagagctataatgagatcgggcgcgctatcgccactctgatggtggacgatctgttcagcgatgtggcatacaaggcaaggaatagagaggacttgatagccggcattgacgagtttctcgacgaggtgatcgtgctgccgcctggcgagtgggatcctaacatcagaatcgagcctccaaagaaggtgccttccgccgacaagcggaaatctgtgttttccttggcagagcttggccagatgaacggtagcgttggcggaggcggaggagcacccggcggcggcaacggtggtggaggcgggggaggcagtgggggaggagcaggaagcgggggcgccggcggcacgagcagcggagatgatggtgaaatgcccgcaatgcatgagatcggggaggagctcatttggactggcaggttcttcggcggcctttgtctggacattaagcggaaactcccctggtttccttccgatttttacgacgggtttcacattcagtctatttctgcaattctatttatataccttggatgcatcacaaatgccatcacattcggcggattactgggagacgctacggacaactaccagggtgttatggaaagcttcctgggcacagcaatggccggatctctgttttgcttatttagtggacaacctctcattattctgagctccaccggaccaatactgatcttcgaaaaattactatttgattttagcaaagggaatggattggactatatggaatttaggctatggatcggcctccacagcgccgttcagtgcttgatcctggtggccacggacgcaagtttcatcattaagtacataacgcgctttacagaggagggtttcagcacactcatctcatttatctttatctacgatgccattaagaagatgatcggagcctttaagtactaccccataaatatggacttcaaaccgaactttataaccacttacaagtgcgaatgcgtggccccagacactgtcaacaccactgtgtttaatgcctccgcccccttggcccccgatacaaacgcgtccctgtataacctgctgaacttgacagcccttgactggagtttgctctctaagaaggaatgcctctcctatggaggccgtctcctgggcaacagctgtaaatttatccccgatctcgctctgatgagttttatcctgtttttcgggacttactcaatgactctaacattgaagaagttcaagttttctcggtacttccccacgaaagtgcgagccctagttgctgacttttctatagttttcagcatcttgatgttctgcgggatcgatgcttgttttggattagagacccccaaactgcatgtgccatcagtgatcaagccaacacgccccgatcggggctggtttgtggcaccttttggcaaaaacccgtggtgggtctatcctgcttcaatcttgccagctctcctcgtgaccatactgatcttcatggaccagcaaataaccgcagtgatcgtcaaccgtaaggagaataagttgaagaaagcagctgggtatcatcttgacctgttctgggtgggcatcctcatggcattgtgctccttcatgggactgccatggtatgtagcagcaacagtgatcagcatcgcccatatcgacagcctgaaaatggagacagaaacctcagcccctggagaacagccacaatttctcggagtgagagagcagcgagtcactgggataatcgttttcatcttaactggcatttctgtttttctggcaccaatcctcaagtgcattcctcttccagtgctgtatggcgtcttcctctatatgggggtcgctagcttaaatgggatccagatgggcacaggaggaagtgagtttaagatccagaaaaagcttaccccattctgggagcgatgcaagctgttcctaatgcccgccaagcaccagcccgatcatgcctttctgcggcatgtaccactgagaagaatccacctcttcacgttagttcagattttgtgtttggctgtgctctggatcttgaagagcactgttgcagcaataatattcccggttatgagcctgagcacaaccgatctcgggcttatcatcgtccgacgactgctggattttatcttctcacagcacgatttagcctggattgataacatccttccggaaaaagagaaaaaagaaactgacaaaaagcgcaagagaaaaaagggcgctcacgaggactgtgacgaggaaccccaattcccccccccctcggtcattaagattccaatggagtccgtgcagtctgaccctcaaaatggcatacattgcatcgcgcggaagcgctcctcttcctggagctactcattatag

SEQ ID NO: 208422 - DNA, 3123 bp, Artificial Sequence
  derived and/or modified sequence
atgaaggtgaaggaggagaaggccggcgtgggcaagctggaccacaccaaccacagaagacgcttcccagaccagaaggaatgtcctcccatccacatcggcctgcctgtgcccacctacccccagaggaagacagaccagaagggccacctgagcggcctgcagaaggtgcactggggcctgcggccagaccagccccagcaggagctgactggacctggcagcggggccagcagccaggacagctccatggacctgatcagcaggaccaggagccctgctgctgagcagctgcaggacatcctgggggaggaggatgaggcccccaaccccaccctcttcacagagatggacaccctgcagcatgatggagaccagatggagtggaaggagagcgcccgctggatcaagtttgaggagaaggtggaggagggcggggagcgctggagcaagccccacgtgtccaccctgagcctgcacagcctgtttgagctgcggacctgcctgcagacaggaacagtgctgctggacctggacagcggcagcctgccccagatcattgatgatgtgattgagaagcagattgaagatggcctgctgcggcctgagctgcgggagcgggtgtcctatgtgctgctgcggcggcaccgccaccagaccaagaagcccatccacaggagcctggccgacatcggcaagtctgtgtccaccaccaacagaagccctgcccggagccctggggccggccccagcctgcaccacagcacagaggacctgaggatgaggcagagcgccaactacggccgcctgtgccacgcccagagccgctccatgaatgacatcagcctgacccccaacacagaccagaggaagaacaagttcatgaagaagatccccaaggacagcgaggccagcaatgtgctggtgggggaggtggacttcctggaccagcccttcatcgcctttgtgcggctcatccagagcgccatgctgggcggcgtgacagaggtgcctgtgcccacccgcttcctgttcatcctgctgggccccagcggccgggccaagagctacaatgagatcggccgggccatcgccaccctgatggtggatgacctcttcagtgatgtggcctacaaggccaggaaccgggaggacctgattgctggcattgatgagttcctggatgaagtcatcgtgctgcccccaggagagtgggaccccaacatcagaattgagccccccaagaaggtgcccagcgctgacaagaggaagtctgtgttcagcctggccgagctgggccagatgaatggatctgtgggcggcggcggcggggcccctgggggcggcaatggaggcggcggcggcggcggcagcggcggcggggccggcagcggcggggccggcggcaccagcagtggagatgatggagagatgcctgccatgcatgagatcggggaggagctgatctggacaggccgcttctttggaggcctgtgcctggacatcaagaggaagctgccctggttccccagcgacttctatgatggcttccacatccagagcatcagcgccatcctcttcatctacctgggctgcatcaccaatgccatcacctttggaggcctgctgggagatgccacagacaactaccagggcgtgatggagagcttcctgggcacagccatggccggcagcctcttctgcctcttcagcggccagcccctcatcatcctgagcagcacaggccccatcctgatctttgagaagctgctgtttgacttcagcaaaggaaatggcctggactacatggagttccggctgtggattggcctgcacagcgctgtgcagtgcctgatcctggtggccacagatgccagcttcatcatcaagtacatcacccgcttcacagaggagggcttcagcaccctcatctccttcatcttcatctatgatgccatcaagaagatgattggagccttcaagtactaccccatcaacatggacttcaagcccaacttcatcaccacctacaagtgtgaatgtgtggccccagacacagtgaacaccaccgtcttcaatgccagcgcccccctggccccagacaccaatgccagcctgtacaacctgctgaacctgacagccctggactggagcctgctgagcaagaaggagtgcctgtcctatggaggccgcctgctgggcaacagctgcaagttcatcccagacctggccctgatgtccttcatcctcttcttcggcacctacagcatgaccctgaccctgaagaagttcaagttcagccgctacttccccaccaaggtgcgggccctggtggccgacttcagcatcgtgttcagcatcctgatgttctgtggcattgatgcctgcttcggcctggagacccccaagctgcacgtgcccagcgtcatcaagcccaccaggccagaccggggctggtttgtggccccctttgggaagaacccctggtgggtgtacccagccagcatcctgcctgccctgctggtgaccatcctgatcttcatggaccagcagatcacagctgtgattgtgaacagaaaagaaaacaagctgaagaaggccgccggctaccacctggacctcttctgggtgggcatcctgatggccctgtgcagcttcatgggcctgccctggtacgtggccgccaccgtcatcagcatcgcccacatcgacagcctgaagatggagacagagaccagcgcccctggagagcagccccagttcctgggcgtgcgggagcagagggtgacaggcatcatcgtgttcatcctgaccggcatctctgtgttcctggcccccatcctgaagatcctgggcctcatcatcgtgcggcggctgctggacttcatcttcagccagcacgacctggcctggattgacaacatcctgcctgagaaggagaagaaggagacagacaagaagaggaagaggaagaagggggcccacgaggactgtgatgaggagccccagtttcctccacccagcgtcatcaagatccccatggagagcgtgcagagcgacccccagaatggcatccactgcatcgccaggaagaggagcagctcctggagctacagcctgtag

SEQ ID NO: 208423 - DNA, 3414 bp, Artificial Sequence
  derived and/or modified sequence
atgaaggtgaaggaggagaaggccggcgtgggcaagctggaccacaccaaccacagaagacgcttcccagaccagaaggaatgtcctcccatccacatcggcctgcctgtgcccacctacccccagaggaagacagaccagaagggccacctgagcggcctgcagaaggtgcactggggcctgcggccagaccagccccagcaggagctgactggacctggcagcggggccagcagccaggacagctccatggacctgatcagcaggaccaggagccctgctgctgagcagctgcaggacatcctgggggaggaggatgaggcccccaaccccaccctcttcacagagatggacaccctgcagcatgatggagaccagatggagtggaaggagagcgcccgctggatcaagtttgaggagaaggtggaggagggcggggagcgctggagcaagccccacgtgtccaccctgagcctgcacagcctgtttgagctgcggacctgcctgcagacaggaacagtgctgctggacctggacagcggcagcctgccccagatcattgatgatgtgattgagaagcagattgaagatggcctgctgcggcctgagctgcgggagcgggtgtcctatgtgctgctgcggcggcaccgccaccagaccaagaagcccatccacaggagcctggccgacatcggcaagtctgtgtccaccaccaacagaagccctgcccggagccctggggccggccccagcctgcaccacagcacagaggacctgaggatgaggcagagcgccaactacggccgcctgtgccacgcccagagccgctccatgaatgacatcagcctgacccccaacacagaccagaggaagaacaagttcatgaagaagatccccaaggacagcgaggccagcaatgtgctggtgggggaggtggacttcctggaccagcccttcatcgcctttgtgcggctcatccagagcgccatgctgggcggcgtgacagaggtgcctgtgcccacccgcttcctgttcatcctgctgggccccagcggccgggccaagagctacaatgagatcggccgggccatcgccaccctgatggtggatgacctcttcagtgatgtggcctacaaggccaggaaccgggaggacctgattgctggcattgatgagttcctggatgaagtcatcgtgctgcccccaggagagtgggaccccaacatcagaattgagccccccaagaaggtgcccagcgctgacaagaggaagtctgtgttcagcctggccgagctgggccagatgaatggatctgtgggcggcggcggcggggcccctgggggcggcaatggaggcggcggcggcggcggcagcggcggcggggccggcagcggcggggccggcggcaccagcagtggagatgatggagagatgcctgccatgcatgagatcggggaggagctgatctggacaggccgcttctttggaggcctgtgcctggacatcaagaggaagctgccctggttccccagcgacttctatgatggcttccacatccagagcatcagcgccatcctcttcatctacctgggctgcatcaccaatgccatcacctttggaggcctgctgggagatgccacagacaactaccagggcgtgatggagagcttcctgggcacagccatggccggcagcctcttctgcctcttcagcggccagcccctcatcatcctgagcagcacaggccccatcctgatctttgagaagctgctgtttgacttcagcaaaggaaatggcctggactacatggagttccggctgtggattggcctgcacagcgctgtgcagtgcctgatcctggtggccacagatgccagcttcatcatcaagtacatcacccgcttcacagaggagggcttcagcaccctcatctccttcatcttcatctatgatgccatcaagaagatgattggagccttcaagtactaccccatcaacatggacttcaagcccaacttcatcaccacctacaagtgtgaatgtgtggccccagacacagtgaacaccaccgtcttcaatgccagcgcccccctggccccagacaccaatgccagcctgtacaacctgctgaacctgacagccctggactggagcctgctgagcaagaaggagtgcctgtcctatggaggccgcctgctgggcaacagctgcaagttcatcccagacctggccctgatgtccttcatcctcttcttcggcacctacagcatgaccctgaccctgaagaagttcaagttcagccgctacttccccaccaaggtgcgggccctggtggccgacttcagcatcgtgttcagcatcctgatgttctgtggcattgatgcctgcttcggcctggagacccccaagctgcacgtgcccagcgtcatcaagcccaccaggccagaccggggctggtttgtggccccctttgggaagaacccctggtgggtgtacccagccagcatcctgcctgccctgctggtgaccatcctgatcttcatggaccagcagatcacagctgtgattgtgaacagaaaagaaaacaagctgaagaaggccgccggctaccacctggacctcttctgggtgggcatcctgatggccctgtgcagcttcatgggcctgccctggtacgtggccgccaccgtcatcagcatcgcccacatcgacagcctgaagatggagacagagaccagcgcccctggagagcagccccagttcctgggcgtgcgggagcagagggtgacaggcatcatcgtgttcatcctgaccggcatctctgtgttcctggcccccatcctgaagtgcatccccctgcctgtgctgtatggagtcttcctgtacatgggcgtggccagcctgaatggcatccagatgggcactggaggcagcgagttcaagatccagaagaagctgacccccttctgggagcgctgcaagctgttcctgatgcctgccaagcaccagcctgaccacgccttcctgcggcacgtgcccctgcggcgcatccacctgttcaccctggtgcagatcctgtgcctggccgtgctgtggatcctgaagagcacagtggccgccatcatcttccctgtgatgatcctgggcctcatcatcgtgcggcggctgctggacttcatcttcagccagcacgacctggcctggattgacaacatcctgcctgagaaggagaagaaggagacagacaagaagaggaagaggaagaagggggcccacgaggactgtgatgaggagccccagttccccccaccttctgtcatcaagatccccatggagagcgtgcagagcgacccccagaatggcatccactgcatcgccaggaagaggagcagctcctggagctacagcctgtag

SEQ ID NO: 208424 - DNA, 2982 bp, Artificial Sequence
  derived and/or modified sequence
atgaaggtgaaggaggagaaggccggcgtgggcaagctggaccacaccaaccacagaagacgcttcccagaccagaaggaatgtcctcccatccacatcggcctgcctgtgcccacctacccccagaggaagacagaccagaagggccacctgagcggcctgcagaaggtgcactggggcctgcggccagaccagccccagcaggagctgactggacctggcagcggggccagcagccaggacagctccatggacctgatcagcaggaccaggagccctgctgctgagcagctgcaggacatcctgggggaggaggatgaggcccccaaccccaccctcttcacagagatggacaccctgcagcatgatggagaccagatggagtggaaggagagcgcccgctggatcaagtttgaggagaaggtggaggagggcggggagcgctggagcaagccccacgtgtccaccctgagcctgcacagcctgtttgagctgcggacctgcctgcagacaggaacagtgctgctggacctggacagcggcagcctgccccagatcattgatgatgtgattgagaagcagattgaagatggcctgctgcggcctgagctgcgggagcgggtgtcctatgtgctgctgcggcggcaccgccaccagaccaagaagcccatccacaggagcctggccgacatcggcaagtctgtgtccaccaccaacagaagccctgcccggagccctggggccggccccagcctgcaccacagcacagaggacctgaggatgaggcagagcgccaactacggccgcctgtgccacgcccagagccgctccatgaatgacatcagcctgacccccaacacagaccagaggaagaacaagttcatgaagaagatccccaaggacagcgaggccagcaatgtgctggtgggggaggtggacttcctggaccagcccttcatcgcctttgtgcggctcatccagagcgccatgctgggcggcgtgacagaggtgcctgtgcccacccgcttcctgttcatcctgctgggccccagcggccgggccaagagctacaatgagatcggccgggccatcgccaccctgatggtggatgacctcttcagtgatgtggcctacaaggccaggaaccgggaggacctgattgctggcattgatgagttcctggatgaagtcatcgtgctgcccccaggagagtgggaccccaacatcagaattgagccccccaagaaggtgcccagcgctgacaagaggaagtctgtgttcagcctggccgagctgggccagatgaatggatctgtgggcggcggcggcggggcccctgggggcggcaatggaggcggcggcggcggcggcagcggcggcggggccggcagcggcggggccggcggcaccagcagtggagatgatggagagatgcctgccatgcatgagatcggggaggagctgatctggacaggccgcttctttggaggcctgtgcctggacatcaagaggaagctgccctggttccccagcgacttctatgatggcttccacatccagagcatcagcgccatcctcttcatctacctgggctgcatcaccaatgccatcacctttggaggcctgctgggagatgccacagacaactaccagggcgtgatggagagcttcctgggcacagccatggccggcagcctcttctgcctcttcagcggccagcccctcatcatcctgagcagcacaggccccatcctgatctttgagaagctgctgtttgacttcagcaaaggaaatggcctggactacatggagttccggctgtggattggcctgcacagcgctgtgcagtgcctgatcctggtggccacagatgccagcttcatcatcaagtacatcacccgcttcacagaggagggcttcagcaccctcatctccttcatcttcatctatgatgccatcaagaagatgattggagccttcaagtactaccccatcaacatggacttcaagcccaacttcatcaccacctacaagtgtgaatgtgtggccccagacacagtgaacaccaccgtcttcaatgccagcgcccccctggccccagacaccaatgccagcctgtacaacctgctgaacctgacagccctggactggagcctgctgagcaagaaggagtgcctgtcctatggaggccgcctgctgggcaacagctgcaagttcatcccagacctggccctgatgtccttcatcctcttcttcggcacctacagcatgaccctgaccctgaagaagttcaagttcagccgctacttccccaccaaggtgcgggccctggtggccgacttcagcatcgtgttcagcatcctgatgttctgtggcattgatgcctgcttcggcctggagacccccaagctgcacgtgcccagcgtcatcaagcccaccaggccagaccggggctggtttgtggccccctttgggaagaacccctggtgggtgtacccagccagcatcctgcctgccctgctggtgaccatcctgatcttcatggaccagcagatcacagctgtgattgtgaacagaaaagaaaacaagctgaagggcacagagagcaacagacaccaccggctgcacccagatggcaacctgtgcctgcccggcagccaccccaaggtgtaccccccagctggagctgtgcgcagcctgcccctgcacggccggggcctgcctgagtggcaccctgtgctgggcaccctgcaggccctgcctgatgccagccaggccccagctggcccctgcctgcctgctgcccgggccgccgccccagacccccccctgcaccctggagctgaccccctgcccggcggggccctggacccccagatccatggaggctgccaccacctgcccggccatgaccccggcccccaccacaggagcaaggccagcggcttccacctgtttcctgcccggcccggcctggactag

SEQ ID NO: 208425 - DNA, 2895 bp, Artificial Sequence
  derived and/or modified sequence
atgaaggtgaaggaggagaaggccggcgtgggcaagctggaccacaccaaccacagaagacgcttcccagaccagaaggaatgtcctcccatccacatcggcctgcctgtgcccacctacccccagaggaagacagaccagaagggccacctgagcggcctgcagaaggtgcactggggcctgcggccagaccagccccagcaggagctgactggacctggcagcggggccagcagccaggacagctccatggacctgatcagcaggaccaggagccctgctgctgagcagctgcaggacatcctgggggaggaggatgaggcccccaaccccaccctcttcacagagatggacaccctgcagcatgatggagaccagatggagtggaaggagagcgcccgctggatcaagtttgaggagaaggtggaggagggcggggagcgctggagcaagccccacgtgtccaccctgagcctgcacagcctgtttgagctgcggacctgcctgcagacaggaacagtgctgctggacctggacagcggcagcctgccccagatcattgatgatgtgattgagaagcagattgaagatggcctgctgcggcctgagctgcgggagcgggtgtcctatgtgctgctgcggcggcaccgccaccagaccaagaagcccatccacaggagcctggccgacatcggcaagtctgtgtccaccaccaacagaagccctgcccggagccctggggccggccccagcctgcaccacagcacagaggacctgaggatgaggcagagcgccaactacggccgcctgtgccacgcccagagccgctccatgaatgacatcagcctgacccccaacacagaccagaggaagaacaagttcatgaagaagatccccaaggacagcgaggccagcaatgtgctggtgggggaggtggacttcctggaccagcccttcatcgcctttgtgcggctcatccagagcgccatgctgggcggcgtgacagaggtgcctgtgcccacccgcttcctgttcatcctgctgggccccagcggccgggccaagagctacaatgagatcggccgggccatcgccaccctgatggtggatgacctcttcagtgatgtggcctacaaggccaggaaccgggaggacctgattgctggcattgatgagttcctggatgaagtcatcgtgctgcccccaggagagtgggaccccaacatcagaattgagccccccaagaaggtgcccagcgctgacaagaggaagtctgtgttcagcctggccgagctgggccagatgaatggatctgtgggcggcggcggcggggcccctgggggcggcaatggaggcggcggcggcggcggcagcggcggcggggccggcagcggcggggccggcggcaccagcagtggagatgatggagagatgcctgccatgcatgagatcggggaggagctgatctggacaggccgcttctttggaggcctgtgcctggacatcaagaggaagctgccctggttccccagcgacttctatgatggcttccacatccagagcatcagcgccatcctcttcatctacctgggctgcatcaccaatgccatcacctttggaggcctgctgggagatgccacagacaactaccagggcgtgatggagagcttcctgggcacagccatggccggcagcctcttctgcctcttcagcggccagcccctcatcatcctgagcagcacaggccccatcctgatctttgagaagctgctgtttgacttcagcaaaggaaatggcctggactacatggagttccggctgtggattggcctgcacagcgctgtgcagtgcctgatcctggtggccacagatgccagcttcatcatcaagtacatcacccgcttcacagaggagggcttcagcaccctcatctccttcatcttcatctatgatgccatcaagaagatgattggagccttcaagtactaccccatcaacatggacttcaagcccaacttcatcaccacctacaagtgtgaatgtgtggccccagacacagtgaacaccaccgtcttcaatgccagcgcccccctggccccagacaccaatgccagcctgtacaacctgctgaacctgacagccctggactggagcctgctgagcaagaaggagtgcctgtcctatggaggccgcctgctgggcaacagctgcaagttcatcccagacctggccctgatgtccttcatcctcttcttcggcacctacagcatgaccctgaccctgaagaagttcaagttcagccgctacttccccaccaagcccaccaggccagaccggggctggtttgtggccccctttgggaagaacccctggtgggtgtacccagccagcatcctgcctgccctgctggtgaccatcctgatcttcatggaccagcagatcacagctgtgattgtgaacagaaaagaaaacaagctgaagggcacagagagcaacagacaccaccggctgcacccagatggcaacctgtgcctgcccggcagccaccccaaggtgtaccccccagctggagctgtgcgcagcctgcccctgcacggccggggcctgcctgagtggcaccctgtgctgggcaccctgcaggccctgcctgatgccagccaggccccagctggcccctgcctgcctgctgcccgggccgccgccccagacccccccctgcaccctggagctgaccccctgcccggcggggccctggacccccagatccatggaggctgccaccacctgcccggccacgtgtccctgcaccaccgctcctgggccagcagcagctttgagggcttctggatcagcagcttccccagcaccacctggccaggcctgaccaccagctag

SEQ ID NO: 208426 - DNA, 3429 bp, Artificial Sequence
  derived and/or modified sequence
atgaaggtgaaggaggagaaggccggcgtgggcaagctggaccacaccaaccacagaagacgcttcccagaccagaaggaatgtcctcccatccacatcggcctgcctgtgcccacctacccccagaggaagacagaccagaagggccacctgagcggcctgcagaaggtgcactggggcctgcggccagaccagccccagcaggagctgactggacctggcagcggggccagcagccaggacagctccatggacctgatcagcaggaccaggagccctgctgctgagcagctgcaggacatcctgggggaggaggatgaggcccccaaccccaccctcttcacagagatggacaccctgcagcatgatggagaccagatggagtggaaggagagcgcccgctggatcaagtttgaggagaaggtggaggagggcggggagcgctggagcaagccccacgtgtccaccctgagcctgcacagcctgtttgagctgcggacctgcctgcagacaggaacagtgctgctggacctggacagcggcagcctgccccagatcattgatgatgtgattgagaagcagattgaagatggcctgctgcggcctgagctgcgggagcgggtgtcctatgtgctgctgcggcggcaccgccaccagaccaagaagcccatccacaggagcctggccgacatcggcaagtctgtgtccaccaccaacagaagccctgcccggagccctggggccggccccagcctgcaccacagcacagaggacctgaggatgaggcagagcgccaactacggccgcctgtgccacgcccagagccgctccatgaatgacatcagcctgacccccaacacagaccagaggaagaacaagttcatgaagaagatccccaaggacagcgaggccagcaatgtgctggtgggggaggtggacttcctggaccagcccttcatcgcctttgtgcggctcatccagagcgccatgctgggcggcgtgacagaggtgcctgtgcccacccgcttcctgttcatcctgctgggccccagcggccgggccaagagctacaatgagatcggccgggccatcgccaccctgatggtggatgacctcttcagtgatgtggcctacaaggccaggaaccgggaggacctgattgctggcattgatgagttcctggatgaagtcatcgtgctgcccccaggagagtgggaccccaacatcagaattgagccccccaagaaggtgcccagcgctgacaagaggaagtctgtgttcagcctggccgagctgggccagatgaatggatctgtgggcggcggcggcggggcccctgggggcggcaatggaggcggcggcggcggcggcagcggcggcggggccggcagcggcggggccggcggcaccagcagtggagatgatggagagatgcctgccatgcatgagatcggggaggagctgatctggacaggccgcttctttggaggcctgtgcctggacatcaagaggaagctgccctggttccccagcgacttctatgatggcttccacatccagagcatcagcgccatcctcttcatctacctgggctgcatcaccaatgccatcacctttggaggcctgctgggagatgccacagacaactaccagggcgtgatggagagcttcctgggcacagccatggccggcagcctcttctgcctcttcagcggccagcccctcatcatcctgagcagcacaggccccatcctgatctttgagaagctgctgtttgacttcagcaaaggaaatggcctggactacatggagttccggctgtggattggcctgcacagcgctgtgcagtgcctgatcctggtggccacagatgccagcttcatcatcaagtacatcacccgcttcacagaggagggcttcagcaccctcatctccttcatcttcatctatgatgccatcaagaagatgattggagccttcaagtactaccccatcaacatggacttcaagcccaacttcatcaccacctacaagtgtgaatgtgtggccccagacacagtgaacaccaccgtcttcaatgccagcgcccccctggccccagacaccaatgccagcctgtacaacctgctgaacctgacagccctggactggagcctgctgagcaagaaggagtgcctgtcctatggaggccgcctgctgggcaacagctgcaagttcatcccagacctggccctgatgtccttcatcctcttcttcggcacctacagcatgaccctgaccctgaagaagttcaagttcagccgctacttccccaccaaggtgcgggccctggtggccgacttcagcatcgtgttcagcatcctgatgttctgtggcattgatgcctgcttcggcctggagacccccaagctgcacgtgcccagcgtcatcaagcccaccaggccagaccggggctggtttgtggccccctttgggaagaacccctggtgggtgtacccagccagcatcctgcctgccctgctggtgaccatcctgatcttcatggaccagcagatcacagctgtgattgtgaacagaaaagaaaacaagctgaagaaggccgccggctaccacctggacctcttctgggtgggcatcctgatggccctgtgcagcttcatgggcctgccctggtacgtggccgccaccgtcatcagcatcgcccacatcgacagcctgaagatggagacagagaccagcgcccctggagagcagccccagttcctgggcgtgcgggagcagagggtgacaggcatcatcgtgttcatcctgaccggcatctctgtgttcctggcccccatcctgaagtgcatccccctgcctgtgctgtatggagtcttcctgtacatgggcgtggccagcctgaatggcatccagatgggcactggaggcagcgagttcaagatccagaagaagctgacccccttctgggagcgctgcaagctgttcctgatgcctgccaagcaccagcctgaccacgccttcctgcggcacgtgcccctgcggcgcatccacctgttcaccctggtgcagatcctgtgcctggccgtgctgtggatcctgaagagcacagtggccgccatcatcttccctgtgatgagcctgagcaccacagacctgggcctcatcatcgtgcggcggctgctggacttcatcttcagccagcacgacctggcctggattgacaacatcctgcctgagaaggagaagaaggagacagacaagaagaggaagaggaagaagggggcccacgaggactgtgatgaggagccccagtttcctccacccagcgtcatcaagatccccatggagagcgtgcagagcgacccccagaatggcatccactgcatcgccaggaagaggagcagctcctggagctacagcctgtag

SEQ ID NO: 208427 - DNA, 3123 bp, Artificial Sequence
  derived and/or modified sequence
atgaaggtgaaggaggagaaggccggcgtgggcaagctggaccacacaaaccaccgaaggagattcccggatcaaaaggagtgcccccctatccatataggtctgccagtccctacatatccacaacgtaagaccgatcagaaaggacacctcagcggcctccaaaaggtgcactggggcctgcggcccgatcaaccacagcaggagttgacagggcctgggagcggtgcttcctctcaagatagctcaatggacctcatttctcgaacacgcagtcctgcggccgaacagctccaggatattcttggcgaagaagacgaagcccccaatcctacactgttcacagaaatggacaccttacagcacgatggtgatcagatggagtggaaagaaagtgcccgctggataaagttcgaggagaaggtggaagagggaggagaacgctggtcgaagcctcacgtcagtactttgtccttacactctctgttcgagctacgcacctgtctgcagacgggcaccgtcctgctggacttggactccggctctctcccccagataatcgacgacgtaattgagaagcagattgaagatggtctccttaggcctgagctgagggagcgggtgagctatgttctcctcaggcgccatcgccaccagaccaaaaaacctatccacaggagcctcgccgacataggaaaatctgtgagcacgaccaaccgatctcccgctcggagcccaggagccggtccttcccttcaccactctacggaagatcttcgaatgaggcaatcggcaaactacggcaggctctgccatgctcaatcccgctccatgaatgacatatccctgacacccaacaccgatcagcgcaagaacaagtttatgaagaaaatacctaaagattcggaggctagcaacgtgctggttggtgaggtggacttcctggatcagcctttcattgccttcgtacgccttatccagtccgctatgctgggaggcgttaccgaagtccccgttccaacccgtttcttgttcattctgttaggaccaagcggaagggctaagagctataatgagattggcagggcgatagctacgctgatggtggatgatctctttagtgatgtcgcttacaaggcccgtaatcgcgaagatctcatagccggaatcgacgagtttctggatgaggttatagtgctgcctccaggcgagtgggatccgaacatccgcatcgagccaccgaaaaaggtaccatctgcagataaacggaagagtgtcttcagtttggcagaactgggccagatgaacggttccgtcggtggcgggggaggggccccaggcggaggaaacggtggcggcggaggtggaggctcgggtggtggagcaggctcaggcggcgcaggtggtactagtagtggcgacgacggggagatgcctgcgatgcacgaaattggagaagagctgatttggacgggaaggtttttcgggggtctctgcctggatataaagcggaaactcccctggttcccgtccgacttctatgatggtttccacatccagtccatttctgccatcctgtttatttatctgggatgtatcaccaacgcaattacttttggcggtctgctgggtgatgccacagataattaccagggtgtgatggagtcattcttagggaccgctatggccgggtcactgttctgtcttttttccggacaacccctgattatcttgagctctaccggccctatccttatcttcgagaaactgctcttcgattttagcaaaggcaatgggttagactatatggaattccgcctttggattggcctccattccgccgtccagtgcctgatccttgttgccacagatgcaagtttcatcataaaatacattacaaggtttacagaggaggggttttccaccctcatatcttttatcttcatttacgatgctattaaaaaaatgattggggcatttaagtattatcctattaacatggactttaaaccaaactttatcactacatacaaatgcgaatgcgtggcgcctgacactgtgaatacaacagtctttaacgcgtccgccccactagcccccgatacaaacgcttcactctataacctgctgaacttaacagccttggattggtccctccttagcaagaaggagtgcctatcttacgggggcagactgctggggaactcgtgcaaattcattcccgacctggctttaatgagcttcatactgttcttcggcacctacagcatgactctcaccctcaagaagttcaagttcagcagatacttccccaccaaggtgcgggccctcgtggcggatttttctatcgtctttagcatccttatgttttgtggcatcgatgcatgtttcggcctggaaacacccaagctccacgtgcccagcgttattaagccgacgcgacccgatcggggctggtttgttgccccattcggaaaaaatccatggtgggtgtacccggcatctatactaccagcactgctagtgacaatcctgatctttatggatcaacaaatcacagctgtaatagtcaacagaaaagagaacaaactgaaaaaggccgccgggtaccacctggatctcttttgggtgggcatccttatggccctttgcagctttatgggcctgccctggtacgttgctgcgacggtgatctctatagcgcacatcgactccttaaaaatggagaccgaaacctccgcccctggagaacaaccccagttcctgggagttcgtgagcagcgcgtgaccggcataattgttttcatccttaccggaatctcagtattcctcgctcccatcctgaaaatccttggcctgattatcgtgcgcaggctactcgactttatattctcccagcacgacctggcgtggatcgataacatcctgccagagaaagaaaaaaaggaaacagacaagaaaaggaaacgaaagaagggggcgcacgaagactgcgatgaggagccgcagtttccgcccccatccgttatcaaaatccctatggaatcggtccaatccgatcctcagaatgggatccactgcatcgcaagaaaacgaagcagtagttggtcctactctctgtag

SEQ ID NO: 208428 - DNA, 3414 bp, Artificial Sequence
  derived and/or modified sequence
atgaaggtgaaggaggagaaggccggcgtgggcaagctggaccacacgaaccatagaaggcggtttcctgatcaaaaggagtgcccccccattcacataggactgccagttccaacttaccctcagcgcaagaccgaccaaaagggccacctctcggggttacagaaggttcattggggacttcgaccagaccaacctcagcaggaactgacaggccccggctccggcgcctcatctcaggacagctccatggatctaatttccagaacccggtctcccgcggccgagcaacttcaggatatcctcggagaagaagatgaagcccccaacccaaccctctttaccgagatggatacgctccagcatgatggggaccaaatggaatggaaggagagcgctaggtggattaagttcgaggaaaaggtggaagagggcggtgagagatggagtaagccccacgtgagtacactctctctccactccctattcgagttgcgaacctgcctgcagactgggaccgtgctgctcgatctggattcgggctcactgcctcagatcattgatgatgtcatagagaagcagatcgaggacgggctgctgcggccggaactgcgtgagagggtgtcctacgttttgcttagacgccacagacaccagaccaagaagccgattcacagatctctcgcagacattggtaaatccgtgagcactacaaaccggagccctgccaggtctcctggagctggtccctctctgcatcactccacagaagacctgcggatgcgccaaagtgccaattacgggcgcctgtgtcatgcacagtctcgtagtatgaatgacattagcctcactccaaacactgatcaacgtaaaaacaagttcatgaagaaaatacctaaagactccgaagcgtccaacgtgctggtgggagaggtggactttctggaccagcccttcatagcatttgtcagacttattcaatcagccatgcttggtggagttacagaggttccggtgcccacccgattcctatttatcctcctgggcccatcgggaagggcgaaatcttacaacgagattggcagagccattgcgacattaatggtggacgacctcttctcagacgtagcctataaggcccgtaatagggaggatctgatcgcaggtattgatgaattcctggatgaagttattgtgttgcccccaggcgagtgggatccaaacattcgaatagaaccccctaaaaaagtcccctccgccgataagagaaaaagtgtcttctcactggcggaactgggtcagatgaacggctccgttgggggcggggggggcgctcccggcggaggtaacggcgggggaggcggtggcggaagcggcggcggggccggttccggcggcgcaggggggacaagctccggggacgacggggagatgcccgccatgcacgagatcggggaagagttaatttggaccggtaggttctttggcgggctctgcctggatataaagcgcaaacttccttggttccctagcgacttttacgacgggttccatatacagtccatctccgccattttgttcatttacttggggtgcataacaaatgccattacattcggggggctgttgggagacgcaacggacaactaccagggagtcatggagagttttttgggcaccgcgatggccgggtctttgttctgtttgtttagtgggcagcctctcatcattctatccagcaccggcccaattttgatatttgagaaactgctgttcgacttttccaaaggtaacggattggattatatggagttcagactttggatcgggctgcactcagctgttcagtgtttgattctggttgccaccgatgcaagctttattattaagtacattactaggttcacagaagagggtttcagcactctaatctcttttatttttatctacgacgccatcaagaagatgatcggggcttttaagtactatcctatcaacatggactttaagccaaacttcatcacaacatataagtgtgagtgcgttgcacctgatactgtgaacacaacagtgtttaacgcatctgcacccttggcccccgacactaatgcatctctatataacctgctaaacttgaccgccctggactggtcccttctgagcaagaaagagtgtctctcatatggtggacgtctcctggggaacagctgcaagttcatccctgatttagctctgatgtctttcattttattttttggcacttactcaatgacactaacgctcaaaaaatttaagtttagcagatatttccccaccaaggtcagagccctggtggctgacttctccatcgtgttcagcatcctgatgttctgcggtatcgatgcctgctttggactcgaaaccccgaagctccatgtcccctccgtgattaagcctacgcgcccagatcgaggctggtttgtggccccctttggaaagaacccttggtgggtgtaccccgcttcaattctacccgcgctgctggtcactattctgatttttatggatcagcaaatcaccgccgttattgtcaatcgtaaagaaaataagctgaaaaaagctgctggctaccacctagatttattctgggtcggcattctgatggcactctgtagctttatgggcctgccgtggtatgtagcagccactgtcatctctattgcccacatcgatagcctgaaaatggaaacagaaacttccgcccctggagagcagcctcagttcttaggtgttcgcgaacagcgtgtaacaggaataatcgtgtttattctcaccggtatttccgtttttctggccccgattctgaagtgtatcccactacccgtcctatacggcgtgttcctgtacatgggagtagccagcctaaacggtattcaaatgggtaccgggggaagcgaattcaaaattcaaaagaagttgacacctttttgggagaggtgcaagctgttccttatgcccgcgaagcaccagcctgaccatgcattcttgcggcatgtgcctttgcgccggattcatctgttcacattagtgcagatcctgtgcctcgcagtgttgtggatcttgaagtcaacggttgccgccattatttttccagtcatgatcttggggctgattatagttagaaggctgctggactttatttttagccagcacgacttagcttggattgataacattctgccagaaaaagagaagaaggagactgacaagaagcggaagaggaaaaaaggcgcccacgaagattgcgacgaggaaccccagttccccccaccctccgttatcaagattcctatggaaagcgtgcagagtgatccccagaatggaatccattgtatcgctcgaaaaaggagctctagctggagctatagcctctag

SEQ ID NO: 208429 - DNA, 3123 bp, Artificial Sequence
  derived and/or modified sequence
atgaaggtgaaggaggagaaggccggcgtgggcaagctggaccacactaatcatcgcagacggttcccggatcagaaggaatgccctcctatccacatcggactgcccgttccaacttaccctcagcggaagacagaccagaaagggcatctgagtgggctgcagaaagtacactggggtttgagaccggatcagccacagcaagagctgaccggtccaggttccggcgcatctagccaggatagcagtatggatctcatatcaagaacccgctctccagcggccgaacaactccaggacatcttaggagaagaggatgaagcacccaacccgacattgttcacagaaatggacacacttcagcacgatggcgatcagatggagtggaaagaatccgcccggtggattaaatttgaagagaaagtcgaggaaggcggagagaggtggtccaagcctcatgtaagtactttatcattgcactctttgtttgagctgaggacatgcctccagacaggaaccgtcctcctcgacctggattccggctctctgccacagatcatcgacgacgtgatagagaaacaaatcgaagacggactcctccgcccagagcttagagaacgagtgagttatgtgctgctccggagacacaggcatcagacaaagaagcccattcataggagccttgccgacataggaaagtccgtcagcactactaatcggtcccctgccagatctccaggagccgggccgtcactccaccactctacagaggatctgcggatgcgccagagcgcaaactacggacgtctgtgccacgcccagtctcgatcaatgaatgatatctcgctcacccctaacactgaccagcgaaaaaataagtttatgaaaaaaatcccaaaagactcagaggcatccaacgtacttgtgggagaggtcgatttcctggatcagccctttattgcctttgtaagacttatccagtccgcaatgctcggcggggttacagaagtgcccgttcccactagatttctgttcattctcttgggtccaagtggccgggccaagtcttacaacgagattggccgtgccatcgccaccttgatggttgatgatctttttagcgacgtggcatataaggcccgtaaccgggaggacttgatcgcgggtatagacgagtttctggacgaggtgatcgttctacccccgggggagtgggatcctaatattcgcatcgaacctccaaagaaagtaccctcagccgacaagcgcaagtccgttttctcattggccgagttaggacagatgaacggatccgtcggcggaggcgggggagccccagggggcggaaacggagggggcggaggcggtggatcgggcggcggagccggctcaggaggcgcgggaggaaccagcagtggggacgatggcgaaatgccggccatgcatgagatcggtgaagagctgatttggaccggcagatttttcgggggactgtgcctggatataaagcggaagctgccatggttcccatcagacttttatgatgggtttcatatccaaagcatctctgccatcctatttatctatctgggctgtattacaaatgccattacattcggcggcttgctcggggatgccacggacaattatcagggtgtaatggaaagcttcttaggcacagctatggccgggtcactattctgcctgttttctggacagcctctcattatactgagtagcacaggccctattctcattttcgaaaaacttctgtttgacttctctaagggcaatggactcgattacatggaattcaggctttggattgggctgcactccgctgtccagtgcctgatcctggtggccaccgatgccagctttattatcaaatacatcacacggttcaccgaagaaggattcagcaccctgatctcattcatcttcatttacgatgctattaagaaaatgatcggcgcctttaagtattacccaatcaatatggacttcaaacccaacttcattactacatacaagtgcgagtgtgtcgccccggacacagtcaataccactgtgtttaatgccagcgccccactggctcccgacacgaatgcttcgctgtataatctcctgaatttgacggccctcgactggtctctgctcagtaagaaggaatgcctcagctatgggggaaggcttctgggtaacagctgtaagtttatacctgatctggctctgatgtcattcatccttttttttgggacctactcaatgacgctgaccctgaagaagtttaagttttcccgctactttccgaccaaagtaagggcgctggtggcagattttagtatcgtgttttctatcctgatgttctgtggtattgacgcctgctttggacttgaaacccctaagcttcacgtcccaagcgttatcaaacccaccagaccagatcgtggatggttcgtggctcccttcggcaagaacccgtggtgggtgtatccggcttccatactccccgccctgctggtgacaattttaattttcatggaccagcaaatcacagccgtgatagttaaccgtaaggaaaacaagctgaaaaaggccgccggctatcatctggacttgttttgggtagggatacttatggcactatgctcgtttatgggactgccttggtatgtagcagcaacagtgatctcaattgctcacattgactccttgaagatggaaacagaaactagcgcccccggcgagcagccacaattcctgggtgtccgagaacaaagggtgacaggaattatcgtgtttatactcacagggatttccgtcttcttggccccaattttaaagattctggggctcataatcgtaaggaggctcctggatttcattttctcccagcatgacctagcctggatcgacaatattctgccagaaaaggagaagaaagaaacagacaagaagcgaaaacgaaaaaagggagcgcatgaagactgtgacgaggagcctcagtttccccctcccagcgtcattaagatacccatggaatcagttcagtcagaccctcagaacggaattcactgtattgccaggaaacgcagttcctcgtggagttattcattgtag

SEQ ID NO: 208430 - DNA, 3414 bp, Artificial Sequence
  derived and/or modified sequence
atgaaggtgaaggaggagaaggccggcgtgggcaagctggaccacaccaaccaccgccgtcggtttccagatcaaaaagaatgtccaccaattcatatcggcctgcccgtcccaacttatccccagagaaaaacggatcagaaaggccacctgtctggccttcagaaggtgcattgggggttgaggcccgatcaaccccagcaggagctgactgggcctggttccggggcgtcctcccaggattcctcaatggatctgatttcacgtacacgctcgcccgccgctgagcagttacaagacatactgggagaggaggacgaagcccccaacccaaccttattcaccgagatggacaccctgcaacacgatggagaccagatggaatggaaagaaagcgcccgatggattaaatttgaggagaaggtagaggaagggggggagcggtggagcaagcctcatgtgtcaaccttaagccttcacagcctgttcgaactgcgtacctgtctgcagaccggaacagtcctacttgatcttgactccggcagcctgcctcagatcattgatgacgtgattgagaagcaaatcgaagacggactcctgaggcctgaactgcgtgagcgcgtgagctatgtgttgttgcgaaggcacaggcatcagacgaaaaaacctatacatagaagcctggctgatattggcaagtctgtgagcaccaccaatcggtcgcctgcacgcagccctggtgctggtcccagcctccaccactcaaccgaggacctcaggatgcggcagtcagccaactatggccgattatgccacgcccagagccgcagcatgaatgacatttccctgacaccaaacaccgaccagagaaagaataagttcatgaagaagatccctaaagactctgaggcctccaatgtgctggttggtgaagtggacttccttgatcaaccttttatcgcattcgtacgtctcattcagagtgctatgctgggtggggtgacagaagtccccgtgccaacgcgctttctgttcatcctgctgggtccatctggccgggctaagagctacaatgaaatcggacgagcaatcgccaccttgatggtggatgatctgttcagcgatgtggcgtataaggcgcggaatcgcgaagatctcatagcagggatagacgagtttctggacgaagtgatcgtcctcccacccggggagtgggacccaaacatacggattgagccccctaagaaggtgcctagcgccgataagaggaaatcagtgttttctctggctgagctgggccaaatgaacggctccgtcgggggtggcggcggtgctcccggcggcggaaatggcggaggcgggggagggggcagcggaggcggcgcgggatccggaggcgcaggaggtacatcttccggggacgatggagagatgccggccatgcacgaaatcggagaggagctaatatggacaggaagattctttggcgggctttgtcttgatattaaaaggaagctaccgtggttcccttctgatttctacgacgggtttcacatccaaagcatcagcgccatactcttcatctacctgggatgcattacaaacgcaatcacctttggtgggctacttggcgacgcaaccgacaactatcagggggtgatggagtccttccttgggaccgccatggcaggctcactgttttgcttgttctccgggcaacccctgattattctgagttcaactggcccaattctcatcttcgagaaactgctctttgatttcagtaaagggaatggccttgattacatggagttcagattatggatcgggctccattccgcagtccagtgcctgattctggtggctacagacgctagcttcattattaagtatatcacgagatttactgaagagggcttctccactctgattagcttcatatttatatatgatgccatcaagaaaatgattggcgccttcaaatattatccgatcaacatggacttcaaacctaatttcataaccacctacaagtgtgaatgtgttgcccctgatacagttaatactacggtctttaatgcctctgctccactggcaccagacacaaacgcctctttgtacaacttactcaatctgaccgctttagactggtcactgctttctaaaaaggaatgcctctcttacggtggcagattgctgggcaattcatgtaagttcatccccgatctggcccttatgtccttcattctgttcttcgggacctattccatgacattgacactgaagaaattcaagttttcccggtactttccaacaaaggttcgagctctggtggcagatttctcaatcgttttctctattctcatgttttgcggcattgacgcttgctttgggcttgagacaccaaagcttcatgtcccctccgttatcaaacccacacgccccgatcgaggctggttcgtagccccattcgggaagaacccctggtgggtctatccagctagcatattgcctgctttgctggttacgattttaatttttatggaccagcagataacggcggtaattgtaaatcggaaggagaataagcttaaaaaagccgctggttatcacctcgatctcttctgggtgggaatcctgatggccctatgttcctttatggggctcccatggtatgtagcagctacagttatttctatagcgcacatcgacagtctgaagatggagactgaaactagcgcaccaggcgagcagccccagttcctaggggtgagggaacagcgggtaacagggatcattgtgtttatccttactggtatctcagtctttctggcccccattttgaaatgcattccattgccggtactatatggcgtgttcctatacatgggcgtcgccagcctgaatggcatacagatggggacgggcggaagcgagttcaagattcagaaaaagctcacacccttctgggaacgatgcaagctgttcctcatgcccgccaagcaccaacccgatcacgccttcctccggcatgtcccattgagacgcatccacttattcaccctggtccaaattttgtgtctggccgtcctttggatcctgaagtctactgtggctgcaattatattcccagtgatgatcttagggttaattatcgtgcgccgtctcctggactttatcttttctcagcacgacctggcttggattgataacatcctccctgaaaaggagaaaaaagaaacagacaagaaacgtaagagaaaaaaaggtgcccacgaagattgtgacgaagagccacagttccccccaccttctgttattaagattccaatggaatctgtgcagtcggacccacaaaatggaatccactgtatcgctagaaaacggagttcttcttggagctacagtctgtag

SEQ ID NO: 208431 - DNA, 2982 bp, Artificial Sequence
  derived and/or modified sequence
atgaaggtgaaggaggagaaggccggcgtgggcaagctggaccacacaaatcatcgcaggcggttccccgatcagaaagagtgtccgcccatccacattgggcttcctgtcccaacatatccccagcgcaagaccgaccaaaaaggtcatctgtcagggctccagaaggtacactggggcttgaggccggaccagccccagcaagaactaacaggcccggggtccggcgcttcttcccaggactcttccatggacctgatttcaagaacacgcagccctgcggccgaacagctgcaagatattctcggggaggaggacgaggcccctaaccctactctgttcactgagatggatacactccagcacgacggcgatcagatggaatggaaggaaagcgctcgttggattaaattcgaggagaaagtcgaagagggaggcgaaaggtggagtaaaccacatgtgagtacactgagccttcacagcctgttcgaactcaggacctgcctccagactggcaccgttctgctagatctcgactcagggagcttgccgcagataatcgatgatgtgattgagaagcagatcgaggacggcttgcttagacctgaactaagggagagggtatcgtatgtgttactgagacggcaccgtcaccagacaaaaaaacctatccacagatccctcgcagatatcggaaaatctgtctctactacaaaccggagcccagcccgcagcccaggtgcggggccatctctccaccatagcacagaggacctgaggatgcgacagagcgctaattatggaagactctgccacgcccagtctaggagcatgaatgacatctcattgacaccaaataccgatcagagaaaaaataaattcatgaagaagatccctaaggattcagaagcaagtaacgtcctggtgggggaggtcgactttctggatcagccattcattgccttcgtgaggttgattcagtctgcgatgttgggcggcgtgactgaggtgcctgtgcccactcgcttcctgttcattctgcttggcccgtctggtagagccaagtcctataatgaaattggaagagctatcgctaccctgatggtggacgatctgttttcagacgtcgcttacaaggccagaaatagggaggacctgattgccggtatcgatgagtttcttgacgaggtgatagtgcttcccccaggtgaatgggatcctaacatacgcattgagcctccgaaaaaagttccctccgccgacaagcggaagagcgtattttccctggctgaactcgggcagatgaacgggtccgtcggcggcggcggaggcgcccctggcggcggaaacggaggaggcggcggcgggggaagtgggggtggcgcaggctccggcggagctggcggaacctccagcggcgatgatggtgaaatgccagctatgcacgagattggtgaagaactcatttggacggggcggttttttggcgggctttgtctggatatcaagcggaagctaccgtggtttccgagtgatttttacgatgggttccacatccaatctatttctgccatcctgttcatctatctgggctgtatcaccaatgccataacctttggcggcctgttgggggacgccactgacaactaccagggggtgatggagtcgttcctcggcactgctatggccggatcactgttctgcttgtttagcggccaacccctgattatactctctagtaccggtcctatactcatattcgaaaagctgctttttgacttcagcaagggcaacgggctggactatatggaatttaggctctggattgggctgcattccgccgtccagtgtctaatcttggttgccacggacgcctctttcattattaaatacatcacaaggtttactgaggaaggctttagtactctcatctcctttatcttcatttatgacgccatcaagaagatgattggcgcatttaagtactacccaatcaacatggattttaaaccaaacttcattacgacttataagtgcgaatgcgtcgcgcctgataccgtcaatacaactgtgtttaatgcctccgctcctctggcgcccgacactaacgcttcactgtacaacctcttgaatctgaccgccctggattggagtttactgagcaagaaagaatgcttgtcttacgggggtagacttctcggtaattcgtgcaagtttataccagatctggctctaatgtcctttatcctgttcttcggtacctattctatgacactcactctcaaaaagttcaagttctctaggtacttcccaaccaaggtacgtgcccttgtagccgacttctctattgtattcagcatattgatgttttgtggaattgacgcgtgtttcggccttgaaacccccaaacttcacgtgccatctgtgatcaagccaacaaggcctgacagagggtggtttgtggctccatttgggaaaaatccttggtgggtctatcccgcttctatcctccctgctctgctggttaccatcctgattttcatggaccagcagatcaccgccgtgatcgtcaatcgcaaggaaaacaagcttaagggcacagagtccaaccgccaccatcggctgcaccctgacggcaacctgtgtctgcctggttctcatcccaaggtgtatcctcctgcaggcgccgttaggtctttgccgttgcacgggaggggcttgcccgagtggcacccagttttaggtacactgcaggcactgccggatgcttcccaggctcccgccggtccttgcctaccagctgctcgggccgccgccccagatcccccgttacaccccggtgctgatcccctacccggtggcgccttagacccgcagatccacggcggctgccaccacctgccaggccatgaccccggaccccatcataggagcaaggccagcggcttccaccttttccctgcgcgcccaggccttgactag

SEQ ID NO: 208432 - DNA, 2895 bp, Artificial Sequence
  derived and/or modified sequence
atgaaggtgaaggaggagaaggccggcgtgggcaagctggaccacacaaatcatcgtcgcaggtttccggaccagaaagagtgcccaccgatccacattggcttgccggttcccacctacccgcaaagaaagactgaccagaaggggcatttgtctggactgcagaaggtgcattggggcctgagacctgaccagcctcagcaggagctgactggccccggttccggcgcgtcgagccaggactcctcaatggacctcatatctcgtactcggtcccccgcagcagagcagctccaggatatccttggagaggaggacgaggcccccaatccgaccctgttcacagagatggatacactgcagcacgacggcgatcagatggagtggaaagaaagtgcaagatggatcaagtttgaggagaaagtagaggaaggaggcgagcggtggagtaagccccacgtttcaaccctgtccctccacagtttgttcgaacttcgaacctgtctgcagacggggacagtgctgctcgacctggactccggttccctgccccaaatcattgacgacgttattgagaaacagatcgaagatggcctcctcaggcctgagctccgggagagagtgagctacgttctcctgagaagacatcggcaccagaccaaaaagcctattcataggagcctggccgacattggaaaatctgtttccaccacaaaccgatcccccgcccggtctcccggagcggggccatccctgcaccactcaactgaagacctccgcatgaggcagtccgcgaactacggcaggttgtgccatgcccagagcaggagcatgaacgatattagtctgacacccaataccgaccaaagaaagaataaatttatgaagaagattcccaaagattccgaggccagcaacgtgctggtcggagaagtggacttcttggaccagccctttatagcgtttgtgagactcattcagagtgcgatgctggggggcgtcacggaggtgcctgttcctactaggtttctgttcattttgctaggcccttccggcagagctaagtcctataacgaaattggccgtgctatagcaacactgatggttgacgatctgtttagcgacgtcgcctataaagcccgtaacagagaggatttaatagccgggatagatgagtttctggacgaggtgatcgtacttcccccgggagaatgggacccaaacatcaggatcgaaccccccaaaaaagtgccctcagctgacaaacgaaaaagtgtgttctctctcgctgagctcgggcagatgaacgggagtgtcggcggcggaggcggagctcccgggggcggcaatgggggcggtgggggtggcgggagtgggggcggggccgggtccggcggggctggcggtactagttctggggatgacggggaaatgccggctatgcacgagatcggggaggagctgatctggacgggaagatttttcggggggctctgtctggatatcaaaaggaaattaccatggtttccatctgacttttacgatgggtttcacattcagtccatttcggcaatcctgttcatatatctgggttgcattaccaacgccatcacgttcggcggactcctcggagacgccactgacaactaccagggtgttatggaaagcttcctcggaacggccatggccggatccctcttctgtctttttagcggacagccactgatcatcctttcctctaccggacccatcctgatttttgaaaaactgctgttcgacttctccaagggcaatggcctagactatatggagttcagactttggattggactccacagcgctgtacaatgtttgattctggtagccaccgatgcatctttcataattaagtacatcacgcgtttcaccgaagaagggtttagcacccttattagttttattttcatctacgacgccattaaaaaaatgattggagcgttcaagtactacccaatcaatatggatttcaagcccaacttcattaccacttacaagtgtgaatgcgtggcccctgatacagtgaatacgaccgtttttaacgcgagtgcccccctcgctccggatacaaacgctagtctgtataatctgctgaatctgactgccctggattggtctctgttgagcaagaaggaatgcttatcctatggcggaagactcctgggaaattcatgcaagttcataccggacctggccctgatgagtttcatcctattttttggcacttattccatgacacttaccctgaaaaaatttaaatttagtcggtattttccaactaaaccaacccgcccagatcgcgggtggtttgtggcacccttcggcaagaacccctggtgggtctatcccgcctcaattctcccagctctgctcgtcacaatcttgattttcatggaccagcagataacagcagtgatcgtaaaccggaaggagaataagctcaaaggcacagaaagcaaccggcatcatcggttgcatccggacgggaatctgtgtttgcctggctcccaccctaaggtgtatccaccggccggggcagtccgaagcttacctctgcacggccgcggtctgcccgaatggcacccagttctcgggacgctgcaggctctgcccgatgcctcccaggcaccggccggtccatgtcttcccgccgcccgtgccgccgcacctgacccccccttacatcctggcgcggatcctctccctggaggcgcccttgatccacagatccatggcggatgccaccacctgccgggccatgtttccctgcatcatagaagctgggcatctagctcatttgaagggttttggatttcctcctttccctccactacttggcccggtttgacgacttcctag

SEQ ID NO: 208433 - DNA, 3429 bp, Artificial Sequence
  derived and/or modified sequence
atgaaggtgaaggaggagaaggccggcgtgggcaagctggaccacaccaaccacagacgacgtttccccgaccagaaggagtgccccccaattcacatcgggttgccagtgccgacttatcctcaacgcaagacagatcagaaaggacatctctctggactgcagaaggtgcattggggattacgtccagaccaaccgcagcaggaactgacaggacccggtagtggcgcatcttcccaagatagtagtatggatctgatcagtagaactaggtctcccgccgccgagcaactccaggacattctgggagaggaagacgaggcgcccaaccctacactgtttacagagatggacacactgcagcatgatggagaccagatggaatggaaggagtcagcgaggtggatcaaatttgaagaaaaagtcgaggaaggcggggaaaggtggtccaagccccacgttagcaccctgagtcttcactctcttttcgagctgcgcacttgcctgcagaccggaaccgtgctgttggacctggactccggcagcctgcctcagatcatcgacgacgtgattgaaaaacagatcgaggacggactgctgaggcctgagctccgtgagcgggtgtcttatgtcctgctacggcgccacagacatcagaccaaaaagccgatccaccggtccctggccgatatcggcaagagcgtgtctaccacaaataggagcccagcgcgcagccccggggccgggccatccttacaccacagtacagaggacttacgcatgagacagtctgccaactacggtcggctgtgtcatgcccagtcacgcagtatgaacgatatcagcctgacccctaacactgaccagcgcaagaataagtttatgaaaaagatcccgaaagatagcgaggcctccaatgtgctagtgggtgaagtcgacttcctggaccaacctttcattgccttcgttaggctaatccagtctgctatgttgggcggcgtgaccgaggtccccgttcccacaagattccttttcattctcctagggccttcagggcgggccaagagctataacgaaattggacgagccatcgccaccctcatggtagatgatttattctcagatgtcgcttataaggctcggaacagggaggatctaatcgctggtattgacgagttcctggacgaggtgatagtcctgccacctggggagtgggaccccaatattagaattgagccaccaaagaaagtgccttctgcggacaagaggaaaagtgtgtttagtctcgccgagttaggccagatgaatgggagcgtgggcggaggaggtggagcacctggtggagggaatggggggggaggcggagggggatccgggggcggggctggctctgggggagccgggggtactagctctggagacgacggggagatgccagctatgcatgagatcggcgaggaattaatttggacgggccgttttttcggaggtctgtgtcttgatattaaaaggaaactcccatggtttccgagcgatttctacgatggattccacattcagagtattagcgcaattttatttatttatctcggatgtatcacgaatgctatcacattcggaggattgttgggcgacgccacagataactatcagggcgtaatggagtctttcttgggaactgctatggcaggttctctcttctgcctgtttagcggccagcctctgatcatactttcatccaccgggcctatcttaatttttgaaaaactgctgtttgatttttccaagggcaacgggttggactatatggaatttcggctctggattggcctgcacagcgctgtgcagtgcctgattctcgttgcaactgacgcttcctttatcatcaaatacatcactaggttcactgaggaaggcttcagtaccctgatcagttttatctttatttatgatgcaattaaaaagatgataggggcctttaaatactacccaattaatatggattttaagcccaatttcataactacctacaaatgcgagtgcgtggcgccggatactgtgaacacaacagtattcaatgcttctgcgcctctggccccggataccaatgcatctctctacaacctcttaaacctcaccgcactggattggagtttgctctcaaaaaaagaatgcctctcctacggtggtaggctccttgggaactcgtgcaagtttatcccagatctggcattgatgtcgttcattctgttctttggaacatattccatgaccttgacactcaaaaaattcaaattttcccgatactttcctacaaaggtacgggccctcgtggcagacttttctatcgtgttctctatccttatgttttgtggtatcgacgcctgtttcggcttagagacaccaaaactgcatgtgccaagtgttataaaaccaaccaggccagaccgggggtggttcgttgctccttttggaaagaatccctggtgggtctatccagcttccatcctgccagccctgctggtaacgatcctgattttcatggatcaacagattacagctgtgattgttaatcgcaaggaaaacaaattgaagaaggcagctgggtaccacctcgacctgttttgggtcggcattcttatggcactgtgttcgtttatgggcttgccttggtatgtcgctgctactgttatcagcatcgctcatatcgactccctcaagatggagactgagaccagcgcccctggcgaacagccacagtttctcggcgtgagagagcagagagtcaccggcatcattgtattcatcttgaccggcatctccgtgtttcttgccccaattttgaagtgcattcccttgccagtgctctatggcgtttttctctatatgggcgttgcaagcttgaacggaatccaaatgggaaccggcgggtctgagtttaaaattcagaagaagctgacgccgttctgggagcggtgcaaactatttctgatgccagcaaagcatcaaccggatcatgcattcttaagacatgtgcctctccgccgcatccatttgtttacactggttcagatcctatgcctggccgtgctatggatcctgaaatctactgtggccgcaataatctttcccgttatgagcctgagcacgacagacctgggccttatcatcgtacgtcggctcctagacttcatctttagtcaacatgacctggcttggatagataatatcctgccagagaaggaaaagaaggagacagataagaaacgaaagcgtaagaagggggcccacgaagattgtgacgaggagcctcagttcccgccgcccagtgtcattaaaatccctatggaatccgtgcagtctgatccccagaatggcatacattgcattgctaggaaaaggtcaagttcttggtcctattccctgtag

SEQ ID NO: 208434 - DNA, 3123 bp, Artificial Sequence
  derived and/or modified sequence
atgaaggtaaaagaggagaaggcgggagtgggtaagcttgatcacacgaatcaccggagacgattccccgatcagaaagaatgtccccctatacatattggcctgccagtgcccacatatccgcagaggaagacagatcaaaagggccacttgagcgggcttcagaaagttcattggggattgaggcccgatcaaccacaacaagaactaactgggccagggtccggggcttcgtcccaggactcatctatggatttgatctcccggactcgctcacctgcagctgagcagctgcaagacatactgggggaagaagatgaggcccctaaccctaccctgttcactgagatggatactttgcaacatgatggagaccagatggagtggaaagagagtgcgcgatggatcaagttcgaggagaaggttgaagagggaggcgagagatggagcaagccacatgtgtccaccttgagcctgcacagcttattcgagctgaggacatgcctgcagacgggcaccgtattgttagacctcgacagcggatccctcccccaaatcattgatgatgtgatcgagaagcagatcgaggatggcctgttgcgacccgaactgagagagcgcgttagctacgtgctgttgagacgccataggcatcagaccaagaagccaattcaccgcagcctggctgatattggtaagtctgtttcgactaccaaccggtcccccgctagaagccccggagccggtcctagtttacatcactctactgaggatctgcggatgagacagagcgccaactacggacgactctgtcacgctcagtcaaggagtatgaatgacatcagccttaccccaaataccgatcagcgtaaaaacaagttcatgaaaaagatccccaaggattcggaggctagtaacgtcctggtcggcgaggttgatttcttagaccagccttttatagcattcgtgaggctgattcagtcagctatgctgggtggtgttacagaagtgccagtaccaactcggtttttatttatcctgctcggaccctcggggagggccaaatcatataacgaaatcggtcgcgcaattgccaccctgatggttgacgatctgttttccgatgtggcatacaaagctcgcaaccgagaagatctcattgcaggcatcgacgaatttctggatgaagtgatcgtgctgcctcccggagaatgggacccaaatatcaggatcgagccacctaagaaggttcccagcgcagacaagagaaagtccgtgttcagcctggcggaactaggccaaatgaacggctccgtgggcggtggaggcggagcgcctgggggaggaaacggaggcggaggtggaggaggcagtggcggtggggctggtagtgggggagccggtggaacttcttctggagatgatggcgagatgccagctatgcatgagataggagaggagctgatctggacagggaggttcttcggaggattgtgtctcgacattaagcgtaagcttccttggttccctagcgatttttatgacgggtttcatatacagtctatttcggctatcctgtttatctacttaggatgcatcacaaatgctattacatttggaggcttgctgggcgacgccacagacaattatcaaggcgtcatggaaagctttctcgggacggcaatggccggaagtctgttctgcctgttctccggccagccattaatcatcctgagctcaactggccctattctgattttcgaaaagttgctgtttgatttttccaagggtaacggactggactacatggaatttcgcctttggatcggcctccactctgcagttcagtgtctgattctggtggccacagatgcatcatttataatcaaatacatcactcgctttactgaggaaggcttctccacattgatttcctttatcttcatttatgatgcaattaagaaaatgattggagctttcaaatattaccccatcaatatggatttcaagccaaatttcattacaacctataaatgcgagtgtgtcgccccagacaccgttaacactaccgtgttcaacgccagcgccccattagccccagatactaatgcaagtttgtacaacttactcaatctgacagcgctcgattggagtctgctcagcaagaaggaatgcctttcttatggaggccgtctgttgggcaactcctgtaagttcatcccagatttggccttgatgtcatttatcctgttttttggcacctacagcatgaccctgaccctgaagaagttcaaattcagtcggtatttcccaacaaaggtccgagctctcgtagcagacttttccatcgtcttttcgatcctcatgttttgtggcatcgatgcatgttttgggttggaaacgcccaagctgcacgttccatcagtgatcaaacccaccaggcctgatcgaggatggttcgttgctccttttggaaagaacccgtggtgggtgtaccccgcttcgattttgccagccctactcgtcactattctcatcttcatggatcaacaaatcaccgccgttattgtgaatcggaaggagaacaagcttaagaaagcagctgggtatcacctcgatttgttttgggtcgggatcctaatggccctatgttctttcatgggccttccatggtacgtggccgcaactgtgatcagtattgcacatattgacagcctgaaaatggagactgagacctccgccccaggggaacagccacaattccttggcgtgcgtgagcagagagttacaggaataattgtgttcatccttacaggtatcagtgtttttctagcacccatcctaaagatcctgggactgatcatcgtccggaggctgctggactttattttctcgcagcacgatcttgcctggatagataacattctgcccgagaaagaaaaaaaggagaccgataaaaagagaaagaggaagaaaggagcccatgaggactgcgacgaagaacctcagttccctccgccaagtgtgattaagattcctatggaatcagtccagtccgacccacagaatgggatccactgtatcgccagaaagcgatcatcatcctggtcatacagcctatag

SEQ ID NO: 208435 - DNA, 3414 bp, Artificial Sequence
  derived and/or modified sequence
atgaaagtgaaagaggagaaggctggagtcggcaagttggatcataccaatcaccgcagaagattccccgatcagaaggaatgcccacctattcacatcgggctgcctgtgcccacttacccgcagcggaaaaccgatcagaaaggacacctgtcaggtctgcagaaggtgcattggggcctgaggcccgatcaaccgcaacaggagttaacagggcctggctcaggagcaagctcacaagacagctccatggacctcatctcaagaacaaggagcccagcagctgagcaactgcaggatatactcggcgaggaagacgaagcacctaatccgacactctttaccgaaatggataccttgcaacatgacggtgaccaaatggaatggaaagagtccgcaagatggatcaagtttgaggaaaaagttgaggagggcggagagcgctggtctaagcctcatgttagtaccctcagcttgcactcattgtttgaacttcgtacttgtctgcagaccggcaccgtactactagacctcgattccggaagcctcccacagataatcgacgatgttatcgaaaagcaaattgaggatggactcctgcggcctgagttacgggaaagagtgagctacgtgcttttgcgccgacacaggcaccagaccaagaaacccatccataggtccctggcggatatcgggaaatcggtgtctacaacgaatcggtcccccgcacgttcccctggggcaggccctagtctgcaccactctaccgaggatttaagaatgcggcagtctgccaattacgggcgtctgtgccatgcacagtcccgcagtatgaatgatattagcctgacccctaatacagaccagcgcaaaaacaagttcatgaaaaagatccctaaggactctgaggcttcaaacgtcctggtcggcgaggtggacttcctggaccagccttttattgcctttgtgagacttattcaatccgctatgctcggtggtgtgactgaggtgccggtgccaacccgtttcctgttcatcctgctgggaccctctgggagagctaagagctataacgaaatcggtcgcgctatcgccacccttatggttgatgaccttttcagtgacgttgcttacaaagccagaaatcgggaggacctgatcgctggaatcgatgagttcctggatgaagttattgtgctgccgccaggcgagtgggaccctaatataagaatcgagcccccaaaaaaagtgccctctgccgacaagagaaaaagtgtgttctccctggcagagttaggacaaatgaacggtagtgtcggagggggaggaggcgcacccggtggcggtaacggaggcggaggcggaggaggctccggtggcggagcagggtctggtggcgctgggggtacatcgtcaggtgacgatggggagatgccagctatgcacgaaatcggcgaggagttgatatggaccggacgctttttcgggggactctgtctcgacatcaaaagaaaactgccctggttccccagcgacttctatgacggattccacatccaatctatctccgctatcctgtttatatacttgggatgcattacaaacgcaattaccttcgggggtttgttgggcgatgcgactgataactatcagggtgtgatggagtcattcctcgggaccgccatggccggatccttattctgtctgttcagcggccaacccctgataattctgagtagtaccggacctatcctgattttcgaaaagctcctgtttgatttctcgaaaggcaacgggctcgattacatggagttcagactttggataggcctgcatagcgccgtgcagtgcctgattctagtagctacagatgcctctttcataattaagtacatcacacgctttaccgaagaaggattttcgacattgatcagcttcatcttcatttacgacgcaattaaaaagatgatcggggctttcaaatactacccgattaacatggacttcaaacccaatttcatcacaacttacaaatgcgagtgtgtagccccagatactgtgaataccaccgtgtttaacgcctctgcaccgctggccccagacaccaacgcttcactgtacaatctactgaatctgacggccctggattggtctctgctatctaagaaggagtgcctctcttatgggggtcgcttactcgggaatagctgtaagttcattcctgaccttgcactaatgagtttcatcctctttttcggcacctatagcatgacactgaccctcaagaagttcaaattctcgcgctacttccctaccaaggtgcgggcactggttgccgatttttccattgtgttctccatcctgatgttctgtggcatcgacgcctgcttcgggctggaaactccaaagctccacgtgccatccgtcattaagcccaccaggccggatcgcggatggttcgtggcccctttcggcaagaatccatggtgggtttatcctgcatctattctgcctgccctgctagtgaccattctcattttcatggatcagcagatcactgccgtcattgtaaaccgaaaagagaataagctgaaaaaagccgcagggtaccacctggacctcttctgggtcggaatcctcatggccctctgctctttcatgggcttaccctggtatgtggccgctacagtgatctcgatcgcccacatcgatagtctgaagatggagaccgagacctctgctccaggcgagcagcctcagttcctcggagtccgggagcagcgcgtgaccgggataatagtctttatccttaccggaatcagcgtgttcctcgctcctattctcaaatgtatccccttgccagtgttgtacggggtatttctctatatgggtgtagcctccctcaacggcatacagatgggaacggggggttcagagtttaagatccagaagaaattgacaccattttgggagagatgtaagctgtttctaatgccggcaaaacatcagcccgaccatgccttcctccggcatgtcccactgcgcaggatacatctttttactctggtgcaaatcctgtgccttgcagtgctgtggattctgaaatccacagtagccgctataatctttcccgtgatgatactgggcctcatcatcgtcaggcgcctcctggactttatcttctctcaacacgacctcgcatggatcgacaatatccttccagagaaagaaaaaaaggagacagataagaaaagaaagaggaagaagggggctcacgaggattgcgatgaagaaccacagttcccccctccttcagtcatcaagatccctatggagagcgtccagagcgacccgcaaaatggcatacactgcatcgcacggaagcgctcttcttcctggagctattccctgtag

SEQ ID NO: 208436 - DNA, 3123 bp, Artificial Sequence
  derived and/or modified sequence
atgaaggtaaaagaagagaaagccggtgtgggaaaacttgaccacacaaatcaccggagacgtttccctgatcagaaggagtgtcccccaatacacatcgggttaccagtacctacgtacccccagaggaagacagatcagaaggggcacctgtcaggcttacagaaagtccattgggggctgaggcccgatcagccccagcaggagcttaccggacctggatccggagcatcctcccaagactcatctatggatctgatatctcgtactaggtcacctgctgcagagcaactgcaggatattttaggtgaggaggacgaggcccctaatccgacactgttcaccgagatggacaccctgcaacacgacggcgaccagatggaatggaaggaatcagctaggtggattaagttcgaagagaaagtggaagaaggcggtgagcgttggtctaaacctcacgtgagcacactctcacttcactctttgtttgagctccgcacttgcctccagacagggactgtgttactggatttagatagtggcagtctgccacagattatcgacgacgtaattgagaagcagattgaagatgggctgcttcgtcccgagttgcgggagcgcgtatcctacgtactgctacgccgacatagacatcagaccaagaagcccattcatcgctctctcgctgacatcgggaagtctgtgagtaccactaaccggagtccagcgagatcacccggagccggtcctagcttacatcattcaacagaagacttgagaatgcggcagtccgcaaattacggtcgactctgccatgcccagagccggagcatgaacgacatttcattaacgcccaacactgaccagagaaagaacaagttcatgaaaaaaatcccgaaggattcggaagcctcgaatgttctcgtgggtgaggtggattttctggaccagcctttcatcgcattcgtcaggctcatccagtctgcaatgttggggggagtgacagaggtccctgtcccaacccggtttctgttcatcctgttggggccaagtggcagggcaaagtcatataatgaaatcggacgggcaatcgcaacgttgatggtggatgacctgttctctgacgtggcatacaaggctcggaatcgggaggacctcattgccggaattgacgagttcttggatgaagtcatcgtcctgcctccgggagaatgggatcccaacatccgcattgagcccccaaagaaggtgccctcggccgacaagaggaaaagcgtgttttctctcgccgaactcggccagatgaacggatctgtgggcggtggtggaggcgctcctggaggcggtaacggtggcggtggcggtggaggctcaggcggaggcgcagggagcgggggtgctggtggtactagctccggtgacgatggcgagatgccggcaatgcacgagatcggggaggagttgatttggactggaagatttttcgggggactttgcctcgatatcaagaggaaactaccttggttcccatccgacttctacgacggtttccacatccagtccatctccgcaatcctgttcatctacctgggctgcattaccaacgcaataaccttcgggggactcctgggcgacgccaccgacaactatcaaggggttatggaaagctttctgggtacagcaatggcaggctctctgttctgtctcttctccggtcagcccttgattatactgtcaagcactggacccattctgatttttgagaaacttctgtttgacttctctaagggtaatggcttagattacatggaattccgcttgtggattgggctccatagtgccgttcagtgcctgattttagtagctacagatgccagcttcatcatcaagtatatcactcgatttaccgaggagggcttttccacgctgatatccttcatatttatttatgatgcaattaaaaagatgatcggagccttcaaatattacccgatcaacatggatttcaagcccaactttatcactacttacaagtgcgagtgcgtagccccagacacggtgaacacaacggtcttcaatgcctccgctcctctggcacccgacacgaatgccagtttatataacttgctaaacctgacagctttggactggtcgcttttgtccaagaaagaatgtctatcctatggaggccgactattagggaattcctgcaagtttattcctgacctggccctgatgagctttattttgttctttggcacgtacagcatgaccctgactctcaagaagtttaaattcagccgatatttcccgactaaggttagggcactggtggcagatttttcgatcgtgtttagcatactaatgttctgcggcatcgatgcttgtttcggactggagacccccaagttgcatgtgccctccgtgattaagccaactcggcctgatagaggatggttcgttgcccctttcgggaaaaatccttggtgggtctacccagcatcgatactgcccgcactactggtcactatactgatcttcatggaccagcagataacagcagtgatcgtgaaccggaaagagaataagcttaagaaggctgccggttatcatctggacttgttctgggtggggattctcatggctctgtgcagttttatgggcctgccatggtatgtggccgcaaccgtgatttctatcgcacacatcgattccctcaagatggaaacggagacctccgctccgggagagcagccacaatttctgggagttcgggagcaacgcgtcaccggcatcatagtttttatcctgacggggatcagcgtttttctggctccaatccttaagatactgggacttatcatcgtgaggaggctcctcgatttcatcttctctcaacacgatttggcctggatcgacaacatcctcccagaaaaagagaaaaaagagacagataaaaagagaaagcggaagaagggcgcacacgaggattgtgacgaggagccacagtttccccctccttcagtcattaaaatacctatggagagcgtgcagtccgacccacaaaacggaatacactgcattgctcggaaaagatctagctcatggtcatactcattgtag

SEQ ID NO: 208437 - DNA, 3414 bp, Artificial Sequence
  derived and/or modified sequence
atgaaagtgaaagaggagaaggctggggtaggcaagctagaccacacaaatcacaggcgtcggttcccggaccagaaggagtgtccccctatacatatcgggctgcctgtgccgacataccctcagcgcaagacagatcagaagggccacctgtcaggtctccagaaggtccattgggggctccgacctgaccaaccgcagcaggagttaacaggccctgggtccggcgcttcttctcaggactcctctatggatctaataagtcgaacccggtctcctgctgctgagcagctccaggacatcctgggcgaggaggatgaggctcctaacccgactctgtttaccgaaatggacactctccagcacgacggggaccagatggagtggaaagagtctgcccgttggattaaatttgaggagaaggtagaggagggtggagagcgctggtctaaaccacacgtgagtactctaagtttgcacagtctatttgagctgcgcacttgtttacagaccggcactgtactcctggatttagatagtggctcattgcctcaaatcatagatgacgtaattgagaagcagattgaggacggactgcttaggcccgagctgcgagaacgcgttagctatgtgctattgcgaaggcatcgccaccaaaccaagaagcccattcaccgctccctggccgacattgggaaaagcgtcagcactacgaacagatctcccgcaaggtcacccggtgcaggacccagcctgcaccatagcactgaagatctccgcatgagacaatcggctaattacggcagattgtgtcatgctcagagtcgatctatgaacgatatttcccttacacccaatacggatcaacgcaaaaataagttcatgaaaaagatacccaaggactctgaagcctccaacgttcttgtgggcgaggtcgactttctggaccaacctttcattgcattcgtgcgattgattcaatccgctatgctgggaggggtgaccgaagtgccagtccccacaagatttctgtttatcctcctcggaccctcaggaagagccaaaagttacaacgagattggtcgcgctatcgcgacactgatggtcgacgatctgtttagtgatgtggcatataaggccagaaaccgggaggacctgatcgcgggaatcgatgagttcctggatgaggtcatcgtactaccccctggagagtgggacccaaacatccgcattgagccgcctaagaaggttcccagcgcagacaaaaggaaaagtgtcttctccttagccgagctgggtcagatgaatggatcagtgggcggaggaggaggggctccgggaggcggaaacgggggaggcggtggagggggatccggaggaggagccggtagcggtggcgctggagggacctcctcaggcgacgacggcgaaatgcctgcgatgcacgaaattggagaggaacttatatggacaggtagattctttggaggtctgtgccttgacatcaaaaggaagctgccttggttcccatcagacttctatgacgggttccatatacagtccatttcggccattctgttcatctaccttggatgtatcacaaacgctattacctttggaggcctgctcggggatgccaccgacaattatcagggcgtcatggaatcctttctgggcaccgccatggcgggtagcctgttctgcctcttcagcggccagccactgatcatcttgtcatctactgggcctattctcatttttgagaaactgttattcgatttcagtaagggaaacgggcttgactacatggaatttcgactttggattggtctccacagcgccgttcagtgtctgattcttgtggctactgacgcatcgttcataatcaaatacataaccaggttcaccgaggaaggcttttcaactctcatatcatttatctttatctacgatgcgataaagaagatgataggcgctttcaaatactaccctattaacatggattttaaacctaactttatcaccacctataagtgcgagtgtgtggccccagatactgtgaacactactgttttcaatgccagcgcccctctcgccccagacactaatgccagcctctacaatttgctgaacctgactgcactggactggtcattgctgagtaaaaaagaatgtttatcatatggtggccgactgctgggtaattcttgtaagtttattccagacctggctctcatgagcttcattttgttcttcggcacctactcaatgaccctaactttgaaaaaatttaagttctcacgctatttccccacgaaggtcagggccctggtagcggacttttctattgtattctcaattctgatgttttgcggaatagatgcatgtttcggactcgagactcccaaactgcacgttccatctgtgatcaaacccacgaggccagacagaggctggttcgtggcaccctttggtaagaatccatggtgggtgtacccggcatcgattttgcccgcactgttagtgaccatccttatcttcatggatcagcagatcactgccgtgattgtgaacagaaaagagaacaaattgaaaaaagcagcaggctaccacctggacctgttctgggtgggaattctcatggctctgtgcagcttcatgggcctcccttggtacgttgcggctacggtaatttcaatcgctcatatagatagtctgaagatggagaccgagacatcggcaccaggggagcaaccacaatttctcggtgtacgagagcagagggttaccggtattatagtttttatactaactggtatctcagtgtttttagccccaatactgaaatgtatccccctgcccgtcctgtatggcgtgttcctctatatgggagtagcttctcttaacggaattcagatgggcactggtggctccgaattcaaaatccagaaaaagctcacacccttttgggagcgctgtaaattattcctaatgcccgcaaaacatcaacctgaccacgcgttcttgagacatgtgcctctccgtcgaatccatctattcacgctggtgcaaatcctgtgtttggccgtgttgtggatactgaaatctaccgtagctgcgataatttttcctgtgatgattctcgggcttattatcgtccggagactgcttgactttatcttcagccagcacgacctggcctggatcgacaatatcttaccggagaaagaaaagaaggaaaccgataagaaaaggaaaagaaagaagggagctcacgaggactgtgacgaggagcctcagttccccccacccagcgtcatcaaaatccccatggagagcgtacaatctgacccacaaaatggaatccactgtatcgccaggaagcgctcaagctcatggtcttatagtttgtag

SEQ ID NO: 208438 - DNA, 2982 bp, Artificial Sequence
  derived and/or modified sequence
atgaaggttaaagaggagaaagcaggagttggaaaactggatcacacaaatcatagacggaggtttcccgaccagaaggagtgccccccaatacacataggtctccccgtgccaacatatcctcagcgcaagaccgaccaaaagggccacctgagtggcctgcagaaagttcactgggggctgcgccctgaccaaccccagcaggagctgacaggtcctgggagtggggctagtagccaggatagttcaatggatctgatctccaggactcgaagtcctgctgccgaacagcttcaggacattcttggagaggaggacgaagcaccaaaccctacccttttcacagaaatggacaccttgcaacatgatggggatcagatggagtggaaagaaagtgcaagatggattaaatttgaagagaaggtggaggaggggggagagagatggtccaagcctcatgtgagcacactgtccctgcactccttgttcgaactgaggacttgtctgcagactgggaccgtcctcctagatctggactctggttccctcccccagatcatcgatgacgtgatagaaaaacagatcgaggatggactcctgaggcctgagctccgagagcgcgtttcctatgtactcctgaggcggcaccgacaccagaccaagaagcccatccatcgctctctggccgacattggaaaatcagtgagtacaaccaaccggagtcctgcccgttcacccggagcaggaccttctttgcaccatagcacagaggatctgaggatgcgtcagagtgcgaactacgggcgattgtgccacgctcaaagccggtcgatgaacgatatctcccttactccaaacacagaccagcggaagaacaagtttatgaaaaaaattcccaaagacagcgaggcctccaatgtgctggttggtgaggtggacttcctcgatcagccgttcattgcctttgtgcggttgattcagagtgccatgctgggcggagtgaccgaagtgccggtgccgacacggtttctgtttattctactgggtccatcaggacgagctaagtcttataatgagatcggcagggccattgccactctcatggttgatgacttattctccgacgttgcctataaagccaggaatcgcgaggatttaatcgctgggattgacgagttcctggacgaagtgatcgtccttcctccaggggagtgggatcccaatatcaggatcgagcctcctaaaaaagtgcctagtgccgataaaaggaaaagcgtcttcagcctggctgagcttggtcaaatgaacggaagcgtgggcggaggtggcggagcgcctgggggtggcaatggcggtggtggcggaggcggttctggcggaggcgcaggaagcggcggagccggaggaacctcctctggagatgatggcgaaatgcccgctatgcatgagatcggtgaagagctcatttggaccggcaggttttttgggggattatgcctagatatcaagaggaagctgccatggttccccagtgatttctacgatggctttcacattcagagtatatccgccatcctgttcatctacctcgggtgcattacgaacgcaattacctttggaggtttgctcggagacgccactgataattatcaaggcgtcatggagtcattcttaggaacagctatggcaggatcactgttttgcctcttttccgggcagccgctcatcatactgtcttctaccggtcccatcctgatattcgaaaagctgctgtttgacttcagtaaggggaacggacttgattatatggagtttcgactgtggattgggctccactccgccgtgcagtgcttaattctggtcgccacagatgccagtttcatcatcaaatatatcaccagatttactgaggaaggcttcagcactctgatctctttcatcttcatctatgacgccattaagaagatgattggcgcttttaaatattacccgatcaatatggattttaagcctaacttcatcactacctataagtgcgagtgtgtggcccctgacacagtgaatactactgtctttaatgcatctgctcctctggctccagataccaatgctagcttatacaatctcttgaacctgaccgctctcgactggtcgctgctgtcaaaaaaagagtgtctcagttatggcggtcggttgctcgggaactcctgcaagtttatcccagacttagctcttatgtctttcatcctgttctttggcacgtacagcatgaccctgaccctaaagaaattcaaattctcccgctatttccctacaaaggtacgagccctggtcgctgattttagtattgttttctccatccttatgttctgcggaattgacgcgtgctttggcctggaaacgccaaaactgcacgtgccgagcgtgattaagccaacacgacccgaccgcggttggtttgtcgccccttttgggaaaaatccttggtgggtgtaccccgcttctattctacccgcactcctggtcaccatccttattttcatggatcaacagataactgccgtaatagttaatcgcaaagaaaacaaactcaagggcaccgagtcaaacaggcaccataggctccaccccgatgggaacttgtgcctgccaggctcccacccgaaagtgtacccgccagccggagctgtaagatcccttccactccatggaagaggtctgccagagtggcacccagtgctgggcaccctacaggccctgcccgacgcttcccaggcacccgctggcccatgcctgcctgccgcaagggctgcagcacctgaccctccgcttcaccctggggctgaccccctgccaggaggagcattggacccccagatccatggcggatgccatcacttgccaggccacgacccaggtccacatcacagatccaaggcatctggatttcatctgttccctgcacgacctgggctggattag

SEQ ID NO: 208439 - DNA, 2895 bp, Artificial Sequence
  derived and/or modified sequence
atgaaggtgaaggaggagaaagccggagtcggcaaattagaccacacaaaccatagacgcagattcccggaccaaaaagagtgtcccccaatccacattgggctgccagttcctacctaccctcagcggaagacggatcagaagggccacctgtctggactccagaaagttcactggggactccgtcctgatcagccacagcaggagctcaccggacccggatccggcgcatctagtcaggacagcagcatggatttgattagtcggacccggtcaccggcagcagagcagctacaggacatcctgggagaagaggatgaagcccctaaccctactctgtttaccgagatggacaccctgcaacacgacggcgaccagatggagtggaaagaaagcgccagatggattaagttcgaggagaaggtggaggagggcggagagcggtggtcaaagccgcatgtctctacattgtcactgcacagccttttcgagctgcgaacatgcctccagaccggtactgtgctgcttgatctggacagtgggagtctcccgcaaataattgatgatgtaatagaaaaacaaattgaggatggattgctcagacccgagttgagggaaagggtttcttatgtcctgcttaggcgccataggcatcagacaaagaaacctatccaccgcagtctggctgacatcggcaagtccgtgtcgactactaataggagcccggcacgctcacccggagcaggcccttccctccaccattctacagaagatctacgtatgcggcaatcagcgaactacggtcgcctgtgccacgcgcagtcaaggtcaatgaacgatatctcgctaactcctaatacagatcagcgtaagaataaattcatgaaaaaaatccctaaagacagcgaagcaagcaatgtgctggtgggagaagtcgattttttagaccagccattcatagctttcgttaggctcattcagagtgccatgcttggaggcgtgactgaggtgcctgttcctacaagatttctgttcatacttctgggtcccagtggccgagccaaatcttacaatgaaataggacgcgcaatagccacacttatggtggacgacttgtttagcgatgtggcatataaagctagaaacagggaggacctgattgcaggtatagatgagttcctggacgaagtgatcgtcctaccgccaggcgaatgggatccaaatattagaatcgagcccccaaagaaagtgcctagcgcagacaagcggaaatccgtgttttcacttgccgagctcggacagatgaatgggtcagtcgggggtgggggtggcgcaccagggggtggaaatggagggggtggaggaggcggttcaggaggcggagcaggtagcggaggagctgggggaacatcatcaggagatgacggggaaatgcccgctatgcatgaaattggcgaggagctaatctggacagggcgattctttggcggactgtgcctcgacatcaagcggaaacttccttggtttccgtcagatttctatgacggattccacattcagtcgattagcgccatcctgttcatttatctcggttgcataaccaatgctatcacctttggcggtttgctaggtgatgccactgataactaccagggcgtaatggaaagttttctcggaaccgctatggcaggctcactcttttgcctttttagcgggcagcctttaattattttatcttctacggggccaatactgatcttcgagaaacttctcttcgatttcagtaaaggaaacgggctggactacatggaattccggttgtggataggcctgcactcagccgtgcagtgcttgatcctggttgctactgatgcctccttcatcataaaatatatcacccgctttaccgaagaagggttcagcaccctgatttccttcatcttcatttacgacgctatcaagaaaatgataggggctttcaagtattatcccatcaatatggacttcaagcctaatttcataaccacctacaagtgtgagtgcgtggctcctgacacagtgaataccacggtctttaacgcttccgctccactagccccagacacgaacgcttccctctataatctgctcaacttaactgcccttgactggagcctcctcagcaaaaaggagtgtttatcttacgggggtaggctgttggggaactcctgtaagttcattcccgacttagccttgatgagttttatccttttttttggcacctacagtatgacactgacacttaaaaaatttaaattctcaaggtactttcccacaaaaccgacaagacctgatcgcggatggtttgtggccccatttgggaagaacccatggtgggtttacccagcttcaatcctgccagccctgcttgtcactatcctgatcttcatggaccaacagatcactgccgtcattgtgaacaggaaagaaaacaaattgaaaggtacggagtcgaatcggcatcaccgtttgcaccccgatggcaacctctgcctaccaggctctcaccccaaggtttatcctcctgcaggcgcagtcagaagcctccctctgcacgggagaggactgcctgaatggcaccctgtgctgggtactctgcaggctcttcccgatgcgtcacaagcccctgctgggccatgtctcccggctgcccgtgcagctgctcctgaccctccactgcatcctggagcagatccactgccaggaggagctctggacccccagatccatggtggttgtcaccatcttcccggtcatgtgtccctccatcacagaagctgggctagctcctcgttcgaggggttctggatcagtagctttccttctaccacatggcctggactcaccacttcgtag

SEQ ID NO: 208440 - DNA, 3429 bp, Artificial Sequence
  derived and/or modified sequence
atgaaggtgaaggaggagaaagctggcgtaggaaagctggaccacactaaccatcggaggcgtttccccgaccaaaaggaatgccctcccatccacatagggttaccagttcctacttatccacagcgaaagaccgatcagaagggacatctgagcggactgcagaaagtacattggggcctccggcctgaccagcctcagcaggaactaacagggcctggtagcggggcatcatcacaagatagcagcatggacctcatcagcaggacccgctctcctgccgctgaacagctgcaagatattttgggggaggaggacgaggcccctaaccctactctgtttactgaaatggatacgctgcagcatgatggggatcaaatggaatggaaagagtcagcccgatggattaagttcgaggaaaaagtagaggaaggcggagaaagatggtccaagccacacgtgtccaccttatccctacacagcctgtttgaactgagaacctgtctgcagacaggaactgtgctgctggacctagactcgggctctctgccccaaataattgatgacgtgattgaaaaacaaatcgaagacggcttacttagaccagagctccgcgagcgggtgtcatacgtgctcctgcgcaggcacagacatcagacgaagaagccaattcatcggtcattggccgatatcggaaagtccgtgtctactaccaatcggagccccgcacgctctccaggcgcaggcccatccttacaccattcaaccgaggacctgcgcatgcggcagtcagctaattacggtcgcttatgtcacgctcaatcccgaagtatgaacgatatctcattgactcccaacacggatcagagaaagaataaattcatgaagaaaatccccaaagactcagaggcatccaatgtgcttgtgggcgaagtggactttctggaccagccctttatcgcatttgtgcggctgatacagtctgcgatgcttgggggagtgaccgaggtgcctgttcctaccaggtttctttttattttgctcggtccctctggtcgggctaagtcatacaatgagattgggagggccatcgctacgctcatggttgacgacctattttcagacgtcgcttataaagcacgcaatagagaagacttgatcgccggtatcgacgaatttttggatgaagttatcgtactccccccaggggagtgggacccgaacatacgcatcgaacccccaaaaaaggttccatccgccgataaaagaaaaagtgtgttttcactggcagaactgggtcaaatgaacggcagcgtcggaggtggaggtggggcacccggtggaggaaatggaggcggtggaggtggagggagcgggggtggggctgggtccggcggagcaggaggcacttcgagtggggatgacggcgaaatgcccgcaatgcacgagatcggggaagaattgatttggactggaaggtttttcggtggcctctgcttggatataaagcgtaagctgccatggttcccctctgacttctacgacggatttcacatccagagtatttcagctattctgttcatatacctaggctgtatcactaatgcaatcactttcggaggcttgctgggcgacgccaccgacaactatcagggcgtgatggagagctttctggggactgccatggcgggttcgcttttttgtctctttagcggtcaacccctgattatactcagctctacaggccctatcctgatcttcgaaaagcttcttttcgacttctctaaagggaatggactcgactatatggagttcagactctggatcggccttcattctgccgttcagtgtctaatcctcgtggccacagatgcaagcttcatcattaagtacattacacgcttcacagaagaagggttctctacactgatcagctttatcttcatatatgacgctataaagaagatgatcggagccttcaagtactacccgatcaacatggacttcaagcccaacttcattaccacatataagtgcgaatgtgtcgccccagacacagtgaacacgacggtcttcaacgcttcagcccctcttgcacctgacaccaacgcatccctgtataacctattaaaccttacagctctggactggtcattgctgagcaagaaggagtgcctcagttacggaggccgattattggggaactcgtgcaaatttattccggacctcgccctcatgagctttatcctgttttttggtacctactccatgaccctcactctcaagaagttcaagttttctaggtactttcctaccaaagtcagggctctggtagcagacttctccatagtcttctctatccttatgttctgcggcatcgatgcctgctttggcctggagactccgaagctgcacgtaccatcagtgattaagcctactagacctgacagaggttggttcgtcgcgccatttggtaaaaacccttggtgggtgtatcctgcaagtatcctgccggcactgttagttaccatccttatcttcatggaccagcagattacagcagttatagtgaatcgtaaggagaacaaacttaagaaagctgccggataccacctcgatctcttttgggtaggcattctgatggcactttgctcctttatggggttgccttggtacgtggctgcaacagtaattagcattgcacatatcgacagcttgaaaatggaaactgaaactagtgcccctggcgagcagccgcagttcctgggcgtaagagagcagagggtgactggtattattgtcttcatcctgactggcattagtgtgtttctggctcccatcctgaagtgcatccccctccctgttctgtacggcgtttttctgtatatgggagtggcgagtcttaatggaatccagatgggtaccggagggtccgagtttaaaattcagaaaaagctaaccccattctgggagagatgtaagctgttcctgatgcccgctaagcaccagccagaccatgccttcctgagacacgtcccattgcgtcgcattcacctctttacactcgttcagattctctgcctggccgtgctctggattttgaagtctactgtcgctgcaattatctttcctgtgatgtcactgtccaccaccgatctgggactgatcattgtccgcagactgctggactttatcttctctcaacatgatctggcctggattgataatattctacccgagaaagaaaaaaaagagaccgataaaaagcgtaaaaggaaaaaaggagcccacgaggactgcgacgaagagccacaattcccacccccttccgttatcaagatccccatggaatctgtccagtctgaccctcagaatggaatccactgtatagcaagaaaaaggtcatcttcttggtcctactccctgtag

SEQ ID NO: 208441 - DNA, 6104 bp, Artificial Sequence
  derived and/or modified sequence
accctaaaggaattggagtcagggcccaggagccacaggccactgcactggggcatcccaggatttggaattcagctgtgagctcatgagctgatggatgtttccaggagtaccctgaagaccacccaggtgggagtgtaagataaccttccagataaagagttgctgctaccaaaagagtgctgacaccatcacagtatgttcccttctcaaccctggacatggttcagaaacagctaaagcagacaagaatctggggcagccaatattgtaccacctgccaaagcttggcacaaacaatctggaagccaaaaattgcacatactgtggaacagagcaagtggttctggcctccctgggatttggatcctggtttccagagctaagaacacaaagtcatgaaggtgaaggaggagaaggctggggtaggaaagctggaccacactaaccacaggaggagatttccggatcagaaagaatgccctcctatccacattgggcttccagtacccacttaccctcaaagaaaaactgaccagaagggacatctttcaggcctgcaaaaagtccactggggcctgcggccagaccagccacagcaggaactgactggcccagggagtggggcaagcagccaggacagcagcatggatcttatcagcaggactcggtccccagctgctgagcagctccaggacatcctgggggaggaagatgaggctcccaaccccaccctctttacagagatggatactctgcagcatgacggagaccagatggagtggaaggagtcagccaggtggataaagtttgaagaaaaggtagaggaaggcggcgaacgctggagcaagccccacgtgtccacactatccctgcacagcctcttcgagctccgtacctgcctgcagacggggacggtgctgctggatttggacagtggctccttaccacagatcatagatgatgtcattgagaagcagattgaggatggtctcctgcggccagagctccgggagagggtcagttacgtcctcctgaggaggcaccgccaccaaaccaagaagcccatccaccgctccttagctgacattgggaagtcagtctccaccacaaatcgcagtcctgcccggagccctggtgctggcccgagtctacaccactccacggaagacctgcggatgcggcagagtgcaaattacggacgtctgtgtcatgcccagagcagaagcatgaatgacatttctctcaccccaaacacagaccagcggaaaaacaaattcatgaagaagatccccaaggactcagaagcgtccaacgtgctcgtgggcgaggtggacttcctagaccagccattcatcgcgttcgtgcgcctcatccagtcggccatgctgggaggagtgaccgaggtgcctgtccccaccagatttctgtttatactactgggaccttctgggagagcaaaatcctacaatgaaattggccgtgccattgcaaccctcatggtagatgatctcttcagtgacgtggcctacaaagcccgcaatcgggaagatctgatcgcaggaattgatgaatttctggatgaggtcatcgtccttcctcctggagaatgggacccaaatatccggattgagccccccaagaaggtgccctctgctgacaagaggaaatctgtgttctccctagcagagctgggccagatgaatggctctgtgggaggaggcggcggagctcctggaggaggcaatggaggtggtggtggtggtggcagtggcggcggggctggcagtggcggggccggcggaacaagcagcggggatgatggagagatgccagccatgcatgaaatcggggaggaacttatctggacaggaaggttcttcggtggcctgtgtctggatatcaagaggaagttgccctggttcccaagtgacttctatgatggcttccacattcagtccatctctgccatcctattcatctacctcggctgtatcaccaacgcgatcacctttggtgggcttctgggggatgccaccgacaattatcagggagtgatggagagcttcctgggcactgccatggctggctccttgttctgcctcttctcgggacagcctctcatcattctcagcagcacggggcccatcctcatctttgagaagctcctcttcgacttcagcaaaggcaatggcctggactacatggagttccgcctctggattggcctacactcagctgtccagtgccttatcctagtggccacagatgccagctttatcatcaaatatatcacccgcttcaccgaggagggcttctccacccttatcagcttcatcttcatctacgatgccatcaagaagatgatcggtgccttcaagtactaccctatcaatatggacttcaagccaaacttcatcactacctacaagtgcgagtgtgtcgcccctgacacagtgaatacaaccgtgttcaatgcttcagccccattggcaccagacaccaacgcttctctgtacaacctccttaacctcacagcgttggactggtccctgctgagcaagaaggagtgtctgagctacggcgggcgcctgcttgggaattcctgcaagtttatcccagacctggcgctcatgtccttcatccttttctttgggacatactccatgaccctgaccctgaagaagttcaaattcagccgctattttcctaccaaggtccgggccctggtggctgacttttccattgttttctccatcctgatgttctgtggaatcgatgcctgttttggcctagaaactcccaagctgcatgtgcccagtgtcatcaagccaacgcggcctgaccgaggctggttcgtggccccctttgggaagaacccgtggtgggtatacccagcaagcatcctgcccgccctgctggtgaccatcctgatcttcatggaccagcagatcactgccgtcattgtcaaccggaaggagaacaaactgaagaaggctgccggctaccatctggacctgttctgggtgggcatcctcatggctttgtgctcctttatggggctcccctggtacgtggctgccacggtcatctccatcgcccacatcgacagcctcaagatggagacagagaccagtgcccctggggagcagccccagtttctgggagtcagggaacagagagtaaccggcatcatcgtcttcatcctgacgggaatctctgtcttcctggctcccatcctaaagatcctgggcctcatcatcgttcgaaggcttctggatttcatcttttcccagcacgacctggcctggattgacaacatcctcccagagaaggaaaaaaaggagacagacaagaagaggaagagaaaaaaaggggcccacgaggactgtgatgaggagccccagttccctcctccctcggttataaagattcccatggaaagtgtccaatcagatccccaaaacggtatccactgcattgccagaaaaagatcttccagttggagttactcactctgattcttccttcagtgacacagaacttgaccgaagcatcaccttgcacttcaaaatatcctgtccagcttcacctgctttcagctactcacggaacccagtgttcatggtgccacaggtgaagatagagatggagtcagactatgacttcacagacatggataaataccgaagagaaactgacagtgagaccaccctctaggatgaagcagcttctcccagatgggagatggagagcctggcttagtcttcactgggagggtcttaacttctctgtgcctgtttccttctttatcaaacagagggagtccgtctgcctatagaaaactggagatctattgatgaaaagtattgcttagatgcaaagctctcccctttgtagtaattaaaatacctaaagctaaatattatattttattttaaaatgcagttcagcatagaaattctaacatttctttggaaataaaaaaatgcttgtttccccaaaccatagctaagataaaggggcaatagtcaattcatatttaaaacaaatatcaatttaaaattgtttaaaggttagatttaaatatagatgttctcaaacaaacttgtaatatacttttatgtcactagaccatctttggaatatttggcaattctgcatattaagaaatgctgaaaaggtcctatcttttctccctgtcacatccaatttcctaagggttatatgaaaagtttgaaccagccgggcacagtggcacacgcctgtaatcctagcactttgggaggccgaggcaggtgaattgcctgagctcaggagttcgagaccagcctaggcaacacggtgaaaccccgtctctactaaactacaaaaaattagccgggtgtggtggcatgcacctgtagtcccagctattcgggaggctgaggcaggagaatcgcttgaacccaggaggcagaagttgcagtgagctgagatggcaccactgcactccagcctaggcaacagagtgagactccgtatccaaacaaaaaaaaagtttgaaccatctgcattatgggccttgctccagaagtgtgactggggctttcccagattgaaaagccagttccaaaactctgttaatgaaagaaccaatgcatctgagtggataaatgtttctaaaataaaatagttcttgttaaagtgaaatttgaaaccacatgttaaatcaaaatgatcctttaaattagtatcactggtttttcatacctggaatcacatttcatgatacatttgggtgggtcctccctgcaaattttcaatgtttattcccaaagtcaaactcccattcatgtgaacaatacaggttagacagaggtaaggtcacattttacattacaactttgcaatattaatcaacctagtactttaaaggaatgattgaaaactatttgggaagataaaaaccagtttcaatgaagcaaacctattcctcatgaaacttaagatcagtcattttatcttcaatccacatttaatgaacaccaaccatgttgatttaatgcctactatgaccctgacagccacagtgcatctgacacttactttctccaaaacaactatgatttaaaccttgagtaaatcacttgaaccttgaggttagagttactatatttgctcaagatgacaaatgcaggtgctttcttttttaaagaaaaatgacactagatcattaacaccttgagtataggacaggtaattgcctctgtaattcccagcgtctagtgtagtgcctggtccatagaaagctctcaataagtgtttgattacatttaatctcagagctcccttccaagggatactgccaagaggtaaagctccaaacctctactcttactgagagcagaatttcttagaatttccagaaccatctcctatgcttaagtataaattcttgtcagacacagtggctcacacctgtaatcccgctacttgggaggcagaggtggggggaatcagcagaggtcaggaggtcaagaccagcctgggcaacatagtgagacccatctctaaacaaatgtttaaaaattagctaggcatgctggcacacacctgtagtcccagccatttcagaggctgatgcaggaggatcgtttaagtccaggagttcaaggctgcagtgagctataatcatgccactgcactccagccagggagacagctggaatccatgtcttataaacaataataattaatttttaaaaaaagtatttatcatccacaccaatcctggggaagctaacaatccacccttaacacatttcagttttaaaacctggctgatctggaatagaactttgtccaaattaaattgtagaaatgctatggattcaagagtaaacctgcttgattaatcaaacaagctggaaaactactgttaatttctttgttgtaaattgatcactgtaattttaccttacatgtcatttatattttgtatatacatgaacattttaatttccatagcttttaacaggttgacataatacttctccatgcagtaagtcagtcattttttccacttgtaactgtaattcaataaaatttaatcctgtctggtc

SEQ ID NO: 208442 - DNA, 3449 bp, Artificial Sequence
  derived and/or modified sequence
tcatgaaggtgaaggaggagaaggctggggtaggaaagctggaccacactaaccacaggaggagatttccggatcagaaagaatgccctcctatccacattgggcttccagtacccacttaccctcaaagaaaaactgaccagaagggacatctttcaggcctgcaaaaagtccactggggcctgcggccagaccagccacagcaggaactgactggcccagggagtggggcaagcagccaggacagcagcatggatcttatcagcaggactcggtccccagctgctgagcagctccaggacatcctgggggaggaagatgaggctcccaaccccaccctctttacagagatggatactctgcagcatgacggagaccagatggagtggaaggagtcagccaggtggataaagtttgaagaaaaggtagaggaaggcggcgaacgctggagcaagccccacgtgtccacactatccctgcacagcctcttcgagctccgtacctgcctgcagacggggacggtgctgctggatttggacagtggctccttaccacagatcatagatgatgtcattgagaagcagattgaggatggtctcctgcggccagagctccgggagagggtcagttacgtcctcctgaggaggcaccgccaccaaaccaagaagcccatccaccgctccttagctgacattgggaagtcagtctccaccacaaatcgcagtcctgcccggagccctggtgctggcccgagtctacaccactccacggaagacctgcggatgcggcagagtgcaaattacggacgtctgtgtcatgcccagagcagaagcatgaatgacatttctctcaccccaaacacagaccagcggaaaaacaaattcatgaagaagatccccaaggactcagaagcgtccaacgtgctcgtgggcgaggtggacttcctagaccagccattcatcgcgttcgtgcgcctcatccagtcggccatgctgggaggagtgaccgaggtgcctgtccccaccagatttctgtttatactactgggaccttctgggagagcaaaatcctacaatgaaattggccgtgccattgcaaccctcatggtagatgatctcttcagtgacgtggcctacaaagcccgcaatcgggaagatctgatcgcaggaattgatgaatttctggatgaggtcatcgtccttcctcctggagaatgggacccaaatatccggattgagccccccaagaaggtgccctctgctgacaagaggaaatctgtgttctccctagcagagctgggccagatgaatggctctgtgggaggaggcggcggagctcctggaggaggcaatggaggtggtggtggtggtggcagtggcggcggggctggcagtggcggggccggcggaacaagcagcggggatgatggagagatgccagccatgcatgaaatcggggaggaacttatctggacaggaaggttcttcggtggcctgtgtctggatatcaagaggaagttgccctggttcccaagtgacttctatgatggcttccacattcagtccatctctgccatcctattcatctacctcggctgtatcaccaacgcgatcacctttggtgggcttctgggggatgccaccgacaattatcagggagtgatggagagcttcctgggcactgccatggctggctccttgttctgcctcttctcgggacagcctctcatcattctcagcagcacggggcccatcctcatctttgagaagctcctcttcgacttcagcaaaggcaatggcctggactacatggagttccgcctctggattggcctacactcagctgtccagtgccttatcctagtggccacagatgccagctttatcatcaaatatatcacccgcttcaccgaggagggcttctccacccttatcagcttcatcttcatctacgatgccatcaagaagatgatcggtgccttcaagtactaccctatcaatatggacttcaagccaaacttcatcactacctacaagtgcgagtgtgtcgcccctgacacagtgaatacaaccgtgttcaatgcttcagccccattggcaccagacaccaacgcttctctgtacaacctccttaacctcacagcgttggactggtccctgctgagcaagaaggagtgtctgagctacggcgggcgcctgcttgggaattcctgcaagtttatcccagacctggcgctcatgtccttcatccttttctttgggacatactccatgaccctgaccctgaagaagttcaaattcagccgctattttcctaccaaggtccgggccctggtggctgacttttccattgttttctccatcctgatgttctgtggaatcgatgcctgttttggcctagaaactcccaagctgcatgtgcccagtgtcatcaagccaacgcggcctgaccgaggctggttcgtggccccctttgggaagaacccgtggtgggtatacccagcaagcatcctgcccgccctgctggtgaccatcctgatcttcatggaccagcagatcactgccgtcattgtcaaccggaaggagaacaaactgaagaaggctgccggctaccatctggacctgttctgggtgggcatcctcatggctttgtgctcctttatggggctcccctggtacgtggctgccacggtcatctccatcgcccacatcgacagcctcaagatggagacagagaccagtgcccctggggagcagccccagtttctgggagtcagggaacagagagtaaccggcatcatcgtcttcatcctgacgggaatctctgtcttcctggctcccatcctaaagtgtatccccctgccggtgctgtacggagtcttcctctacatgggcgtggcctccctgaatggcatccagatggggaccggagggtcagaattcaaaatccagaagaagctgactccattctgggaacgctgcaagctcttcctgatgccagccaagcaccagccggaccatgccttcctgcggcacgtgccgctgcgccggatccacctcttcaccctggtgcagatcctctgcctggcggtgctctggatcctcaaatccacggtggctgccatcatcttcccggtcatgatcctgggcctcatcatcgttcgaaggcttctggatttcatcttttcccagcacgacctggcctggattgacaacatcctcccagagaaggaaaaaaaggagacagacaagaagaggaagagaaaaaaaggggcccacgaggactgtgatgaggagccccagttccctcctccctcggttataaagattcccatggaaagtgtccaatcagatccccaaaacggtatccactgcattgccagaaaaagatcttccagttggagttactcactctgattcttccttcagtgacacagaacttgaccgaag

SEQ ID NO: 208443 - DNA, 3123 bp, Artificial Sequence
  derived and/or modified sequence
atgaaggtgaaggaggagaaggctggggtaggaaagctggaccacactaaccacaggaggagatttccggatcagaaagaatgccctcctatccacattgggcttccagtacccacttaccctcaaagaaaaactgaccagaagggacatctttcaggcctgcaaaaagtccactggggcctgcggccagaccagccacagcaggaactgactggcccagggagtggggcaagcagccaggacagcagcatggatcttatcagcaggactcggtccccagctgctgagcagctccaggacatcctgggggaggaagatgaggctcccaaccccaccctctttacagagatggatactctgcagcatgacggagaccagatggagtggaaggagtcagccaggtggataaagtttgaagaaaaggtagaggaaggcggcgaacgctggagcaagccccacgtgtccacactatccctgcacagcctcttcgagctccgtacctgcctgcagacggggacggtgctgctggatttggacagtggctccttaccacagatcatagatgatgtcattgagaagcagattgaggatggtctcctgcggccagagctccgggagagggtcagttacgtcctcctgaggaggcaccgccaccaaaccaagaagcccatccaccgctccttagctgacattgggaagtcagtctccaccacaaatcgcagtcctgcccggagccctggtgctggcccgagtctacaccactccacggaagacctgcggatgcggcagagtgcaaattacggacgtctgtgtcatgcccagagcagaagcatgaatgacatttctctcaccccaaacacagaccagcggaaaaacaaattcatgaagaagatccccaaggactcagaagcgtccaacgtgctcgtgggcgaggtggacttcctagaccagccattcatcgcgttcgtgcgcctcatccagtcggccatgctgggaggagtgaccgaggtgcctgtccccaccagatttctgtttatactactgggaccttctgggagagcaaaatcctacaatgaaattggccgtgccattgcaaccctcatggtagatgatctcttcagtgacgtggcctacaaagcccgcaatcgggaagatctgatcgcaggaattgatgaatttctggatgaggtcatcgtccttcctcctggagaatgggacccaaatatccggattgagccccccaagaaggtgccctctgctgacaagaggaaatctgtgttctccctagcagagctgggccagatgaatggctctgtgggaggaggcggcggagctcctggaggaggcaatggaggtggtggtggtggtggcagtggcggcggggctggcagtggcggggccggcggaacaagcagcggggatgatggagagatgccagccatgcatgaaatcggggaggaacttatctggacaggaaggttcttcggtggcctgtgtctggatatcaagaggaagttgccctggttcccaagtgacttctatgatggcttccacattcagtccatctctgccatcctattcatctacctcggctgtatcaccaacgcgatcacctttggtgggcttctgggggatgccaccgacaattatcagggagtgatggagagcttcctgggcactgccatggctggctccttgttctgcctcttctcgggacagcctctcatcattctcagcagcacggggcccatcctcatctttgagaagctcctcttcgacttcagcaaaggcaatggcctggactacatggagttccgcctctggattggcctacactcagctgtccagtgccttatcctagtggccacagatgccagctttatcatcaaatatatcacccgcttcaccgaggagggcttctccacccttatcagcttcatcttcatctacgatgccatcaagaagatgatcggtgccttcaagtactaccctatcaatatggacttcaagccaaacttcatcactacctacaagtgcgagtgtgtcgcccctgacacagtgaatacaaccgtgttcaatgcttcagccccattggcaccagacaccaacgcttctctgtacaacctccttaacctcacagcgttggactggtccctgctgagcaagaaggagtgtctgagctacggcgggcgcctgcttgggaattcctgcaagtttatcccagacctggcgctcatgtccttcatccttttctttgggacatactccatgaccctgaccctgaagaagttcaaattcagccgctattttcctaccaaggtccgggccctggtggctgacttttccattgttttctccatcctgatgttctgtggaatcgatgcctgttttggcctagaaactcccaagctgcatgtgcccagtgtcatcaagccaacgcggcctgaccgaggctggttcgtggccccctttgggaagaacccgtggtgggtatacccagcaagcatcctgcccgccctgctggtgaccatcctgatcttcatggaccagcagatcactgccgtcattgtcaaccggaaggagaacaaactgaagaaggctgccggctaccatctggacctgttctgggtgggcatcctcatggctttgtgctcctttatggggctcccctggtacgtggctgccacggtcatctccatcgcccacatcgacagcctcaagatggagacagagaccagtgcccctggggagcagccccagtttctgggagtcagggaacagagagtaaccggcatcatcgtcttcatcctgacgggaatctctgtcttcctggctcccatcctaaagatcctgggcctcatcatcgttcgaaggcttctggatttcatcttttcccagcacgacctggcctggattgacaacatcctcccagagaaggaaaaaaaggagacagacaagaagaggaagagaaaaaaaggggcccacgaggactgtgatgaggagccccagttccctcctccctcggttataaagattcccatggaaagtgtccaatcagatccccaaaacggtatccactgcattgccagaaaaagatcttccagttggagttactcactctga

SEQ ID NO: 208444 - DNA, 3814 bp, Artificial Sequence
  derived and/or modified sequence
ccaccctaaaggaattggagtcagggcccaggagccacaggccactgcactggggcatcccaggatttggaattcagctgtgagctcatgagctgatggatgtttccaggagtaccctgaagaccacccaggtgggagtgtaagataaccttccagataaagagttgctgctaccaaaagagtgctgacaccatcacagtatgttcccttctcaaccctggacatggttcagaaacagctaaagcagacaagaatctggggcagccaatattgtaccacctgccaaagcttggcacaaacaatctggaagccaaaaattgcacatactgtggaacagagcaagtggttctggcctccctgggatttggatcctggtttccagagctaagaacacaaagtcatgaaggtgaaggaggagaaggctggggtaggaaagctggaccacactaaccacaggaggagatttccggatcagaaagaatgccctcctatccacattgggcttccagtacccacttaccctcaaagaaaaactgaccagaagggacatctttcaggcctgcaaaaagtccactggggcctgcggccagaccagccacagcaggaactgactggcccagggagtggggcaagcagccaggacagcagcatggatcttatcagcaggactcggtccccagctgctgagcagctccaggacatcctgggggaggaagatgaggctcccaaccccaccctctttacagagatggatactctgcagcatgacggagaccagatggagtggaaggagtcagccaggtggataaagtttgaagaaaaggtagaggaaggcggcgaacgctggagcaagccccacgtgtccacactatccctgcacagcctcttcgagctccgtacctgcctgcagacggggacggtgctgctggatttggacagtggctccttaccacagatcatagatgatgtcattgagaagcagattgaggatggtctcctgcggccagagctccgggagagggtcagttacgtcctcctgaggaggcaccgccaccaaaccaagaagcccatccaccgctccttagctgacattgggaagtcagtctccaccacaaatcgcagtcctgcccggagccctggtgctggcccgagtctacaccactccacggaagacctgcggatgcggcagagtgcaaattacggacgtctgtgtcatgcccagagcagaagcatgaatgacatttctctcaccccaaacacagaccagcggaaaaacaaattcatgaagaagatccccaaggactcagaagcgtccaacgtgctcgtgggcgaggtggacttcctagaccagccattcatcgcgttcgtgcgcctcatccagtcggccatgctgggaggagtgaccgaggtgcctgtccccaccagatttctgtttatactactgggaccttctgggagagcaaaatcctacaatgaaattggccgtgccattgcaaccctcatggtagatgatctcttcagtgacgtggcctacaaagcccgcaatcgggaagatctgatcgcaggaattgatgaatttctggatgaggtcatcgtccttcctcctggagaatgggacccaaatatccggattgagccccccaagaaggtgccctctgctgacaagaggaaatctgtgttctccctagcagagctgggccagatgaatggctctgtgggaggaggcggcggagctcctggaggaggcaatggaggtggtggtggtggtggcagtggcggcggggctggcagtggcggggccggcggaacaagcagcggggatgatggagagatgccagccatgcatgaaatcggggaggaacttatctggacaggaaggttcttcggtggcctgtgtctggatatcaagaggaagttgccctggttcccaagtgacttctatgatggcttccacattcagtccatctctgccatcctattcatctacctcggctgtatcaccaacgcgatcacctttggtgggcttctgggggatgccaccgacaattatcagggagtgatggagagcttcctgggcactgccatggctggctccttgttctgcctcttctcgggacagcctctcatcattctcagcagcacggggcccatcctcatctttgagaagctcctcttcgacttcagcaaaggcaatggcctggactacatggagttccgcctctggattggcctacactcagctgtccagtgccttatcctagtggccacagatgccagctttatcatcaaatatatcacccgcttcaccgaggagggcttctccacccttatcagcttcatcttcatctacgatgccatcaagaagatgatcggtgccttcaagtactaccctatcaatatggacttcaagccaaacttcatcactacctacaagtgcgagtgtgtcgcccctgacacagtgaatacaaccgtgttcaatgcttcagccccattggcaccagacaccaacgcttctctgtacaacctccttaacctcacagcgttggactggtccctgctgagcaagaaggagtgtctgagctacggcgggcgcctgcttgggaattcctgcaagtttatcccagacctggcgctcatgtccttcatccttttctttgggacatactccatgaccctgaccctgaagaagttcaaattcagccgctattttcctaccaaggtccgggccctggtggctgacttttccattgttttctccatcctgatgttctgtggaatcgatgcctgttttggcctagaaactcccaagctgcatgtgcccagtgtcatcaagccaacgcggcctgaccgaggctggttcgtggccccctttgggaagaacccgtggtgggtatacccagcaagcatcctgcccgccctgctggtgaccatcctgatcttcatggaccagcagatcactgccgtcattgtcaaccggaaggagaacaaactgaagaaggctgccggctaccatctggacctgttctgggtgggcatcctcatggctttgtgctcctttatggggctcccctggtacgtggctgccacggtcatctccatcgcccacatcgacagcctcaagatggagacagagaccagtgcccctggggagcagccccagtttctgggagtcagggaacagagagtaaccggcatcatcgtcttcatcctgacgggaatctctgtcttcctggctcccatcctaaagtgtatccccctgccggtgctgtacggagtcttcctctacatgggcgtggcctccctgaatggcatccagatggggaccggagggtcagaattcaaaatccagaagaagctgactccattctgggaacgctgcaagctcttcctgatgccagccaagcaccagccggaccatgccttcctgcggcacgtgccgctgcgccggatccacctcttcaccctggtgcagatcctctgcctggcggtgctctggatcctcaaatccacggtggctgccatcatcttcccggtcatgatcctgggcctcatcatcgttcgaaggcttctggatttcatcttttcccagcacgacctggcctggattgacaacatcctcccagagaaggaaaaaaaggagacagacaagaagaggaagagaaaaaaaggggcccacgaggactgtgatgaggagccccagttccctcctccctcggttataaagattcccatggaaagtgtccaatcagatccccaaaacggtatccactgcattgccagaaaaagatcttccagttggagttactcactctga

SEQ ID NO: 208445 - DNA, 6168 bp, Artificial Sequence
  derived and/or modified sequence
accctaaaggaattggagtcagggcccaggagccacaggccactgcactggggcatcccaggatttggaattcagctgtgagctcatgagctgatggatgtttccaggagtaccctgaagaccacccaggtgggagtgtaagataaccttccagataaagagttgctgctaccaaaagagtgctgacaccatcacagtatgttcccttctcaaccctggacatggttcagaaacagctaaagcagacaagaatctggggcagccaatattgtaccacctgccaaagcttggcacaaacaatctggaagccaaaaattgcacatactgtggaacagagcaagtggttctggcctccctgggatttggatcctggtttccagagctaagaacacaaagtcatgaaggtgaaggaggagaaggctggggtaggaaagctggaccacactaaccacaggaggagatttccggatcagaaagaatgccctcctatccacattgggcttccagtacccacttaccctcaaagaaaaactgaccagaagggacatctttcaggcctgcaaaaagtccactggggcctgcggccagaccagccacagcaggaactgactggcccagggagtggggcaagcagccaggacagcagcatggatcttatcagcaggactcggtccccagctgctgagcagctccaggacatcctgggggaggaagatgaggctcccaaccccaccctctttacagagatggatactctgcagcatgacggagaccagatggagtggaaggagtcagccaggtggataaagtttgaagaaaaggtagaggaaggcggcgaacgctggagcaagccccacgtgtccacactatccctgcacagcctcttcgagctccgtacctgcctgcagacggggacggtgctgctggatttggacagtggctccttaccacagatcatagatgatgtcattgagaagcagattgaggatggtctcctgcggccagagctccgggagagggtcagttacgtcctcctgaggaggcaccgccaccaaaccaagaagcccatccaccgctccttagctgacattgggaagtcagtctccaccacaaatcgcagtcctgcccggagccctggtgctggcccgagtctacaccactccacggaagacctgcggatgcggcagagtgcaaattacggacgtctgtgtcatgcccagagcagaagcatgaatgacatttctctcaccccaaacacagaccagcggaaaaacaaattcatgaagaagatccccaaggactcagaagcgtccaacgtgctcgtgggcgaggtggacttcctagaccagccattcatcgcgttcgtgcgcctcatccagtcggccatgctgggaggagtgaccgaggtgcctgtccccaccagatttctgtttatactactgggaccttctgggagagcaaaatcctacaatgaaattggccgtgccattgcaaccctcatggtagatgatctcttcagtgacgtggcctacaaagcccgcaatcgggaagatctgatcgcaggaattgatgaatttctggatgaggtcatcgtccttcctcctggagaatgggacccaaatatccggattgagccccccaagaaggtgccctctgctgacaagaggaaatctgtgttctccctagcagagctgggccagatgaatggctctgtgggaggaggcggcggagctcctggaggaggcaatggaggtggtggtggtggtggcagtggcggcggggctggcagtggcggggccggcggaacaagcagcggggatgatggagagatgccagccatgcatgaaatcggggaggaacttatctggacaggaaggttcttcggtggcctgtgtctggatatcaagaggaagttgccctggttcccaagtgacttctatgatggcttccacattcagtccatctctgccatcctattcatctacctcggctgtatcaccaacgcgatcacctttggtgggcttctgggggatgccaccgacaattatcagggagtgatggagagcttcctgggcactgccatggctggctccttgttctgcctcttctcgggacagcctctcatcattctcagcagcacggggcccatcctcatctttgagaagctcctcttcgacttcagcaaaggcaatggcctggactacatggagttccgcctctggattggcctacactcagctgtccagtgccttatcctagtggccacagatgccagctttatcatcaaatatatcacccgcttcaccgaggagggcttctccacccttatcagcttcatcttcatctacgatgccatcaagaagatgatcggtgccttcaagtactaccctatcaatatggacttcaagccaaacttcatcactacctacaagtgcgagtgtgtcgcccctgacacagtgaatacaaccgtgttcaatgcttcagccccattggcaccagacaccaacgcttctctgtacaacctccttaacctcacagcgttggactggtccctgctgagcaagaaggagtgtctgagctacggcgggcgcctgcttgggaattcctgcaagtttatcccagacctggcgctcatgtccttcatccttttctttgggacatactccatgaccctgaccctgaagaagttcaaattcagccgctattttcctaccaaggtccgggccctggtggctgacttttccattgttttctccatcctgatgttctgtggaatcgatgcctgttttggcctagaaactcccaagctgcatgtgcccagtgtcatcaagccaacgcggcctgaccgaggctggttcgtggccccctttgggaagaacccgtggtgggtatacccagcaagcatcctgcccgccctgctggtgaccatcctgatcttcatggaccagcagatcactgccgtcattgtcaaccggaaggagaacaaactgaagggaacagagagtaaccggcatcatcgtcttcatcctgacgggaatctctgtcttcctggctcccatcctaaagtgtatccccctgccggtgctgtacggagtcttcctctacatgggcgtggcctccctgaatggcatccagttctgggaacgctgcaagctcttcctgatgccagccaagcaccagccggaccatgccttcctgcggcacgtgccgctgcgccggatccacctcttcaccctggtgcagatcctctgcctggcggtgctctggatcctcaaatccacggtggctgccatcatcttcccggtcatgatcctgggcctcatcatcgttcgaaggcttctggatttcatcttttcccagcacgacctggcctggattgacaacatcctcccagagaaggaaaaaaaggagacagacaagaagaggaagagaaaaaaaggggcccacgaggactgtgatgaggagccccagttccctcctccctcggttataaagattcccatggaaagtgtccaatcagatccccaaaacggtatccactgcattgccagaaaaagatcttccagttggagttactcactctgattcttccttcagtgacacagaacttgaccgaagcatcaccttgcacttcaaaatatcctgtccagcttcacctgctttcagctactcacggaacccagtgttcatggtgccacaggtgaagatagagatggagtcagactatgacttcacagacatggataaataccgaagagaaactgacagtgagaccaccctctaggatgaagcagcttctcccagatgggagatggagagcctggcttagtcttcactgggagggtcttaacttctctgtgcctgtttccttctttatcaaacagagggagtccgtctgcctatagaaaactggagatctattgatgaaaagtattgcttagatgcaaagctctcccctttgtagtaattaaaatacctaaagctaaatattatattttattttaaaatgcagttcagcatagaaattctaacatttctttggaaataaaaaaatgcttgtttccccaaaccatagctaagataaaggggcaatagtcaattcatatttaaaacaaatatcaatttaaaattgtttaaaggttagatttaaatatagatgttctcaaacaaacttgtaatatacttttatgtcactagaccatctttggaatatttggcaattctgcatattaagaaatgctgaaaaggtcctatcttttctccctgtcacatccaatttcctaagggttatatgaaaagtttgaaccagccgggcacagtggcacacgcctgtaatcctagcactttgggaggccgaggcaggtgaattgcctgagctcaggagttcgagaccagcctaggcaacacggtgaaaccccgtctctactaaactacaaaaaattagccgggtgtggtggcatgcacctgtagtcccagctattcgggaggctgaggcaggagaatcgcttgaacccaggaggcagaagttgcagtgagctgagatggcaccactgcactccagcctaggcaacagagtgagactccgtatccaaacaaaaaaaaagtttgaaccatctgcattatgggccttgctccagaagtgtgactggggctttcccagattgaaaagccagttccaaaactctgttaatgaaagaaccaatgcatctgagtggataaatgtttctaaaataaaatagttcttgttaaagtgaaatttgaaaccacatgttaaatcaaaatgatcctttaaattagtatcactggtttttcatacctggaatcacatttcatgatacatttgggtgggtcctccctgcaaattttcaatgtttattcccaaagtcaaactcccattcatgtgaacaatacaggttagacagaggtaaggtcacattttacattacaactttgcaatattaatcaacctagtactttaaaggaatgattgaaaactatttgggaagataaaaaccagtttcaatgaagcaaacctattcctcatgaaacttaagatcagtcattttatcttcaatccacatttaatgaacaccaaccatgttgatttaatgcctactatgaccctgacagccacagtgcatctgacacttactttctccaaaacaactatgatttaaaccttgagtaaatcacttgaaccttgaggttagagttactatatttgctcaagatgacaaatgcaggtgctttcttttttaaagaaaaatgacactagatcattaacaccttgagtataggacaggtaattgcctctgtaattcccagcgtctagtgtagtgcctggtccatagaaagctctcaataagtgtttgattacatttaatctcagagctcccttccaagggatactgccaagaggtaaagctccaaacctctactcttactgagagcagaatttcttagaatttccagaaccatctcctatgcttaagtataaattcttgtcagacacagtggctcacacctgtaatcccgctacttgggaggcagaggtggggggaatcagcagaggtcaggaggtcaagaccagcctgggcaacatagtgagacccatctctaaacaaatgtttaaaaattagctaggcatgctggcacacacctgtagtcccagccatttcagaggctgatgcaggaggatcgtttaagtccaggagttcaaggctgcagtgagctataatcatgccactgcactccagccagggagacagctggaatccatgtcttataaacaataataattaatttttaaaaaaagtatttatcatccacaccaatcctggggaagctaacaatccacccttaacacatttcagttttaaaacctggctgatctggaatagaactttgtccaaattaaattgtagaaatgctatggattcaagagtaaacctgcttgattaatcaaacaagctggaaaactactgttaatttctttgttgtaaattgatcactgtaattttaccttacatgtcatttatattttgtatatacatgaacattttaatttccatagcttttaacaggttgacataatacttctccatgcagtaagtcagtcattttttccacttgtaactgtaattcaataaaatttaatcctgtctggtc

SEQ ID NO: 208446 - DNA, 3073 bp, Artificial Sequence
  derived and/or modified sequence
tggacatggttcagaaacagctaaagcagacaagaatctggggcagccaatattgtaccacctgccaaagcttggcacaaacaatctggaagccaaaaattgcacatactgtggaacagagcaagtggttctggcctccctgggatttggatcctggtttccagagctaagaacacaaagtcatgaaggtgaaggaggagaaggctggggtaggaaagctggaccacactaaccacaggaggagatttccggatcagaaagaatgccctcctatccacattgggcttccagtacccacttaccctcaaagaaaaactgaccagaagggacatctttcaggcctgcaaaaagtccactggggcctgcggccagaccagccacagcaggaactgactggcccagggagtggggcaagcagccaggacagcagcatggatcttatcagcaggactcggtccccagctgctgagcagctccaggacatcctgggggaggaagatgaggctcccaaccccaccctctttacagagatggatactctgcagcatgacggagaccagatggagtggaaggagtcagccaggtggataaagtttgaagaaaaggtagaggaaggcggcgaacgctggagcaagccccacgtgtccacactatccctgcacagcctcttcgagctccgtacctgcctgcagacggggacggtgctgctggatttggacagtggctccttaccacagatcatagatgatgtcattgagaagcagattgaggatggtctcctgcggccagagctccgggagagggtcagttacgtcctcctgaggaggcaccgccaccaaaccaagaagcccatccaccgctccttagctgacattgggaagtcagtctccaccacaaatcgcagtcctgcccggagccctggtgctggcccgagtctacaccactccacggaagacctgcggatgcggcagagtgcaaattacggacgtctgtgtcatgcccagagcagaagcatgaatgacatttctctcaccccaaacacagaccagcggaaaaacaaattcatgaagaagatccccaaggactcagaagcgtccaacgtgctcgtgggcgaggtggacttcctagaccagccattcatcgcgttcgtgcgcctcatccagtcggccatgctgggaggagtgaccgaggtgcctgtccccaccagatttctgtttatactactgggaccttctgggagagcaaaatcctacaatgaaattggccgtgccattgcaaccctcatggtagatgatctcttcagtgacgtggcctacaaagcccgcaatcgggaagatctgatcgcaggaattgatgaatttctggatgaggtcatcgtccttcctcctggagaatgggacccaaatatccggattgagccccccaagaaggtgccctctgctgacaagaggaaatctgtgttctccctagcagagctgggccagatgaatggctctgtgggaggaggcggcggagctcctggaggaggcaatggaggtggtggtggtggtggcagtggcggcggggctggcagtggcggggccggcggaacaagcagcggggatgatggagagatgccagccatgcatgaaatcggggaggaacttatctggacaggaaggttcttcggtggcctgtgtctggatatcaagaggaagttgccctggttcccaagtgacttctatgatggcttccacattcagtccatctctgccatcctattcatctacctcggctgtatcaccaacgcgatcacctttggtgggcttctgggggatgccaccgacaattatcagggagtgatggagagcttcctgggcactgccatggctggctccttgttctgcctcttctcgggacagcctctcatcattctcagcagcacggggcccatcctcatctttgagaagctcctcttcgacttcagcaaaggcaatggcctggactacatggagttccgcctctggattggcctacactcagctgtccagtgccttatcctagtggccacagatgccagctttatcatcaaatatatcacccgcttcaccgaggagggcttctccacccttatcagcttcatcttcatctacgatgccatcaagaagatgatcggtgccttcaagtactaccctatcaatatggacttcaagccaaacttcatcactacctacaagtgcgagtgtgtcgcccctgacacagtgaatacaaccgtgttcaatgcttcagccccattggcaccagacaccaacgcttctctgtacaacctccttaacctcacagcgttggactggtccctgctgagcaagaaggagtgtctgagctacggcgggcgcctgcttgggaattcctgcaagtttatcccagacctggcgctcatgtccttcatccttttctttgggacatactccatgaccctgaccctgaagaagttcaaattcagccgctattttcctaccaagccaacgcggcctgaccgaggctggttcgtggccccctttgggaagaacccgtggtgggtatacccagcaagcatcctgcccgccctgctggtgaccatcctgatcttcatggaccagcagatcactgccgtcattgtcaaccggaaggagaacaaactgaagggaacagagagtaaccggcatcatcgtcttcatcctgacgggaatctctgtcttcctggctcccatcctaaagtgtatccccctgccggtgctgtacggagtcttcctctacatgggcgtggcctccctgaatggcatccagttctgggaacgctgcaagctcttcctgatgccagccaagcaccagccggaccatgccttcctgcggcacgtgccgctgcgccggatccacctcttcaccctggtgcagatcctctgcctggcggtgctctggatcctcaaatccacggtggctgccatcatcttcccggtcatgtctctctccaccacagatcctgggcctcatcatcgttcgaaggcttctggatttcatcttttcccagcacgacctggcctggattgacaacatc

SEQ ID NO: 208447 - DNA, 6410 bp, Artificial Sequence
  derived and/or modified sequence
accctaaaggaattggagtcagggcccaggagccacaggccactgcactggggcatcccaggatttggaattcagctgtgagctcatgagctgatggatgtttccaggagtaccctgaagaccacccaggtgggagtgtaagataaccttccagataaagagttgctgctaccaaaagagtgctgacaccatcacagtatgttcccttctcaaccctggacatggttcagaaacagctaaagcagacaagaatctggggcagccaatattgtaccacctgccaaagcttggcacaaacaatctggaagccaaaaattgcacatactgtggaacagagcaagtggttctggcctccctgggatttggatcctggtttccagagctaagaacacaaagtcatgaaggtgaaggaggagaaggctggggtaggaaagctggaccacactaaccacaggaggagatttccggatcagaaagaatgccctcctatccacattgggcttccagtacccacttaccctcaaagaaaaactgaccagaagggacatctttcaggcctgcaaaaagtccactggggcctgcggccagaccagccacagcaggaactgactggcccagggagtggggcaagcagccaggacagcagcatggatcttatcagcaggactcggtccccagctgctgagcagctccaggacatcctgggggaggaagatgaggctcccaaccccaccctctttacagagatggatactctgcagcatgacggagaccagatggagtggaaggagtcagccaggtggataaagtttgaagaaaaggtagaggaaggcggcgaacgctggagcaagccccacgtgtccacactatccctgcacagcctcttcgagctccgtacctgcctgcagacggggacggtgctgctggatttggacagtggctccttaccacagatcatagatgatgtcattgagaagcagattgaggatggtctcctgcggccagagctccgggagagggtcagttacgtcctcctgaggaggcaccgccaccaaaccaagaagcccatccaccgctccttagctgacattgggaagtcagtctccaccacaaatcgcagtcctgcccggagccctggtgctggcccgagtctacaccactccacggaagacctgcggatgcggcagagtgcaaattacggacgtctgtgtcatgcccagagcagaagcatgaatgacatttctctcaccccaaacacagaccagcggaaaaacaaattcatgaagaagatccccaaggactcagaagcgtccaacgtgctcgtgggcgaggtggacttcctagaccagccattcatcgcgttcgtgcgcctcatccagtcggccatgctgggaggagtgaccgaggtgcctgtccccaccagatttctgtttatactactgggaccttctgggagagcaaaatcctacaatgaaattggccgtgccattgcaaccctcatggtagatgatctcttcagtgacgtggcctacaaagcccgcaatcgggaagatctgatcgcaggaattgatgaatttctggatgaggtcatcgtccttcctcctggagaatgggacccaaatatccggattgagccccccaagaaggtgccctctgctgacaagaggaaatctgtgttctccctagcagagctgggccagatgaatggctctgtgggaggaggcggcggagctcctggaggaggcaatggaggtggtggtggtggtggcagtggcggcggggctggcagtggcggggccggcggaacaagcagcggggatgatggagagatgccagccatgcatgaaatcggggaggaacttatctggacaggaaggttcttcggtggcctgtgtctggatatcaagaggaagttgccctggttcccaagtgacttctatgatggcttccacattcagtccatctctgccatcctattcatctacctcggctgtatcaccaacgcgatcacctttggtgggcttctgggggatgccaccgacaattatcagggagtgatggagagcttcctgggcactgccatggctggctccttgttctgcctcttctcgggacagcctctcatcattctcagcagcacggggcccatcctcatctttgagaagctcctcttcgacttcagcaaaggcaatggcctggactacatggagttccgcctctggattggcctacactcagctgtccagtgccttatcctagtggccacagatgccagctttatcatcaaatatatcacccgcttcaccgaggagggcttctccacccttatcagcttcatcttcatctacgatgccatcaagaagatgatcggtgccttcaagtactaccctatcaatatggacttcaagccaaacttcatcactacctacaagtgcgagtgtgtcgcccctgacacagtgaatacaaccgtgttcaatgcttcagccccattggcaccagacaccaacgcttctctgtacaacctccttaacctcacagcgttggactggtccctgctgagcaagaaggagtgtctgagctacggcgggcgcctgcttgggaattcctgcaagtttatcccagacctggcgctcatgtccttcatccttttctttgggacatactccatgaccctgaccctgaagaagttcaaattcagccgctattttcctaccaaggtccgggccctggtggctgacttttccattgttttctccatcctgatgttctgtggaatcgatgcctgttttggcctagaaactcccaagctgcatgtgcccagtgtcatcaagccaacgcggcctgaccgaggctggttcgtggccccctttgggaagaacccgtggtgggtatacccagcaagcatcctgcccgccctgctggtgaccatcctgatcttcatggaccagcagatcactgccgtcattgtcaaccggaaggagaacaaactgaagaaggctgccggctaccatctggacctgttctgggtgggcatcctcatggctttgtgctcctttatggggctcccctggtacgtggctgccacggtcatctccatcgcccacatcgacagcctcaagatggagacagagaccagtgcccctggggagcagccccagtttctgggagtcagggaacagagagtaaccggcatcatcgtcttcatcctgacgggaatctctgtcttcctggctcccatcctaaagtgtatccccctgccggtgctgtacggagtcttcctctacatgggcgtggcctccctgaatggcatccagatggggaccggagggtcagaattcaaaatccagaagaagctgactccattctgggaacgctgcaagctcttcctgatgccagccaagcaccagccggaccatgccttcctgcggcacgtgccgctgcgccggatccacctcttcaccctggtgcagatcctctgcctggcggtgctctggatcctcaaatccacggtggctgccatcatcttcccggtcatgtctctctccaccacagatctgggcctcatcatcgttcgaaggcttctggatttcatcttttcccagcacgacctggcctggattgacaacatcctcccagagaaggaaaaaaaggagacagacaagaagaggaagagaaaaaaaggggcccacgaggactgtgatgaggagccccagttccctcctccctcggttataaagattcccatggaaagtgtccaatcagatccccaaaacggtatccactgcattgccagaaaaagatcttccagttggagttactcactctgattcttccttcagtgacacagaacttgaccgaagcatcaccttgcacttcaaaatatcctgtccagcttcacctgctttcagctactcacggaacccagtgttcatggtgccacaggtgaagatagagatggagtcagactatgacttcacagacatggataaataccgaagagaaactgacagtgagaccaccctctaggatgaagcagcttctcccagatgggagatggagagcctggcttagtcttcactgggagggtcttaacttctctgtgcctgtttccttctttatcaaacagagggagtccgtctgcctatagaaaactggagatctattgatgaaaagtattgcttagatgcaaagctctcccctttgtagtaattaaaatacctaaagctaaatattatattttattttaaaatgcagttcagcatagaaattctaacatttctttggaaataaaaaaatgcttgtttccccaaaccatagctaagataaaggggcaatagtcaattcatatttaaaacaaatatcaatttaaaattgtttaaaggttagatttaaatatagatgttctcaaacaaacttgtaatatacttttatgtcactagaccatctttggaatatttggcaattctgcatattaagaaatgctgaaaaggtcctatcttttctccctgtcacatccaatttcctaagggttatatgaaaagtttgaaccagccgggcacagtggcacacgcctgtaatcctagcactttgggaggccgaggcaggtgaattgcctgagctcaggagttcgagaccagcctaggcaacacggtgaaaccccgtctctactaaactacaaaaaattagccgggtgtggtggcatgcacctgtagtcccagctattcgggaggctgaggcaggagaatcgcttgaacccaggaggcagaagttgcagtgagctgagatggcaccactgcactccagcctaggcaacagagtgagactccgtatccaaacaaaaaaaaagtttgaaccatctgcattatgggccttgctccagaagtgtgactggggctttcccagattgaaaagccagttccaaaactctgttaatgaaagaaccaatgcatctgagtggataaatgtttctaaaataaaatagttcttgttaaagtgaaatttgaaaccacatgttaaatcaaaatgatcctttaaattagtatcactggtttttcatacctggaatcacatttcatgatacatttgggtgggtcctccctgcaaattttcaatgtttattcccaaagtcaaactcccattcatgtgaacaatacaggttagacagaggtaaggtcacattttacattacaactttgcaatattaatcaacctagtactttaaaggaatgattgaaaactatttgggaagataaaaaccagtttcaatgaagcaaacctattcctcatgaaacttaagatcagtcattttatcttcaatccacatttaatgaacaccaaccatgttgatttaatgcctactatgaccctgacagccacagtgcatctgacacttactttctccaaaacaactatgatttaaaccttgagtaaatcacttgaaccttgaggttagagttactatatttgctcaagatgacaaatgcaggtgctttcttttttaaagaaaaatgacactagatcattaacaccttgagtataggacaggtaattgcctctgtaattcccagcgtctagtgtagtgcctggtccatagaaagctctcaataagtgtttgattacatttaatctcagagctcccttccaagggatactgccaagaggtaaagctccaaacctctactcttactgagagcagaatttcttagaatttccagaaccatctcctatgcttaagtataaattcttgtcagacacagtggctcacacctgtaatcccgctacttgggaggcagaggtggggggaatcagcagaggtcaggaggtcaagaccagcctgggcaacatagtgagacccatctctaaacaaatgtttaaaaattagctaggcatgctggcacacacctgtagtcccagccatttcagaggctgatgcaggaggatcgtttaagtccaggagttcaaggctgcagtgagctataatcatgccactgcactccagccagggagacagctggaatccatgtcttataaacaataataattaatttttaaaaaaagtatttatcatccacaccaatcctggggaagctaacaatccacccttaacacatttcagttttaaaacctggctgatctggaatagaactttgtccaaattaaattgtagaaatgctatggattcaagagtaaacctgcttgattaatcaaacaagctggaaaactactgttaatttctttgttgtaaattgatcactgtaattttaccttacatgtcatttatattttgtatatacatgaacattttaatttccatagcttttaacaggttgacataatacttctccatgcagtaagtcagtcattttttccacttgtaactgtaattcaataaaatttaatcctgtctggtc

SEQ ID NO: 208448 - protein, 261 aa, Artificial Sequence
  derived and/or modified sequence
MDSSAVITQISKEEARGPLRGKGDQKSAASQKPRSRGILHSLFCCVCRDDGEALPAHSGAPLLVEENGAIPKQTPVQYLLPEAKAQDSDKICVVIDLDETLVHSSFKPVNNADFIIPVEIDGVVHQVYVLKRPHVDEFLQRMGELFECVLFTASLAKYADPVADLLDKWGAFRARLFRESCVFHRGNYVKDLSRLGRDLRRVLILDNSPASYVFHPDNAVPVASWFDNMSDTELHDLLPFFEQLSRVDDVYSVLRQPRPGS

SEQ ID NO: 208449 - DNA, 786 bp, Artificial Sequence
  derived and/or modified sequence
atggatagctctgccgtaattacccagattagtaaagaggaggcccgcggccccctgaggggaaagggcgatcagaaaagcgccgccagccaaaaaccccggagtcgtggtatcttgcattctctgttttgttgcgtctgccgggacgacggtgaggcactaccagcccatagcggagcccccctcctcgtggaggaaaacggtgccataccaaaacagacgcccgtgcaatatctgctgccagaggccaaggctcaggatagcgataagatctgtgtggtgatcgacctcgatgagaccctcgtccactcctccttcaaacccgtgaataacgctgacttcataattcctgtagagatcgacggcgtggtgcatcaggtctacgtattgaaacgccctcatgtcgacgaattcctccagaggatgggggagctgttcgagtgtgtgctatttaccgccagtcttgccaagtatgctgaccccgtagccgacctgcttgataagtggggcgcgttccgcgcgaggctcttccgagaatcgtgtgtcttccataggggcaattatgtgaaggatttgagcagattgggccgggatctgaggcgtgtcttaattcttgacaacagccccgcctcttacgtgttccatcccgataatgctgtccccgtagctagctggtttgataatatgtcagatactgagctacatgatctgctccctttctttgaacagttatctagggtggacgatgtgtactcagtgttgagacaacccaggcccggtagttag

SEQ ID NO: 208450 - DNA, 786 bp, Artificial Sequence
  derived and/or modified sequence
atggacagcagcgctgtgatcacccagatcagcaaggaggaggcccggggccccctgcggggcaagggggaccagaagtctgctgccagccagaagcccaggagccggggcatcctgcacagcctcttctgctgcgtgtgcagagatgatggagaggccctgcctgcccacagcggggcccccctgctggtggaggagaatggagccatccccaagcagacccctgtgcagtacctgctgcctgaggccaaggcccaggacagcgacaagatctgtgtggtgattgacctggatgagaccctggtgcacagcagcttcaagcctgtgaacaatgctgacttcatcatccctgtggagattgatggagtggtgcaccaggtgtatgtgctgaagaggccccacgtggatgagttcctgcagaggatgggagagctgtttgaatgtgtgctcttcaccgccagcctggccaagtatgctgaccctgtggccgacctgctggacaagtggggcgccttccgggcccggctcttccgggagagctgtgtgttccaccggggcaactacgtgaaggacctgagccggctgggccgggacctgcggcgggtgctgatcctggacaacagccctgccagctatgtgttccacccagacaatgctgtgcctgtggcctcctggtttgacaacatgtctgacacagagctgcatgacctgctgcccttctttgagcagctgagccgggtggatgatgtgtacagcgtgctgcggcagcccaggcctggcagctag

SEQ ID NO: 208451 - DNA, 786 bp, Artificial Sequence
  derived and/or modified sequence
atggacagcagcgccgtgatcacccagatcagcaaggaggaggcccggggcccgttaagagggaagggagaccagaaatcagctgcctcccaaaaacctagatctagaggaatcttacactctctgttctgttgtgtgtgccgagatgacggagaggcacttccagcacactccggtgctcctcttctggtcgaagaaaacggtgccattccaaagcagacaccagtgcaatatctcctacctgaagccaaagcccaggatagtgataaaatatgtgttgtaatcgacctggacgaaacactggtgcactcttcttttaaacccgttaacaacgctgacttcattatccccgtagaaatcgatggtgtggttcatcaggtgtatgtgctgaagaggccgcatgtcgatgagtttctgcaacggatgggagagcttttcgaatgtgtcttatttaccgcctccctggctaaatatgccgatcctgttgccgatctgctggacaaatggggcgcgttcagggcccgcttatttagagagagctgcgttttccaccggggcaattatgttaaggacctgagccggctcggaagagacctgcgaagggtgctgatccttgacaatagccctgcaagctacgtcttccatcccgacaatgccgtaccagttgcatcttggttcgacaatatgagcgacacagaacttcatgatcttttgccgttcttcgaacaactgtcacgcgttgacgacgtgtactctgttctgagacagccacgtccgggctcatag

SEQ ID NO: 208452 - DNA, 786 bp, Artificial Sequence
  derived and/or modified sequence
atggacagtagtgccgtaattacccaaatctccaaagaggaagcgaggggacctttgaggggaaaaggagatcagaagagtgcagcctctcagaaaccaagatcccgcggtattttacacagtcttttttgctgtgtgtgtagggatgacggggaagccctccctgcccacagcggagccccactgctagtcgaagagaatggggctatccccaagcagacccctgttcaatatctcctgcctgaagcgaaagcacaggatagtgacaagatctgtgtggtaatcgatttagacgagactctggtgcactcgtcgtttaagccagtcaacaatgccgattttataatcccagttgagatcgatggcgtggtccatcaggtgtatgtgctcaagcgcccacacgtggacgaattccttcagagaatgggcgaactcttcgagtgtgtcctttttactgccagtttagcaaagtacgccgaccccgtggccgatcttcttgacaagtggggagcctttcgcgctcggctatttagagagtcttgtgtttttcatagaggcaactacgtaaaagatctgagccgattgggccgtgacctcaggagggtgctcattctggacaactctccagcctcctacgtgttccatccggataatgcagtgcccgtggcttcttggttcgacaatatgtctgatacagagctgcacgatttattgcctttcttcgagcagctaagcagggtcgacgatgtttacagcgtgctacgacagccaagacctggaagctag

SEQ ID NO: 208453 - DNA, 2638 bp, Artificial Sequence
  derived and/or modified sequence
cgcctagccgcgccggtcccagaagtggcgaaagccgcagccgagtccaggtcacgccgaagccgttgcccttttaagggggagccttgaaacggcgcctgggttccatgtttgcatccgcctcgcgggaaggaaactccatgttgtaacaaagtttcctccgcgccccctccctccccctcccccctagaacctggctcccctcccctccggagctcgcggggatccctccctcccacccctcccctcccccccgcgccccgattccggccccagccgggggggaggccgggcgcccgggccagagtccggccggagcggagcgcgcccggccccatggacagctcggccgtcattactcagatcagcaaggaggaggctcggggcccgctgcggggcaaaggtgaccagaagtcagcagcttcccagaagccccgaagccggggcatcctccactcactcttctgctgtgtctgccgggatgatggggaggccctgcctgctcacagcggggcgcccctgcttgtggaggagaatggcgccatccctaagcagaccccagtccaatacctgctccctgaggccaaggcccaggactcagacaagatctgcgtggtcatcgacctggacgagaccctggtgcacagctccttcaagccagtgaacaacgcggacttcatcatccctgtggagattgatggggtggtccaccaggtctacgtgttgaagcgtcctcacgtggatgagttcctgcagcgaatgggcgagctctttgaatgtgtgctgttcactgctagcctcgccaagtacgcagacccagtagctgacctgctggacaaatggggggccttccgggcccggctgtttcgagagtcctgcgtcttccaccgggggaactacgtgaaggacctgagccggttgggtcgagacctgcggcgggtgctcatcctggacaattcacctgcctcctatgtcttccatccagacaatgctgtaccggtggcctcgtggtttgacaacatgagtgacacagagctccacgacctcctccccttcttcgagcaactcagccgtgtggacgacgtgtactcagtgctcaggcagccacggccagggagctagtgagggtgatggggccaggacctgcccctgaccaatgatacccacacctcctcccaggaagactgcccaggcctttgttaggaaaacccatgggccgccgccacactcagtgccatggggaagcgggcgtctcccccaccagccccaccaggcggtgtaggggcagcaggctgcactgaggaccgtgagctccaggccccgtgtcagtgccttcaaacctcctcccctattctcaggggacctggggggccctgcctgctgctccctttttctgtctctgtccatgctgccatgtttctctgctgccaaattgggccccttggccccttccggttctgcttcctgggggcagggttcctgccttggacccccagtctgggaacggtggacatcaagtgccttgcatagagccccctcttccccgcccagctttcccaggggcacagctctaggctgggaggggagaaccagcccctccccctgccccacctcctcccttgggactgagagggcccctaccaacctttgcctctgccttggagggaggggaggtctgttaccactggggaaggcagcaggagtctgtccttcaggccccacagtgcagcttctccagggccgacagctgagggctgctccctgcatcatccaagcaatgacctcagacttctgccttaaccagccccggggcttggctcccccagctctgagcgtgggggcataggcaggaccccccttgtggtgccatataaatatgtacatgtgtatatagatttttaggggaaggagagagggaagggtcagggtagagacacccctcccttgcccctttcctgggcccagaagttggggggagggagggaaaggatttttacattttttaaactgctattttctgaatggaacaagctgggccaaggggcccaggccctgtcctctgtccctcacacccctttgctccgttcattcattcaaaaaaacatttcttgagcaccttctgtgcccagcatatgctaggcccaccagctaagtgtgtgtggggggtctctacgccagctcatcagtgcctccttgcccatccttcaccggtgcctttgggggatctgtaggaggtgggaccttctgtggggtttggggatctccaggaagcccgaccaagctgtccccttcccctgtgccaacccatctcctacagccccctgcctgatcccctgctggctgggggcagctcccaggatatcctgccttccaactgtttctgaagcccctcctcctaacatggcgattccggaggtcaaggccttgggctctccccagggtctaacggttaaggggacccacataccagtgccaagggggatgtcaagtggtgatgtcgttgtgctcccctcccccagagcgggtgggcggggggtgaatatggttggcctgcatcaggtggccttcccatttaagtgccttctctgtgactgagagccctagtgtgatgagaactaaagagaaagccagaccccta

SEQ ID NO: 208454 - DNA, 786 bp, Artificial Sequence
  derived and/or modified sequence
atggacagcagcgccgtgatcacccagatcagcaaggaggaggccagaggccccctgagaggcaagggcgaccagaagagcgccgccagccagaagcccagaagcagaggcatcctgcacagcctgttctgctgcgtgtgcagagacgacggcgaggccctgcccgcccacagcggcgcccccctgctggtggaggagaacggcgccatccccaagcagacccccgtgcagtacctgctgcccgaggccaaggcccaggacagcgacaagatctgcgtggtgatcgacctggacgagaccctggtgcacagcagcttcaagcccgtgaacaacgccgacttcatcatccccgtggagatcgacggcgtggtgcaccaggtgtacgtgctgaagagaccccacgtggacgagttcctgcagagaatgggcgagctgttcgagtgcgtgctgttcaccgccagcctggccaagtacgccgaccccgtggccgacctgctggacaagtggggcgccttcagagccagactgttcagagagagctgcgtgttccacagaggcaactacgtgaaggacctgagcagactgggcagagacctgagaagagtgctgatcctggacaacagccccgccagctacgtgttccaccccgacaacgccgtgcccgtggccagctggttcgacaacatgagcgacaccgagctgcacgacctgctgcccttcttcgagcagctgagcagagtggacgacgtgtacagcgtgctgagacagcccagacccggcagctag

SEQ ID NO: 208455 - protein, 450 aa, Artificial Sequence
  derived and/or modified sequence
MVPLVAVVSGPRAQLFACLLRLGTQQVGPLQLHTGASHAARNHYEVLVLGGGSGGITMAARMKRKVGAENVAIVEPSERHFYQPIWTLVGAGAKQLSSSGRPTASVIPSGVEWIKARVTELNPDKNCIHTDDDEKISYRYLIIALGIQLDYEKIKGLPEGFAHPKIGSNYSVKTVEKTWKALQDFKEGNAIFTFPNTPVKCAGAPQKIMYLSEAYFRKTGKRSKANIIFNTSLGAIFGVKKYADALQEIIQERNLTVNYKKNLIEVRADKQEAVFENLDKPGETQVISYEMLHVTPPMSPPDVLKTSPVADAAGWVDVDKETLQHRRYPNVFGIGDCTNLPTSKTAAAVAAQSGILDRTISVIMKNQTPTKKYDGYTSCPLVTGYNRVILAEFDYKAEPLETFPFDQSKERLSMYLMKADLMPFLYWNMMLRGYWGGPAFLRKLFHLGMS

SEQ ID NO: 208456 - DNA, 1353 bp, Artificial Sequence
  derived and/or modified sequence
atggtgccactcgtggccgttgtcagtggccccagagctcagctattcgcgtgcctgttgaggctcggcacccagcaggtcggccctctccagctgcataccggagcaagccatgccgcaagaaaccattacgaggttctggtgctcggtggaggatcaggcggcataaccatggccgcacggatgaaacggaaggtaggagccgaaaatgtggctatcgtggagccaagtgagcggcatttttaccagccaatttggaccctcgtcggggctggagccaaacagctcagctctagtggtcgtccaacagcaagcgtgatacccagcggagtagaatggattaaggctcgagttacagaactgaatccagacaaaaactgtatacatacagacgacgacgagaaaatttcctaccgctatctgataatcgcactgggcatccagctggactacgagaaaattaaaggattacctgaggggttcgcccatcccaaaatcggctccaattactctgttaagactgttgaaaagacatggaaagcattacaggacttcaaagagggtaacgctatattcacctttcccaacactcctgtgaagtgcgcaggagcaccccaaaagatcatgtatctgtccgaagcctacttccggaagactggcaagcgctcaaaggccaatataatctttaacactagtttgggagccatcttcggagtgaaaaagtatgcagatgccctccaggaaattatacaggagaggaatttaaccgtgaattacaaaaagaatctcattgaagtgagggccgacaagcaggaagctgtgtttgaaaatctggataagcccggcgagacccaggtgatttcctatgagatgcttcacgtaacaccccccatgtctcctccagacgtcctaaagacgtccccggttgcagacgctgccggctgggtcgatgtagacaaggagacccttcaacaccgcagataccctaatgtgttcggcatcggcgactgcaccaacttgccaacttcaaaaacagcagccgcagtagctgcccagtcaggcatcctggacagaacaatttccgtaatcatgaaaaatcagacacccactaagaaatacgacgggtacacctcctgtcccctagtcacgggctacaaccgggtaatcctagccgagtttgactataaggcggagccccttgagaccttccctttcgatcaatcaaaggagcgcctgtctatgtacttgatgaaggcggaccttatgccttttctctattggaacatgatgctgcgcggctactggggcggccccgcatttttgagaaagcttttccaccttggtatgtcctag

SEQ ID NO: 208457 - DNA, 1353 bp, Artificial Sequence
  derived and/or modified sequence
atggtgccacttgtggccgtggtctcgggtccaagagctcagttgtttgcttgtttactgaggctgggcacgcagcaagtggggccactgcaacttcacaccggcgcctctcacgcggcacgaaatcattatgaagtgctagtcctcggaggcgggtccggtggtataacaatggccgctcggatgaaaaggaaggttggtgctgaaaacgttgccattgtggaacctagtgagaggcatttctaccagccaatatggacacttgttggcgccggagccaagcagctgagctcttcagggcgacctacagcaagtgtgataccaagtggcgttgagtggattaaggctcgtgtgaccgaactcaatcccgacaaaaattgtattcacaccgacgacgacgagaaaatcagctaccgctacttgatcatagcccttgggatccaactggactacgaaaagatcaaaggattgcccgagggcttcgcgcatcccaagataggcagcaattatagcgtcaaaaccgttgaaaaaacctggaaggccctgcaggatttcaaagaggggaacgccatttttacttttcccaatacccctgtgaaatgtgccggcgctccccaaaaaataatgtatctgagtgaggcttactttaggaaaacagggaaacgtagtaaagctaatatcatcttcaacacctccctgggcgcaatatttggagtgaagaaatatgccgatgctctgcaggagattatccaggaacggaatttaactgtcaactataaaaagaacctcatcgaagtgagggctgataagcaggaggctgtgttcgaaaaccttgataaacccggtgagactcaggtaatttcttacgaaatgctgcatgttaccccccctatgtccccacccgacgtcctcaaaacatctcctgtcgccgatgcggctggatgggtcgacgtcgacaaggaaactctccagcatagacgctaccccaacgttttcgggatcggcgattgcactaacttgcctacaagtaagacagccgcagccgtcgcagcgcagtcgggcatcttagatcggacaatttctgtgattatgaaaaatcaaaccccgacaaaaaaatacgatggttatacttcgtgtcccttggtcactggctacaaccgggtgattttggccgagtttgactacaaggctgaacccctcgagacatttccgttcgaccagtcaaaggagcgcctgagcatgtatctgatgaaagctgatcttatgccattcctgtactggaatatgatgctacgtggatactgggggggtcccgcgttccttaggaagctgttccaccttggcatgtcttag

SEQ ID NO: 208458 - DNA, 1353 bp, Artificial Sequence
  derived and/or modified sequence
atggtgcccctggtggccgtggtgtctggcccccgggcccagctgtttgcctgcctgctgcggctgggcacccagcaggtgggccccctgcagctgcacactggagccagccatgctgccaggaaccactatgaggtgctggtgctgggcggcggcagcggcggcatcaccatggccgccaggatgaagaggaaggtgggcgcagaaaatgtggccatcgtggagcccagcgagcggcacttctaccagcccatctggaccctggtgggcgctggggccaagcagctgagcagcagcggccggcccacagccagcgtcatccccagcggcgtggagtggatcaaggcccgggtgacagagctgaacccagacaagaactgcatccacacagatgatgatgagaagatctcctaccgctacctgatcatcgccctgggcatccagctggactatgagaagatcaagggcctgcctgagggctttgcccaccccaagattggcagcaactacagcgtgaagacagtggagaagacctggaaggccctgcaggacttcaaggagggcaatgccatcttcaccttccccaacacccctgtgaagtgtgccggggccccccagaagatcatgtacctgtctgaggcctacttcaggaagacaggcaagaggagcaaggccaacatcatcttcaacaccagcctgggcgccatctttggagtgaagaagtatgcagatgccctgcaggagatcatccaggagaggaacctgactgtgaactacaagaagaacctgattgaggtgcgggctgacaagcaggaggccgtgtttgagaacctggacaagccaggagagacccaggtgatctcctatgagatgctgcacgtgaccccacccatgagccccccagatgtgctgaagaccagccctgtggctgatgctgctggctgggtggatgtggacaaggagaccctgcagcaccggcgctaccccaacgtgtttggcatcggggactgcaccaacctgcccaccagcaagacagctgctgctgtggccgcccagagcggcatcctggacaggaccatcagcgtcatcatgaagaaccagacccccaccaagaagtatgatggctacaccagctgccccctggtgacaggctacaacagagtcatcctggccgagtttgactacaaggccgagcccctggagaccttcccctttgaccagagcaaggagcggctgtccatgtacctgatgaaggctgacctgatgcccttcctgtactggaacatgatgctgcggggctactggggcggccctgccttcctgaggaagctgttccacctgggcatgtcctag

SEQ ID NO: 208459 - DNA, 1353 bp, Artificial Sequence
  derived and/or modified sequence
atggtgcccctggtggccgtggtgagcggcccccgggcccagctgttcgcctgtctcctccgactgggcacgcagcaggtgggcccattgcaattacatacaggagccagccatgcagccaggaaccattatgaggtgctcgtgctaggaggtggaagcggagggatcaccatggcagccaggatgaagaggaaggtgggcgcggaaaacgtcgctatagtggagccatcagagaggcacttctaccaacctatatggaccctggtaggggccggggccaaacagttaagcagctctggacgacctactgccagcgttatcccatctggagtggaatggattaaagctagagtgaccgagctgaatcctgacaagaactgtattcacacagacgacgatgaaaagatttcctacagatatctcataatcgccctgggaattcagttagactacgagaagattaaagggttacccgaaggctttgcacatcccaaaatcggcagtaattattccgtcaaaaccgtagagaagacctggaaggccttacaagactttaaagaaggaaatgcaatatttaccttccccaatacgccagtgaagtgtgccggtgccccacagaagattatgtacttatccgaggcctactttcgcaagacagggaaacggtcgaaagcaaatattattttcaacactagcctcggcgccatctttggcgtaaaaaaatacgcagacgccctgcaggagatcatacaggaaaggaatctcactgtcaattacaagaaaaatctgatagaagtgcgggcagataaacaggaggccgtgttcgaaaacttggataagcctggagaaacccaagtgataagctatgagatgttgcacgtcacccccccaatgtccccccccgatgtcctgaaaacctctccggtggctgacgccgcgggttgggtggacgtggataaagagacactgcagcaccggagatacccgaatgttttcgggatcggagattgcactaatcttccaaccagcaaaactgccgccgccgtggccgcacaaagtgggatcctagatcgcaccatctctgtgattatgaaaaaccagacccccaccaagaagtacgacggctatacaagctgccctctggtgactggatacaacagagttatcctggcagaattcgattacaaagcagagccattggagacctttccctttgaccagtctaaagaacgactctcaatgtacttgatgaaagcagatctcatgccctttttgtattggaacatgatgctgagaggatactggggcgggcctgccttcttgaggaagctgtttcatctcggcatgtcttag

SEQ ID NO: 208460 - DNA, 1353 bp, Artificial Sequence
  derived and/or modified sequence
atggtgcccctggtggccgtggtgagcggcccccgggcccagctgtttgcctgcctgctacgtctgggtacccagcaggtgggccctctccaactgcatacgggcgcctcccacgcggccagaaaccattacgaagtgctggtcttagggggcgggtcgggcggcattactatggccgcccgcatgaaacgaaaagttggagctgaaaatgtcgccattgtggagcccagcgaacgccatttctatcagcccatttggacccttgtgggggccggtgccaaacaactgtcaagcagcggtcggccgaccgcgagcgttattccgagcggggtcgaatggattaaggcgagagtaacggaactcaatccagacaagaattgcatccatactgatgacgacgagaaaatcagttacaggtacctgatcattgccttgggaatccaactcgactatgagaaaattaaggggcttcctgagggctttgcacacccgaagatcggatcaaactattccgtcaagaccgtcgagaaaacttggaaggctcttcaagacttcaaagagggtaacgccatattcaccttccccaataccccagttaagtgcgctggcgccccacagaaaataatgtatctttcggaagcctattttaggaaaaccgggaagcggtctaaggctaacataatctttaataccagtctcggagctatctttggcgtgaaaaaatatgctgacgccctacaggagatcatacaggaaaggaatctgaccgttaattacaagaagaacctgattgaagtgcgggcagacaagcaagaagccgtcttcgaaaatctagataagcctggtgaaacccaggtgatttcgtacgaaatgttgcatgtgactccccccatgtctccccctgatgtcctcaaaacctcccctgtggctgacgccgcaggatgggtggacgtggacaaggaaactctgcagcacagacgctatcctaacgtatttggtattggcgactgcacaaacctgcctaccagcaaaaccgccgccgccgttgcagcacagtctggtatactcgaccgcaccatctcagtaatcatgaagaatcagacacctactaaaaaatacgatgggtatacctcgtgtcccttggttaccggctacaacagagtgattctggccgaattcgattacaaggctgaacctctggaaacgtttccgttcgatcagtccaaggagaggctgtccatgtacctgatgaaggccgacttaatgccctttctgtactggaatatgatgttaagagggtactggggaggccccgcatttctgagaaagctgtttcatttgggtatgagttag

SEQ ID NO: 208461 - DNA, 1353 bp, Artificial Sequence
  derived and/or modified sequence
atggttccgttggtcgccgtggtcagtggccctcgtgcacagctgtttgcgtgtctactccggctgggtacccaacaggtgggtcctctgcagcttcacactggagccagccatgccgctcgaaaccattatgaagtcctcgtactgggcggtggatctggcggaatcaccatggccgcacgcatgaagagaaaggtgggggctgagaatgtagccattgtagagccatccgagagacacttctatcaacctatttggactctggtcggcgcaggcgctaagcagctgtcatcctctggccgaccgaccgcatcggtaatcccctccggagtggagtggataaaggctagggtgacagaactcaatccagataagaactgcatccacacggatgacgatgagaagatctcgtacaggtacctgataattgcactgggaatccagttggattacgaaaagatcaaggggctccccgaaggctttgcccacccaaagattggaagcaattactcagtaaaaactgtggaaaagacctggaaagctctccaagacttcaaagagggcaacgctattttcactttcccaaacacccccgtgaaatgtgccggtgccccacagaagattatgtatttgtccgaagcatatttccgcaaaacgggtaaacggagtaaagccaatatcatcttcaacacgagcctgggtgcaatctttggtgtaaagaaatacgctgacgccctgcaggagatcatccaggaaaggaacctcaccgtgaattacaagaagaacctgatcgaagtgagagcagacaaacaggaggccgtgttcgaaaacttagacaaaccaggcgagacacaagtaataagctacgagatgctgcacgtgacccccccaatgagtccacccgacgtcctcaaaacaagcccagtggctgacgccgcaggttgggtggacgtcgacaaagaaactctccagcacagacggtacccaaacgtgtttggaatcggcgattgtacaaacctgcccacttccaagacggctgcggcagtggccgctcagagcggtatccttgatcggacgatttctgttattatgaagaaccagacccctactaagaagtatgacgggtatacaagctgtccgctcgtgacagggtataacagggtgatacttgccgagtttgattataaggccgaaccactggagacttttccgttcgaccagagcaaagagcggttaagtatgtatctgatgaaggcggatcttatgcctttcctttactggaatatgatgctgaggggatattgggggggacccgcattcctacggaagctgttccacttaggaatgagctag

SEQ ID NO: 208462 - DNA, 1353 bp, Artificial Sequence
  derived and/or modified sequence
atggtccctctggtggcagtggtctcagggccacgggcacaattatttgcctgcctgctcagattaggcacccagcaagtcggccctctgcagctacataccggcgcttctcacgctgctcggaatcactacgaagtcctcgtcctggggggagggtctgggggaattactatggctgcgcgtatgaagcgaaaggtcggcgcagagaatgtggctatcgttgaacccagtgagaggcacttttatcagcccatttggaccctggtcggtgcgggagccaagcagctctcctcttcggggagacccactgcttccgtaataccaagcggcgtagagtggattaaggctcgggttacggaattgaatccagacaaaaattgtattcacacagacgacgacgagaaaatcagttatcgttacttgatcattgcccttggtattcaactcgattacgagaagatcaaaggactccctgagggcttcgctcatccgaagatagggagtaattactccgtcaagacagttgaaaagacgtggaaggccctgcaggacttcaaagaaggcaatgccattttcacttttcctaataccccagtcaagtgtgccggagctccccaaaaaataatgtatctgtctgaggcgtactttcggaagaccgggaaacgctccaaggcaaatatcatttttaacacctccctgggggcaatctttggcgtcaaaaagtatgcggacgcactgcaagagattattcaagagcgaaatcttaccgtgaactataaaaagaacttgatagaggtacgtgccgacaagcaggaggccgttttcgaaaacttggataaaccgggtgaaacacaggtgatctcatacgagatgttgcatgtgacccctcccatgtctcctcccgacgtgctgaaaacctctcctgtggccgacgcggctggatgggtggacgtcgacaaggagacactgcagcatagacggtacccaaatgttttcggtatcggtgactgcaccaacttgccaaccagcaaaaccgccgctgctgtggcagcccagtccggcattttagatagaacaatctccgtcataatgaaaaaccaaacccccacgaaaaaatacgacgggtatacctcatgtcccctggtaactgggtacaaccgagtaatcctggctgagtttgactataaagccgagccgcttgagacatttccttttgaccagagtaaggagcgcttgtctatgtatttaatgaaagctgacctgatgcctttcctctattggaatatgatgctgagggggtactggggcggacctgcctttttgaggaaactgttccatctcggaatgtcctag

SEQ ID NO: 208463 - DNA, 1940 bp, Artificial Sequence
  derived and/or modified sequence
cgcgcaaggggcgagtctgtccagccggcagcaccccaggccggatggacgcttgttcctggttctgtgccccgtgagcgctcaacgccctggtgtgttcactgaccatggtgcctgggctgcggcgccgggcggggcacggcgggacttttcgggacctttcctggggggagcctcgctttccccgcctccagcctccgcccggatggcaggcgggcggggccccagtccaggccttgagacccagaagggagcgaaggtttttgctgcgccaacgcagtgaccgaaggctccgctcacgcccggcctgatcctgcctgaagatggtgccactggtggctgtggtatcagggccccgtgcccagctctttgcctgcctgctcaggctgggcactcagcaggtcggcccccttcagctgcacaccggggccagccatgcggccaggaaccattatgaggtgctggtgctgggtgggggcagtggcggaatcaccatggctgcccgcatgaagaggaaagtgggtgcagagaatgtggccattgttgagcccagtgagagacatttctaccagccaatctggacactggtgggtgctggtgccaaacaattgtcctcatctggtcgtcccacggcaagtgtgattccatctggtgtagaatggatcaaagctagagtgactgagttgaacccagacaagaactgcattcacacagatgacgacgagaagatctcctaccgatatcttattattgctctcggaatccagctggactatgagaagattaaaggcctacctgaaggtttcgctcatcccaaaatagggtcgaattattcagttaagactgtagagaagacatggaaagctctgcaggacttcaaagagggcaatgccatcttcaccttcccaaatactccagtgaagtgtgctggagcccctcagaagatcatgtacttatcagaagcctacttcaggaagacagggaagcgatccaaggccaatatcattttcaacacttctcttggagccattttcggggttaagaagtatgcagatgccctgcaggagatcatccaggagcggaacctcactgttaactacaagaaaaacctcattgaagtccgagccgataaacaagaggctgtatttgagaacctggacaaaccaggagagacccaagtgatttcatatgaaatgcttcatgtcacacctccaatgagcccaccagatgtcctcaagaccagtcctgtggctgatgctgctggttgggtggatgtggataaagaaactctgcaacacaggaggtacccaaatgtgtttgggattggggactgcaccaaccttcctacgtcaaagaccgctgctgcagtagctgcccagtcaggaatacttgataggacaatttctgtaattatgaagaatcaaacaccaacaaagaagtatgatggctacacatcatgtccactggtgaccggctacaaccgtgtgattcttgctgagtttgactacaaagcagagccgctagaaaccttcccctttgatcaaagcaaagagcgcctttccatgtatctcatgaaagctgacctgatgcctttcctgtattggaatatgatgctaaggggttactggggaggaccagcgtttctgcgcaagttgtttcatctaggtatgagttaaggatggctcagcacttgctcatcttggatggcttctgggccaaaactgcagtcactgaatgaccaagagcagcacgaaggacttggaacctatccttgtaaagagttccttgatgggtaatggtgaccaaatgcctcccttttcagtacctttgaacagcaaccatgtgggctactcatgatgggcttgattctttgggaataataaaatgaaataatacttttattttctgaataaaagtttgtcactgattgtgttctatga

SEQ ID NO: 208464 - DNA, 1792 bp, Artificial Sequence
  derived and/or modified sequence
ctcattttctcttgccgccaccatgtaagaagcgcctttcgcctccctccatgattctgaggcctccccagccacatggtacttgtatgcctagacagcgggcacagggcttgctggacacagaaggcaaggactcagagaatatccaccagatgaaagaatgactgcatgacctgatcctgcctgaagatggtgccactggtggctgtggtatcagggccccgtgcccagctctttgcctgcctgctcaggctgggcactcagcaggtcggcccccttcagctgcacaccggggccagccatgcggccaggaaccattatgaggtgctggtgctgggtgggggcagtggcggaatcaccatggctgcccgcatgaagaggaaagtgggtgcagagaatgtggccattgttgagcccagtgagagacatttctaccagccaatctggacactggtgggtgctggtgccaaacaattgtcctcatctggtcgtcccacggcaagtgtgattccatctggtgtagaatggatcaaagctagagtgactgagttgaacccagacaagaactgcattcacacagatgacgacgagaagatctcctaccgatatcttattattgctctcggaatccagctggactatgagaagattaaaggcctacctgaaggtttcgctcatcccaaaatagggtcgaattattcagttaagactgtagagaagacatggaaagctctgcaggacttcaaagagggcaatgccatcttcaccttcccaaatactccagtgaagtgtgctggagcccctcagaagatcatgtacttatcagaagcctacttcaggaagacagggaagcgatccaaggccaatatcattttcaacacttctcttggagccattttcggggttaagaagtatgcagatgccctgcaggagatcatccaggagcggaacctcactgttaactacaagaaaaacctcattgaagtccgagccgataaacaagaggctgtatttgagaacctggacaaaccaggagagacccaagtgatttcatatgaaatgcttcatgtcacacctccaatgagcccaccagatgtcctcaagaccagtcctgtggctgatgctgctggttgggtggatgtggataaagaaactctgcaacacaggaggtacccaaatgtgtttgggattggggactgcaccaaccttcctacgtcaaagaccgctgctgcagtagctgcccagtcaggaatacttgataggacaatttctgtaattatgaagaatcaaacaccaacaaagaagtatgatggctacacatcatgtccactggtgaccggctacaaccgtgtgattcttgctgagtttgactacaaagcagagccgctagaaaccttcccctttgatcaaagcaaagagcgcctttccatgtatctcatgaaagctgacctgatgcctttcctgtattggaatatgatgctaaggggttactggggaggaccagcgtttctgcgcaagttgtttcatctaggtatgagttaaggatggctcagcacttgctcatcttggatggcttctgggccaaaactgcagtcactgaatgaccaagagcagcacgaaggacttggaacctatccttgtaaagagttccttgatgggtaatggtgaccaaatgcctcccttttcagtacctttgaacagcaaccatgtgggctactcatgatgggcttgattctttgggaataataaaatgaaataatacttttattttctgaataaaagtttgtcactg

SEQ ID NO: 208465 - DNA, 1353 bp, Artificial Sequence
  derived and/or modified sequence
atggtgcccctggtggccgtggtgagcggccccagagcccagctgttcgcctgcctgctgagactgggcacccagcaggtgggccccctgcagctgcacaccggcgccagccacgccgccagaaaccactacgaggtgctggtgctgggcggcggcagcggcggcatcaccatggccgccagaatgaagagaaaggtgggcgccgagaacgtggccatcgtggagcccagcgagagacacttctaccagcccatctggaccctggtgggcgccggcgccaagcagctgagcagcagcggcagacccaccgccagcgtgatccccagcggcgtggagtggatcaaggccagagtgaccgagctgaaccccgacaagaactgcatccacaccgacgacgacgagaagatcagctacagatacctgatcatcgccctgggcatccagctggactacgagaagatcaagggcctgcccgagggcttcgcccaccccaagatcggcagcaactacagcgtgaagaccgtggagaagacctggaaggccctgcaggacttcaaggagggcaacgccatcttcaccttccccaacacccccgtgaagtgcgccggcgccccccagaagatcatgtacctgagcgaggcctacttcagaaagaccggcaagagaagcaaggccaacatcatcttcaacaccagcctgggcgccatcttcggcgtgaagaagtacgccgacgccctgcaggagatcatccaggagagaaacctgaccgtgaactacaagaagaacctgatcgaggtgagagccgacaagcaggaggccgtgttcgagaacctggacaagcccggcgagacccaggtgatcagctacgagatgctgcacgtgaccccccccatgagcccccccgacgtgctgaagaccagccccgtggccgacgccgccggctgggtggacgtggacaaggagaccctgcagcacagaagataccccaacgtgttcggcatcggcgactgcaccaacctgcccaccagcaagaccgccgccgccgtggccgcccagagcggcatcctggacagaaccatcagcgtgatcatgaagaaccagacccccaccaagaagtacgacggctacaccagctgccccctggtgaccggctacaacagagtgatcctggccgagttcgactacaaggccgagcccctggagaccttccccttcgaccagagcaaggagagactgagcatgtacctgatgaaggccgacctgatgcccttcctgtactggaacatgatgctgagaggctactggggcggccccgccttcctgagaaagctgttccacctgggcatgagctag

SEQ ID NO: 208466 - protein, 243 aa, Artificial Sequence
  derived and/or modified sequence
MSPAAPVPPDSALESPFEEMALVRGGWLWRQSSILRRWKRNWFALWLDGTLGYYHDETAQDEEDRVLIHFNVRDIKIGPECHDVQPPEGRSRDGLLTVNLREGGRLHLCAETKDDALAWKTALLEANSTPAPAGATVPPRSRRVCSKVRCVTRSWSPCKVERRIWVRVYSPYQDYYEVVPPNAHEATYVRSYYGPPYAGPGVTHVIVREDPCYSAGAPLAMGMLAGAATGAALGSLMWSPCWF

SEQ ID NO: 208467 - protein, 224 aa, Artificial Sequence
  derived and/or modified sequence
MALVRGGWLWRQSSILRRWKRNWFALWLDGTLGYYHDETAQDEEDRVLIHFNVRDIKIGPECHDVQPPEGRSRDGLLTVNLREGGRLHLCAETKDDALAWKTALLEANSTPAPAGATVPPRSRRVCSKVRCVTRSWSPCKVERRIWVRVYSPYQDYYEVVPPNAHEATYVRSYYGPPYAGPGVTHVIVREDPCYSAGAPLAMGMLAGAATGAALGSLMWSPCWF

SEQ ID NO: 208468 - protein, 160 aa, Artificial Sequence
  derived and/or modified sequence
MALVRGGWLWRQSSILRRWKRNWFALWLDGTLGYYHDETAQDEEDRVLIHFNVRDIKIGPECHDVQPPEGRSRDGLLTVNLREGGRLHLCAETKDDALAWKTALLEANSTPAPAGATVPPRSRRVCSKVRCVTRSWSPCKVERRIWVRVYSPYQDYYEVV

SEQ ID NO: 208469 - protein, 85 aa, Artificial Sequence
  derived and/or modified sequence
MALVRGGWLWRQSSILRRWKRNWFALWLDGTLGYYHDETAQDEEDRVLIHFNVRDIKIGPECHDVQPPEGRSRDGLLTVNLREGG

SEQ ID NO: 208470 - DNA, 732 bp, Artificial Sequence
  derived and/or modified sequence
atgtccccagccgccccggtacctccagacagcgcattggaatcaccttttgaagaaatggcactggtccgaggcggatggctttggcgacagagctctatcctcaggcggtggaagaggaactggtttgcgctgtggctggacggaacacttggctactaccatgacgagactgcccaggatgaagaggacagagttctgatccactttaacgtgagggatatcaaaattgggccagaatgtcatgacgtgcagccacctgaagggcggtcacgcgacggcctgctaacagtgaacttgcgcgaaggcggccgcctccacctatgcgccgaaactaaggacgacgccctcgcctggaagacagccttgctggaggcgaatagtactcccgctcccgccggcgccactgtccccccgcgttccagacgggtctgttcaaaagtcaggtgtgtgacgcggagctggtccccttgcaaggtcgagagaagaatctgggtgcgggtctactcgccttatcaagactactatgaggtggtgccgccaaacgctcacgaagctacgtacgtgcgatcttattatgggcccccttatgccggaccaggcgtaacacatgtgatcgtccgtgaggatccatgttactcagcgggcgccccgcttgctatgggcatgctcgctggagccgcaaccggggcggcattaggctccttaatgtggagcccatgctggttctag

SEQ ID NO: 208471 - DNA, 732 bp, Artificial Sequence
  derived and/or modified sequence
atgagccctgctgcccctgtgcccccagattctgccctggagagcccctttgaggagatggccctggtgcggggcggctggctgtggaggcagagcagcatcctgcggcgctggaagaggaactggtttgccctgtggctggatggcaccctgggctactaccatgatgaaacagcccaggatgaagaagatagagtgctgatccacttcaacgtgcgggacatcaagattggccctgagtgccatgatgtgcagcccccagagggccgcagcagagatggcctgctgactgtgaacctgcgggagggcggccgcctgcacctgtgtgccgagaccaaggatgatgccctggcctggaagacagccctgctggaggccaacagcaccccagccccagctggggccaccgtgccccccaggagccggcgggtgtgcagcaaggtgcgctgtgtgaccaggtcctggagcccctgcaaggtggagcggcgcatctgggtgcgggtgtacagcccctaccaggactactatgaggtggtgcccccaaatgcccacgaggccacctacgtgcgcagctactacggccccccctatgccggccctggggtgacccacgtgattgtgcgggaggacccctgctacagcgctggggcccccctggccatgggcatgctggccggggccgccactggagctgccctgggcagcctgatgtggagcccctgctggttctag

SEQ ID NO: 208472 - DNA, 732 bp, Artificial Sequence
  derived and/or modified sequence
atgagccccgccgcccccgtgccccccgacagcgccctggagagcccattcgaggagatggccttagtgaggggaggatggctgtggaggcagtcttccatcctgaggcggtggaaacggaactggtttgccttatggttggacggaacacttggctattatcacgatgagaccgcccaggatgaggaagatcgggtgttaatccattttaacgtgagggacatcaagattggcccagagtgccacgatgtgcagcctcccgagggcagaagccgtgatggcttgctgaccgtgaaccttcgggaagggggcagactgcatctgtgtgcggagacgaaggacgatgccctggcctggaaaaccgccttgctggaagccaatagcacaccagctccggccggggcaacagttcccccccggtccaggagggtgtgttccaaagtaaggtgtgtgacccgcagttggtctccttgtaaggttgaaagacgaatttgggttagagtgtatagcccctaccaagactactacgaggttgtgcctcccaacgcccacgaagcaacttacgtccgatcctattatggcccgccttatgcaggtcccggggtgacacacgtgatagttagggaggacccatgttatagtgcaggcgccccactggccatgggaatgctggctggcgctgccaccggcgctgctcttggcagcctcatgtggagcccatgttggttctag

SEQ ID NO: 208473 - DNA, 2380 bp, Artificial Sequence
  derived and/or modified sequence
aagagaggaaggcttaaagagccagactgcgcagccaggactggggtgatgggcgctgtcctgccaggccaaagaatgaagatgtagccccgcccccaacctagggaggaggaccagcccggttcctgtcctgcccccgcaacctcgccccgattccactccgggaacctcggcgatgctgagccaagaccacttctgaatcagggatgacttgtctagtgaacctagggtcagagccatcagttggaaaggctgggaggagcctggagaaagagggcgaccttccttgggatctgtgcgctccctccttgcctccccctccagcctcccacttggtagcaccttcctgatccccttatctctaaggcgctcagggaaatgccccgctgcgggagccttctgggaaatgctgccctggccacccaggaaccatgagccctgcagccccggtcccgcctgactccgctctggaaagtccttttgaagaaatggccctggtgaggggcggctggctgtggagacagagctccatcctccgccgctggaagcggaactggtttgccctgtggctggacgggaccctgggatactaccacgatgagacagcgcaggacgaggaggaccgtgtgctcatccacttcaatgtccgtgacataaagatcggcccagagtgccatgatgtgcagcccccagagggccggagccgagatggcctgctgactgtgaacctacgggaaggcggccgcctgcacctctgtgcggagaccaaggatgatgccctagcatggaagacagcactgctggaggcaaactccaccccggccccagctggagccaccgtccctcccaggagccgccgggtttgctccaaggtcaggtgtgtgacccgctcgtggagcccctgtaaggttgagaggcggatctgggtgcgcgtctacagcccgtaccaagactactacgaggtggtgccccccaatgcacacgaggccacgtatgtccgcagctactacggaccgccctacgcaggccctggcgtgacgcacgtgatagtgcgggaggatccctgctacagcgccggcgcccctctggccatgggcatgcttgcgggagccgccactggggcggcgctgggctcgctcatgtggtcgccctgctggttctgagccctgggactcggagcactgacccctgcgcttggattgctagactcctcttcctcctggaccccatcctctaccatccaagccctgtcccactttggccctatcctctccattagctccttccgggtttggaccattccccccactccctacccttaatccccacatgggaagaagctatcatcacaggtacaaacatcgcttgaagtcttcacatctaccactagacacccccaaaatctgttatagacatttatggatacatttcctctaaacacaacagggcacagcaaatacgacttcatttggcttcgagttccccaggcgctgtagacacaacatgaatcgggctctctgctctctccttagggagctcgagtcctggtggggagaacaggagtaaacaaggacttgacaaagctgaagagttatcagtcctttgacaaggacaggtggggcagggagcaagacaggtaggctggaagaacagttattggcaagtatgcagagccgtgaacgtcatggcatgtccaaggaattaaatgggagttcatttgggctggggtggaggctgggatcagaccgtggtgggccttcaagctaaggagcttcctaggtgaaaggggagatgtgagccttctctggagggaagtttcatgattgcatctataatgaatatattgcctgttttgtgaatactgacacatgtccatacctaaaacactcctgagtcaagtcccatccttcccacaaacagcttcctggctggtacccatgataacaattgagctgaacctggggacccctggttggggaacaggtgagttctatttgagacttccagccctagaaagctgcctccgtccagaaatgcctctcacaccaggagctcggccctctctttgtagctgtgactgtcaccctctcaggctttgtctcatccttcattctgaataagatggcagtgttctcctctggggcctgatccacctctacaccagcccaggaagccccatctgtgcctgccctcaggtggtccaccagtctccccctttggttcccttccagtctcttccccctttctatcccaatcaccaatagaaatgctaacatccctgcctggtagccagactagcccactaaagctcccctgtaaatgggggctccattagttctgctgccgagactaataaagatttggttggctctagcagtaa

SEQ ID NO: 208474 - DNA, 2061 bp, Artificial Sequence
  derived and/or modified sequence
aggcgctgcgggaggagagaaatgccccaggctctccggggcacacaaagcgcaggcgcagcgggttgggtggcagcagcatcgagtagcggccgcttaggcagcaacatccgcaacaagtgtagacaaggtcccgcctgactccgctctggaaagtccttttgaagaaatggccctggtgaggggcggctggctgtggagacagagctccatcctccgccgctggaagcggaactggtttgccctgtggctggacgggaccctgggatactaccacgatgagacagcgcaggacgaggaggaccgtgtgctcatccacttcaatgtccgtgacataaagatcggcccagagtgccatgatgtgcagcccccagagggccggagccgagatggcctgctgactgtgaacctacgggaaggcggccgcctgcacctctgtgcggagaccaaggatgatgccctagcatggaagacagcactgctggaggcaaactccaccccggccccagctggagccaccgtccctcccaggagccgccgggtttgctccaaggtcaggtgtgtgacccgctcgtggagcccctgtaaggttgagaggcggatctgggtgcgcgtctacagcccgtaccaagactactacgaggtggtgccccccaatgcacacgaggccacgtatgtccgcagctactacggaccgccctacgcaggccctggcgtgacgcacgtgatagtgcgggaggatccctgctacagcgccggcgcccctctggccatgggcatgcttgcgggagccgccactggggcggcgctgggctcgctcatgtggtcgccctgctggttctgagccctgggactcggagcactgacccctgcgcttggattgctagactcctcttcctcctggaccccatcctctaccatccaagccctgtcccactttggccctatcctctccattagctccttccgggtttggaccattccccccactccctacccttaatccccacatgggaagaagctatcatcacaggtacaaacatcgcttgaagtcttcacatctaccactagacacccccaaaatctgttatagacatttatggatacatttcctctaaacacaacagggcacagcaaatacgacttcatttggcttcgagttccccaggcgctgtagacacaacatgaatcgggctctctgctctctccttagggagctcgagtcctggtggggagaacaggagtaaacaaggacttgacaaagctgaagagttatcagtcctttgacaaggacaggtggggcagggagcaagacaggtaggctggaagaacagttattggcaagtatgcagagccgtgaacgtcatggcatgtccaaggaattaaatgggagttcatttgggctggggtggaggctgggatcagaccgtggtgggccttcaagctaaggagcttcctaggtgaaaggggagatgtgagccttctctggagggaagtttcatgattgcatctataatgaatatattgcctgttttgtgaatactgacacatgtccatacctaaaacactcctgagtcaagtcccatccttcccacaaacagcttcctggctggtacccatgataacaattgagctgaacctggggacccctggttggggaacaggtgagttctatttgagacttccagccctagaaagctgcctccgtccagaaatgcctctcacaccaggagctcggccctctctttgtagctgtgactgtcaccctctcaggctttgtctcatccttcattctgaataagatggcagtgttctcctctggggcctgatccacctctacaccagcccaggaagccccatctgtgcctgccctcaggtggtccaccagtctccccctttggttcccttccagtctcttccccctttctatcccaatcaccaatagaaatgctaacatccctgcctggtagccagactagcccactaaagctcccctgtaaatgggggctccattagttctgctgccgagactaataaagatttggttggctctagcagtaa

SEQ ID NO: 208475 - DNA, 618 bp, Artificial Sequence
  derived and/or modified sequence
aaacgtttcctgggtggctccccagggacggcagggctgggggcttctctccagggagctgctgctgaggcctgtgtctcccgtggctcctctgacaggtcccgcctgactccgctctggaaagtccttttgaagaaatggccctggtgaggggcggctggctgtggagacagagctccatcctccgccgctggaagcggaactggtttgccctgtggctggacgggaccctgggatactaccacgatgagacagcgcaggacgaggaggaccgtgtgctcatccacttcaatgtccgtgacataaagatcggcccagagtgccatgatgtgcagcccccagagggccggagccgagatggcctgctgactgtgaacctacgggaaggcggccgcctgcacctctgtgcggagaccaaggatgatgccctagcatggaagacagcactgctggaggcaaactccaccccggccccagctggagccaccgtccctcccaggagccgccgggtttgctccaaggtcaggtgtgtgacccgctcgtggagcccctgtaaggttgagaggcggatctgggtgcgcgtctacagcccgtaccaagactactacgaggtggtgc

SEQ ID NO: 208476 - DNA, 732 bp, Artificial Sequence
  derived and/or modified sequence
atgagccctgccgctcccgtgcctcctgactctgccctggagagcccctttgaggagatggccctggttagggggggttggctctggaggcagtcttctattctccgcaggtggaagcgtaattggtttgcactgtggcttgacggcacactggggtattaccatgatgagactgcccaagatgaggaagaccgggtccttatccattttaatgtacgcgacataaaaattggaccagagtgccacgatgtgcagccccctgaggggagaagccgggatggtctgctaactgtgaatcttcgggaaggagggcgtctgcatctctgtgctgagacaaaggatgacgcactggcctggaagaccgccctgctggaggctaacagtacacctgcacccgctggcgctaccgtacctccaagatcgcgccgtgtctgttccaaagtccgctgcgtgaccaggtcatggtccccatgtaaggttgagcgcagaatttgggtccgtgtttattctccctatcaggattactacgaagttgttcctccgaacgctcacgaagcgacctatgtaagatcctactatggccctccatacgctggtcctggggtgactcacgtgatcgttagggaagatccttgctacagcgccggagctcctctcgccatggggatgctggccggagctgccacgggcgctgctctgggatctcttatgtggtccccttgctggttctag

SEQ ID NO: 208477 - DNA, 732 bp, Artificial Sequence
  derived and/or modified sequence
atgagccccgccgcccccgtgccccccgacagcgccctggagagccccttcgaggagatggccctggtgagaggcggctggctgtggagacagagcagcatcctgagaagatggaagagaaactggttcgccctgtggctggacggcaccctgggctactaccacgacgagaccgcccaggacgaggaggacagagtgctgatccacttcaacgtgagagacatcaagatcggccccgagtgccacgacgtgcagccccccgagggcagaagcagagacggcctgctgaccgtgaacctgagagagggcggcagactgcacctgtgcgccgagaccaaggacgacgccctggcctggaagaccgccctgctggaggccaacagcacccccgcccccgccggcgccaccgtgccccccagaagcagaagagtgtgcagcaaggtgagatgcgtgaccagaagctggagcccctgcaaggtggagagaagaatctgggtgagagtgtacagcccctaccaggactactacgaggtggtgccccccaacgcccacgaggccacctacgtgagaagctactacggccccccctacgccggccccggcgtgacccacgtgatcgtgagagaggacccctgctacagcgccggcgcccccctggccatgggcatgctggccggcgccgccaccggcgccgccctgggcagcctgatgtggagcccctgctggttctag

SEQ ID NO: 208478 - protein, 220 aa, Artificial Sequence
  derived and/or modified sequence
MFQRLSSLFFSTPSPPEDPDCPRAFVSEEDEVDGWLIIDLPDSYAAPPSPGAAPAPAGRPPPAPSLMDESWFVTPPACFTAEGPGLGPARLQSSPLEDLLIEHPSMSVYVTGSTIVLEPGSPSPLPDAALPDGDLSEGELTPARREPRAARHAAPLPARAALLEKAGQVRRLQRARQRAERHALSAKAVQRQNRARESRPRRSKNQSSFIYQPCQRQFNY

SEQ ID NO: 208479 - protein, 77 aa, Artificial Sequence
  derived and/or modified sequence
MFQRLSSLFFSTPSPPEDPDCPRAFVSEEDEVDGWLIIDLPDSYAAPPSPGAAPAPAGRPPPAPSLMDESWFVTPPA

SEQ ID NO: 208480 - protein, 88 aa, Artificial Sequence
  derived and/or modified sequence
MFQRLSSLFFSTPSPPEDPDCPRAFVSEEDEVDGWLIIDLPEGPGLGPARLQSSPLEDLLIEHPSMSVYVTGSTIVLEPGSPSPLPDA

SEQ ID NO: 208481 - DNA, 663 bp, Artificial Sequence
  derived and/or modified sequence
atgttccagaggctctccagcctgtttttttcaaccccctcccctccagaggatcccgattgcccgcgcgccttcgtgtctgaggaagacgaggtggacggctggctgattatagacctccccgacagttatgccgcccccccaagcccaggggccgctcccgcacctgccgggcggcctccaccggctccttctcttatggacgagtcatggtttgttaccccccccgcttgtttcacagctgagggccctgggctgggacctgccagactacagtccagcccattagaagatcttctcatagagcacccatctatgagcgtgtacgttacaggatcaacaattgtcctggagcccgggagcccatcgcctctgccagacgcggccctaccagacggcgacctgtctgagggagaactgacaccggctaggcgtgaacccagggcggcacggcacgccgctcctctgcctgccagggccgcgctgcttgaaaaagccggtcaggtgagacggttgcagagagcgcggcagcgcgctgaaaggcatgcattgagcgcaaaggcagtgcagcgtcagaatcgggcacgggaatctagacctcgcaggtctaaaaatcagtcgagctttatttaccagccctgccagcggcagtttaactactag

SEQ ID NO: 208482 - DNA, 663 bp, Artificial Sequence
  derived and/or modified sequence
atgttccagcggctgtctagcctgtttttcagcacaccgagccccccggaagaccccgattgtccccgcgcatttgtgagcgaagaggatgaggtggatggctggctgattattgaccttccagatagctatgccgccccaccttcacctggagccgctccagcacccgccgggaggccccctcccgccccatctctgatggacgagtcctggttcgttactccacctgcctgttttacagctgaggggcctgggttggggcctgctagactccagtcctctccattggaggatctgctaatcgagcatccctcaatgtccgtgtacgtcacagggagtactattgtattagagccaggatcacctagcccccttcccgatgccgcactgcccgacggagacttaagcgagggggagctgaccccagcccgccgcgagccacgggccgcccgtcatgcagctcctctgcccgctagggccgctttgcttgaaaaagctgggcaggttcgtcggctccagagggcacgtcaaagagccgaaaggcatgctctgtctgccaaggccgttcaacgacagaatagagcccgagagtcccggccccggcggtcaaagaaccagtcaagtttcatttaccagccctgccagcgccagttcaattattag

SEQ ID NO: 208483 - DNA, 234 bp, Artificial Sequence
  derived and/or modified sequence
atgttccagaggctgagtagcctctttttcagcacaccaagtcctcccgaggaccctgattgtcctcgcgcatttgtgtcggaggaggacgaggttgatgggtggctaatcatagatttgcccgacagctatgccgctcctccctcccccggagcggcacctgcgcctgccggtcgacctccaccagctcctagtctgatggacgaatcatggtttgttacccccccagcctag

SEQ ID NO: 208484 - DNA, 267 bp, Artificial Sequence
  derived and/or modified sequence
atgttccagaggctgagcagcctcttcttctccactccatctcctcccgaagaccccgattgtccgagagcctttgtgagtgaagaagacgaagtcgatggttggcttatcatcgatctccctgaaggtccggggttgggacctgcccggttacagagttcccctctggaagacctgttaattgagcatccaagtatgtccgtgtacgtgactggttcaactatcgtcttagaaccgggaagcccgtcccccttacctgacgcctag

SEQ ID NO: 208485 - DNA, 663 bp, Artificial Sequence
  derived and/or modified sequence
atgttccagaggctgagcagcctcttcttcagcacccccagccccccagaagatcctgactgcccccgggcctttgtgtctgaagaagatgaggtggatggctggctgatcatcgacctgcctgacagctatgctgccccacccagccctggggccgccccagccccagctggccggcccccaccagcccccagcctgatggatgagagctggtttgtgaccccaccagcctgcttcaccgctgagggccctggcctgggccctgcccggctgcagagcagccccctggaggacctgctgattgagcaccccagcatgtctgtgtatgtgacaggcagcaccatcgtgctggagcccggcagccccagccccctgcctgatgctgccctgcctgatggagacctgtctgagggggagctgaccccagcccggcgggagcccagggctgcccggcatgctgcccccctgcctgcccgggccgccctgctggagaaggccggccaggtgcggcggctgcagagggcccggcagagagctgagagacatgccctgagcgccaaggctgtgcagaggcagaacagagcccgggagagccggcccaggaggagcaagaaccagagcagcttcatctaccagccctgccagaggcagttcaactactag

SEQ ID NO: 208486 - DNA, 234 bp, Artificial Sequence
  derived and/or modified sequence
atgttccagaggctgagcagcctcttcttcagcacccccagccccccagaagatcctgactgcccccgggcctttgtgtctgaagaagatgaggtggatggctggctgatcatcgacctgcctgacagctatgctgccccacccagccctggggccgccccagccccagctggccggcccccaccagcccccagcctgatggatgagagctggtttgtgaccccaccagcctag

SEQ ID NO: 208487 - DNA, 267 bp, Artificial Sequence
  derived and/or modified sequence
atgttccagaggctgagcagcctcttcttcagcacccccagccccccagaagatcctgactgcccccgggcctttgtgtctgaagaagatgaggtggatggctggctgatcatcgacctgcctgagggccctggcctgggccctgcccggctgcagagcagccccctggaggacctgctgattgagcaccccagcatgtctgtgtatgtgacaggcagcaccatcgtgctggagcccggcagccccagccccctgcctgatgcctag

SEQ ID NO: 208488 - DNA, 663 bp, Artificial Sequence
  derived and/or modified sequence
atgttccagcggctgagcagcctgttcttcagcacccccagcccccccgaagatcccgattgtcctcgggccttcgtttcagaggaggacgaggtggatggttggctgattattgatcttccagattcgtacgcagcccctcccagccccggagcagcccccgccccagcagggcgccccccacccgcacccagcctgatggacgagtcctggtttgtgacgccccccgcatgcttcaccgccgaagggcctggcctgggccccgctcgcctgcaatcctcacctctggaggacttactgatcgaacatcctagcatgtccgtttacgtgaccggaagcaccattgtcctggagccagggagtccatcccccctacccgacgcggcattgcctgacggtgacctgtcggagggcgaactaaccccggccagacgagagccacgcgcagctcgccacgctgctcccctacccgcaagagccgctcttctggagaaagccgggcaagtcaggagactgcagagggcccggcagagagctgagcgtcacgccttgagtgccaaggctgtgcaacgccagaatagagccagagagtcgcggccacgcagatccaagaatcagtcctccttcatctatcagccttgccagcggcagtttaactactag

SEQ ID NO: 208489 - DNA, 663 bp, Artificial Sequence
  derived and/or modified sequence
atgttccagcggctgagcagcctgttcttcagcacccccagcccccctgaagacccagattgccccagggccttcgtatccgaggaggacgaagtggatggctggttgatcatagatctgcctgatagctatgccgcacccccctcccctggtgcagcacccgccccagccggtagacccccaccagccccctccttgatggacgagtcatggtttgtgaccccccccgcttgcttcaccgcggagggccctggtctgggaccggctcgcctgcaaagttcccctttggaggatctgcttatagagcatccctctatgtcggtgtacgtcacaggctctacgatcgtcctggaaccgggatctccatcacctctacccgacgctgccctgcctgacggagatctctccgagggcgaacttacgccggctaggcgggagccaagagcggccagacacgcagcgcctctcccagcgcgcgcagccctacttgagaaggctggacaggtccgtagactgcagcgcgcccgccagcgcgccgaaaggcatgccctgagcgcgaaggctgtccagcgccaaaacagagctagagaatccagacctaggcggagtaagaaccaaagctccttcatttatcagccatgccagcgccagtttaattactag

SEQ ID NO: 208490 - DNA, 234 bp, Artificial Sequence
  derived and/or modified sequence
atgttccagcggctgagcagcctgttcttcagcacccccagcccccctgaggacccagattgcccaagggcctttgtgtctgaggaagacgaggtggatggctggctgatcattgatctccctgacagttatgctgccccaccaagtcccggagccgccccggcacctgccgggcggcccccccccgctccgtccttaatggatgagagctggtttgtgaccccacctgcttag

SEQ ID NO: 208491 - DNA, 267 bp, Artificial Sequence
  derived and/or modified sequence
atgttccagcggctgagcagcctgttcttcagcacccccagcccccccgaggatcccgattgcccccgagcttttgtctcagaggaggacgaggtggatggatggttaattatcgacttaccagaggggcctggtctgggcccggcgaggttgcagtcatcgcctctcgaagacctgctgatcgagcatccatctatgagtgtgtatgtgaccggttcgaccatcgtcctggaaccaggctccccgtcccctctgcccgacgcctag

SEQ ID NO: 208492 - DNA, 663 bp, Artificial Sequence
  derived and/or modified sequence
atgttccagcgtctctcatcgcttttcttcagcacccccagcccaccagaggatcctgattgccccagagcctttgtttccgaggaagacgaggtggacggctggcttataatcgatctgcctgactcatacgcagctccaccctcaccgggtgctgcgcctgccccagcaggaaggcctccaccagccccaagcctcatggatgaaagctggttcgtgacacctcccgcatgcttcacagccgaagggcctggcctgggaccggctaggctccagtccagccctttggaagacctgctgattgagcatccaagtatgagtgtgtacgttaccggctctacgatcgtgctggagccaggatctccatctccactacccgacgcagcgctaccagatggggacctcagcgaaggcgaattaactcctgctcgcagggaacctagggccgctcgacacgccgctcctttgcccgctcgcgctgccctgctggagaaggcaggtcaggtccgtagattgcagagagcgaggcagagggccgagcgccacgccctcagcgccaaggcagtgcagcggcagaaccgggctcgtgagtcccgaccacgcagatctaagaaccaatccagttttatttatcagccatgccagcgacaatttaactattag

SEQ ID NO: 208493 - DNA, 663 bp, Artificial Sequence
  derived and/or modified sequence
atgttccagcgtctatcatccttattcttcagcactccatctccacccgaagaccctgactgtcccagggccttcgtatctgaggaggatgaagtagatgggtggctgatcatcgatttgcccgactcctatgccgcacccccaagtcctggagcagcccctgctcccgcaggccgtccccctcccgctccaagcctcatggacgagtcttggttcgtcactccaccggcttgctttacagctgaggggcctggtctgggcccagccagattgcaatcatcacctttggaagacttactgatagagcacccttcaatgtctgtctatgttacaggctctacaatcgtgttggagcctgggtctcctagccccctgccggacgccgcactgcctgatggtgacctctctgagggcgagcttactcccgctcggcgagagcctcgcgcagcgcgtcatgccgctcctctgcccgcaagggcagcactgcttgagaaggctggtcaggtcagacgactgcagagagccagacagcgtgctgagagacacgctctgtctgccaaggccgtgcaaagacagaacagggccagggagtccaggccccgacgatcaaaaaaccagagttcatttatttaccagccctgccagaggcagtttaactactag

SEQ ID NO: 208494 - DNA, 234 bp, Artificial Sequence
  derived and/or modified sequence
atgtttcagagactgtcatctttgttcttttccaccccgtcacccccagaagaccccgattgcccccgtgcgtttgtatccgaagaagacgaggtggacggctggcttattattgatcttccggactcttacgccgcacccccatcgccaggagcggctccagcgccagccggtaggcctccgccagccccatctctgatggatgaatcctggtttgtgaccccacctgcctag

SEQ ID NO: 208495 - DNA, 267 bp, Artificial Sequence
  derived and/or modified sequence
atgttccagcgactctccagcctgttttttagcaccccttctcccccagaggacccagactgtcctagagcatttgtatccgaagaagatgaggtggatggctggctgatcattgatttgcctgaagggccaggcctgggcccagcgcgtttacagtcaagccccctggaggacctgctaatcgaacatccgtcaatgtcagtgtacgtgacagggtcaaccatagtcttagaacctggttcacccagtccattgcctgacgcttag

SEQ ID NO: 208496 - DNA, 4018 bp, Artificial Sequence
  derived and/or modified sequence
cggccgcacagactcaaagccccgcgggcgagctcagcagcccggagcgaccgcggccccgccgcctcccccgcgagtcccggcgatgcggcccggcctgtgagcggccggcgaccctgggacgccccgccgcacaactacctcaacgccgtgccgcccccctcccgcccccaggtttttgcactgccatagggcgcccccgtgaggcgcttcgccccccaccatgttccagcgcctctccagcctcttcttcagcaccccctcgccccccgaagaccccgactgcccccgcgccttcgtgtcggaggaggatgaagtggacggctggctcatcattgacctgccggacagctacgcggctccacccagccccggggccgcccctgcccccgcgggccgccctccgcccgcgccctccttgatggacgagagctggtttgttacccctcccgcctgttttacggcagaggggcctggactcggtcccgcccgcctccagagcagtcccctggaggacctcctcatcgagcaccccagcatgtccgtttacgtcaccggcagcaccatagtgctagagcccgggtccccttccccgctcccggacgcggccctgcctgacggcgacctcagcgaaggggaattgacgcccgcccgccgcgagccgcgggccgcgcgccacgccgctcctctcccagcgcgggcggcgctgctggagaaggcgggccaggtgcggcggctgcagcgggcccggcagcgggcagagcgccacgcgctgagcgccaaggcggtgcagcggcagaaccgagcccgcgagagccgtccgcgccggtccaagaaccagagcagcttcatctaccagccgtgccagcgccagttcaactactgagcgtccaccggccgcgccacgaaccccttgccgatcccgatccctgtcgggctcctccgactcctcgggctggacaccgaaacctcccttcttaaagcgtgtgaggttgggtgatagccgttccttccccgacaccctcaatttccccatctctgatcctctaatctgcctctgaacccattcacccttcaccctcactcctggtccccatacccagcatctaatcatccatgccccctactcctggcccctccatcctttcttctctggtccccatccctgtctctccctttcacccttgccctccagtcctctacctctggcctgcccctatttctgaaagcttcttccagtccctgatctggctcattccccaccttcaactcccaccttacatgtctcacactatcccatggttggcattacactcactcctgttcccttattcttcattcccagtaattccctaccaaatggtggggaccctgagcccagctctgaccaggtagagcctgtgcagcctgggctgctgtcattgccctccagtaagggctcagggttttgcttttagtctccccttccttctgccttgggggcggtactctgtggagctgcttaggcctggaaaggtacagtatgtagaagaggactgtgagacgtgagttagagggagaagatggagggaatctagggaacgaggcagcctattggagatgcggacaggacagacacgttgagaagctgcagggagcagggcaccaagggagtgtgcactgtgcttgctcagagaggccaaaccctgctcccaggctgaagcctggagtctgcccccacttcccttttctataatccacccttctgcaggccctgaaatctgaagggcttagttagtaccttgccactctacccccaacacgtcacccgagtagaagctgggcaaggccctaccatcctggccgtctgttcacaagcccaaggtgctagaactagcttaggagacatgcaggccacagggcttctaggcagggaaagggcacacaccctaggtcagcgtgcagagcagtgatgctggaggacacaccatggggtgaagccatcccaaggctgacagctcagtcttcaccttgcctctggccttgtatttcacaccctgctcagtatggctagccagcagtcctgagtaggagtccaggactcccactgtctcaatctgcaaattgttcctatccaggttcagggccttcagggggcctcttttcattttctcccacaggcctctctttctttctaggttgctggggagaaatgggtaccctatgatccccctccccttctcctccagtaaatacctggaagagggaacctgaatccctgggggagacagaaggggcaggggccaccagcctccccttcttgtggtgagactgaattttgggctcagacaccagcaacagcctcttgggatgccctgagttgcttcccatttcctctttctagccgtccttttctagtgtgtgctcactcttcctaggaacttttaagacttcttggtacctatgaacataggtcctcccctcaccccaactctaggtttccaggcctcacagccaagctgaagcttggagaaaactctgcattcccatgagggcaaaggcagctgccctccctgaccctatagccccaggcctcatggggggtatgtggggaagggatggggtatccccatggatgctgggatgaggacagaggaagacctgatggggtctcctattccagggaataagccaaattaacactaaaaacggatcaaagctcccacgccagtccactagggccccagtagttgacagccttgctcctctcccaagttctccttcagaacctagttgcttttattcttccagctaccacttgggcacttcacagccagcctagggtcttcggcacctccaagagctgaatctccctccaacccttcttgcctactcctcactgccagctgggacctaggctcagtcctgtgtggtgcccatgatccttctggtgggggaagagtttaagttatagggcatttggctcaaattttaaaaggccttttgtttacctatatttctggaggctcctgtattctagaacccaatctctcacctgcttggttgcaaggctcatatttttttgtacctttcctatagattctgtagcatttgagtgtggcaatattttaattgtgtatagatttctaagaaccaacactactcagtctcctgctagtctgactcctgaagcatcagcccttgtcatactgtattgactgtgtacgtgcctttcaccttgagcatgcttcaggatttttttttaaaccacagaacttgaatacatgagggaaccagagttcaaagtcctatgcaaccttaggagggggttagagagtctgttttgattgatgttttctgaggccctagaggagtttgtatcaatttgtgagtattaatgtcagtactaccagcactttgccaaaactgtcagagggacccgtttctagagtgagtcccagttacatcaaacagtgacttccagttattccccagtaagtctgagtggttccttcaagctgggtgtctttccagcctttgccagtctagccccagcagggcaccgtgtatgaatgcagtttggtgctgttttagagtatgcctgctccccagccccctgcctggaaccctctgagcaacttgctctgacctataatgtcttaggtgcaacacggaccccaccagagctcttggatacccccctagatccatgtggctttatgtgaggggactgaatgcagacacaccatagcccccttctactactttccctctcgccctgccacctagttccacatggaaccaacaagttgagtgcatccctgttgggtgttttgtgttgagactggctgaaatgaggagactttgaccatgtgacgtgtcaacagactcaaggagacaaccacctcaactgggtcatgtggcatgcctgtgtatgtgtgtaacagaattctgattgttagactgtaatgctattcctctatgggagaaaaaaattaatataaagaaaaacaaataaaaatatatttaaagcacatga

SEQ ID NO: 208497 - DNA, 4184 bp, Artificial Sequence
  derived and/or modified sequence
acaatcagctgtttgaacgttccaatttgtgccgtgagccccgccgcagcggccgcacagactcaaagccccgcgggcgagctcagcagcccggagcgaccgcggccccgccgcctcccccgcgagtcccggcgatgcggcccggcctgtgagcggccggcgaccctgggacgccccgccgcacaactacctcaacgccgtgccgcccccctcccgcccccagggaatctctggagattggttcaccttttgtggtcctgaccccttctgtcctcactgtaccttgaagtcctagagtccaataaaatcgctgcctcccagctgtttggatcacagagaggtttttgcactgccatagggcgcccccgtgaggcgcttcgccccccaccatgttccagcgcctctccagcctcttcttcagcaccccctcgccccccgaagaccccgactgcccccgcgccttcgtgtcggaggaggatgaagtggacggctggctcatcattgacctgccggacagctacgcggctccacccagccccggggccgcccctgcccccgcgggccgccctccgcccgcgccctccttgatggacgagagctggtttgttacccctcccgcctgttttacggcagaggggcctggactcggtcccgcccgcctccagagcagtcccctggaggacctcctcatcgagcaccccagcatgtccgtttacgtcaccggcagcaccatagtgctagagcccgggtccccttccccgctcccggacgcggccctgcctgacggcgacctcagcgaaggggaattgacgcccgcccgccgcgagccgcgggccgcgcgccacgccgctcctctcccagcgcgggcggcgctgctggagaaggcgggccaggtgcggcggctgcagcgggcccggcagcgggcagagcgccacgcgctgagcgccaaggcggtgcagcggcagaaccgagcccgcgagagccgtccgcgccggtccaagaaccagagcagcttcatctaccagccgtgccagcgccagttcaactactgagcgtccaccggccgcgccacgaaccccttgccgatcccgatccctgtcgggctcctccgactcctcgggctggacaccgaaacctcccttcttaaagcgtgtgaggttgggtgatagccgttccttccccgacaccctcaatttccccatctctgatcctctaatctgcctctgaacccattcacccttcaccctcactcctggtccccatacccagcatctaatcatccatgccccctactcctggcccctccatcctttcttctctggtccccatccctgtctctccctttcacccttgccctccagtcctctacctctggcctgcccctatttctgaaagcttcttccagtccctgatctggctcattccccaccttcaactcccaccttacatgtctcacactatcccatggttggcattacactcactcctgttcccttattcttcattcccagtaattccctaccaaatggtggggaccctgagcccagctctgaccaggtagagcctgtgcagcctgggctgctgtcattgccctccagtaagggctcagggttttgcttttagtctccccttccttctgccttgggggcggtactctgtggagctgcttaggcctggaaaggtacagtatgtagaagaggactgtgagacgtgagttagagggagaagatggagggaatctagggaacgaggcagcctattggagatgcggacaggacagacacgttgagaagctgcagggagcagggcaccaagggagtgtgcactgtgcttgctcagagaggccaaaccctgctcccaggctgaagcctggagtctgcccccacttcccttttctataatccacccttctgcaggccctgaaatctgaagggcttagttagtaccttgccactctacccccaacacgtcacccgagtagaagctgggcaaggccctaccatcctggccgtctgttcacaagcccaaggtgctagaactagcttaggagacatgcaggccacagggcttctaggcagggaaagggcacacaccctaggtcagcgtgcagagcagtgatgctggaggacacaccatggggtgaagccatcccaaggctgacagctcagtcttcaccttgcctctggccttgtatttcacaccctgctcagtatggctagccagcagtcctgagtaggagtccaggactcccactgtctcaatctgcaaattgttcctatccaggttcagggccttcagggggcctcttttcattttctcccacaggcctctctttctttctaggttgctggggagaaatgggtaccctatgatccccctccccttctcctccagtaaatacctggaagagggaacctgaatccctgggggagacagaaggggcaggggccaccagcctccccttcttgtggtgagactgaattttgggctcagacaccagcaacagcctcttgggatgccctgagttgcttcccatttcctctttctagccgtccttttctagtgtgtgctcactcttcctaggaacttttaagacttcttggtacctatgaacataggtcctcccctcaccccaactctaggtttccaggcctcacagccaagctgaagcttggagaaaactctgcattcccatgagggcaaaggcagctgccctccctgaccctatagccccaggcctcatggggggtatgtggggaagggatggggtatccccatggatgctgggatgaggacagaggaagacctgatggggtctcctattccagggaataagccaaattaacactaaaaacggatcaaagctcccacgccagtccactagggccccagtagttgacagccttgctcctctcccaagttctccttcagaacctagttgcttttattcttccagctaccacttgggcacttcacagccagcctagggtcttcggcacctccaagagctgaatctccctccaacccttcttgcctactcctcactgccagctgggacctaggctcagtcctgtgtggtgcccatgatccttctggtgggggaagagtttaagttatagggcatttggctcaaattttaaaaggccttttgtttacctatatttctggaggctcctgtattctagaacccaatctctcacctgcttggttgcaaggctcatatttttttgtacctttcctatagattctgtagcatttgagtgtggcaatattttaattgtgtatagatttctaagaaccaacactactcagtctcctgctagtctgactcctgaagcatcagcccttgtcatactgtattgactgtgtacgtgcctttcaccttgagcatgcttcaggatttttttttaaaccacagaacttgaatacatgagggaaccagagttcaaagtcctatgcaaccttaggagggggttagagagtctgttttgattgatgttttctgaggccctagaggagtttgtatcaatttgtgagtattaatgtcagtactaccagcactttgccaaaactgtcagagggacccgtttctagagtgagtcccagttacatcaaacagtgacttccagttattccccagtaagtctgagtggttccttcaagctgggtgtctttccagcctttgccagtctagccccagcagggcaccgtgtatgaatgcagtttggtgctgttttagagtatgcctgctccccagccccctgcctggaaccctctgagcaacttgctctgacctataatgtcttaggtgcaacacggaccccaccagagctcttggatacccccctagatccatgtggctttatgtgaggggactgaatgcagacacaccatagcccccttctactactttccctctcgccctgccacctagttccacatggaaccaacaagttgagtgcatccctgttgggtgttttgtgttgagactggctgaaatgaggagactttgaccatgtgacgtgtcaacagactcaaggagacaaccacctcaactgggtcatgtggcatgcctgtgtatgtgtgtaacagaattctgattgttagactgtaatgctattcctctatgggagaaaaaaattaatataaagaaaaacaaataaaaatatatttaaagcacatga

SEQ ID NO: 208498 - DNA, 442 bp, Artificial Sequence
  derived and/or modified sequence
tcctcccgtgacccggtagccgctgtgtcggggctgggccctggggaatctctggagattggttcaccttttgtggtcctgaccccttctgtcctcactgtaccttgaagtcctagagtccaataaaatcgctgcctcccagctgtttggatcacagagaggtttttgcactgccatagggcgcccccgtgaggcgcttcgccccccaccatgttccagcgcctctccagcctcttcttcagcaccccctcgccccccgaagaccccgactgcccccgcgccttcgtgtcggaggaggatgaagtggacggctggctcatcattgacctgccggacagctacgcggctccacccagccccggggccgcccctgcccccgcgggccgccctccgcccgcgccctccttgatggacgagagctggtttgttacccctcccgcct

SEQ ID NO: 208499 - DNA, 477 bp, Artificial Sequence
  derived and/or modified sequence
actcaaagccccgcgggcgagctcagcagcccggagcgaccgcggccccgccgcctcccccgcgagtcccggcgatgcggcccggcctgtgagcggccggcgaccctgggacgccccgccgcacaactacctcaacgccgtgccgcccccctcccgcccccaggtttttgcactgccatagggcgcccccgtgaggcgcttcgccccccaccatgttccagcgcctctccagcctcttcttcagcaccccctcgccccccgaagaccccgactgcccccgcgccttcgtgtcggaggaggatgaagtggacggctggctcatcattgacctgccggaggggcctggactcggtcccgcccgcctccagagcagtcccctggaggacctcctcatcgagcaccccagcatgtccgtttacgtcaccggcagcaccatagtgctagagcccgggtccccttccccgctcccggacgcgg

SEQ ID NO: 208500 - DNA, 663 bp, Artificial Sequence
  derived and/or modified sequence
atgttccagagactgagcagcctgttcttcagcacccccagcccccccgaggaccccgactgccccagagccttcgtgagcgaggaggacgaggtggacggctggctgatcatcgacctgcccgacagctacgccgccccccccagccccggcgccgcccccgcccccgccggcagacccccccccgcccccagcctgatggacgagagctggttcgtgaccccccccgcctgcttcaccgccgagggccccggcctgggccccgccagactgcagagcagccccctggaggacctgctgatcgagcaccccagcatgagcgtgtacgtgaccggcagcaccatcgtgctggagcccggcagccccagccccctgcccgacgccgccctgcccgacggcgacctgagcgagggcgagctgacccccgccagaagagagcccagagccgccagacacgccgcccccctgcccgccagagccgccctgctggagaaggccggccaggtgagaagactgcagagagccagacagagagccgagagacacgccctgagcgccaaggccgtgcagagacagaacagagccagagagagcagacccagaagaagcaagaaccagagcagcttcatctaccagccctgccagagacagttcaactactag

SEQ ID NO: 208501 - DNA, 234 bp, Artificial Sequence
  derived and/or modified sequence
atgttccagagactgagcagcctgttcttcagcacccccagcccccccgaggaccccgactgccccagagccttcgtgagcgaggaggacgaggtggacggctggctgatcatcgacctgcccgacagctacgccgccccccccagccccggcgccgcccccgcccccgccggcagacccccccccgcccccagcctgatggacgagagctggttcgtgaccccccccgcctag

SEQ ID NO: 208502 - DNA, 267 bp, Artificial Sequence
  derived and/or modified sequence
atgttccagagactgagcagcctgttcttcagcacccccagcccccccgaggaccccgactgccccagagccttcgtgagcgaggaggacgaggtggacggctggctgatcatcgacctgcccgagggccccggcctgggccccgccagactgcagagcagccccctggaggacctgctgatcgagcaccccagcatgagcgtgtacgtgaccggcagcaccatcgtgctggagcccggcagccccagccccctgcccgacgcctag

SEQ ID NO: 208503 - protein, 271 aa, Artificial Sequence
  derived and/or modified sequence
MASADSRRVADGGGAGGTFQPYLDTLRQELQQTDPTLLSVVVAVLAVLLTLVFWKLIRSRRSSQRAVLLVGLCDSGKTLLFVRLLTGLYRDTQTSITDSCAVYRVNNNRGNSLTLIDLPGHESLRLQFLERFKSSARAIVFVVDSAAFQREVKDVAEFLYQVLIDSMGLKNTPSFLIACNKQDIAMAKSAKLIQQQLEKELNTLRVTRSAAPSTLDSSSTAPAQLGKKGKEFEFSQLPLKVEFLECSAKGGRGDVGSADIQDLEKWLAKIA

SEQ ID NO: 208504 - protein, 92 aa, Artificial Sequence
  derived and/or modified sequence
MASADSRRVADGGGAGGTFQPYLDTLRQELQQTDPTLLSVVVAVLAVLLTLVFWKLIRSRRSSQRAVLLVGLCDSGKTLLFVRLLTGLYRDT

SEQ ID NO: 208505 - DNA, 816 bp, Artificial Sequence
  derived and/or modified sequence
atggccagcgccgacagcagaagagtggccgacggcggcggcgccggcggcaccttccagccctacctggacaccctgagacaggagctgcagcagaccgaccccaccctgctgagcgtggtggtggccgtgctggccgtgctgctgaccctggtgttctggaagctgatcagaagcagaagaagcagccagagagccgtgctgctggtgggcctgtgcgacagcggcaagaccctgctgttcgtgagactgctgaccggcctgtacagagacacccagaccagcatcaccgacagctgcgccgtgtacagagtgaacaacaacagaggcaacagcctgaccctgatcgacctgcccggccacgagagcctgagactgcagttcctggagagattcaagagcagcgccagagccatcgtgttcgtggtggacagcgccgccttccagagagaggtgaaggacgtggccgagttcctgtaccaggtgctgatcgacagcatgggcctgaagaacacccccagcttcctgatcgcctgcaacaagcaggacatcgccatggccaagagcgccaagctgatccagcagcagctggagaaggagctgaacaccctgagagtgaccagaagcgccgcccccagcaccctggacagcagcagcaccgcccccgcccagctgggcaagaagggcaaggagttcgagttcagccagctgcccctgaaggtggagttcctggagtgcagcgccaagggcggcagaggcgacgtgggcagcgccgacatccaggacctggagaagtggctggccaagatcgcctag

SEQ ID NO: 208506 - DNA, 279 bp, Artificial Sequence
  derived and/or modified sequence
atggccagcgccgacagcagaagagtggccgacggcggcggcgccggcggcaccttccagccctacctggacaccctgagacaggagctgcagcagaccgaccccaccctgctgagcgtggtggtggccgtgctggccgtgctgctgaccctggtgttctggaagctgatcagaagcagaagaagcagccagagagccgtgctgctggtgggcctgtgcgacagcggcaagaccctgctgttcgtgagactgctgaccggcctgtacagagacacctag

SEQ ID NO: 208507 - DNA, 816 bp, Artificial Sequence
  derived and/or modified sequence
atggcaagtgccgattcaagacgcgtggcagacggagggggcgcaggagggactttccaaccgtaccttgacacactacggcaggagttacagcagaccgaccccaccctactatctgtcgtggtcgccgtgctggccgtgcttttgacactggtattttggaagttgataagatcacggcgttctagtcagcgtgccgttctgctagtgggactgtgtgactctggcaaaacactattatttgtaaggctcctgactggcctgtaccgagacactcagacctcaatcactgactcttgtgctgtctaccgcgtgaataataataggggaaactccctgaccctgattgacttacctgggcacgagtccctgcggttgcagttcctggaacgatttaagtctagcgcgagggccatagtcttcgtggtagattcagctgcatttcagcgggaggtgaaagatgtcgccgaattcctctatcaggtactaatcgactccatggggttgaagaacacaccctccttcttgattgcctgcaacaagcaagacatcgcaatggcaaaaagcgccaagctgatacagcaacagctggagaaagaactgaacacactacgcgtcacgcgtagtgccgccccgtccacacttgactcatcatcaaccgcccctgctcagctcggcaagaagggtaaagagtttgaatttagccagttgcccctgaaagtcgaatttcttgagtgttcagcaaagggtggccggggagacgtgggcagcgccgacatccaagacctcgagaaatggctggccaaaatcgcttag

SEQ ID NO: 208508 - DNA, 279 bp, Artificial Sequence
  derived and/or modified sequence
atggcttctgcggacagcagacgggtggctgatggtgggggcgccggcgggacattccagccataccttgataccctgaggcaggaactgcaacagacggacccaacattactgtctgtggtggttgctgtcctcgcagtgctgttgactctggtgttttggaagctgattcgaagcaggagatcgagccagagagcagtgctgctagtcggactgtgcgatagcgggaagaccttactttttgtccggctgttgaccggcctctatcgggacacttag

SEQ ID NO: 208509 - DNA, 816 bp, Artificial Sequence
  derived and/or modified sequence
atggccagcgctgacagcagaagagtggctgatggcggcggggccggcggcaccttccagccctacctggacaccctgcggcaggagctgcagcagacagaccccaccctgctgtctgtggtggtggccgtgctggccgtgctgctgaccctggtgttctggaagctgatccgcagccgccgcagcagccagagagctgtgctgctggtgggcctgtgtgacagcggcaagaccctgctgtttgtgcggctgctgaccggcctgtacagagacacccagaccagcatcacagacagctgtgctgtgtacagagtgaacaacaacagaggcaacagcctgaccctgattgacctgcccggccacgagagcctgcggctgcagttcctggagcgcttcaagagcagcgcccgggccatcgtgtttgtggtggacagcgctgccttccagcgggaggtgaaggatgtggccgagttcctgtaccaggtgctgattgacagcatgggcctgaagaacacccccagcttcctgattgcctgcaacaagcaggacatcgccatggccaagagcgccaagctgatccagcagcagctggagaaggagctgaacaccctgcgggtgaccaggtctgctgcccccagcaccctggacagcagcagcacagccccagcccagctgggcaagaagggcaaggagtttgagttcagccagctgcccctgaaggtggagttcctggagtgcagcgccaagggcggcagaggagatgtgggcagcgctgacatccaggacctggagaagtggctggccaagatcgcctag

SEQ ID NO: 208510 - DNA, 279 bp, Artificial Sequence
  derived and/or modified sequence
atggccagcgctgacagcagaagagtggctgatggcggcggggccggcggcaccttccagccctacctggacaccctgcggcaggagctgcagcagacagaccccaccctgctgtctgtggtggtggccgtgctggccgtgctgctgaccctggtgttctggaagctgatccgcagccgccgcagcagccagagagctgtgctgctggtgggcctgtgtgacagcggcaagaccctgctgtttgtgcggctgctgaccggcctgtacagagacacctag

SEQ ID NO: 208511 - DNA, 816 bp, Artificial Sequence
  derived and/or modified sequence
atggccagcgccgacagccggcgggtggccgacggcggcggcgccggtggcacattccagccttacttggatactctgaggcaggagctccagcagactgacccaaccctactgtccgtggtcgtggccgtactcgcagtgctcttgacgctcgtattctggaaactgatacgttctagacgcagttcacagcgtgcagtcttgcttgtggggttatgcgatagtggaaaaacattgcttttcgtgcgactgctcactgggctctatcgcgacacgcagaccagcatcaccgacagctgtgcagtttacagggtaaacaacaatcggggcaatagccttacgctcattgatctgcccggccacgaatcacttagactgcaatttctggaacggttcaagtctagtgcacgggccatcgtgttcgtagtggattctgccgcttttcaacgcgaagtcaaagacgttgccgagttcctgtaccaagtattgatagattcaatgggtttaaagaacactcctagctttttaatcgcttgcaacaagcaggatatcgcaatggcaaagagtgcaaagttgatccagcagcaattagagaaagagctgaatacacttcgggtgactaggagcgccgccccatcaacactggactcctcttctacggccccagcccaactcggcaaaaagggcaaggagtttgagtttagccagctccctctcaaggtggagttcctggagtgcagtgccaagggaggccgcggggatgttggctcagcggacatccaggatttggaaaagtggctggcgaagatcgcctag

SEQ ID NO: 208512 - DNA, 279 bp, Artificial Sequence
  derived and/or modified sequence
atggccagcgccgacagccggcgggtggccgacggcggcggcgccggcggcacattccagccatatctcgatactctgaggcaggaattgcagcagactgatccaactctgctgagtgtggtcgttgctgtgctggcagtgttgctcacccttgttttttggaaattgatcagatctagaagaagcagccagagggccgtcttactagtgggtctgtgtgactctgggaagacccttctctttgtcagactgctcactggactttacagagacacttag

SEQ ID NO: 208513 - DNA, 816 bp, Artificial Sequence
  derived and/or modified sequence
atggctagcgccgatagcaggcgggtggccgatgggggtggtgcaggcggtaccttccagccatatctggatacacttaggcaggagctgcagcaaacagaccccacactcttgtctgtcgtagtggcggtgctcgcggtcctcttaacccttgttttctggaaattaatccgcagccgcaggagcagtcagagggcagtgctcctggtggggctgtgtgacagcggtaaaacgttgttattcgtgcggctgctgactggtctttatcgtgacacacagacttctattaccgacagctgtgccgtctacagagttaataataatcgagggaacagtctcacactgatcgacctgccaggccacgagtctttgcggctgcagtttctcgaaagattcaaatcatccgctcgggcaatagtgttcgtcgtcgattcagccgcttttcagcgagaagtgaaagatgtagccgaattcctttatcaggtgctgatcgacagcatggggctgaagaacactccttcttttctgatcgcctgcaataagcaggatattgcgatggctaaaagcgcaaagctcattcagcagcaactggaaaaggagctgaacactctaagagttaccagatccgccgcaccttccacactcgactcatcttccactgcccctgctcagctggggaaaaagggcaaagaatttgaattttcccaactgcctctcaaggtggagtttcttgaatgcagcgccaaaggtgggcgtggtgatgtcggttcagctgacattcaggacctggagaagtggcttgccaaaattgcatag

SEQ ID NO: 208514 - DNA, 279 bp, Artificial Sequence
  derived and/or modified sequence
atggcatccgccgacagcagacgggtggccgacggcggtggggctgggggaacgtttcaaccatatctggataccttgcgccaagagctccagcagaccgaccctacactgctcagcgtcgtagtcgcagtgttggccgttctgcttactctggttttctggaaattgattcggtcccgccgatcgtctcagagggctgtgctgctagtgggcctgtgtgactccggcaagacgctgctttttgttcgtctgctcaccggcctttaccgggacacgtag

SEQ ID NO: 208515 - DNA, 2016 bp, Artificial Sequence
  derived and/or modified sequence
gtaggccatggagccgagcagatccgggtcttcgggtggccgcaatgtcccaagtggacgacacccacctagtcccgaggacaaccgacaaagtccttaatgggcccagaaggaggacggagtcccagagaactacaactcccatcaagcacttgggggatcgccgcggctgagggagagactatggcttaggaaccaccattcgcgtgaggctctgctccccgcgcctgcgcagagtgcagggccacgtcgcttttgctgtaccggggaccacgcgtctcatccatggcttccgcggactcgcgccgggtggcagatggcggcggtgccgggggcaccttccagccctacctagacaccttgcggcaggagctgcagcagacggacccaacgctgttgtcagtagtggtggcggttcttgcggtgctgctgacgctagtcttctggaagttaatccggagcagaaggagcagtcagagagctgttcttcttgttggcctttgtgattccgggaaaacgttgctctttgtcaggttgttaacaggcctttatagagacactcagacgtccattactgacagctgtgctgtatacagagtcaacaataacaggggcaatagtctgaccttgattgaccttcccggccatgagagtttgaggcttcagttcttagagcggtttaagtcttcagccagggctattgtgtttgttgtggatagtgcagcattccagcgagaggtgaaagatgtggctgagtttctgtatcaagtcctcattgacagtatgggtctgaagaatacaccatcattcttaatagcctgcaataagcaagatattgcaatggcaaaatcagcaaagttaattcaacagcagctggagaaagaactcaacaccttacgagttacccgttctgctgcccccagcacactggacagttccagcactgcccctgctcagctggggaagaaaggcaaagagtttgaattctcacagttgcccctcaaagtggagttcctggagtgcagtgccaagggtggaagaggggacgtgggctctgctgacatccaggacttggagaaatggctggctaaaattgcctgagaggcagctctaaagcacaagacctggatgtgtgacacacagttttggaaaaaggtctgtggtagtctggagttgatgaggaaggggtacaagatgtggttagaaacatttctttgttctggaaacaaagtactgttgaaaccagcttggaattttttttttttttttttttaagttcagttctcccttatggctgcctttcaaacaagtaccttttatctgatgcctgtatcttccctttgttaaggtgtaacttgatgtagggtcaaggtttttgtgacaacaggcagactccacacagagaggatatgatgagaatatggccatcacctgaaaagttttcttatcttctgtgcttttggtccctggaaacaaatccgcctatgtatgaagctagttgatttccagttgcactatttccagttgcctctgaagttcacaggcaatacattgtctagtcctttgcgaatttctctgatttgtgggcacagttatgaagtttccccacatgtgaagacaggtacaaaatagcagagccaagcagacagtgggtctattcttcattagctcagtgacttgtccacactcgtcttagcacttacgtttcaaaagcttgtcacaaacccttggagtcattcccagataatagaactggaaatgataaatcccctaatgccaagggtctagtgtgttcttagtggttatactgggaagtgtgtggagatttaggtgctgctctgctgctctggatggctgaaggctcctgggccatcttcatgtgctgcttgaagagctcctattttgtactcctggctagaatgctgtggaacaaatacaaagtgaaaaaagttctctgtagatttctgaagtgcatattcattgatgccaagaaaaaaaaaaagttgcctttttgaa

SEQ ID NO: 208516 - DNA, 512 bp, Artificial Sequence
  derived and/or modified sequence
atctcttaaaagatgtgtgtgtccctcgacaaataacctgtctgcccctatcgttctgtaggaggacggagtcccagagaactacaactcccatcaagcacttgggggatcgccgcggctgagggagagactatggcttaggaaccaccattcgcgtgaggctctgctccccgcgcctgcgcagagtgcagggccacgtcgcttttgctgtaccggggaccacgcgtctcatccatggcttccgcggactcgcgccgggtggcagatggcggcggtgccgggggcaccttccagccctacctagacaccttgcggcaggagctgcagcagacggacccaacgctgttgtcagtagtggtggcggttcttgcggtgctgctgacgctagtcttctggaagttaatccggagcagaaggagcagtcagagagctgttcttcttgttggcctttgtgattccgggaaaacgttgctctttgtcaggttgttaacaggcctttatagagacactca

SEQ ID NO: 208517 - protein, 261 aa, Artificial Sequence
  derived and/or modified sequence
MVVLSVPAEVTVILLDIEGTTTPIAFVKDILFPYIEENVKEYLQTHWEEEECQQDVSLLRKQAEEDAHLDGAVPIPAASGNGVDDLQQMIQAVVDNVCWQMSLDRKTTALKQLQGHMWRAAFTAGRMKAEFFADVVPAVRKWREAGMKVYIYSSGSVEAQKLLFGHSTEGDILELVDGHFDTKIGHKVESESYRKIADSIGCSTNNILFLTDVTREASAAEEADVHVAVVVRPGNAGLTDDEKTYYSLITSFSELYLPSST

SEQ ID NO: 208518 - protein, 219 aa, Artificial Sequence
  derived and/or modified sequence
MVVLSVPAEVTVILLDIEGTTTPIAFVKDILFPYIEENVKEYLQTHWEEEECQQDVSLLRKQAEEDAHLDGAVPIPAASGNGVDDLQQMIQAVVDNVCWQMSLDRKTTALKQLQGHMWRAAFTAGRMKAEFFADVVPAVRKWREAGMKVYIYSSGSVEAQKLLFGHSTEGDILELVDGHFDTKIGHKVESESYKDCRQHWVLNQQHFVSDRCYSRGQCC

SEQ ID NO: 208519 - DNA, 459 bp, Artificial Sequence
  derived and/or modified sequence
ggagccaaccgtggcgcaggcggcgcggggaggcgtcccagagggatgctatactggacttccctactctcatctgctccagccccctgaccttatagttgcccagctttcctggcaattgactttgcccatcaatacacaggatttagcatccagggaagatgtcggagcctcagatgttaattttctaattgagaatgttggcgctgtccgaacctggagacaggaaaacaaaaagtcctttctcctgattcaccaaaaaataaaatactgactaccatcactgtgatgagattcctatagtctcaggaactgaagtctttaaacaaccagggaccctctgcccctagaataagaacatactagaagtcccttctgctaggacaacgaggatcatgggagaccacctggaccttctcctaggagtggtgctcatggccggtcctgtgtttggaattc

SEQ ID NO: 208520 - DNA, 660 bp, Artificial Sequence
  derived and/or modified sequence
atggtggtgctgagcgtgcccgccgaggtgaccgtgatcctgctggacatcgagggcaccaccacccccatcgccttcgtgaaggacatcctgttcccctacatcgaggagaacgtgaaggagtacctgcagacccactgggaggaggaggagtgccagcaggacgtgagcctgctgagaaagcaggccgaggaggacgcccacctggacggcgccgtgcccatccccgccgccagcggcaacggcgtggacgacctgcagcagatgatccaggccgtggtggacaacgtgtgctggcagatgagcctggacagaaagaccaccgccctgaagcagctgcagggccacatgtggagagccgccttcaccgccggcagaatgaaggccgagttcttcgccgacgtggtgcccgccgtgagaaagtggagagaggccggcatgaaggtgtacatctacagcagcggcagcgtggaggcccagaagctgctgttcggccacagcaccgagggcgacatcctggagctggtggacggccacttcgacaccaagatcggccacaaggtggagagcgagagctacaaggactgcagacagcactgggtgctgaaccagcagcacttcgtgagcgacagatgctacagcagaggccagtgctgctag

SEQ ID NO: 208521 - DNA, 786 bp, Artificial Sequence
  derived and/or modified sequence
atggtggtattgtctgtgccagctgaggtgactgtgatcttgttggacatcgagggcacgacaactcctatagcatttgtgaaggatattctatttccctacatagaggagaatgtgaaggagtacctgcagacgcactgggaggaggaggagtgccaacaggatgtgtctctgctaagaaagcaagccgaggaagacgctcaccttgacggcgcggtgcccattccagctgccagtgggaacggcgtcgacgaccttcaacaaatgatccaggccgtggttgacaacgtgtgctggcagatgtccctggatcgtaagaccacggccctgaaacagctgcagggtcatatgtggcgggctgcatttaccgccggccggatgaaggccgaattcttcgctgacgtcgtgcctgccgtgagaaaatggcgcgaggccgggatgaaagtctacatctattcctctggctcagtggaagctcaaaaactcctgttcggacacagcacagaaggtgacatccttgagctcgtggatggccattttgataccaagatcggccacaaagtcgaaagcgagagttacagaaagattgctgattctatcggctgtagcactaataacattttgtttcttactgacgtcaccagggaggcatccgccgctgaggaggcagacgtgcatgttgccgtggtggttcgccccgggaacgccgggctgaccgacgacgagaagacgtattactctctgataacgagcttctcagagttgtacctaccgtccagcacttag

SEQ ID NO: 208522 - DNA, 660 bp, Artificial Sequence
  derived and/or modified sequence
atggtggtgttatctgtgcccgccgaggtgaccgtaattctgctggatatcgagggaactacaacgcccattgcatttgtaaaagacattcttttcccttatattgaagaaaatgtgaaggagtacctgcagacacactgggaggaggaagagtgccaacaggacgtatccctgctgcgtaagcaggctgaggaagatgctcacctcgacggcgctgtccccatccctgccgctagcggcaatggtgtcgacgaccttcagcagatgattcaggccgtggtcgacaatgtgtgctggcagatgagcctcgatcggaagaccacagctttgaagcagttgcagggacacatgtggagggcggccttcacggccggccgcatgaaggctgaatttttcgccgatgtcgttcccgccgttcgcaaatggcgagaagccgggatgaaagtgtatatatacagtagcgggagtgtagaggcccagaagctgctgttcgggcactcgactgaaggcgatatcctcgagctggtggacggccacttcgacactaaaattggacataaggtggaatctgagtcctacaaggattgtaggcagcactgggtcttgaaccagcagcacttcgtcagtgatagatgctattcacgcggacagtgctgctag

SEQ ID NO: 208523 - DNA, 786 bp, Artificial Sequence
  derived and/or modified sequence
atggtggtgctgtctgtgcctgctgaggtgaccgtcatcctgctggacatcgagggcaccaccacccccatcgcctttgtgaaggacatcctcttcccctacattgaagaaaatgtgaaggagtacctgcagacccactgggaggaggaggagtgccagcaggatgtgtccctgctgaggaagcaggccgaggaggatgcccacctggatggagctgtgcccatcccagctgccagcggaaatggagtggatgacctgcagcagatgatccaggccgtggtggacaacgtgtgctggcagatgagcctggacaggaagaccacagccctgaagcagctgcagggccacatgtggagggctgccttcaccgctggccgcatgaaggccgagttctttgctgatgtggtgcctgctgtgaggaagtggagggaggccggcatgaaggtgtacatctacagcagcggctctgtggaggcccagaagctgctgtttggccacagcacagaaggagacatcctggagctggtggatggccactttgacaccaagattggccacaaggtggagagcgagagctacaggaagattgctgacagcatcggctgcagcaccaacaacatcctcttcctgacagatgtgacccgggaggccagcgctgctgaggaggctgatgtgcacgtggccgtggtggtgcggcctggaaatgccggcctgacagatgatgagaagacctactacagcctcatcaccagcttcagcgagctgtacctgcccagcagcacctag

SEQ ID NO: 208524 - DNA, 660 bp, Artificial Sequence
  derived and/or modified sequence
atggtggtgctgtctgtgcctgctgaggtgaccgtcatcctgctggacatcgagggcaccaccacccccatcgcctttgtgaaggacatcctcttcccctacattgaagaaaatgtgaaggagtacctgcagacccactgggaggaggaggagtgccagcaggatgtgtccctgctgaggaagcaggccgaggaggatgcccacctggatggagctgtgcccatcccagctgccagcggaaatggagtggatgacctgcagcagatgatccaggccgtggtggacaacgtgtgctggcagatgagcctggacaggaagaccacagccctgaagcagctgcagggccacatgtggagggctgccttcaccgctggccgcatgaaggccgagttctttgctgatgtggtgcctgctgtgaggaagtggagggaggccggcatgaaggtgtacatctacagcagcggctctgtggaggcccagaagctgctgtttggccacagcacagaaggagacatcctggagctggtggatggccactttgacaccaagattggccacaaggtggagagcgagagctacaaggactgccggcagcactgggtgctgaaccagcagcactttgtgtctgaccgctgctacagccggggccagtgctgctag

SEQ ID NO: 208525 - DNA, 786 bp, Artificial Sequence
  derived and/or modified sequence
atggtggtgctgagcgtgcccgccgaggtgaccgtgatcctgctggacatcgaagggaccactacgcctatcgccttcgtgaaagacattttgttcccctacatcgaagagaatgtgaaagagtacctccagactcactgggaggaagaggaatgtcagcaagacgtcagcttactgcgcaaacaagccgaagaggatgcccacttggacggtgctgtgcccatccccgccgcatctggaaatggagtggatgaccttcaacaaatgatccaggcggtagtggacaatgtgtgttggcagatgtccctcgaccgtaagaccaccgccctgaagcaactgcaggggcatatgtggcgggcggcctttactgcagggagaatgaaggcagagttctttgccgacgtcgttcccgccgttcgtaagtggcgtgaagccggtatgaaagtctacatctatagcagtggttctgtagaggcacagaaacttctattcggacacagtacggaaggagatatcctcgagctagtcgacgggcatttcgataccaagattgggcataaggttgagtcagagtcataccggaagatagccgatagcataggctgtagtactaataacatactctttctgaccgacgtcaccagggaggctagcgcagccgaggaggccgacgtgcacgtggcagttgttgtgagacctgggaatgctggcctgactgatgatgagaagacatactattcccttataactagctttagcgaactgtaccttccatctagcacctag

SEQ ID NO: 208526 - DNA, 660 bp, Artificial Sequence
  derived and/or modified sequence
atggtggtgctgagcgtgcccgccgaggtgaccgtgatcctgctggacatcgaggggacaaccacacctatcgcattcgtgaaagacatcctgttcccttacattgaagagaatgtgaaagagtaccttcagactcactgggaagaggaggaatgtcagcaggatgtgtctctcctgcgaaaacaggcggaggaggacgcccacctggacggggctgtcccaattccggcggcaagcggcaatggcgtagatgacctgcagcagatgattcaggcggtggttgacaacgtgtgctggcagatgtcactggatcgcaaaacaacagcactgaagcagctccagggacacatgtggagggccgcattcaccgctggacgtatgaaggctgagtttttcgcagatgtggtacccgccgtcaggaagtggcgggaagctggcatgaaagtgtacatctactcgtccggttcggtggaggctcaaaagctcttgtttggacactctacagagggtgacatcttagagcttgtcgacggacactttgatacaaagataggccacaaagtggagtccgagagctacaaagattgtaggcaacactgggtgctgaaccagcagcatttcgtttcagacagatgttatagtcggggacagtgctgctag

SEQ ID NO: 208527 - DNA, 786 bp, Artificial Sequence
  derived and/or modified sequence
atggttgtcttaagcgtgcccgcagaggtgacagtgattctcctagacatagaagggaccactacccccatagcctttgtgaaagacatcctgtttccttacatcgaggaaaacgtgaaagaatacctgcagacacattgggaagaggaagagtgccagcaggatgttagtctgctgcgcaagcaggcggaggaagatgcccatttagacggggcagtccccatccccgctgcctcaggcaacggtgtggatgacttgcagcagatgattcaagcagtggtggataatgtttgctggcagatgtcactggaccggaagactacggccctcaagcagctgcagggacacatgtggcgcgcagcatttactgccggacgcatgaaggctgagttcttcgcagacgtcgtaccagccgtccgcaaatggagagaggcagggatgaaagtctatatctattcctcaggcagcgtagaagcccaaaagttattgttcgggcacagcaccgaaggagatattctggagctcgtggatggacattttgatactaaaattgggcataaagtggagagcgagtcttatcggaagatcgctgatagcattggctgctccacgaacaatatcctgtttttaacagacgttacccgtgaggcctctgcggctgaggaagccgacgtgcacgtcgcagtcgtggttcggcctggtaatgcaggtttgactgatgacgagaagacttactactccttgatcaccagctttagtgagctgtatctgcccagtagcacttag

SEQ ID NO: 208528 - DNA, 660 bp, Artificial Sequence
  derived and/or modified sequence
atggtggtgctgtcagtgcctgccgaggtaacagtaatactgctcgatattgaagggaccacaactcccatcgccttcgtgaaagacatcctgtttccttatattgaagagaatgtgaaggagtatcttcagacccactgggaagaagaggagtgccagcaggacgtttcgctcctcagaaaacaggccgaggaagacgcccatctcgatggcgcagtcccaatcccagcagcttccggtaacggagttgacgatctgcaacaaatgatccaggccgtagttgacaacgtgtgttggcagatgtccctggacagaaaaaccacagccctgaagcagctgcagggtcacatgtggagagctgcctttactgcaggccgaatgaaggcagagttcttcgccgatgttgtccctgccgtgcgtaagtggagggaagcgggaatgaaagtatatatctacagttctggaagcgtcgaagcgcagaagttgctgttcggacactctactgaaggcgatatacttgaactggtagatggacatttcgataccaagattgggcacaaagtggagtcagaaagctacaaagactgtcggcagcattgggttctcaaccaacagcacttcgtcagtgacagatgttatagcagagggcagtgttgctag

SEQ ID NO: 208529 - DNA, 2011 bp, Artificial Sequence
  derived and/or modified sequence
cttttcctgcccacgtggtctcgggctcctgccccgtcctgctcacgagttcagggctcctgggcggccgccttttccagttccaggtgtgcagaagtgtcctctccccacgcgcggcgggctgcacttggtcgctggctccgagatcgcgcggggccgccggaagcccaagacggtaccgggggccgcagccgcagccggcgccgccctccgccctccccaacagcaggccgagtcccgtagcatccggtagggaaatggtcgtgctttcggtccccgccgaagtcaccgtgatcctgttagatatcgaaggtaccacaaccccgattgctttcgtgaaggacattttatttccttacatcgaagaaaatgttaaagagtatctgcagacacattgggaagaagaggagtgccagcaggatgtcagtcttttgaggaaacaggctgaagaggacgcccacctggatggggctgttcctatccctgcagcatctgggaatggagtggatgatctgcaacagatgatccaggccgtggtagataatgtgtgctggcagatgtccctggatcgaaagaccactgcactcaaacagctgcagggccacatgtggagggcggcattcacagctgggcgcatgaaagcagagttctttgcagatgtagttccagcagtcaggaagtggagagaggccggaatgaaggtgtacatctattcctcagggagtgtggaggcacagaaactgttattcgggcattctacggagggagatattcttgagcttgttgatggtcactttgataccaagattggacacaaagtagagagtgaaagttacaaagattgcagacagcattgggtgctcaaccaacaacattttgtttctgacagatgttactcgagaggccagtgctgctgaggaagcagatgtgcacgtagctgtggtggtgagaccaggcaacgcaggattaacagatgatgagaagacttactacagcctcatcacatccttcagtgaactatacctgccttcctcaacctagagaagggttgttaaggcagaccgccctgttccccagagttgtccctgtagtgtctaggtttattctaatggtaaaagtaacttacttaaaaaacatatgtacacatatgtatgcaagtatgtatatatgtgtatgctcagattaacttccataggtacataagtgaaagaagtctcagttcagtgaacacaaaacttatttaaagatgctttatatgtagaaattgtttcaaatcatactctaacccttagtgagggcaaagtgtagttggtagaagaaattgctaaatacctatctaatgtgctatgtttatcaaatcgtgtactaaaatggaaagctagttttgagaaattattcagaagccttgttattttaaaaatgaaatatttcaaagactgaatattttcaaagaaaatgaataattcattgcccttgtgatttagaagattataacagctgtatttcatatttgcctccttatatatatcaaagaccaaggtatttccttctgcttcaaaagaacaaaattgggaaagaaaactcacttgagtcttgatcaaacaagtgtcttttacttaagaagaaacttggtaatcattgtggcacccacagcaagcagttgccttaccagtgaaaaaggtgcactgaggtaacatctaaaacagagatgtggttcttaatgtttaacagaacagttctaatcctgccacgtgttatcattatagattttatagttgcctttctaactacttagcacagtttgagaatacgttaattgctatttactatttaaaaagttttactgaaatcagtccataacattaagatgagccctaatatgtaagattttcctctggaatggatgtgagaaatgtaaattttataacagcagtatttatcctggtttaattctaatacgatgtcatgttaatttcatgttgtgattaataaaagcattttttcttcactc

SEQ ID NO: 208530 - DNA, 2025 bp, Artificial Sequence
  derived and/or modified sequence
aagggccgccccttttcctgcccacgtggtctcgggctcctgccccgtcctgctcacgagttcagggctcctgggcggccgccttttccagttccaggtgtgcagaagtgtcctctccccacgcgcggcgggctgcacttggtcgctggctccgagatcgcgcggggccgccggaagcccaagacggtaccgggggccgcagccgcagccggcgccgccctccgccctccccaacagcaggccgagtcccgtagcatccggtagggaaatggtcgtgctttcggtccccgccgaagtcaccgtgatcctgttagatatcgaaggtaccacaaccccgattgctttcgtgaaggacattttatttccttacatcgaagaaaatgttaaagagtatctgcagacacattgggaagaagaggagtgccagcaggatgtcagtcttttgaggaaacaggctgaagaggacgcccacctggatggggctgttcctatccctgcagcatctgggaatggagtggatgatctgcaacagatgatccaggccgtggtagataatgtgtgctggcagatgtccctggatcgaaagaccactgcactcaaacagctgcagggccacatgtggagggcggcattcacagctgggcgcatgaaagcagagttctttgcagatgtagttccagcagtcaggaagtggagagaggccggaatgaaggtgtacatctattcctcagggagtgtggaggcacagaaactgttattcgggcattctacggagggagatattcttgagcttgttgatggtcactttgataccaagattggacacaaagtagagagtgaaagttaccgaaagattgcagacagcattgggtgctcaaccaacaacattttgtttctgacagatgttactcgagaggccagtgctgctgaggaagcagatgtgcacgtagctgtggtggtgagaccaggcaacgcaggattaacagatgatgagaagacttactacagcctcatcacatccttcagtgaactatacctgccttcctcaacctagagaagggttgttaaggcagaccgccctgttccccagagttgtccctgtagtgtctaggtttattctaatggtaaaagtaacttacttaaaaaacatatgtacacatatgtatgcaagtatgtatatatgtgtatgctcagattaacttccataggtacataagtgaaagaagtctcagttcagtgaacacaaaacttatttaaagatgctttatatgtagaaattgtttcaaatcatactctaacccttagtgagggcaaagtgtagttggtagaagaaattgctaaatacctatctaatgtgctatgtttatcaaatcgtgtactaaaatggaaagctagttttgagaaattattcagaagccttgttattttaaaaatgaaatatttcaaagactgaatattttcaaagaaaatgaataattcattgcccttgtgatttagaagattataacagctgtatttcatatttgcctccttatatatatcaaagaccaaggtatttccttctgcttcaaaagaacaaaattgggaaagaaaactcacttgagtcttgatcaaacaagtgtcttttacttaagaagaaacttggtaatcattgtggcacccacagcaagcagttgccttaccagtgaaaaaggtgcactgaggtaacatctaaaacagagatgtggttcttaatgtttaacagaacagttctaatcctgccacgtgttatcattatagattttatagttgcctttctaactacttagcacagtttgagaatacgttaattgctatttactatttaaaaagttttactgaaatcagtccataacattaagatgagccctaatatgtaagattttcctctggaatggatgtgagaaatgtaaattttataacagcagtatttatcctggtttaattctaatacgatgtcatgttaatttcatgttgtgattaataaaagcattttttcttcactca

SEQ ID NO: 208531 - DNA, 786 bp, Artificial Sequence
  derived and/or modified sequence
atggtggtgctgagcgtgcccgccgaggtgaccgtgatcctgctggacatcgagggcaccaccacccccatcgccttcgtgaaggacatcctgttcccctacatcgaggagaacgtgaaggagtacctgcagacccactgggaggaggaggagtgccagcaggacgtgagcctgctgagaaagcaggccgaggaggacgcccacctggacggcgccgtgcccatccccgccgccagcggcaacggcgtggacgacctgcagcagatgatccaggccgtggtggacaacgtgtgctggcagatgagcctggacagaaagaccaccgccctgaagcagctgcagggccacatgtggagagccgccttcaccgccggcagaatgaaggccgagttcttcgccgacgtggtgcccgccgtgagaaagtggagagaggccggcatgaaggtgtacatctacagcagcggcagcgtggaggcccagaagctgctgttcggccacagcaccgagggcgacatcctggagctggtggacggccacttcgacaccaagatcggccacaaggtggagagcgagagctacagaaagatcgccgacagcatcggctgcagcaccaacaacatcctgttcctgaccgacgtgaccagagaggccagcgccgccgaggaggccgacgtgcacgtggccgtggtggtgagacccggcaacgccggcctgaccgacgacgagaagacctactacagcctgatcaccagcttcagcgagctgtacctgcccagcagcacctag

SEQ ID NO: 208532 - protein, 258 aa, Artificial Sequence
  derived and/or modified sequence
MPPQQGDPAFPDRCEAPPVPPRRERGGRGGRGPGEPGGRGRAGGAEGRGVKCVLVGDGAVGKTSLVVSYTTNGYPTEYIPTAFDNFSAVVSVDGRPVRLQLCDTAGQDEFDKLRPLCYTNTDIFLLCFSVVSPSSFQNVSEKWVPEIRCHCPKAPIILVGTQSDLREDVKVLIELDKCKEKPVPEEAAKLCAEEIKAASYIECSALTQKNLKEVFDAAIVAGIQYSDTQQQPKKSKSRTPDKMKNLSKSWWKKYCCFV

SEQ ID NO: 208533 - DNA, 777 bp, Artificial Sequence
  derived and/or modified sequence
atgcctccacagcagggcgacccggcttttcccgacaggtgtgaggctccaccggtcccaccccgtcgtgagaggggcgggcgagggggcagaggtcctggagagcccggtggcagaggaagagcaggaggggccgagggaaggggtgtgaagtgcgttttagttggcgacggcgctgtcggaaagacatctctggttgtgtcgtatacaacgaatggctatcccaccgagtacattcccactgcctttgacaatttctctgccgtggtttccgtcgatggaaggcccgtgcgtctccagctgtgtgacacagcagggcaggatgagttcgacaaactgcggccgctctgttacaccaatactgacattttcttgctgtgtttctccgtggtcagccctagcagcttccagaacgtttccgagaagtgggtacccgagattaggtgtcactgtccaaaggctccaattatcctcgttggaactcaaagcgatttgcgcgaagatgtgaaggtgttgattgaactggacaagtgcaaggaaaaacccgtgcctgaggaagccgcgaagctgtgcgctgaggaaataaaggccgcttcctatatcgaatgtagcgcacttacccagaaaaacttgaaagaagtttttgacgccgccatcgtcgctgggattcagtattcggacacacagcaacagcctaagaaaagcaaatctaggacgcctgacaagatgaaaaacctctccaagagctggtggaagaagtactgttgtttcgtttag

SEQ ID NO: 208534 - DNA, 777 bp, Artificial Sequence
  derived and/or modified sequence
atgccaccccagcagggcgaccctgccttcccagacagatgtgaggcccctcctgtgcccccccggcgggagcggggcggccggggcggccggggccctggagagcccggcggccggggccgggccggcggcgctgagggccggggcgtgaagtgtgtgctggtgggagatggagctgtgggcaagaccagcctggtggtgtcctacaccaccaacggctaccccacagagtacatccccacagcctttgacaacttctctgctgtggtgtctgtggatggccggcctgtgcggctgcagctgtgtgacacagctggccaggatgaatttgacaagctgcggcccctgtgctacaccaacacagacatcttcctgctgtgcttctctgtggtgagccccagcagcttccagaatgtgtctgagaagtgggtgcctgagatccgctgccactgccccaaggcccccatcatcctggtgggcacccagagcgacctgagagaagatgtgaaggtgctgattgagctggacaagtgcaaggagaagcctgtgcctgaggaggccgccaagctgtgtgccgaggagatcaaggccgccagctacatcgagtgcagcgccctgacccagaagaacctgaaggaggtgtttgatgctgccatcgtggccggcatccagtacagcgacacccagcagcagcccaagaagagcaagagcaggaccccagacaagatgaagaacctgagcaagtcctggtggaagaagtactgctgctttgtgtag

SEQ ID NO: 208535 - DNA, 777 bp, Artificial Sequence
  derived and/or modified sequence
atgcccccccagcagggcgaccccgccttccccgaccggtgcgaggctccccccgtgccaccccggagggaacgcggaggtaggggcggacgaggcccaggagagcctggaggcaggggccgagctggaggggcagagggccggggagttaagtgtgtcctcgttggggatggcgcggtgggtaagacgagcttggtcgtgagctatactacgaatggctaccccacagagtacatccctacggccttcgacaatttcagcgccgtggtgagcgttgatggaagacccgtccgcctgcagctgtgcgatacggctggacaggacgagttcgacaagctacggcccctttgttataccaacactgacatcttcctcctgtgctttagcgtggtgtcacccagcagtttccagaatgtttctgagaagtgggttcccgagattaggtgccactgccccaaagccccgatcatcctcgttggcactcagtccgacctgagggaagacgtgaaggtgctgattgagctggataaatgcaaggagaaaccagttcctgaggaagctgccaagttgtgcgccgaggagattaaagctgcatcgtacatcgagtgttccgctctgacacagaagaacctgaaggaggtgtttgatgccgctatagtggccgggattcagtacagcgatacgcagcagcagccaaagaagagtaagagtcgcacaccagataagatgaaaaacttgagcaagagttggtggaagaaatactgctgcttcgtctag

SEQ ID NO: 208536 - DNA, 777 bp, Artificial Sequence
  derived and/or modified sequence
atgccacctcaacagggggatcctgcgtttcctgatagatgcgaagcccctccagtaccgccacgacgggaaaggggaggacggggtgggaggggaccaggcgagccaggaggccgagggcgagccggaggagccgaagggcgaggcgtcaagtgtgtcctcgtcggcgacggcgctgtgggtaagacaagcctggtagttagctataccaccaatggctatccaacagaatacatccccacggccttcgacaatttcagtgcagtggtgtccgtggatggcagaccggtgaggttacagctttgcgatactgcgggtcaggatgaattcgacaaactcagaccattgtgttacactaatactgacatcttcctcttgtgcttcagtgtggtgtccccttcgtctttccagaatgtctccgagaaatgggtgccggaaatacggtgtcactgtccaaaggcaccaataatcctggtgggtacacagtcagatctcagggaagatgttaaggtcctcatagaactggacaaatgcaaagaaaaacctgtgccagaggaggccgctaagctgtgcgccgaagaaatcaaggccgctagttatatcgagtgttccgctctaacccagaaaaaccttaaggaagtgttcgatgcggctattgtggcgggaatccaatactcagatacacagcagcagcccaaaaaaagcaagagcagaacaccggataagatgaaaaatttgagtaaatcttggtggaaaaagtattgttgctttgtgtag

SEQ ID NO: 208537 - DNA, 4372 bp, Artificial Sequence
  derived and/or modified sequence
gggctccacggagtgaataggaggcggctcaggcttcctggctcgcgtgggcgccagaaagcggaacctcccgggccagtcgcgcggtggtcaccctcttgggagctggggaggaggctgcggaggctggcccggctccttcgggcgtcgcttcccggaccgggtgcgcggggtcccccggaacgtgtgttccaggtcctcccgcgccagtgttcgcagtccccgcctggtcgcggcggcgcctcgggcgcgggtgcaggcgcgcggcgcgcaggcggggggcgctgtggtcttggcgcggggaccgagccgctcggccagacccgcctcttttccctccccgccagcccgcccgcctgcccgccccccacgcgtcgtgtcgccgggaagccgggcggagacagagcgcttgggatccacggcgctcggaccgctgtcctccaacagcgcagggcagagcggctggcgccgccggagcgcggagccacgaccctccctggccgcctttgtctactggccgtgcggcccggaaccgccactctccagggccggggacgcgcccgcagctgtcggtgacagctcctccctaccgcaaccctccggggcggaggggcggtcgggccgggccctgctagcccgcgaccgcaagcccgcgctcgcggatcgatgcccccgcagcagggggaccccgcgttccccgaccgctgcgaggcgcctccggtgccgccgcgtcgggagcgcggtggacgcgggggacgcgggcctggggagccggggggccgggggcgtgcggggggtgccgaggggcgcggcgtcaagtgcgtgctggtcggcgacggcgcggtgggcaagacgagcctggtggtgagctacaccaccaacggctaccccaccgagtacatccctactgccttcgacaacttctccgcggtggtgtctgtggatgggcggcccgtgagactccaactctgtgacactgccggacaggatgaatttgacaagctgaggcctctctgctacaccaacacagacatcttcctgctctgcttcagtgtcgtgagcccctcatccttccagaacgtcagtgagaaatgggtgccggagattcgatgccactgtcccaaagcccccatcatcctagttggaacgcagtcggatctcagagaagatgtcaaagtcctcattgagttggacaaatgcaaagaaaagccagtgcctgaagaggcggctaagctgtgcgccgaggaaatcaaagccgcctcctacatcgagtgttcagccttgactcaaaaaaacctcaaagaggtctttgatgcagccatcgtcgctggcattcaatactcggacactcagcaacagccaaagaagtctaaaagcaggactccagataaaatgaaaaacctctccaagtcctggtggaagaagtactgctgtttcgtatgatgctggcaagacacccagaaaggctattttcagatgaaatcgatattagaagctatattagctgaaacaactccttttactgcgtagaacctatatcgagagtgtgtgtatatgtattataggaggagctctcaattttatgtattctttctgcctttaattttcttgtttgtttgagcttagggatgagatacttatgcaagatatttttgaagtaaattaaacatttttcacatctctggaaatttagagttctagacctctggttaatttatatctaatatgaagaagacacctctaatctggatgttaagaatgaagttctgctacattataatgtacagaagagcaaaagggaggaacactatggttaaccctctcttgattaagggctacttaatgcacagtgcattatgtacacaggtcaaccatggtaacaatagttcttagctttgaaactccatgcaaaccatgccttttttttaaggagcaaaaatctgagaaaaaaagtgagagacctctgcctacaaaacctcaaaccagtcacttttgtcaattgctaatacccagttacttatgatttaaaaacaaccaacagaaaacatcccactgactgtatggcactctgtagtcaaaaaaggaaacttccttattgggacttttctttcttagtccagttgtgttgacacatatgaacacagacaaagtgctatgcggaggaaagcaagtgttggtcagtagtttcatgttttagggagtggttcctgtggagatcagaaagtgacatttgctttcggtactgtaatacgtgcaccaaactgcctcaatcctaggtaacgagggcaacagggagcacctgtctggattgtttttaaacctccatactcaagctgtctcttcggcagggaggtgaatactcttgaaaggccaacagcaagtgtttgtgggacacaacacagataattttttcttaagtcggccaagatgtacttctctgtgtgcacacccatgcacactcatgcacacagatacataggtctgtatggctgtatttgctgttgattcagactttcacaccattaatggggaaaagcgtggccacaaaaacagatgctaggaagcttggcttcctcttcttgttgacccttttttgaaccaacatcttttttattatattcagagtatgtttttaagtgtatcttaatatatacattttttaggacatcttaaatctaaacaaaaaataaaatgaacatctcttgaaacctgttaaaacaaccagttaaagccacagatggctttcagggcagtagcagcagaggccagtggactctgaggactcctgaggggcggggcgtgtagccagccaggtgcatgccgggaccatggcccccatacttggctgcttcctgtgacagtgaaatacatccttcaaggtggcagctgttagggctgaatcttctggagaaaaaggtgccatctcaggagaatagcttttactctggtaggaatgcttccgagacaccacaaggcagcctgaacactcagttgcagggtcgggcttgcggtgggtgacccagagccaccaaagtcacatccacaactaatgagggaaatctgtaaagccagttagatagaagaattttatttttctgtgggttttgtgttgtcttttttatgttaaaaagaaatccagtttgtgtttttctatagaaaaagtaaaagatcaggttatactttaggttaggggttctatttattcctgttagtaaataaaattaacaaatttctttgtttaacaaaagattaatctttaaaccactaaaatacatagactgattgattattcaacacattggaattgatgtcggtcatagtttcctgaagcatttagttacaacctgaaggaataaaatgatttgtggaaatgcttaaaatagacctaactgaatacagtctcatcttgccgcgcctggcttacctatctgtggaaagctaggcttcccaggctgggctctgcctgtctggtgcctggaggtgtgggagggaagatgagttatttaactggtaagcgatttgaaacactatttttatattaaagtaaatggcatggagtatagtgcaaattcatttttaagatagaacacaaaacttgaaagaagttttatgcgtgtgacagtgtatggggctgcagttggtctccctggaggggacttccacacctcctgcctttaggccatgggtggaaagtgctcagtgaagtacacctgtgtggcccagttctgaaagctttatacagttgaattttaagtggggttgataacaccttggactgttagtgttaaaaatctagtgggttgacctttaaatgcaacagtttttaaaatatattgctgcattttatagaatagtaaaggtacgattatacttgagattttcctccatttttatttcttcgtgaacatagagtttggggccgaaaatgtttttaaagtatgtgtttgagttaaatataaagttggttcacttcaaagctaaaaaattgttaaacttgcagcttggtattgcagagaagattttataagaattttgctttagagaatgccactttggctgaactacaagtgtaggccaccattataatttataaatacagcatacttcaaaactgtttgttatctcttgttaccatgtatgtataaatggaccttttataaccttgttctctgcttgacagactcaagagaaactacccaggtattacacaagccaaaatgggagcaaggccttctctccagactatcgtaacctggtgccttaccaagttgtgcttttctgttttcaagtgtaaatgatgttgagcagaatgttgtacttgaaaatgctataagtgagatggtatgaaataaattctgacttatgaatataa

SEQ ID NO: 208538 - DNA, 777 bp, Artificial Sequence
  derived and/or modified sequence
atgcccccccagcagggcgaccccgccttccccgacagatgcgaggccccccccgtgccccccagaagagagagaggcggcagaggcggcagaggccccggcgagcccggcggcagaggcagagccggcggcgccgagggcagaggcgtgaagtgcgtgctggtgggcgacggcgccgtgggcaagaccagcctggtggtgagctacaccaccaacggctaccccaccgagtacatccccaccgccttcgacaacttcagcgccgtggtgagcgtggacggcagacccgtgagactgcagctgtgcgacaccgccggccaggacgagttcgacaagctgagacccctgtgctacaccaacaccgacatcttcctgctgtgcttcagcgtggtgagccccagcagcttccagaacgtgagcgagaagtgggtgcccgagatcagatgccactgccccaaggcccccatcatcctggtgggcacccagagcgacctgagagaggacgtgaaggtgctgatcgagctggacaagtgcaaggagaagcccgtgcccgaggaggccgccaagctgtgcgccgaggagatcaaggccgccagctacatcgagtgcagcgccctgacccagaagaacctgaaggaggtgttcgacgccgccatcgtggccggcatccagtacagcgacacccagcagcagcccaagaagagcaagagcagaacccccgacaagatgaagaacctgagcaagagctggtggaagaagtactgctgcttcgtgtag

SEQ ID NO: 208539 - protein, 145 aa, Artificial Sequence
  derived and/or modified sequence
MTVHNLYLFDRNGVCLHYSEWHRKKQAGIPKEEEYKLMYGMLFSIRSFVSKMSPLDMKDGFLAFQTSRYKLHYYETPTGIKVVMNTDLGVGPIRDVLHHIYSALYVELVVKNPLCPLGQTVQSELFRSRLDSYVRSLPFFSARAG

SEQ ID NO: 208540 - DNA, 438 bp, Artificial Sequence
  derived and/or modified sequence
atgaccgtgcacaacctgtacctgttcgacagaaacggcgtgtgcctgcactacagcgagtggcacagaaagaagcaggccggcatccccaaggaggaggagtacaagctgatgtacggcatgctgttcagcatcagaagcttcgtgagcaagatgagccccctggacatgaaggacggcttcctggccttccagaccagcagatacaagctgcactactacgagacccccaccggcatcaaggtggtgatgaacaccgacctgggcgtgggccccatcagagacgtgctgcaccacatctacagcgccctgtacgtggagctggtggtgaagaaccccctgtgccccctgggccagaccgtgcagagcgagctgttcagaagcagactggacagctacgtgagaagcctgcccttcttcagcgccagagccggctag

SEQ ID NO: 208541 - DNA, 438 bp, Artificial Sequence
  derived and/or modified sequence
atgactgtgcataacctttacctgttcgaccgcaacggcgtgtgcctgcattactctgagtggcatcgcaagaaacaggctggcatccctaaggaagaggagtacaagctcatgtatggaatgttattctccattagaagttttgtgagcaaaatgtcgcccctggatatgaaagatggcttcttggcctttcaaacttctagatacaagctacactattatgaaaccccgacaggaatcaaagtggtcatgaatactgacctgggcgtgggtcccatcagggacgtccttcaccacatctactctgctttgtacgtggagctcgtggtgaagaatcccctgtgtccacttgggcagactgttcagagcgagttgtttagatctcgcctcgatagctatgtccgctcccttcctttcttctccgcccgggccggttag

SEQ ID NO: 208542 - DNA, 438 bp, Artificial Sequence
  derived and/or modified sequence
atgaccgtgcacaacctgtatctttttgatagaaacggcgtctgtctgcattactccgaatggcaccgtaagaagcaggctgggattccaaaggaggaggaatacaagcttatgtatggtatgctcttcagtatccgttcctttgtgtctaaaatgtcccctcttgatatgaaggatgggttcttggcctttcagaccagccgatacaagttacattactatgagacgcctactggaattaaagtagtaatgaacactgacctcggggtgggccccatcagggacgttctccatcatatttacagtgccttgtacgtggagttggtggtgaagaaccctctttgtccccttgggcagaccgtacagagtgagctgtttagatcccgcctagacagctacgtccggtctctgccgtttttctctgccagagctggatag

SEQ ID NO: 208543 - DNA, 438 bp, Artificial Sequence
  derived and/or modified sequence
atgacagtgcacaacctgtacctgtttgacagaaatggagtgtgcctgcactacagcgagtggcacaggaagaagcaggccggcatccccaaggaggaggagtacaagctgatgtatggcatgctgttcagcatccgcagctttgtgtccaagatgagccccctggacatgaaggatggcttcctggccttccagaccagccgctacaagctgcactactatgagacccccaccggcatcaaggtggtgatgaacacagacctgggcgtgggccccatcagagatgtgctgcaccacatctacagcgccctgtatgtggagctggtggtgaagaaccccctgtgccccctgggccagacagtgcagagcgagctgttccgcagccggctggacagctatgtgcgcagcctgcccttcttcagcgcccgggccggctag

SEQ ID NO: 208544 - DNA, 438 bp, Artificial Sequence
  derived and/or modified sequence
atgaccgtgcacaacctgtacctgttcgaccggaacggcgtgtgccttcactattccgagtggcataggaagaagcaggctggaatccctaaggaggaagagtacaagctcatgtacgggatgcttttctccatacgcagtttcgtctctaaaatgtccccgttggatatgaaagacggttttctggcctttcagacaagcagatacaaactgcactattacgaaacccccactggtataaaagtggtgatgaacaccgatttgggcgttggacccatacgggacgtccttcatcacatctactctgctttgtacgtggagctggtcgtcaagaacccactgtgtcccctgggacagacagtccagtccgaactgttccgatcacgactcgacagttacgttcggtctctgccattttttagtgcaagggccggttag

SEQ ID NO: 208545 - DNA, 438 bp, Artificial Sequence
  derived and/or modified sequence
atgaccgtgcacaacctgtacctgttcgaccggaacggcgtgtgccttcactatagcgaatggcaccgcaaaaagcaggcaggaataccaaaagaagaagaatataaactcatgtatgggatgttgttctcgatcaggtcctttgtcagcaaaatgtcccctctggacatgaaagacggcttcctggcattccaaacctctaggtacaagttgcattactatgagactccaacaggaatcaaggttgtcatgaataccgaccttggcgtcggtccgattcgcgacgtgttgcaccacatttacagcgcgctgtacgtcgagcttgttgtcaagaatcccctgtgtccgctgggtcagacagttcaatccgagttattcagatcccgattggatagctacgtgcgcagcctgcccttctttagtgcacgcgccggctag

SEQ ID NO: 208546 - DNA, 438 bp, Artificial Sequence
  derived and/or modified sequence
atgactgtacataacctctatttgttcgaccgcaatggagtgtgtctccattactccgaatggcaccggaaaaagcaggcgggtatcccgaaagaggaagagtataaactgatgtacggtatgctgttttcaatcaggagcttcgtatctaagatgtccccactggatatgaaagatggattcttggccttccagacttccagatacaagttacactactatgagacccctactggcatcaaggtcgtgatgaacacagaccttggtgtgggacctatcagggacgtgctgcaccatatctactctgccctgtatgttgaactcgtcgtgaagaatcccctctgcccactcggacagactgtccagtcggaattatttcgttcccgtcttgatagctacgttcgatctctcccctttttttctgctagagccggttag

SEQ ID NO: 208547 - DNA, 438 bp, Artificial Sequence
  derived and/or modified sequence
atgaccgttcacaacctgtacttatttgaccgcaacggcgtgtgcttacattactccgaatggcataggaagaaacaggcaggaataccgaaagaggaagagtataagctgatgtacgggatgctcttctccattagaagcttcgtatccaagatgtcaccactcgacatgaaagacggtttccttgcttttcagacctcgcgctacaagctgcactattacgaaacacccacaggaattaaggttgttatgaacacagatctgggcgtggggcctatccgcgacgtcctgcatcatatctacagcgcactgtatgtggagttagtcgttaagaaccctctgtgcccacttggccagactgtgcagtcagaactgttcaggtccagactggactcatacgttagaagtctgccatttttcagtgcaagagcgggatag

SEQ ID NO: 208548 - DNA, 818 bp, Artificial Sequence
  derived and/or modified sequence
gcagttccggtgagtccgtgggtggggtccccacctggttggaaggctgtgggtccgggaacccgagcccaaggagtgggggcggccccggagcgaggctcacactccctgccctgcagatgactgtccacaacctgtacctgtttgaccggaatggagtgtgtctgcactacagcgaatggcaccgcaagaagcaagcagggattcccaaggaggaggagtataagctgatgtacgggatgctcttctctatccgctcgtttgtcagcaagatgtccccgctagacatgaaggatggcttcctggccttccaaactagccgttacaaactccattactacgagacgcccactgggatcaaagttgtcatgaatactgacttgggcgtgggacccatccgagatgtgctgcaccacatctacagtgcgctgtatgtggagctggtggtgaagaatcccctgtgcccgctgggccaaactgtgcaaagtgagctctttcgctcccgactggactcctatgttcgctctctgcccttcttctccgcccgggctggctgaagcaacctacctcaagtctcaggagaattcatgtctgcctggggcccttccgaacctgtgccaactaagggcccccactgtaagcccccgcacccccaccccctgcccagagcaacagcctaaaggcctgccctgatgctctcctcctaccagagtgaagcccacagagtccctccacctccacaccaggccctctctccagttttatcccctgcctaatgctgcgagaagcacagaataaactttttgtcactctctgcg

SEQ ID NO: 208549 - DNA, 759 bp, Artificial Sequence
  derived and/or modified sequence
aaggggcggagctccgtggaaaccggaagtaactcttgacgggcactcggagcagttccgatgactgtccacaacctgtacctgtttgaccggaatggagtgtgtctgcactacagcgaatggcaccgcaagaagcaagcagggattcccaaggaggaggagtataagctgatgtacgggatgctcttctctatccgctcgtttgtcagcaagatgtccccgctagacatgaaggatggcttcctggccttccaaactagccgttacaaactccattactacgagacgcccactgggatcaaagttgtcatgaatactgacttgggcgtgggacccatccgagatgtgctgcaccacatctacagtgcgctgtatgtggagctggtggtgaagaatcccctgtgcccgctgggccaaactgtgcaaagtgagctctttcgctcccgactggactcctatgttcgctctctgcccttcttctccgcccgggctggctgaagcaacctacctcaagtctcaggagaattcatgtctgcctggggcccttccgaacctgtgccaactaagggcccccactgtaagcccccgcacccccaccccctgcccagagcaacagcctaaaggcctgccctgatgctctcctcctaccagagtgaagcccacagagtccctccacctccacaccaggccctctctccagttttatcccctgcctaatgctgcgagaagcacagaataaactttttgtcactctctgcg

SEQ ID NO: 208550 - protein, 214 aa, Artificial Sequence
  derived and/or modified sequence
MELAAGSFSEEQFWEACAELQQPALAGADWQLLVETSGISIYRLLDKKTGLYEYKVFGVLEDCSPTLLADIYMDSDYRKQWDQYVKELYEQECNGETVVYWEVKYPFPMSNRDYVYLRQRRDLDMEGRKIHVILARSTSMPQLGERSGVIRVKQYKQSLAIESDGKKGSKVFMYYFDNPGGQIPSWLINWAAKNGVPNFLKDMARACQNYLKKT

SEQ ID NO: 208551 - protein, 193 aa, Artificial Sequence
  derived and/or modified sequence
LAQGRCLQVTAVQIQGSWKVTGVQPQKTGLYEYKVFGVLEDCSPTLLADIYMDSDYRKQWDQYVKELYEQECNGETVVYWEVKYPFPMSNRDYVYLRQRRDLDMEGRKIHVILARSTSMPQLGERSGVIRVKQYKQSLAIESDGKKGSKVFMYYFDNPGGQIPSWLINWAAKNGVPNFLKDMARACQNYLKKT

SEQ ID NO: 208552 - protein, 142 aa, Artificial Sequence
  derived and/or modified sequence
MDSDYRKQWDQYVKELYEQECNGETVVYWEVKYPFPMSNRDYVYLRQRRDLDMEGRKIHVILARSTSMPQLGERSGVIRVKQYKQSLAIESDGKKGSKVFMYYFDNPGGQIPSWLINWAAKNGVPNFLKDMARACQNYLKKT

SEQ ID NO: 208553 - DNA, 645 bp, Artificial Sequence
  derived and/or modified sequence
atggaattggctgccgggtctttctcagaggagcagttttgggaagcatgtgctgaactacagcagcctgcattagccggcgctgactggcaattgctagtagaaaccagcggaatttctatctatcgactgctagacaaaaagactggtctgtatgagtataaagtgttcggagtcttagaggactgttccccaacactgcttgctgacatctatatggattcagactatcggaaacagtgggaccagtatgtgaaggaactgtacgagcaagagtgcaatggtgagacagtagtctattgggaggtgaaatacccatttcccatgtcaaaccgcgattatgtttatcttaggcagcgccgggacctcgatatggaaggccgcaaaatacatgtgatcttggctaggagcacaagcatgccacagctgggcgagagatctggtgtgatccgcgtcaagcagtataaacaatctctcgcgattgagagcgatgggaaaaaaggctcaaaggtcttcatgtactactttgataatccaggaggccagatcccctcttggcttatcaactgggccgctaaaaatggtgtgcctaatttcctgaaagatatggccagggcgtgccagaattaccttaaaaagacatag

SEQ ID NO: 208554 - DNA, 582 bp, Artificial Sequence
  derived and/or modified sequence
ctcgcacagggccgatgtttgcaggttaccgcagtacaaattcaaggctcttggaaagtgactggagtacagcctcaaaaaacaggcctgtacgaatacaaggtatttggagtcctggaggactgctcccccacactcctggcagatatttatatggactccgattaccggaagcaatgggatcagtacgtgaaagaactgtacgagcaggagtgcaacggggaaacggttgtgtactgggaagtgaagtatccattccccatgtctaatagagattacgtgtacctacgccagcggcgggacctggatatggaaggcagaaagattcacgtgatcctggcgagatccacaagcatgcctcagttgggggaacgctctggagtcatcagggtcaaacaatacaagcagtctcttgcaattgagtccgatggaaaaaaaggctcaaaagttttcatgtattactttgacaaccccggcggacaaattccgtcttggttaatcaactgggccgcaaaaaacggagtgcccaatttcctcaaagatatggcaagggcctgtcagaactacctgaagaagacctag

SEQ ID NO: 208555 - DNA, 645 bp, Artificial Sequence
  derived and/or modified sequence
atggagctggccgccggcagcttcagcgaggagcagttctgggaggcctgtgccgagctgcagcagcctgccctggccggggctgactggcagctgctggtggagaccagcggcatcagcatctaccgcctgctggacaagaagacaggcctgtatgagtacaaggtgtttggagtgctggaggactgcagccccaccctgctggccgacatctacatggacagcgactacaggaagcagtgggaccagtatgtgaaggagctgtatgagcaggagtgcaatggagaaacagtggtgtactgggaggtgaagtaccccttccccatgagcaacagagattatgtgtacctgcggcagaggcgggacctggacatggagggcaggaagatccacgtgatcctggcccggagcacctccatgccccagctgggggagaggtctggagtcatccgggtgaagcagtacaagcagagcctggccattgaaagtgatggcaagaagggcagcaaggtgttcatgtactactttgacaaccctgggggccagatccccagctggctgatcaactgggccgccaagaatggagtgcccaacttcctgaaggacatggcccgggcctgccagaactacctgaagaagacctag

SEQ ID NO: 208556 - DNA, 582 bp, Artificial Sequence
  derived and/or modified sequence
ctggcccagggccgctgcctgcaggtgacagctgtgcagatccagggctcctggaaggtgactggagtgcagccccagaagacaggcctgtatgagtacaaggtgtttggagtgctggaggactgcagccccaccctgctggccgacatctacatggacagcgactacaggaagcagtgggaccagtatgtgaaggagctgtatgagcaggagtgcaatggagagaccgtggtgtactgggaggtgaagtaccccttccccatgagcaacagagattatgtgtacctgcggcagaggcgggacctggacatggagggcaggaagatccacgtgatcctggcccggagcacctccatgccccagctgggggagaggtctggagtcatccgggtgaagcagtacaagcagagcctggccatcgagagtgatggcaagaagggcagcaaggtgttcatgtactactttgacaaccctgggggccagatccccagctggctgatcaactgggccgccaagaatggagtgcccaacttcctgaaggacatggcccgggcctgccagaactacctgaagaagacctag

SEQ ID NO: 208557 - DNA, 645 bp, Artificial Sequence
  derived and/or modified sequence
atggagctggccgccggcagcttcagcgaggagcagttctgggaggcctgcgcagaattgcagcagccggccttagcaggcgccgactggcaactccttgttgagacatctggaatatccatatatcgcctcctggacaagaaaacaggcctgtacgagtacaaagtgttcggtgtgcttgaagattgttcacctacactcctggccgatatctacatggatagcgattacagaaaacagtgggaccagtacgtcaaagagctttacgaacaagaatgcaacggggagacagttgtttactgggaagtgaaatacccgttcccaatgtccaatcgagactacgtttatttacggcagagacgcgacctggatatggagggccgtaagatccacgttattctagccagatcaactagcatgcctcagctaggagagcggtctggtgtgatccgcgtgaagcaatataagcaatcacttgctattgaatcggacgggaagaagggatcaaaagtgtttatgtactatttcgataatcccggagggcagattccctcatggttgattaattgggctgctaagaatggtgtgcctaacttcctcaaagacatggctcgcgcatgccagaattatctgaagaagacatag

SEQ ID NO: 208558 - DNA, 582 bp, Artificial Sequence
  derived and/or modified sequence
ctggcccagggccggtgcctgcaggtgaccgccgtgcagatccagggatcttggaaggtgaccggtgtccagcctcagaaaacaggtctctatgagtacaaagtttttggggtgctggaggattgttccccaacactcctcgctgacatttacatggatagcgattatcgcaaacagtgggaccaatatgttaaagaactctatgagcaggagtgcaacggagagaccgtggtctattgggaggtgaagtaccccttcccaatgtccaatagggactacgtgtacctgagacagcgccgggacctcgacatggaagggagaaaaatccatgttattctcgcacgcagtacatcaatgcctcagctcggtgagcgctccggtgtgatacgagttaagcagtacaaacagagtctggcgatagagtctgatgggaaaaaaggtagcaaagtgttcatgtactactttgataatcccggtggtcagataccatcctggttgatcaattgggccgcgaagaatggagtgcccaattttctgaaggatatggccagagcttgccaaaactacttaaagaagacttag

SEQ ID NO: 208559 - DNA, 2041 bp, Artificial Sequence
  derived and/or modified sequence
cgctggggcagccggggcagccggggcagcccggtcaccccgcccccaggcccacactaagggtgtccgcggcctgccctccaggcggaggagcccggactgcggaaggatggagctggccgccggaagcttctcggaggagcagttctgggaggcctgcgccgagctccagcagcccgctctggccggggccgactggcagctcctagtggagacctcgggcatcagcatctaccggctgctggacaagaagactggactttatgagtataaagtctttggtgttctggaggactgctcaccaactctactggcagacatctatatggactcagattacagaaaacaatgggaccagtatgttaaagaactctatgaacaagaatgcaacggagagactgtggtctactgggaagtgaagtacccttttcccatgtccaacagagactatgtctaccttcggcagcggcgagacctggacatggaagggaggaagatccatgtgatcctggcccggagcacctccatgcctcagcttggcgagaggtctggggtgatccgggtgaagcaatacaagcagagcctggcgatcgagagtgacggcaagaaggggagcaaagttttcatgtattacttcgataacccgggtggccaaattccgtcctggctcattaactgggccgccaagaatggagttcctaacttcttgaaagacatggcaagagcctgtcagaactacctcaagaaaacctaagaaagagaactgggaacattgcatccatgggttgatgtctctggaagtgcaaccacccaatgtctctggaagtgccacctggaagtgccacctggaagtgtctctggaagagcacccaccactgttcagccttcccctgctgtttctgtcttcagaggcctacacactaccacatcctttctaagcatgtttgcctgacatccagctcactcgtctgcttcctttctcgctccccccatcctgggctgggctgccttcttctacagttcaatatggggcagactagggaaacctttgcttgcttactattaggaggggaagtcttcagtagggaacacgatcattccattgtgcaattttacggggatgggtgggcggagggacacaacaaaatttaagaatgactatttgggcgggctggctcttttgcagcttgtgatttcttccagcttgggaggggctgctggaagtggcatttcgttcagagctgactttcagtgcacccaaactggatgacgtgccaatgtccatttgccttatgctttgtggagctgattaggctgggatttgaggtgataatccagtaagtctttcctcgttcctacttgtggaggatcagtagctgttatgatgccagaccatttggagaagtatcagaggcctgaccggacacataatatgacaaccacatttttcctcatcatccatgaggaaatggatgatttctcttttccatatgtcactgggggaaaggctgcctgtacctctcaagctttgcattttactggaaactgaggcgtcaagatggctgtggcagctagcaaaagcaaagatgctttgtgcatagccttgtgaaaaagtatctttctatgcaataagatgaattttcctcccagaatatttagaaatgtagaagggataacagttcacagccaggtaaaatttaactggtggcttaatgactctgcacctttttctcaggaattctgcctaagttgtctgccttttctaccaccaaaaagacttttagttttctatgctttctcctgaattttggtagggtaaggtatttctatgtcaaaggcacagccttgatgatctcagggaaaaattttaatcactgtgtataatgatactgaaccttgattaataacagaaattcaggatgtaaagccacagaatgggatttattaatgtgggatacctcagactgtttgttttctttctgggaagaaaagtgtgttctataatgaataaatatagagtggtttttacttgtcctgtgta

SEQ ID NO: 208560 - DNA, 1869 bp, Artificial Sequence
  derived and/or modified sequence
ctagcgcaggggcggtgcctccaagtgactgccgtgcagatccaggggagttggaaggtcacaggagttcagcctcagaagactggactttatgagtataaagtctttggtgttctggaggactgctcaccaactctactggcagacatctatatggactcagattacagaaaacaatgggaccagtatgttaaagaactctatgaacaagaatgcaacggagagactgtggtctactgggaagtgaagtacccttttcccatgtccaacagagactatgtctaccttcggcagcggcgagacctggacatggaagggaggaagatccatgtgatcctggcccggagcacctccatgcctcagcttggcgagaggtctggggtgatccgggtgaagcaatacaagcagagcctggcgatcgagagtgacggcaagaaggggagcaaagttttcatgtattacttcgataacccgggtggccaaattccgtcctggctcattaactgggccgccaagaatggagttcctaacttcttgaaagacatggcaagagcctgtcagaactacctcaagaaaacctaagaaagagaactgggaacattgcatccatgggttgatgtctctggaagtgcaaccacccaatgtctctggaagtgccacctggaagtgccacctggaagtgtctctggaagagcacccaccactgttcagccttcccctgctgtttctgtcttcagaggcctacacactaccacatcctttctaagcatgtttgcctgacatccagctcactcgtctgcttcctttctcgctccccccatcctgggctgggctgccttcttctacagttcaatatggggcagactagggaaacctttgcttgcttactattaggaggggaagtcttcagtagggaacacgatcattccattgtgcaattttacggggatgggtgggcggagggacacaacaaaatttaagaatgactatttgggcgggctggctcttttgcagcttgtgatttcttccagcttgggaggggctgctggaagtggcatttcgttcagagctgactttcagtgcacccaaactggatgacgtgccaatgtccatttgccttatgctttgtggagctgattaggctgggatttgaggtgataatccagtaagtctttcctcgttcctacttgtggaggatcagtagctgttatgatgccagaccatttggagaagtatcagaggcctgaccggacacataatatgacaaccacatttttcctcatcatccatgaggaaatggatgatttctcttttccatatgtcactgggggaaaggctgcctgtacctctcaagctttgcattttactggaaactgaggcgtcaagatggctgtggcagctagcaaaagcaaagatgctttgtgcatagccttgtgaaaaagtatctttctatgcaataagatgaattttcctcccagaatatttagaaatgtagaagggataacagttcacagccaggtaaaatttaactggtggcttaatgactctgcacctttttctcaggaattctgcctaagttgtctgccttttctaccaccaaaaagacttttagttttctatgctttctcctgaattttggtagggtaaggtatttctatgtcaaaggcacagccttgatgatctcagggaaaaattttaatcactgtgtataatgatactgaaccttgattaataacagaaattcaggatgtaaagccacagaatgggatttattaatgtgggatacctcagactgtttgttttctttctgggaagaaaagtgtgttctataatgaataaatatagagtggtttttacttgtcctgtgta

SEQ ID NO: 208561 - DNA, 2273 bp, Artificial Sequence
  derived and/or modified sequence
cgctggggcagccggggcagccggggcagcccggtcaccccgcccccaggcccacactaagggtgtccgcggcctgccctccaggcggaggagcccggactgcggaaggatggagctggccgccggaagcttctcggaggagcagttctgggaggcctgcgccgagctccagcagcccgctctggccggggccgactggcagctcctagtggagacctcgggcatcagcatctaccggctgctggacaaggtagcggccaacccgctggaggaccgcggggcctagaatgcgccggggtcgacctccccgcagggagtgcggggcggcagtcgcggaagggacaggggcgcgtcttctccggctcaggaaggagctccgcccggaccctgtctcaagctctggagctagcgcaggggcggtgcctccaagtgactgccgtgcagatccaggggagttggaaggtcacaggagttcagcctcagaagactggactttatgagtataaagtctttggtgttctggaggactgctcaccaactctactggcagacatctatatggactcagattacagaaaacaatgggaccagtatgttaaagaactctatgaacaagaatgcaacggagagactgtggtctactgggaagtgaagtacccttttcccatgtccaacagagactatgtctaccttcggcagcggcgagacctggacatggaagggaggaagatccatgtgatcctggcccggagcacctccatgcctcagcttggcgagaggtctggggtgatccgggtgaagcaatacaagcagagcctggcgatcgagagtgacggcaagaaggggagcaaagttttcatgtattacttcgataacccgggtggccaaattccgtcctggctcattaactgggccgccaagaatggagttcctaacttcttgaaagacatggcaagagcctgtcagaactacctcaagaaaacctaagaaagagaactgggaacattgcatccatgggttgatgtctctggaagtgcaaccacccaatgtctctggaagtgccacctggaagtgccacctggaagtgtctctggaagagcacccaccactgttcagccttcccctgctgtttctgtcttcagaggcctacacactaccacatcctttctaagcatgtttgcctgacatccagctcactcgtctgcttcctttctcgctccccccatcctgggctgggctgccttcttctacagttcaatatggggcagactagggaaacctttgcttgcttactattaggaggggaagtcttcagtagggaacacgatcattccattgtgcaattttacggggatgggtgggcggagggacacaacaaaatttaagaatgactatttgggcgggctggctcttttgcagcttgtgatttcttccagcttgggaggggctgctggaagtggcatttcgttcagagctgactttcagtgcacccaaactggatgacgtgccaatgtccatttgccttatgctttgtggagctgattaggctgggatttgaggtgataatccagtaagtctttcctcgttcctacttgtggaggatcagtagctgttatgatgccagaccatttggagaagtatcagaggcctgaccggacacataatatgacaaccacatttttcctcatcatccatgaggaaatggatgatttctcttttccatatgtcactgggggaaaggctgcctgtacctctcaagctttgcattttactggaaactgaggcgtcaagatggctgtggcagctagcaaaagcaaagatgctttgtgcatagccttgtgaaaaagtatctttctatgcaataagatgaattttcctcccagaatatttagaaatgtagaagggataacagttcacagccaggtaaaatttaactggtggcttaatgactctgcacctttttctcaggaattctgcctaagttgtctgccttttctaccaccaaaaagacttttagttttctatgctttctcctgaattttggtagggtaaggtatttctatgtcaaaggcacagccttgatgatctcagggaaaaattttaatcactgtgtataatgatactgaaccttgattaataacagaaattcaggatgtaaagccacagaatgggatttattaatgtgggatacctcagactgtttgttttctttctgggaagaaaagtgtgttctataatgaataaatatagagtggtttttacttgtcctgtgt

SEQ ID NO: 208562 - DNA, 645 bp, Artificial Sequence
  derived and/or modified sequence
atggagctcgccgctggcagctttagcgaggaacagttctgggaagcctgtgctgaactgcagcaaccagctctggccggagccgattggcagttgctagtggagaccagtggcatatctatttataggctccttgacaagaagacaggcttgtacgagtacaaggtgtttggggtactagaagactgctcccccacattactggcagatatttacatggacagcgactaccgtaaacagtgggaccaatacgttaaagagctgtacgagcaggaatgtaacggcgagacagtggtgtactgggaggtcaaataccctttccccatgtccaaccgcgattacgtctacttgaggcaacgtagggacttagacatggaaggtagaaaaatacatgttatactcgcacgaagtaccagcatgccacaactgggggaaaggtccggagtgatcagggttaaacagtataagcagtcactcgcaattgagtcagacggaaaaaaaggcagcaaagtgttcatgtattactttgataatcctggagggcagatccccagctggctgatcaactgggctgcaaagaacggggtacccaactttcttaaggacatggcgagggcttgccagaactacctgaaaaagacctag

SEQ ID NO: 208563 - DNA, 582 bp, Artificial Sequence
  derived and/or modified sequence
ctggcccaagggaggtgcctccaggttacagccgtgcagattcagggtagttggaaagtaaccggggtgcagccccagaagaccggactgtatgagtacaaagtctttggcgtcttggaggactgttctccgacccttttagccgacatttatatggactcggattatagaaagcagtgggaccaatacgtcaaggagctgtatgagcaggaatgcaatggcgagaccgtcgtgtattgggaggtgaaataccccttccctatgagcaaccgggactacgtgtatctgaggcagcgtagagacttggacatggaaggacggaaaatccatgtgatcctagccaggtccacaagtatgcctcaactgggtgaacggtcaggcgtgatcagggtgaaacagtacaaacagagccttgcaatagagtccgacggaaagaagggatccaaagtctttatgtattactttgacaatcccggaggccagattccttcttggttgatcaactgggccgctaaaaacggtgtccctaatttcctgaaagacatggctcgggcttgccagaattacttaaagaaaacctag

SEQ ID NO: 208564 - DNA, 645 bp, Artificial Sequence
  derived and/or modified sequence
atggagctggccgccggcagcttcagcgaggagcagttctgggaggcctgcgccgagctgcagcagcccgccctggccggcgccgactggcagctgctggtggagaccagcggcatcagcatctacagactgctggacaagaagaccggcctgtacgagtacaaggtgttcggcgtgctggaggactgcagccccaccctgctggccgacatctacatggacagcgactacagaaagcagtgggaccagtacgtgaaggagctgtacgagcaggagtgcaacggcgagaccgtggtgtactgggaggtgaagtaccccttccccatgagcaacagagactacgtgtacctgagacagagaagagacctggacatggagggcagaaagatccacgtgatcctggccagaagcaccagcatgccccagctgggcgagagaagcggcgtgatcagagtgaagcagtacaagcagagcctggccatcgagagcgacggcaagaagggcagcaaggtgttcatgtactacttcgacaaccccggcggccagatccccagctggctgatcaactgggccgccaagaacggcgtgcccaacttcctgaaggacatggccagagcctgccagaactacctgaagaagacctag

SEQ ID NO: 208565 - DNA, 582 bp, Artificial Sequence
  derived and/or modified sequence
ctggcccagggcagatgcctgcaggtgaccgccgtgcagatccagggcagctggaaggtgaccggcgtgcagccccagaagaccggcctgtacgagtacaaggtgttcggcgtgctggaggactgcagccccaccctgctggccgacatctacatggacagcgactacagaaagcagtgggaccagtacgtgaaggagctgtacgagcaggagtgcaacggcgagaccgtggtgtactgggaggtgaagtaccccttccccatgagcaacagagactacgtgtacctgagacagagaagagacctggacatggagggcagaaagatccacgtgatcctggccagaagcaccagcatgccccagctgggcgagagaagcggcgtgatcagagtgaagcagtacaagcagagcctggccatcgagagcgacggcaagaagggcagcaaggtgttcatgtactacttcgacaaccccggcggccagatccccagctggctgatcaactgggccgccaagaacggcgtgcccaacttcctgaaggacatggccagagcctgccagaactacctgaagaagacctag

SEQ ID NO: 208566 - protein, 326 aa, Artificial Sequence
  derived and/or modified sequence
MSSFSESALEKKLSELSNSQQSVQTLSLWLIHHRKHAGPIVSVWHRELRKAKSNRKLTFLYLANDVIQNSKRKGPEFTREFESVLVDAFSHVAREADEGCKKPLERLLNIWQERSVYGGEFIQQLKLSMEDSKSPPPKATEEKKSLKRTFQQIQEEEDDDYPGSYSPQDPSAGPLLTEELIKALQDLENAASGDATVRQKIASLPQEVQDVSLLEKITDKEAAERLSKTVDEACLLLAEYNGRLAAELEDRRQLARMLVEYTQNQKDVLSEKEKKLEEYKQKLARVTQVRKELKSHIQSLPDLSLLPNVTGGLAPLPSAGDLFSTD

SEQ ID NO: 208567 - DNA, 981 bp, Artificial Sequence
  derived and/or modified sequence
atgagcagcttcagcgagagcgccctggagaagaagctgagcgagctgagcaacagccagcagagcgtgcagaccctgagcctgtggctgatccaccacagaaagcacgccggccccatcgtgagcgtgtggcacagagagctgagaaaggccaagagcaacagaaagctgaccttcctgtacctggccaacgacgtgatccagaacagcaagagaaagggccccgagttcaccagagagttcgagagcgtgctggtggacgccttcagccacgtggccagagaggccgacgagggctgcaagaagcccctggagagactgctgaacatctggcaggagagaagcgtgtacggcggcgagttcatccagcagctgaagctgagcatggaggacagcaagagccccccccccaaggccaccgaggagaagaagagcctgaagagaaccttccagcagatccaggaggaggaggacgacgactaccccggcagctacagcccccaggaccccagcgccggccccctgctgaccgaggagctgatcaaggccctgcaggacctggagaacgccgccagcggcgacgccaccgtgagacagaagatcgccagcctgccccaggaggtgcaggacgtgagcctgctggagaagatcaccgacaaggaggccgccgagagactgagcaagaccgtggacgaggcctgcctgctgctggccgagtacaacggcagactggccgccgagctggaggacagaagacagctggccagaatgctggtggagtacacccagaaccagaaggacgtgctgagcgagaaggagaagaagctggaggagtacaagcagaagctggccagagtgacccaggtgagaaaggagctgaagagccacatccagagcctgcccgacctgagcctgctgcccaacgtgaccggcggcctggcccccctgcccagcgccggcgacctgttcagcaccgactag

SEQ ID NO: 208568 - DNA, 981 bp, Artificial Sequence
  derived and/or modified sequence
atgagttccttctccgagagtgctcttgagaagaagctgagtgaactgtcgaactcacagcagtctgttcagactctgagtctttggctgatccatcatcggaagcacgctggccctatcgtgtcagtatggcatagagaacttcgaaaggccaaaagcaataggaaactcaccttcctgtacctcgcaaacgacgtcatccagaactctaagaggaagggacctgagtttactagagagttcgagtccgtactggttgatgccttttctcatgtcgctagagaggctgatgagggctgcaaaaaaccccttgagaggctgcttaatatatggcaagaacgctccgtttatgggggagagttcatccagcagctgaagctctcaatggaggattccaagtcaccgccccccaaagctactgaggagaagaagagtctgaagcgcacattccagcagatacaggaggaagaggacgacgattaccctggatcctactctcctcaggacccatctgctgggcctctgctgacagaagaactcattaaagcccttcaggatctcgaaaacgctgcaagcggcgacgctactgtgcgtcaaaaaatcgcctcactgccgcaagaggttcaagacgtgtccctgctggagaagatcaccgacaaggaggcagccgagaggctcagtaaaaccgtagacgaggcttgcctgttgttggctgaatacaacggtcggttagccgccgaactggaggatcgccgccagctggcgcggatgctggtggagtacacccagaatcagaaagatgtgctgtcagagaaagaaaaaaaattagaagagtataaacagaaactggcccgcgtgacccaggttcgaaaggaactgaaatctcatattcagtccttacccgatttaagtctgctgcccaatgtaacggggggtttggctcccttaccatccgccggcgatctgttctctacggattag

SEQ ID NO: 208569 - DNA, 981 bp, Artificial Sequence
  derived and/or modified sequence
atgagcagcttcagcgagagcgccctggagaagaagctgtctgagctgagcaacagccagcagagcgtgcagaccctgagcctgtggctgatccaccacaggaagcatgctggccccatcgtgtctgtgtggcaccgggagctgaggaaggccaagagcaacaggaagctgaccttcctgtacctggccaatgatgtgatccagaacagcaagaggaaaggacctgagttcacccgggagtttgaatctgtgctggtggatgccttcagccacgtggcccgggaggctgatgagggctgcaagaagcccctggagcggctgctgaacatctggcaggagaggtctgtgtatggaggagagttcatccagcagctgaagctgtccatggaggacagcaagagccccccacccaaggccacagaggagaagaagagcctgaagaggaccttccagcagatccaggaggaggaggatgatgactacccaggcagctacagcccccaggaccccagcgctggccccctgctgacagaggagctgatcaaggccctgcaggacctggagaatgctgccagcggagatgccaccgtgcggcagaagatcgccagcctgccccaggaggtgcaggatgtgtccctgctggagaagatcacagacaaggaggccgctgagcggctgagcaagacagtggatgaggcctgcctgctgctggccgagtacaacggccgcctggccgctgagctggaggaccggcggcagctggccaggatgctggtggagtacacccagaaccagaaggatgtgctgtctgagaaggagaagaagctggaggagtacaagcagaagctggcccgggtgacccaggtgaggaaggagctgaagagccacatccagagcctgcctgacctgagcctgctgcccaacgtgactggaggcctggcccccctgcccagcgctggggacctcttcagcacagactag

SEQ ID NO: 208570 - DNA, 981 bp, Artificial Sequence
  derived and/or modified sequence
atgagcagcttcagcgagagcgccctggagaagaagctgagcgagctcagcaatagccagcagtccgtgcagacattatcactgtggctcatccatcatagaaagcatgccggcccaatcgttagcgtgtggcacagagagctgcggaaggcaaagtcaaacaggaagctgacattcctatacttggcaaacgatgtcatccagaactccaagcggaaaggacccgaatttacccgagagtttgagagtgttctagtggatgctttctctcacgtggctcgagaggccgatgaaggatgcaaaaagccactggaacgcctgctaaatatctggcaggaaaggtccgtatatggcggcgagtttatccagcagcttaaattatctatggaggatagcaagagtcctccccccaaagccaccgaggagaagaaatccctcaagcgcacctttcagcaaattcaggaagaggaggatgatgactaccccgggtcttactctccacaagacccttccgccggtccactgctgaccgaggagctaataaaagccctccaggaccttgagaatgctgccagtggggatgcaactgtgaggcaaaagattgcttcactgcctcaagaagtccaggacgtttccctgctagagaagatcaccgataaggaggctgctgagaggttgtccaagacagtggacgaggcttgtctgctgctggcagaatataatggacgcttggcagctgaactggaggacaggaggcaactggctagaatgctcgtggaatatacccagaaccagaaagacgtcctcagtgagaaggaaaagaaactggaagaatataagcaaaagctcgcacgggtcactcaagtacgtaaagagctcaaatcccacatccagtcactgcctgacctcagccttcttcctaatgtaacaggcggactagcccctctccctagcgctggcgatcttttttctaccgactag

SEQ ID NO: 208571 - DNA, 981 bp, Artificial Sequence
  derived and/or modified sequence
atgagctcctttagcgagtctgccctggagaaaaaactgagcgagttatcaaacagtcagcaaagtgtacagacgctgagtctctggttaatacaccacagaaagcacgctgggcctatcgtgagtgtgtggcaccgagagctaaggaaggcaaaatcaaacagaaaacttacatttctataccttgcaaatgacgtgatccagaacagcaagaggaaaggacccgaattcactcgggaatttgaaagcgtgcttgtggacgcattctcccacgtggcacgcgaggcagacgagggatgtaaaaaaccgctggagcgtttacttaacatttggcaggaaaggtccgtgtatggcggagagttcatccagcagttgaagctgtccatggaggactccaagagcccccctccaaaggcaaccgaagagaaaaagtccctgaagaggacattccagcaaattcaagaggaggaggacgacgattacccgggttcttacagccctcaggacccctctgctggcccacttctaaccgaggagctcatcaaggccctccaggacctggaaaacgcagctagcggagatgcgactgtgagacagaagatcgcctccttgcctcaggaagtgcaggacgtgtccttgctggaaaaaatcaccgataaagaggctgcagagcgactgtccaagacagtggatgaagcctgcttgttgctggccgaatataacggtagattagcggcagagcttgaggatcgtcggcagctggcaaggatgttggtggaatatactcaaaatcagaaagatgtgctttcggaaaaggagaagaaactggaagagtataagcagaaactggcaagagtaacacaagttcgcaaggaattaaaatcacatatccagagcctgccagatctatctctgcttcctaatgtgacaggtggtcttgccccacttcccagcgccggagatcttttctcaaccgactag

SEQ ID NO: 208572 - DNA, 3874 bp, Artificial Sequence
  derived and/or modified sequence
aggctcgagcggtcaaagctctttccgggggcccggggaactactctccttgcctcgctctgtctccttcgaagtgctctgcgcgaggttcagagcggccgccgcctccaaagggacggttttctagagctccgacgcctctcggtgcccctctgctccggcccttgccctttgacctcgctctcgcggcagggtgagaggtcgggtggccatcttgtggcggcggcgcgggcggctgttactgcggagacccatcccctcccccttctcgcacccctggcagtctgtcagtcggtaaaaagtcccgcagcctgtcaggtgaggccccggcctcgtgccgtcgctcttcccgccgcactgggcggcccaggccgctccctgccgggcctcactgccgccaccatgtcctccttctctgagtcggcgctggagaagaagctctcggagctgagcaactctcagcagagcgtgcagaccctgtccctttggctcatccaccaccgcaagcacgcgggacccatcgtctccgtgtggcaccgcgagctccgcaaagccaaatcaaatagaaagcttacttttctgtatttagcgaatgatgtcatccaaaacagtaaaaggaaaggacctgaattcactagagaatttgaatctgtccttgtggatgctttttctcatgttgccagagaggcagatgaaggctgtaaaaaacctttagaaagattgctgaacatctggcaagaacgaagtgtgtatggcggcgagttcatacagcagctgaagctgtctatggaggactccaagagccctccccccaaagcaacagaagagaagaaatctctgaaacgaacttttcagcaaattcaggaggaggaggatgacgactaccctggcagctactctcctcaggatccttctgcaggacccctcttgactgaggaactaatcaaagctttgcaggatctggaaaatgccgcatcaggggatgctactgtccgacagaaaattgcttctctgccccaggaagtgcaagatgtttctctattggaaaaaataacagacaaagaggcagctgaacgtctttcaaaaacagtagatgaagcatgtctgttactagcagaatataacgggcgcctggcagcagaactggaggaccgtcgccagctggctcggatgttggtggagtatacccagaatcagaaagatgttttgtcggagaaggagaaaaaactagaggaatacaaacagaagcttgcacgagtaacccaggtccgcaaggaactgaaatcccatattcagagcttgccagacctctcactgctgcccaacgtcacagggggcttagcccccctgccctctgctggggacctgttttcaactgactaggatgggtgtcatgtcccagatttctgtttgtaccagcagaaagaagagggcaagtcatggttggaaataaccttctagcccctggttctatcccttcttccgcccagccccccagcctcaagaaagaacctcagactctgattctcctcttcagcctctcatcttgagcacagttcagaacagtggcgactggaatctggtttatattcatatttgcaaagactacagactttttctcccacttcatattttcatgcccccctgttggttttccattcttaactgtctccttatacctaagaagttatgaaaatcatgtgtacttctggaagctttcgaaagaatcttgtccctcatgacagcattttatcatgaaagcagcttctcctttctgggctgggcttgttcaagttcggtgtgggcttccactaaggcacttgtcctggagacgttggctttcccagctgcatctgccccaaaaggttgtaggcacagctgtcgtagcgttgccataaagagtttgccaaatctctgatcctccctttccattgcttctcctagtgatgcacgaagattaggtgcatttattttgtaaacagattggagaatctagcaataagattcaaagctaatctggagcataaaggcacagttcagagacagaataacagggatcacaagcatgaattaaaaggaatttatttgcttcaagttcctagatacaaccttcccatgctgcacttctccactgtcggagcacgttccgaaaaacagaatgccttgatccctggtgggtgcgaaggcagttgttagggatggcaggcattggtgggctccaaaagatgaaggccccacacacaggtgtgctgcatttgggatctgtgtgggtgtttcttggaccctttcttctgggagtagggtacacactaacgtttaatccgctgtctgggtgcatgtccacagtacggtggctaaactcgaacatcactgcaaataggacgctgagcaggtccgtctgtcatgtcacgccactgcacaggtccttgtccccacacgacggggagtacttgcgtcagatgttattgaatagctcgtctcgggcaggggaagcggggagttggggatattaattgggggttttaattctattatcatgtcagctgacattatgactatataatgtagttagagacaatttttatcttgcttatagtaaaggttcagcctgccaattgtaaatcattctaatttggcaggcttatttttgacattggaaagggcagaaagcgatttgccccagtagtgtaataggagttatagaccagaggctgaaacccaaactatataaaaaggaattcagtggagggggctttgtaatctccattaatttgtgttgctacttccaggatcaccaaaaattacatgtaattttacatgttaaacacattgaaacataacctatgtttataaagcataacgggcttcccttccagaagctctcctgcttgtcatgaagtgagaacaatgaaaagtcatagcagatactcagtttaactctgtgtagaacctagtagtgtttgagctgttattcagatttgaattcagactgtgtgttgtttgcttatggacactgcctgtcgttctgtcactgttaaattaatgagtctataaggtttttcttccagaggccataggtgacatcactaaaattgcaagataaattgtaatctttgctgctgctgcactccccaacctctcccccaccccccgtggtgtgctgctttctagatgagcgtgttttggagcaggcccatctgggacactctatgctttcaccaaggaagtgcgatctgagcagccacaatccagccaaaagaggatcgtagatatttgctctgatcaactagatgaaaatatagcagaatggatttagcccactgctctgttttatccaactgagtctctgaccagcaattggtgcataattattacagcaaaagttaagaaatgaaactgtagcaattatgtaaatgaatgtgttggcctcttaatacctgttactagtggacttcctgtgaggaagttagttttttgttttgatgaaatgctttcgttttttaaatcttaattctgctgtccacatcctcccaaagtgtgcttacttcatttgtttaatttaaatgaactttcctccttgtatgtatgaggtgacttggtgggtggggtgggtggtttttgtttttgtgttttttctttcttagggcatctgtaggcctcaaaggacctttcctttaggtcatattcctcagaaagtcttcaatcttcccttgtttttgtttgtttgtttttcttaaagaatattttcaaagcttaaatttgtatattaatttaggactatttagaagtataggctgtcgttggcggcagcagtatattctgaaatgtctcatagatatatatttttgaataaagatggtgttgttgaacaaca

SEQ ID NO: 208573 - protein, 298 aa, Artificial Sequence
  derived and/or modified sequence
MARRSRHRLLLLLLRYLVVALGYHKAYGFSAPKDQQVVTAVEYQEAILACKTPKKTVSSRLEWKKLGRSVSFVYYQQTLQGDFKNRAEMIDFNIRIKNVTRSDAGKYRCEVSAPSEQGQNLEEDTVTLEVLVAPAVPSCEVPSSALSGTVVELRCQDKEGNPAPEYTWFKDGIRLLENPRLGSQSTNSSYTMNTKTGTLQFNTVSKLDTGEYSCEARNSVGYRRCPGKRMQVDDLNISGIIAAVVVVALVISVCGLGVCYAQRKGYFSSKYMFMKSNSSSKATTMSENDFKHTKSFII

SEQ ID NO: 208574 - protein, 298 aa, Artificial Sequence
  derived and/or modified sequence
MARRSRHRLLLLLLRYLVVALGYHKAYGFSAPKDQQVVTAVEYQEAILACKTPKKTVSSRLEWKKLGRSVSFVYYQQTLQGDFKNRAEMIDFNIRIKNVTRSDAGKYRCEVSAPSEQGQNLEEDTVTLEVLVAPAVPSCEVPSSALSGTVVELRCQDKEGNPAPEYTWFKDGIRLLENPRLGSQSTNSSYTMNTKTGTLQFNTVSKLDTGEYSCEARNSVGYRRCPGKRMQVDDLNISGIIAAVVVVALVISVCGLGVCYAQRKGYFSKETSFQKSNSSSKATTMSENDFKHTKSFII

SEQ ID NO: 208575 - DNA, 897 bp, Artificial Sequence
  derived and/or modified sequence
atggcgaggagatctcgacatcgacttctgctgctcctattgcggtacctggtagtggctctggggtatcacaaggcctatgggttctctgccccaaaggaccagcaggtggtcactgccgtggaataccaggaagccatcttagcctgtaagactcccaagaagacagtctcctctcgacttgagtggaaaaagctcggtcggtcagtctcctttgtctactatcagcagaccctgcagggggactttaagaatagagcggagatgatcgatttcaacattcggattaaaaacgtgactcggagtgatgcaggaaagtatcgatgcgaagttagtgccccttctgagcaggggcagaatctagaggaggatacagtgacactggaagtcctcgtggccccagcagtccctagctgtgaggtcccctctagtgcattgagtggaacagtggtagaactgagatgccaggataaagagggtaaccccgctcccgaatatacttggtttaaggatggcattagactgctggagaacccacggctaggtagtcagtccaccaatagcagttataccatgaacaccaagactggcacactgcaatttaacacggtgagtaagctcgacaccggagaatattcctgcgaggcccggaactccgtgggatacaggcggtgtcctggaaaaaggatgcaggtggacgatctcaacatctctgggataatcgccgccgttgttgtggtcgctcttgtaatctccgtttgtggactgggagtgtgttatgcccaacggaagggttactttagctccaagtacatgtttatgaagtcaaatagttctagcaaagccaccaccatgagcgagaacgatttcaagcacacaaaatctttcatcatatag

SEQ ID NO: 208576 - DNA, 897 bp, Artificial Sequence
  derived and/or modified sequence
atggcgaggagatctcgtcaccgtctgctgttgctcctgctgcgctacctggttgtggccctgggctaccacaaggcctatgggtttagcgcccccaaagatcagcaggttgtcaccgccgtggagtatcaagaggcgattcttgcctgcaagacccctaagaagacagtgagctctcgcctggaatggaaaaaactgggccggagtgttagcttcgtctactatcagcagactctccagggtgacttcaagaacagggccgaaatgatcgatttcaacatccgcattaaaaacgtgacaaggagcgacgccggcaaataccgctgcgaagtttccgcaccctctgagcagggccagaatctggaggaagataccgtcactctggaggtccttgtggccccagcggtgcccagctgcgaggtgccatcttctgctctgtccggcaccgtcgttgagcttcgctgccaggataaggaaggcaatcctgcccctgaatacacatggtttaaggacggaattcgactgcttgaaaacccgcgcctggggtcacaatccaccaacagctcttacacgatgaacaccaaaacaggtacgctgcagtttaacaccgtctccaagcttgacaccggggaatattcatgcgaggcgagaaacagcgtggggtaccgacggtgccccggcaagcgcatgcaggttgacgatcttaacatctctggtatcatcgccgcggtggtcgtggttgccttggtcatctccgtgtgcggcctgggtgtatgctatgcccagagaaagggctatttcagtaaggagacttcctttcagaaatctaattccagttctaaagccaccactatgagcgagaacgactttaagcacaccaagagctttattatctag

SEQ ID NO: 208577 - DNA, 1693 bp, Artificial Sequence
  derived and/or modified sequence
acgaggggaagaaaggagttggggcaaaacaggaggcgtttccctacccgcatacatccccgtccccgagacacccaatccccccacccccagcctgcccgcgcctcccgcccccagctcctcgccctggggacagctggcagccccgcgcggaccagacacaaagccgatcaatcccggaggcgtgggggcggagggacgacccgccggggctttcccgggcgctgctctcctcctgctgccccctcgctaggacccggcggacgcctcgtctggttttcacgccctctagcccctacccccacacccccaaaacagaacagacccccatccctgggctggaggacccgcctcttggcagccagctgagaaggcgccccggggagggggaaactgacatcccatctagagccgtccctcctcttcctcccctcccgactctctgctcctttcccgccccagaagttcaagggcccccggcctcctgcgctcctgccgccgggaccctcgacctcctcagagcagccggctgccgccccgggaagatggcgaggaggagccgccaccgcctcctcctgctgctgctgcgctacctggtggtcgccctgggctatcataaggcctatgggttttctgccccaaaagaccaacaagtagtcacagcagtagagtaccaagaggctattttagcctgcaaaaccccaaagaagactgtttcctccagattagagtggaagaaactgggtcggagtgtctcctttgtctactatcaacagactcttcaaggtgattttaaaaatcgagctgagatgatagatttcaatatccggatcaaaaatgtgacaagaagtgatgcggggaaatatcgttgtgaagttagtgccccatctgagcaaggccaaaacctggaagaggatacagtcactctggaagtattagtggctccagcagttccatcatgtgaagtaccctcttctgctctgagtggaactgtggtagagctacgatgtcaagacaaagaagggaatccagctcctgaatacacatggtttaaggatggcatccgtttgctagaaaatcccagacttggctcccaaagcaccaacagctcatacacaatgaatacaaaaactggaactctgcaatttaatactgtttccaaactggacactggagaatattcctgtgaagcccgcaattctgttggatatcgcaggtgtcctgggaaacgaatgcaagtagatgatctcaacataagtggcatcatagcagccgtagtagttgtggccttagtgatttccgtttgtggccttggtgtatgctatgctcagaggaaaggctacttttcaagtaaatatatgttcatgaagagtaattcttcatctaaagccacgacaatgagtgaaaatgatttcaagcacacaaaatcctttataatttaaagactccactttagagatacaccaaagccaccgttgttacacaagttattaaactattataaaactctgctttgtccgacatttgcaaagaggtacacgaggaaatggaattggtatttcattttaattttcatgactactaactcacctgaacttgctattttaaacaaatagttctgtcgacacctaaaatataatctggcttcttgtgtctggactaagttaaaagaattaaaatactttgtaatgtc

SEQ ID NO: 208578 - DNA, 4337 bp, Artificial Sequence
  derived and/or modified sequence
agccaacgaggggaagaaaggagttggggcaaaacaggaggcgtttccctacccgcatacatccccgtccccgagacacccaatccccccacccccagcctgcccgcgcctcccgcccccagctcctcgccctggggacagctggcagccccgcgcggaccagacacaaagccgatcaatcccggaggcgtgggggcggagggacgacccgccggggctttcccgggcgctgctctcctcctgctgccccctcgctaggacccggcggacgcctcgtctggttttcacgccctctagcccctacccccacacccccaaaacagaacagacccccatccctgggctggaggacccgcctcttggcagccagctgagaaggcgccccggggagggggaaactgacatcccatctagagccgtccctcctcttcctcccctcccgactctctgctcctttcccgccccagaagttcaagggcccccggcctcctgcgctcctgccgccgggaccctcgacctcctcagagcagccggctgccgccccgggaagatggcgaggaggagccgccaccgcctcctcctgctgctgctgcgctacctggtggtcgccctgggctatcataaggcctatgggttttctgccccaaaagaccaacaagtagtcacagcagtagagtaccaagaggctattttagcctgcaaaaccccaaagaagactgtttcctccagattagagtggaagaaactgggtcggagtgtctcctttgtctactatcaacagactcttcaaggtgattttaaaaatcgagctgagatgatagatttcaatatccggatcaaaaatgtgacaagaagtgatgcggggaaatatcgttgtgaagttagtgccccatctgagcaaggccaaaacctggaagaggatacagtcactctggaagtattagtggctccagcagttccatcatgtgaagtaccctcttctgctctgagtggaactgtggtagagctacgatgtcaagacaaagaagggaatccagctcctgaatacacatggtttaaggatggcatccgtttgctagaaaatcccagacttggctcccaaagcaccaacagctcatacacaatgaatacaaaaactggaactctgcaatttaatactgtttccaaactggacactggagaatattcctgtgaagcccgcaattctgttggatatcgcaggtgtcctgggaaacgaatgcaagtagatgatctcaacataagtggcatcatagcagccgtagtagttgtggccttagtgatttccgtttgtggccttggtgtatgctatgctcagaggaaaggctacttttcaaaagaaacctccttccagaagagtaattcttcatctaaagccacgacaatgagtgaaaatgatttcaagcacacaaaatcctttataatttaaagactccactttagagatacaccaaagccaccgttgttacacaagttattaaactattataaaactctgctttgtccgacatttgcaaagaggtacacgaggaaatggaattggtatttcattttaattttcatgactactaactcacctgaacttgctattttaaacaaatagttctgtcgacacctaaaatataatctggcttcttgtgtctggactaagttaaaagaattaaaatactttgtaatgtcctgggctttgggaaatgttaaccacgtcctaacttctagagaacgttactaaaatataacatactgattgtgaagtcaatccacaggtcatgaaaatataaatcagactctgcacgagagtctgatttagggggtccaacaaatactctgacagatgcaaaaggaacctctggtctcatttctgccagaatcctcttttctcccctaatatcatccttattctgatgctcgttcatcactaacacacccacagaaaggaggaagcgggatgggtcttatgcccaaggatttgcactttgtgtttacttccattcctgggaactaaaagcaacatcaaaagaaatgcctaatggctggagcccacaggtgtgcaccacaggatttgcctggtgtgtgtcactgatttcttcattaaacgtaatttagatggtcaaacacaaacccaagtggcttatttcacccctactgctgcttgccactgcttccttcttgtaagatttctttgaagaggatcagtgactttgacatcagaactcaccactggagcctacacaagtttgcagatacctttccctgcaggagtggtgacttcacatctttctgtctctaaaaattgtgcagtgacattccgggccaagtcccttagtcaggggttgacaattctgcttttggacaaggagggatgtggagggaagaagtaatagtctaccaggaaaatgagacgaaaaagctcagtatgactccctgcatctggtacccctcttgaaacacagtgggcacatgagcaatggctcaaacgaaaagtggatctaatgtgggtttctcaaccgatgaaccacaaaagcttccagctactattacaatgtgaaaattccaatgatccgtttaccagagcaattagactatgttaaaaattcatatcatttgtaacttcttttaattactgaattgatattaaaaacaaaatatggctagggcatgtcctattcttctgggcaaatgtggatgaaaaggtcacttgctacctttgacaactatgaacatgatggttaatcttctttctttttttttttttttttttgagacggagtctcactctgtcgcccaggctggagtacagtggcacaatcttggctcactgcaacctccgcctcccctccgcctcccagattcaagcacttctcctgcctcagcctcccaagtagctgagattataggcgtgtaccaccacacctggctaatttttgtattttagtagagaagggtttcaccatgttggccaggctggtctcaaacctctgacctcaaatgatccacccccatcagcctcccaaagtgctgggattataggcatgagccactgcactgggcaggttaatcttctttcaaaagagtctgctctttctacccaattggcgaagcaaatccccaggattcaccgaacaaatggattaagcacccactgagtgcctagcatgtgcctggacaccaggccaccgggaagatgctccccctttgacttgtctatgacatgctatgtctctcaccagatcccttcctggaggtcgggcttctgtaacatggctctgcccccaaaataaaattttcaccacgagtcagggatcggcaaacattttctgtaaagagccagaaagtagatattttaagtcataaggtccctgttaacaactacttgactctgccattgtagcacaaaggcagccacagacaaaacaagcaagtagtcatgtctgtgttccaataagactttatttacaaaaacagcaggcacagacaagatttggcccacaggcatagattcccaactcatggtggtgaagtacagaaaaaaacacctgtctacaagcttttgtaagaaatcaggctaaatgttacctatgttttggttggaagatttctttggtttgaggaatgctttcctcttgcattggcatgccaagaggatagatgactctgaaagacgcctcttcagacatacctgtcatcacacaagatcaacttcttcagtttaaatgacacaaatccatattgtggaaggaaaatatgtagtgccttagcttcactaatagttgtaaaacttctttttaagacatcaaaggctagaggattcattttatgcagtgcgaacatctaataacactctctgtgtcaaatatatattgtacattaccttaaactattgtaatagctaggtaaaaatccttgtataaaagaatgttttcccccacacaaagggcagagtattgagcactaatttcctattaaaagtatatatatgtatctgtgggtcactggtgtccagacttgtatttgcatttgtgtttacttgaggaacttgaacactaacaactggtaaaatcccattgtaattcttacagcattttgactttattttcctgcagtgaattgtgttgtgtaaagattagggctttaaaatcttattagcaagctttgttttgttttaattattgttgctgttgtaactagatttaatttatttttagttggaggtttgacctaagtctggaccaattgattgcttttcaatacaactttgcaaagaacttcctttttccacaggtggctttgttcgattaaagtctacactaataaaaata

SEQ ID NO: 208579 - DNA, 897 bp, Artificial Sequence
  derived and/or modified sequence
atggcccggcgcagccgccaccggctgctgctgctgctgctgcgctacctggtggtggccctgggctaccacaaggcctacggcttcagcgcccccaaggaccagcaggtggtgacagctgtggagtaccaggaggccatcctggcctgcaagacccccaagaagacagtgagcagccggctggagtggaagaagctgggccgctctgtgtcctttgtgtactaccagcagaccctgcagggcgacttcaagaacagagctgagatgattgacttcaacatccgcatcaagaatgtgaccaggagtgatgctgggaagtaccgctgtgaggtgtctgcccccagcgagcagggccagaacctggaggaggacacagtgaccctggaggtgctggtggccccagctgtgcccagctgtgaggtgcccagcagcgccctgtctggaacagtggtggagctgcgctgccaggacaaggagggcaacccagcccctgagtacacctggttcaaggatggcatccggctgctggagaacccccggctgggcagccagagcaccaacagcagctacaccatgaacaccaagacaggcaccctgcagttcaacacagtgtccaagctggacacaggagagtacagctgtgaggccagaaattctgtgggctaccgccgctgccctgggaagaggatgcaggtggatgacctgaacatcagcggcatcatcgctgctgtggtggtggtggccctggtgatctctgtgtgtggcctgggcgtgtgctacgcccagaggaagggctacttcagcagcaagtacatgttcatgaagagcaacagcagcagcaaggccaccaccatgtctgaaaatgacttcaagcacaccaagagcttcatcatctag

SEQ ID NO: 208580 - DNA, 897 bp, Artificial Sequence
  derived and/or modified sequence
atggcccggcgcagccgccaccggctgctgctgctgctgctgcgctacctggtggtggccctgggctaccacaaggcctacggcttcagcgcccccaaggaccagcaggtggtgacagctgtggagtaccaggaggccatcctggcctgcaagacccccaagaagacagtgagcagccggctggagtggaagaagctgggccgctctgtgtcctttgtgtactaccagcagaccctgcagggcgacttcaagaacagagctgagatgattgacttcaacatccgcatcaagaatgtgaccaggagtgatgctgggaagtaccgctgtgaggtgtctgcccccagcgagcagggccagaacctggaggaggacacagtgaccctggaggtgctggtggccccagctgtgcccagctgtgaggtgcccagcagcgccctgtctggaacagtggtggagctgcgctgccaggacaaggagggcaacccagcccctgagtacacctggttcaaggatggcatccggctgctggagaacccccggctgggcagccagagcaccaacagcagctacaccatgaacaccaagacaggcaccctgcagttcaacacagtgtccaagctggacacaggagagtacagctgtgaggccagaaattctgtgggctaccgccgctgccctgggaagaggatgcaggtggatgacctgaacatcagcggcatcatcgctgctgtggtggtggtggccctggtgatctctgtgtgtggcctgggcgtgtgctacgcccagaggaagggctacttcagcaaggagaccagcttccagaagagcaacagcagcagcaaggccaccaccatgtctgaaaatgacttcaagcacaccaagagcttcatcatctag

SEQ ID NO: 208581 - DNA, 897 bp, Artificial Sequence
  derived and/or modified sequence
atggcccggcggagccggcaccggctgctgctgctgctgctgcggtacttagtggttgcgctcggctatcacaaggcatatggatttagcgcccctaaggatcaacaggtggtaactgctgtcgagtatcaggaggcgattcttgcctgcaagacaccaaagaaaaccgtatcatctaggctagaatggaagaaattgggacgcagcgtttccttcgtttactaccagcagacacttcaaggagactttaaaaatagagctgaaatgattgatttcaatattaggatcaaaaatgtaacaagatcagacgccggcaagtaccggtgtgaagtttctgctccgtccgaacagggtcaaaacctggaggaagacacagtgacacttgaagtgctcgtagcccccgctgtcccaagctgcgaggttccatcttcggcactgtctggcactgtcgtcgagctgaggtgccaggataaggagggtaaccccgcccccgaatatacttggttcaaagatggaatcaggcttctggaaaatccaagacttgggtcacaaagcaccaatagctcctataccatgaataccaagaccggcactctccagtttaacacagttagtaaacttgatactggggaatattcctgcgaagcccgaaacagcgttggctacaggcggtgccctgggaagcgcatgcaagttgacgacttgaacatctccggcatcatagcggccgtggtggttgttgccctggtgatttcagtgtgcggtttgggcgtctgctacgcacaacgcaaggggtattttagttctaagtatatgtttatgaagtctaattcctcatcgaaagcaacaacgatgagtgaaaacgactttaaacacactaaatctttcattatatag

SEQ ID NO: 208582 - DNA, 897 bp, Artificial Sequence
  derived and/or modified sequence
atggcccggcggagccggcaccggctgctgctgctgctgctgcggtacctggtggttgcccttggctaccacaaggcatacggcttctccgcccctaaggatcagcaggtggtgactgcggtggagtaccaggaggctattctggcttgcaagactcctaaaaaaaccgtaagcagcaggttggagtggaaaaaactgggccgttcagtcagcttcgtgtattatcagcaaaccctccagggcgacttcaagaatcgcgccgagatgattgacttcaatatacggattaagaatgtgacaagatcggatgccggtaagtacaggtgcgaggtttccgcacctagcgagcagggacagaatctggaagaggatactgtcactctggaggttctagtagctcctgctgttcctagctgcgaggtgccaagttcggctctctccggaacggttgtggagctgaggtgtcaggataaggaaggaaaccccgcccccgaatacacctggttcaaagacggcatccgtctgcttgaaaatcctagattaggctctcagagcacgaactccagctacacgatgaatacgaagactgggactctccagttcaataccgttagcaagttggatactggcgaatactcctgcgaggcccgaaattccgttggttataggcgatgccctggcaaacgaatgcaggtggacgacctgaatatcagcggaattattgccgcagtcgttgttgtcgcactcgtaatctcagtgtgcggcttgggtgtctgctacgctcagcgaaaaggctattttagcaaagagacctctttccaaaagtctaacagcagcagtaaagccactacaatgagcgaaaacgacttcaaacacactaaatcctttattatctag

SEQ ID NO: 208583 - DNA, 897 bp, Artificial Sequence
  derived and/or modified sequence
atggccagacgctcccgccaccgattgctgctcctgctattacgctatctggtggtcgcactcggataccacaaggcgtatggcttctccgctcctaaggaccaacaggtcgtcaccgccgtcgagtatcaggaagctatcctggcctgtaagacaccaaagaaaacagtttcctcacggctggaatggaaaaaactggggaggtcagtgagcttcgtctattaccagcagaccctccaaggcgattttaagaatcgcgctgaaatgatcgatttcaatatacggattaagaatgtgacccgatcggacgccggaaagtacaggtgcgaggtcagcgccccatcggagcaggggcagaacctagaggaggacactgttactcttgaggtgctagtggcccctgcggtcccttcttgtgaggtacctagcagcgccttaagcggcactgttgtggagctacgctgccaggacaaggagggcaatcctgccccagagtacacttggtttaaagatggtatccggttgttggaaaaccctcgacttggctctcagtccaccaactcctcctatacgatgaacacgaaaacaggaacactacagttcaacacagtgagtaagcttgacaccggggagtactcttgtgaagcccgaaattctgtgggctatcgccgttgccccggaaagagaatgcaggtcgatgacctgaatatttcagggattatcgctgctgtcgtggtcgtcgcacttgtgatcagcgtgtgcgggctcggggtttgttacgcccagcgcaagggttatttctcgtccaaatatatgtttatgaagtctaacagttccagtaaggctacgacaatgagcgaaaatgacttcaagcatactaaatcatttattatctag

SEQ ID NO: 208584 - DNA, 897 bp, Artificial Sequence
  derived and/or modified sequence
atggccagaagatccaggcacaggctgctgctactgctcctgcgttatcttgtggtggcactgggctatcataaggcttacggatttagtgcccctaaggaccagcaggtcgtgaccgctgtcgagtatcaggaagcgatactggcctgtaagactcccaaaaaaacagtcagtagtcgcttggaatggaagaaactgggaagatccgtttccttcgtctattaccagcagaccctgcaaggagatttcaagaatcgagctgagatgatagatttcaatatcagaatcaagaacgttactcgctcagacgctgggaaatatagatgcgaagtgtcagccccatctgagcaggggcaaaatctggaggaagataccgtgaccctggaagtactggtggctccagctgtgccctcatgcgaggtgccctcgtccgctctctccgggactgtggtggaacttcggtgccaggataaggaagggaatcccgctcctgagtacacatggtttaaggatggcatccgactcctggagaacccaagactgggtagtcagagtacaaactcatcctatacgatgaataccaaaacagggacccttcaatttaatactgtgagcaagctcgacactggagaatacagctgcgaggcgaggaactccgtgggctatcggcgatgtcctgggaagaggatgcaggtggacgatctgaatatctctgggataattgctgccgttgttgttgtggcacttgtgatctcggtgtgtgggttgggagtctgctatgctcagcgcaagggatacttctctaaggaaacaagcttccagaagtcaaacagtagctcgaaagcaactacgatgtcggagaacgatttcaaacatacaaaatccttcattatctag

SEQ ID NO: 208585 - DNA, 897 bp, Artificial Sequence
  derived and/or modified sequence
atggccagaagaagcagacacagactgctgctgctgctgctgagatacctggtggtggccctgggctaccacaaggcctacggcttcagcgcccccaaggaccagcaggtggtgaccgccgtggagtaccaggaggccatcctggcctgcaagacccccaagaagaccgtgagcagcagactggagtggaagaagctgggcagaagcgtgagcttcgtgtactaccagcagaccctgcagggcgacttcaagaacagagccgagatgatcgacttcaacatcagaatcaagaacgtgaccagaagcgacgccggcaagtacagatgcgaggtgagcgcccccagcgagcagggccagaacctggaggaggacaccgtgaccctggaggtgctggtggcccccgccgtgcccagctgcgaggtgcccagcagcgccctgagcggcaccgtggtggagctgagatgccaggacaaggagggcaaccccgcccccgagtacacctggttcaaggacggcatcagactgctggagaaccccagactgggcagccagagcaccaacagcagctacaccatgaacaccaagaccggcaccctgcagttcaacaccgtgagcaagctggacaccggcgagtacagctgcgaggccagaaacagcgtgggctacagaagatgccccggcaagagaatgcaggtggacgacctgaacatcagcggcatcatcgccgccgtggtggtggtggccctggtgatcagcgtgtgcggcctgggcgtgtgctacgcccagagaaagggctacttcagcagcaagtacatgttcatgaagagcaacagcagcagcaaggccaccaccatgagcgagaacgacttcaagcacaccaagagcttcatcatctag

SEQ ID NO: 208586 - DNA, 897 bp, Artificial Sequence
  derived and/or modified sequence
atggccagaagaagcagacacagactgctgctgctgctgctgagatacctggtggtggccctgggctaccacaaggcctacggcttcagcgcccccaaggaccagcaggtggtgaccgccgtggagtaccaggaggccatcctggcctgcaagacccccaagaagaccgtgagcagcagactggagtggaagaagctgggcagaagcgtgagcttcgtgtactaccagcagaccctgcagggcgacttcaagaacagagccgagatgatcgacttcaacatcagaatcaagaacgtgaccagaagcgacgccggcaagtacagatgcgaggtgagcgcccccagcgagcagggccagaacctggaggaggacaccgtgaccctggaggtgctggtggcccccgccgtgcccagctgcgaggtgcccagcagcgccctgagcggcaccgtggtggagctgagatgccaggacaaggagggcaaccccgcccccgagtacacctggttcaaggacggcatcagactgctggagaaccccagactgggcagccagagcaccaacagcagctacaccatgaacaccaagaccggcaccctgcagttcaacaccgtgagcaagctggacaccggcgagtacagctgcgaggccagaaacagcgtgggctacagaagatgccccggcaagagaatgcaggtggacgacctgaacatcagcggcatcatcgccgccgtggtggtggtggccctggtgatcagcgtgtgcggcctgggcgtgtgctacgcccagagaaagggctacttcagcaaggagaccagcttccagaagagcaacagcagcagcaaggccaccaccatgagcgagaacgacttcaagcacaccaagagcttcatcatctag

SEQ ID NO: 208587 - protein, 275 aa, Artificial Sequence
  derived and/or modified sequence
MPKVFLVKRRSLGVSVRSWDELPDEKRADTYIPVGLGRLLHDPPEDCRSDGGSSSGSGSSSAGEPGGAESSSSPHAPESETPEPGDAEGPDGHLATKQRPVARSKIKFTTGTCSDSVVHSCDLCGKGFRLQRMLNRHLKCHNQVKRHLCTFCGKGFNDTFDLKRHVRTHTGIRPYKCNVCNKAFTQRCSLESHLKKIHGVQQQYAYKQRRDKLYVCEDCGYTGPTQEDLYLHVNSAHPGSSFLKKTSKKLAALLQGKLTSAHQENTSLSEEEERK

SEQ ID NO: 208588 - DNA, 1555 bp, Artificial Sequence
  derived and/or modified sequence
ttttccccggcgtggtctcactcgcgatttaaggcataggtgtcgccgagccgggaggctgggagtcgccaggcgtgcgggggagaggcctgggccgcgccgcggcggggggtggaggaagagggcaggcgaggcgggaaggtgggctctggccgccgggagccggggacggagccgccgccgttgcccctagcggggagcagccgggaggagggggccgcagtcgggagaggggaccccaccatgcccaaagtcttcctggtgaagaggaggagcctgggggtctcggtccgcagctgggatgagctcccggatgagaaaagggcagacacctacatcccagtgggcctaggccgcctgctccacgacccccccgaggactgccgcagcgacggcggcagcagcagcggcagcggcagcagcagcgcgggggagcctggaggagcagagagcagctcgtccccgcacgcccccgagagcgaaacccccgagcccggcgacgccgagggccccgatggacacctggcgaccaagcagcgcccggtcgccagatcgaaaatcaagttcaccacaggcacgtgcagcgactcggtggttcacagctgtgacctgtgtggcaagggcttccgtctgcagcgcatgctgaaccgtcacctcaagtgccacaaccaggtgaaaagacacctgtgcaccttctgcggcaagggcttcaacgacaccttcgacctgaagaggcacgtccgcacacacacaggcattcgtccctacaaatgcaacgtctgcaataaagccttcacccagcgctgctctctggagtcccacctgaagaaaatccatggggtgcagcagcagtatgcctataagcagcggcgggacaagctctacgtctgcgaggattgcggctacacgggccccacccaggaggacctgtacctgcacgtgaacagtgcccatccgggcagctcgtttctcaaaaagacatctaaaaaactggcagcccttctgcagggcaagctgacatccgcacaccaggagaataccagcctgagtgaggaggaggagaggaagtgaggagaaggaaggggaggacagacgttcacactgccacgtatgtctacgtggatttttggttttcagcttcccccaccccactggctcttcttaattagaagtgaccagttcacctctgtgtccttttgaaacatcagcagtagggtccattccaagattgtcagttaccgttagtgacgtcaggccctgtaacctgtgtcctgtctggcgcagttgctcacattcaccaaagtttgttttcatgatcctgatggccaagaacaccgtgtgggatttttttttcccccaaggattttcacacacggaaggagaggtatttcttagagagatcatcattttatggtgccttgaaataaaaatacttctacttgaaatgctgtttaagcaaggcaagtgaattttgttattctgaaagagtttacagaaactattttaataaatgaaatgttcttgtgaagcttttaaaagcaaaatggaacattga

SEQ ID NO: 208589 - DNA, 828 bp, Artificial Sequence
  derived and/or modified sequence
atgcccaaggtcttcctggtaaaaagaagatcgcttggtgtgagcgtgagaagctgggacgagttacctgatgaaaaacgggcggacacttatattcctgttgggctgggccgactgctccatgatcccccggaggactgccgctctgatggaggctcttcatccgggtccggatcctcttcagctggtgaacccggtggcgctgaatcaagtagtagccctcatgcgccagaaagcgagacccccgaaccgggagatgccgagggacctgatggccaccttgcaacgaaacagcgccctgtggcaaggtcgaaaattaagttcaccacagggacttgttcagacagtgtggtgcacagttgcgacctgtgcggaaagggcttcaggctccaacggatgctcaatcgccacctgaagtgccataaccaggtgaagcggcatctgtgcactttctgcgggaagggctttaacgacacctttgatctcaaacgacatgtcagaacgcatactggcatcaggccttacaagtgtaacgtttgtaataaggcttttactcagagatgctcactcgagagtcatctaaaaaagatccacggcgtgcagcagcagtacgcgtataagcaaaggcgggataaactctacgtttgtgaagactgtggttacaccggccctacccaggaagacctgtacctacacgtgaattctgctcaccccggttcgtcgttcctgaagaagacctccaaaaaactggctgccctcctgcaggggaaactcacctccgcacatcaggagaacacaagcctgagtgaggaagaagagaggaagtag

SEQ ID NO: 208590 - DNA, 1449 bp, Artificial Sequence
  derived and/or modified sequence
ttttccccggcgtggtctcactcgcgatttaaggcataggtgtcgccgagccgggaggctgggagtcgccaggcgtgcgggggagaggcctgggccgcgccgcggcggggggtggaggaagagggcaggcgaggcgggaaggtgggctctggccgccgggagccggggacggagccgccgccgttgcccctagcggggagcagccgggaggagggggccgcagtcgggagaggggaccccaccatgcccaaagtcttcctggtgaagaggaggagcctgggggtctcggtccgcagctgggatgagctcccggatgagaaaagggcagacacctacatcccagtgggcctaggccgcctgctccacgacccccccgaggactgccgcagcgacggcggcagcagcagcggcagcggcagcagcagcgcgggggagcctggaggagcagagagcagctcgtccccgcacgcccccgagagcgaaacccccgagcccggcgacgccgagggccccgatggacacctggcgaccaagcagcgcccggtcgccagatcgaaaatcaagttcaccacaggcacgtgcagcgactcggtggttcacagctgtgacctgtgtggcaagggcttccgtctgcagcgcatgctgaaccgtcacctcaagtgccacaaccaggtgaaaagacacctgtgcaccttctgcggcaagggcttcaacgacaccttcgacctgaagaggcacgtccgcacacacacaggcattcgtccctacaaatgcaacgtctgcaataaagccttcacccagcgctgctctctggagtcccacctgaagaaaatccatggggtgcagcagcagtatgcctataagcagcggcgggacaagctctacgtctgcgaggattgcggctacacgggccccacccaggaggacctgtacctgcacgtgaacagtgcccatccgggcagctcgtttctcaaaaagacatctaaaaaactggcagcccttctgcagggcaagctgacatccgcacaccaggagaataccagcctgagtgaggaggaggagaggaagtgaggagaaggaaggggaggacagacgttcacactgccacgtatgtctacgtggatttttggttttcagcttcccccaccccactggctcttcttaattagaagtgaccagttcacctctgtgtccttttgaaacatcagcagtagggtccattccaagattgtcagttgccgttagtgacgtcaggccctgtaacctgtgtcctgtctggcgcagttgctcacattcaccaaagtttgttttcatgatcctgatggccaagaacaccgtgtgggatttttttttcccccaaggattttcacacacggaaggagaggtatttcttagagagatcatcattttatggtgccttgaaataaaaatacttctacttgaaatgct

SEQ ID NO: 208591 - DNA, 828 bp, Artificial Sequence
  derived and/or modified sequence
atgcccaaggtgttcctggtgaagagaagaagcctgggcgtgtctgtgcgctcctgggatgagctgcctgatgagaagagagctgacacctacatccctgtgggcctgggccgcctgctgcatgaccccccagaggactgccgcagtgatggcggcagcagcagcggcagcggcagcagcagcgctggggagcctggaggagctgagagcagcagcagcccccacgcccctgagagcgagaccccagagcctggagatgctgagggcccagatggccacctggccaccaagcagaggcctgtggcccggagcaagatcaagttcaccaccggcacctgcagcgacagcgtggtgcacagctgtgacctgtgtgggaagggcttccggctgcagaggatgctgaacagacacctgaagtgccacaaccaggtgaagaggcacctgtgcaccttctgtgggaagggcttcaatgacacctttgacctgaagagacatgtgaggacccacacaggcatccggccctacaagtgcaatgtgtgcaacaaggccttcacccagcgctgcagcctggagagccacctgaagaagatccacggcgtgcagcagcagtatgcctacaagcagaggcgggacaagctgtatgtgtgtgaggactgtggctacacaggccccacccaggaggacctgtacctgcacgtgaacagcgcccaccctggcagcagcttcctgaagaagaccagcaagaagctggccgccctgctgcagggcaagctgaccagcgcccaccaggagaacaccagcctgtctgaggaggaggagaggaagtag

SEQ ID NO: 208592 - DNA, 828 bp, Artificial Sequence
  derived and/or modified sequence
atgcccaaggtgttcctggtgaagcggcggagcctgggcgtgagcgtgcgctcatgggacgaactgccagatgagaaacgcgccgatacatatatcccggtggggctaggcagactcctgcatgatcccccagaggattgtaggtcagatgggggctcgagcagcggctctgggtcctcatctgccggtgagcccggcggcgctgaatcatcatccagtccccacgccccagaaagcgagacccctgagcccggagacgctgaaggacctgacgggcatctcgccacgaagcagcgtcccgtcgccaggtctaagatcaagttcacaactgggacctgctctgactcagtagttcattcatgtgacctctgtggaaagggttttcgactgcagaggatgctaaatagacaccttaagtgccacaaccaggtgaaaagacacttatgtactttctgtgggaaaggtttcaacgacacattcgatctgaagaggcatgtgagaactcacactgggattcggccatacaagtgtaacgtttgtaacaaggcctttacacagcggtgcagtctggagtcacatttgaaaaagatacacggcgtgcaacaacagtacgcctataagcaaaggcgggataaactctatgtctgcgaggattgcgggtacaccgggccaacccaggaagacctgtatctgcacgtcaatagtgcacaccccgggtcctcgttcctcaaaaaaacatccaaaaaactcgccgcactgctacaggggaaattgacttccgcacaccaggagaataccagccttagcgaagaggaagagcgcaagtag

SEQ ID NO: 208593 - DNA, 828 bp, Artificial Sequence
  derived and/or modified sequence
atgcctaaagtgtttctcgtcaagagacgctctttgggcgtctctgtacggagctgggatgaactcccagatgagaagagggcagacacgtatataccagtcggactgggcaggttgcttcatgatccacccgaggactgccgctcagacgggggatcgtcctcgggcagcggaagctcatccgcgggagagcctggaggagctgaaagctctagtagccctcacgctcccgaatccgaaacccctgagccgggagacgccgaggggccagatggtcacctcgccaccaagcaacgtcctgttgccaggagtaagatcaagtttaccaccgggacctgtagtgatagcgtggtccatagctgcgatctgtgtggaaaggggttccgactgcagcgaatgctcaaccgccatctgaagtgtcataatcaggtcaagcgccacttatgtaccttttgtggtaagggcttcaacgatacatttgatcttaagaggcatgttcgtacccacactggtataagaccctataagtgcaacgtgtgtaacaaggcattcacacagcgctgttctcttgagtcacatcttaaaaagatccacggcgtccagcaacagtacgcatataagcaacgcagagataaattgtacgtgtgtgaagactgcgggtacactggacccacacaggaggacttatacctccatgtgaactctgcccacccgggatcgagtttcttaaaaaaaaccagcaaaaaactggctgccctcctacagggtaagctgacaagtgcgcatcaggagaacaccagcctcagcgaagaagaggagagaaagtag

SEQ ID NO: 208594 - DNA, 828 bp, Artificial Sequence
  derived and/or modified sequence
atgcccaaggtgttcctggtgaagagaagaagcctgggcgtgagcgtgagaagctgggacgagctgcccgacgagaagagagccgacacctacatccccgtgggcctgggcagactgctgcacgacccccccgaggactgcagaagcgacggcggcagcagcagcggcagcggcagcagcagcgccggcgagcccggcggcgccgagagcagcagcagcccccacgcccccgagagcgagacccccgagcccggcgacgccgagggccccgacggccacctggccaccaagcagagacccgtggccagaagcaagatcaagttcaccaccggcacctgcagcgacagcgtggtgcacagctgcgacctgtgcggcaagggcttcagactgcagagaatgctgaacagacacctgaagtgccacaaccaggtgaagagacacctgtgcaccttctgcggcaagggcttcaacgacaccttcgacctgaagagacacgtgagaacccacaccggcatcagaccctacaagtgcaacgtgtgcaacaaggccttcacccagagatgcagcctggagagccacctgaagaagatccacggcgtgcagcagcagtacgcctacaagcagagaagagacaagctgtacgtgtgcgaggactgcggctacaccggccccacccaggaggacctgtacctgcacgtgaacagcgcccaccccggcagcagcttcctgaagaagaccagcaagaagctggccgccctgctgcagggcaagctgaccagcgcccaccaggagaacaccagcctgagcgaggaggaggagagaaagtag

SEQ ID NO: 208595 - protein, 201 aa, Artificial Sequence
  derived and/or modified sequence
MKVHMLVGVLVMVGFTVGKVPVPDIRTCHFCLVEDPSVGCISGSEKCTISSSSLCMVITIYYDVKVRFIVRGCGQYISYRCQEKRNTYFAEYWYQAQCCQYDYCNSWSSPQLQSSLPEPHDRPLALPLSDSQIQWFYQALNLSLPLPNFHAGTEPDGLDPMVTLSLNLGLSFAELRRMYLFLNSSGLLVLPQAGLLTPHPS

SEQ ID NO: 208596 - protein, 146 aa, Artificial Sequence
  derived and/or modified sequence
MVITIYYDVKVRFIVRGCGQYISYRCQEKRNTYFAEYWYQAQCCQYDYCNSWSSPQLQSSLPEPHDRPLALPLSDSQIQWFYQALNLSLPLPNFHAGTEPDGLDPMVTLSLNLGLSFAELRRMYLFLNSSGLLVLPQAGLLTPHPS

SEQ ID NO: 208597 - protein, 212 aa, Artificial Sequence
  derived and/or modified sequence
DFGYCPRVYCENQPMLPIGVLVMVGFTVGKVPVPDIRTCHFCLVEDPSVGCISGSEKCTISSSSLCMVITIYYDVKVRFIVRGCGQYISYRCQEKRNTYFAEYWYQAQCCQYDYCNSWSSPQLQSSLPEPHDRPLALPLSDSQIQWFYQALNLSLPLPNFHAGTEPDGLDPMVTLSLNLGLSFAELRRMYLFLNSSGLLVLPQAGLLTPHPS

SEQ ID NO: 208598 - protein, 212 aa, Artificial Sequence
  derived and/or modified sequence
DFGYCPRVYCENQPMLPIGVLVMVGFTVGKVPVPDIRTCHFCLVEDPSVGCISGSEKCTISSSSLCMVITIYYDVKVRFIVRGCGQYISYRCQEKRNTYFAEYWYQAQCCQYDYCNSWSSPQLQSSLPEPHDRPLALPLSDSQIQWFYQALNLSLPLPNFHAGTEPDGLDPMVTLSLNLGLSFAELCRMYLFLNSSGLLVLPQAGLLTPHPS

SEQ ID NO: 208599 - protein, 201 aa, Artificial Sequence [sequence omitted]

SEQ ID NO: 208600 - DNA, 2487 bp, Artificial Sequence
  derived and/or modified sequence
cttcgcctgccgcggtcgggtccgcggcctgcgctgtagcggtcgccgccgttccctggaagtagcaacttccctaccccaccccagtcctggtccccgtccagccgctgacgtgaagatgagcagctcagaggaggtgtcctggatttcctggttctgtgggctccgtggcaatgaattcttctgtgaagtggatgaagactacatccaggacaaatttaatcttactggactcaatgagcaggtccctcactatcgacaagctctagacatgatcttggacctggagcctgatgaagaactggaagacaaccccaaccagagtgacctgattgagcaggcagccgagatgctttatggattgatccacgcccgctacatccttaccaaccgtggcatcgcccagatgttggaaaagtaccagcaaggagactttggttactgtcctcgtgtgtactgtgagaaccagccaatgcttcccattggcctttcagacatcccaggtgaagccatggtgaagctctactgccccaagtgcatggatgtgtacacacccaagtcatcaagacaccatcacacggatggcgcctacttcggcactggtttccctcacatgctcttcatggtgcatcccgagtaccggcccaagagacctgccaaccagtttgtgcccagttcctgttcccgacatccggacgtgccacttctgcctcgtagaagacccttctgtaggatgcatttcaggctcagagaagtgtaccatcagcagctcatccctgtgcatggtgatcaccatctattatgatgtcaaggttcgcttcatcgttcgaggctgtggacagtacatttcctaccgctgccaagaaaaacgcaacacctactttgcagagtactggtatcaggcccagtgctgtcagtacgattattgcaactcctggtcaagcccccaactccagagctctctgccggagccccatgacaggcccctggccctgcctctgtctgactcccagattcagtggttctaccaggccctgaacctctccctgcccctccccaatttccatgctgggacggagcctgatggcctggaccccatggtcacactgtccctgaacctgggcttgtcttttgctgagctgcgccgcatgtacttgttcctcaatagttcaggacttttggttcttccccaggctggactcttgacacctcacccttcctgaattccacagtgcaaatatctttctgtaacaccctcagcatcctgcactgccctctctgaaaacacccacattctttggtcactgtgatttcttaggcctccgtctgttgtaccactagcatctatatgacttttgtgtaattttctctcttgaactctggtgctgtttttttgtttgtttgagacaaagtctcgctctgtcacccagggtggagtgcagtggcatgatctctgctcactacaacctccacctcccgggttccagcgattctcctgcctcagcctcccgagtagctgggactacaggcgtgcaccaccacgcctggctaattttttgtatttttagtagagacggggtttcaccatgttggtcaggctggtctcgaactcctgacctcgtaatctgccctcctcgacctcccaaagtgccgggattacaggtgtgagccactgtgcctgtctgagctctggtgctgttcttccccctagaaaagaatctctagtgtggattctgcccagacaggctgacctgagaaaggcacagtggttcctccattccttccccatcatctgagtgttccagtatcccccatccctctcaatccagtcacctgcctattgacatctagctctgtttcccctgtcttgtccatgtctctaagacccagtaccagactgaactagcagcaagaaggacgaggaggccgggcatggtggctcacgccggtaatcccagcactttgggaggccgaggtgggcggatcacttgagattgggagtttgagaccagcctggccaacatggtaaaacccgctctctattaaaaatagaaaaatcagctgggtgtggtggcacacctctgtaatcccagctactcaggaggctgagacaggagaatcacttgaacccgggaggcagaggttgcagtgagccgagatcgcgccactgcactccagcctgggtgacacagtgagactccgtctccaaaaaaaaggatgaggaatagaattctgtgcagatgtcctgacttggcaattttgtgtccctgcctcactgtctccaccaacccccgcctgtcctagtgttgttctgcctcctgtcctctcttgctctcttgtcagtctctggcttcctcggccccatttcacttcactgagtcctgacacccatctccctaggggcctgtgagaggagagggaagggtctgttctgctcagctccatgtcccccattttcctccacaataaactgggactgggctaaaa

SEQ ID NO: 208601 - DNA, 606 bp, Artificial Sequence
  derived and/or modified sequence
atgaaggtgcatatgcttgtgggtgtgctggttatggtcggattcaccgttggcaaggtgccggtgccagatattcgtacatgtcacttctgtctggtcgaggaccccagcgtgggctgcattagcggaagtgagaagtgcactatcagtagctctagtttatgtatggtaattaccatatactacgatgtaaaggtgcgttttatcgtacggggttgcggtcagtacatctcttatcgctgtcaggagaagagaaacacatactttgccgagtactggtaccaggcgcaatgttgccagtatgactactgtaacagttggtcgagcccccagctgcagtcaagcttacccgaaccccatgaccggcctctcgcgctgccactctcagacagccagatccagtggttttaccaagcactcaatctaagtctccccttgccaaacttccacgctggaaccgagccagatggcctagaccccatggtgacacttagccttaatctgggcctgtcattcgctgaattacgacggatgtacctgttcctgaacagcagtgggttactggtgctgccccaagccggacttttaactccccatcccagctag

SEQ ID NO: 208602 - DNA, 441 bp, Artificial Sequence
  derived and/or modified sequence
atggtcatcaccatttactatgatgtgaaggtacgctttattgtgagagggtgcggacaatacatttcttaccgttgccaggaaaaacggaacacctactttgcagagtattggtatcaggcgcagtgctgccagtatgactactgcaacagctggtcatccccacagctgcagtcatccctgcctgaacctcatgatcgtcctctggctctgcccctgtccgacagccagatccagtggttctatcaagccctgaatctgtccctccctctacccaactttcatgccggaaccgagccagacggcctggatcctatggtgacgctctctctcaatttgggcctatctttcgccgagcttcggagaatgtatctcttcctgaatagcagtggtctcctagtgctgccacaggctggtctgcttaccccacaccccagctag

SEQ ID NO: 208603 - DNA, 1505 bp, Artificial Sequence
  derived and/or modified sequence
ggaaaagtagcctaaagtcagtataactaaagggtggaacgaggtgggacaaggtccggaattgctgctcagtgatgtgtgtgtgcctgccgctggtggagctgagactgctcatctcagaaggatggggatgcttgatttcctggccaggttgtcccagcacagtggggattggccctgttgtatgacgaagacagcacatggtggcagagatagatactaacccatggactttccaagggagggaataggtctttggagggtatgcaagacaaaggtagacactggataaagaacccggtagtgcccaggtattaccccatctgggccattactcccacactcaggaaccagacgttgtgggtgaggacatgctgtccctcctgccaagtaataacttccttcccagccaggatcctgccccaagtaggaatatagctctgcatttacagcagctcctgctcagaccttgtcaaaaccaccctgcagcttaggattaaggagcatggtcacaggaaggtggggtttcagggcatcccctcaggaactgcccatctccccagaattccaaaatgaaggtccatatgcttgtaggtgtgctggtcatggtgggcttcacagtaggaaagggtaagtggggcccaggggcagggagggaggaaggggtaactgagtccaggaagggggtggagcgtggccatggataatcgggcttcctactggcccagggtatttgagagtgacccagtgcctccatccctccttctgcctccccagttcctgttcccgacatccggacgtgccacttctgcctcgtagaagacccttctgtaggatgcatttcaggctcagagaagtgtaccatcagcagctcatccctgtgcatggtgatcaccatctattatgatgtcaaggttcgcttcatcgttcgaggctgtggacagtacatttcctaccgctgccaagaaaaacgcaacacctactttgcagagtactggtatcaggcccagtgctgtcagtacgattattgcaactcctggtcaagcccccaactccagagctctctgccggagccccatgacaggcccctggccctgcctctgtctgactcccagattcagtggttctaccaggccctgaacctctccctgcccctccccaatttccatgctgggacggagcctgatggcctggaccccatggtcacactgtccctgaacctgggcttgtcttttgctgagctgcgccgcatgtacttgttcctcaatagttcaggacttttggttcttccccaggctggactcttgacacctcacccttcctgaattccacagtgcaaatatctttctgtaacaccctcagcatcctgcactgccctctctgaaaacacccacattctttggtcactgtgatttcttaggcctccgtctgttgtaccactagcatctatatgacttttgtgtaattttctctcttgaactctggtgctgtttttttgtttgttt

SEQ ID NO: 208604 - DNA, 639 bp, Artificial Sequence
  derived and/or modified sequence
gactttgggtactgtccccgtgtgtactgcgagaaccagcccatgctccctatcggagttcttgtgatggtagggttcacagtgggcaaagtgcccgtgcccgatatcaggacttgccacttttgcctggtagaggacccctcagtcggatgcatatccgggtctgagaagtgtacaatcagctctagtagcctgtgcatggtgattactatttactacgacgttaaagttagatttattgtccgtggctgtgggcagtacatcagttaccgatgccaagaaaagaggaatacttacttcgctgagtactggtaccaggcgcagtgctgccagtacgactattgcaactcctggtccagccctcagttgcaaagttcactccctgagccccacgatagacccctggcactgcctctgtcagactcacagattcagtggttttaccaggcgctcaacttgagcctgcctctccctaactttcatgccggtacggaacccgatggcctggacccaatggtaaccctcagcctcaatttagggctatctttcgcggagctgcgaaggatgtatctattcctgaattcctccggcttgcttgtcttaccacaggccggtcttctgaccccccacccttcgtag

SEQ ID NO: 208605 - DNA, 639 bp, Artificial Sequence
  derived and/or modified sequence
gactttgggtactgtcccagagtgtattgcgagaatcagcccatgttgccgatcggggttcttgttatggtcggcttcacagtcggaaaagtgccggtgcctgacattagaacctgtcatttttgcctggttgaggacccaagcgtggggtgcatctccggaagcgagaaatgcacaattagtagcagcagcctgtgcatggtgatcactatctattacgacgtcaaggtgcgctttatcgtgcggggttgcgggcagtacattagctacagatgccaagaaaaaaggaatacttatttcgcagaatattggtaccaggcccagtgttgtcaatacgattactgtaatagctggagctccccccagctgcagtccagtctccctgagcctcacgaccggcctttagccctgccactttctgattcacaaatccagtggttttatcaggctctgaacctctcgctgcctctgcctaactttcatgcaggaacagaacctgacggtctcgatccgatggtgaccctaagccttaacctggggctctcatttgccgaactgcgcagaatgtatctgttcttgaattcctccggacttctggtcctgccgcaggcagggctgcttaccccccatcctagttag

SEQ ID NO: 208606 - DNA, 606 bp, Artificial Sequence
  derived and/or modified sequence
atgaaagtccatatgctggtgggggtgctggtgatggtggggtttaccgtcggtaaagttcctgtgcccgacattaggacctgtcatttctgcttagtggaggatcccagtgtagggtgcatcagtggttccgagaagtgcacaatttcatcatcctccctatgtatggttattaccatttattacgatgtgaaggtgcggtttatcgttagagggtgtggccagtatatcagttacagatgccaggaaaagagaaatacgtattttgctgaatattggtaccaggctcagtgttgccagtacgattactgcaacagctggagtagccctcagctgcagagcagcctaccggagcctcacgaccggcctttggcactgcccctatccgatagccagatacagtggttctaccaggccctaaatctgtcactccccttgccgaatttccacgccggtactgaacctgacggattggatccaatggtaaccctttctcttaatctcggcctaagcttcgccgagctgcgaagaatgtatttgttcttgaacagctctggactgctggttctacctcaggccggtctcctcacaccacacccctcttag

SEQ ID NO: 208607 - DNA, 606 bp, Artificial Sequence
  derived and/or modified sequence
atgaaagtccacatgctggtgggcgtgctggtgatggtcgggtttaccgtgggaaaagttcccgtgcctgatatccgcacgtgtcacttttgcctggtggaagacccttcagtcggctgtatctctggatctgagaaatgtactataagcagcagctccttatgtatggtgatcactatctattatgacgtaaaagtgcgctttatcgtacgtggttgcggacagtacattagctatcggtgccaggaaaaaaggaacacgtatttcgctgaatactggtaccaggcacaatgctgccagtacgactattgcaactcgtggtcaagtcctcagctgcaaagcagccttccagaaccccatgaccggcctctggcattgcctctgtctgacagtcaaattcaatggttctaccaggctcttaatctgagccttcccctccctaatttccatgccggaacagaaccagatggtctcgacccgatggtgaccctcagccttaatctcggccttagtttcgcagagctccgacggatgtatctctttctgaattcaagcgggttactggttttgccccaggcaggtctgctcactccccacccatcttag

SEQ ID NO: 208608 - DNA, 606 bp, Artificial Sequence
  derived and/or modified sequence
atgaaggtgcacatgctcgtgggcgtgctggtgatggtgggattcacagtcggcaaggtgcctgtccccgatattcgtacttgccacttctgtctggtggaggatccctctgttggttgcatatctgggagtgagaaatgcacaatcagtagcagcagcctctgtatggttatcaccatctactatgatgttaaagtgagattcatcgtgcggggatgtggacagtacattagttatcgctgccaggagaaacggaacacatatttcgcagagtactggtaccaagcccagtgttgccagtacgactactgcaattcttggtcctctccacaactgcagtcttctttgcctgaacctcatgacaggccgttagcccttcccctgagtgatagtcagatccagtggttctatcaggcactgaacttgtcactgcctctgcccaactttcatgccggtacagagcccgacggcctagacccaatggtgaccttgagcttgaatcttggcctatctttcgccgagctgagacggatgtatctctttttgaacagcagtggactgttggtcctgccgcaagccggtctgctaacacctcacccttcatag

SEQ ID NO: 208609 - DNA, 606 bp, Artificial Sequence
  derived and/or modified sequence
atgaaagtgcatatgctggtgggtgtcctggttatggtgggcttcactgtcggcaaggtgcctgttccggacatccgtacatgccacttttgtctggtggaggacccaagcgtgggctgtattagtggcagcgaaaagtgcaccatctctagtagcagcttatgtatggtcatcacaatctattacgacgtaaaggtacgcttcattgtccgagggtgtgggcaatatatttcctataggtgtcaggagaaacgcaacacctacttcgctgagtactggtatcaggcacagtgctgccagtacgactactgtaactcctggagctctccccagctgcaaagcagcctgcctgagcctcatgatcgacctctggcgttgcccctgtccgactcccaaatccaatggttctaccaggctctcaatctgtcgcttcctttgcccaacttccacgccggaactgaaccagacggcttagaccctatggtcaccctgtcgcttaatttaggtctgtcctttgccgagcttcgcaggatgtatctttttctcaactcttcaggtttgctggtccttccgcaggcgggactgctgacaccacatccaagttag

SEQ ID NO: 208610 - DNA, 606 bp, Artificial Sequence
  derived and/or modified sequence
atgaaggtccacatgttagtgggagtactggtgatggtcggattcaccgtcgggaaggtgccagtccctgatattcgcacatgccacttctgtttagtcgaggacccaagcgtcggatgcatttccggatcagaaaaatgcaccatctccagctcctctctgtgtatggtaatcaccatttattatgacgtaaaagtgcggttcatcgtgcgaggttgtgggcagtacatttcttacagatgccaggagaagagaaatacctattttgctgagtattggtaccaggctcaatgttgtcagtacgactattgtaattcatggtcatcaccccagttgcagtctagtctgcccgagcctcatgatcgtccacttgccctgcctctgtctgactctcagatccaatggttctaccaggcacttaatctctcgttacctctaccaaattttcatgccgggaccgaaccagacggcctcgaccctatggtaaccctttccctcaatctcgggctgtccttcgctgagttacgtagaatgtaccttttcctgaatagttctggactgctggtgctgcctcaggccgggctgttgactccgcacccgtcttag

SEQ ID NO: 208611 - DNA, 441 bp, Artificial Sequence
  derived and/or modified sequence
atggtcattaccatttattacgatgttaaggtgcggttcatcgtacgtggatgtggtcaatacatttcctaccgatgccaggagaaaagaaatacctatttcgccgaatactggtaccaggcccaatgttgtcagtacgattattgtaattcttggtcttccccacagctgcagagcagcttacccgagccacacgacagacccctagccctgcctctcagcgactctcagatccagtggttttatcaggccctcaacctgtcattgcccttgcctaacttccacgcaggcactgagcccgatggattggaccccatggttacgctctccctgaatttaggccttagctttgccgaacttagacggatgtatttgttcctaaatagcagcggactactcgtattacctcaggccgggctcttaaccccccacccctcttag

SEQ ID NO: 208612 - DNA, 639 bp, Artificial Sequence
  derived and/or modified sequence
gatttcggttactgccccagggtatactgcgaaaatcagccaatgctccccataggcgttcttgtcatggtagggtttactgtcggaaaggttcccgtgcccgatatccggacatgccatttttgcttggtggaagatccctctgtcggttgcatttctgggagtgaaaagtgtactattagctcatcttctctgtgtatggtcatcactatttactatgacgtcaaggttaggttcattgtacgagggtgcggtcagtacatctcatacaggtgccaggagaagagaaatacctatttcgctgagtattggtaccaggcccaatgctgccagtacgactactgcaattcatggagttctccacagctacagtcttctttacctgagccccatgacaggcccctggcattgcctctgagcgactcccaaattcaatggttctaccaggccctgaatctatccctgcctcttccaaatttccacgctggtacagagcccgacggcctggatccgatggttaccctgagtctgaacctgggcctgtccttcgctgaactacgccggatgtatctgtttctgaactcatcaggcctgctcgtgcttccccaggctggcctgctgacgccccatccatcatag

SEQ ID NO: 208613 - DNA, 1903 bp, Artificial Sequence
  derived and/or modified sequence
gactttggttactgtcctcgtgtgtactgtgagaaccagccaatgcttcccattggtgtgctggtcatggtgggcttcacagtaggaaaggttcctgttcccgacatccggacgtgccacttctgcctcgtagaagacccttctgtaggatgcatttcaggctcagagaagtgtaccatcagcagctcatccctgtgcatggtgatcaccatctattatgatgtcaaggttcgcttcatcgttcgaggctgtggacagtacatttcctaccgctgccaagaaaaacgcaacacctactttgcagagtactggtatcaggcccagtgctgtcagtacgattattgcaactcctggtcaagcccccaactccagagctctctgccggagccccatgacaggcccctggccctgcctctgtctgactcccagattcagtggttctaccaggccctgaacctctccctgcccctccccaatttccatgctgggacggagcctgatggcctggaccccatggtcacactgtccctgaacctgggcttgtcttttgctgagctgcgccgcatgtacttgttcctcaatagttcaggacttttggttcttccccaggctggactcttgacacctcacccttcctgaattccacagtgcaaatatctttctgtaacaccctcagcatcctgcactgccctctctgaaaacacccacattctttggtcactgtgatttcttaggcctccgtctgttgtaccactagcatctatatgacttttgtgtaattttctctcttgaactctggtgctgtttttttgtttgtttgagacaaagtctcgctctgtcacccagggtggagtgcagtggcatgatctctgctcactacaacctccacctcccgggttccagcgattctcctgcctcagcctcccgagtagctgggactacaggcgtgcaccaccacgcctggctaattttttgtatttttagtagagacggggtttcaccatgttggtcaggctggtctcgaactcctgacctcgtaatctgccctcctcgacctcccaaagtgccgggattacaggtgtgagccactgtgcctgtctgagctctggtgctgttcttccccctagaaaagaatctctagtgtggattctgcccagacaggctgacctgagaaaggcacagtggttcctccattccttccccatcatctgagtgttccagtatcccccatccctctcaatccagtcacctgcctattgacatctagctctgtttcccctgtcttgtccatgtctctaagacccagtaccagactgaactagcagcaagaaggacgaggaggccgggcatggtggctcacgccggtaatcccagcactttgggaggccgaggtgggcggatcacttgagattgggagtttgagaccagcctggccaacatggtaaaacccgctctctattaaaaatagaaaaatcagctgggtgtggtggcacacctctgtaatcccagctactcaggaggctgagacaggagaatcacttgaacccgggaggcagaggttgcagtgagccgagatcgcgccactgcactccagcctgggtgacacagtgagactccgtctccaaaaaaaaggatgaggaatagaattctgtgcagatgtcctgacttggcaattttgtgtccctgcctcactgtctccaccaacccccgcctgtcctggtgttgttctgcctcctgtcctctcttgctctcttgtcagtctctggcttcctcggccccatttcacttcactgagtcctgacacccatctccctaggggcctgtgagaggagagggaagggtctgttctgctcagctccatgtcccccattttcctccacaataaactgggactgggctaaaa

SEQ ID NO: 208614 - DNA, 639 bp, Artificial Sequence
  derived and/or modified sequence
gattttggctattgcccccgggtctattgcgagaatcagcctatgctgcccataggcgtgctggtgatggtcggatttacagtgggcaaggtccccgtgcctgacatcagaacatgccacttctgcttagtggaagatccttcagttggttgtatttccggaagcgagaagtgtaccatcagttcctcaagcctctgtatggtgatcacgatctattatgacgtcaaagtccgcttcatagtccgagggtgcggccagtatatttcttatcgttgtcaagaaaaaagaaacacctattttgccgaatactggtaccaagcacaatgttgtcagtatgactactgcaattcgtggtctagtcctcagctgcagtcatcactccccgaaccccatgataggccccttgcccttccactgtccgactctcagattcagtggttctaccaggctttaaaccttagcctgccactgcctaactttcacgctggaactgagcccgatggcctcgatcctatggtcaccctgtcccttaacctcggtctctcctttgccgagctgcggcgaatgtatctttttctgaattcatcaggtcttttagtgctgcctcaagctgggctgttgactccacatccatcatag

SEQ ID NO: 208615 - DNA, 606 bp, Artificial Sequence
  derived and/or modified sequence
atgaaggtgcacatgctcgttggcgtactagtgatggtcggcttcacagttggtaaagtccccgtccctgatataagaacctgtcatttctgcctggtagaagatccgtctgtggggtgtatctctggcagtgaaaagtgcacgatctctagttctagtctgtgcatggtgatcaccatatactacgacgtcaaggtccgcttcattgtccgaggttgtgggcagtacatctcgtacagatgtcaggagaagcggaatacttatttcgccgagtactggtatcaagctcagtgctgccaatacgactactgcaattcatggtcatctcctcaactgcaaagtagcttacctgagcctcacgaccgacccctggccctccctctaagcgatagccagatccagtggttttaccaagcactcaacctttcccttcctcttcctaacttccacgccggcactgagcccgacggtctggatcccatggtaaccctttctctgaatttggggctcagcttcgctgagttgaggcgaatgtatctattcttaaattcgtctggccttttggtgctgcctcaggctggactattgacccctcacccctcgtag

SEQ ID NO: 208616 - DNA, 606 bp, Artificial Sequence
  derived and/or modified sequence
atgaaagtccacatgctggttggagtgctggtgatggttggatttactgttggaaaggtgcccgtgcctgacatccgtacttgtcacttttgcctagttgaggacccctctgtcggctgtattagcggatccgagaagtgtacaatttccagttcatctctctgtatggtcatcacaatttattacgacgtcaaagtgagattcatcgtaagagggtgtgggcagtacatatcctatcgatgtcaggagaaaagaaatacctactttgctgaatattggtatcaggcccagtgctgccagtacgattattgtaactcctggtcttcacctcaactgcagagcagtctccctgagcctcatgacagacctttggccctgccccttagcgactcccaaattcagtggttctaccaggccttaaaccttagcctaccgctaccaaattttcacgctggaactgaacccgatggcctggaccctatggtaactctatcactaaatctgggactaagctttgccgagctgagaagaatgtacttatttttgaattcatcagggctgctggtgctaccccaagccggtctgctgactccccatccgtcctag

SEQ ID NO: 208617 - DNA, 606 bp, Artificial Sequence
  derived and/or modified sequence
atgaaggtacatatgcttgttggggtgctggtgatggtgggatttacagtcggaaaggtgcccgtgcctgacatacgcacctgccacttttgtctcgtggaagatcctagcgtaggctgtatttccggctcagagaaatgtaccatttcctctagttcgctctgtatggtgatcaccatttactatgatgtaaaggtgcggtttatcgtccgcggatgtgggcaatacatttcttatagatgtcaggagaagcgcaacacatactttgccgagtattggtaccaagctcagtgttgtcagtacgattactgtaattcttggtcctctccgcaacttcagtcttcactgcccgaaccccacgacagacccttggcccttcccttgagtgacagccagatacaatggttctaccaagctttaaatctttctttgccactgccaaacttccatgctggcactgaaccagatggcctcgaccccatggtgaccttgtctttgaatctcggcctgagttttgctgaactgcgccgtatgtatcttttcttgaactctagtgggctgctcgtacttccacaagccggattgcttacgccacacccaagctag

SEQ ID NO: 208618 - DNA, 606 bp, Artificial Sequence
  derived and/or modified sequence
atgaaagtccatatgctggtgggtgttctggtgatggtgggattcacagttgggaaagtgcctgtccccgacattcgcacctgtcacttttgcctcgtagaagacccgtccgttggatgtatttcaggaagcgaaaagtgtacaatttcttccagcagcctgtgcatggtcataacaatctactacgacgtaaaagttcgtttcattgtgcggggctgcggacaatacattagctaccgctgccaggaaaaaaggaatacctactttgctgagtactggtaccaggcacagtgctgtcagtacgattattgtaactcctggtcttctccacagttacagtcctcgctcccagaacctcatgatcgccctctcgctttgccactgtccgacagccaaatccaatggttctaccaggctcttaacctctctttacccttacctaactttcacgccggcacggaaccagatgggctcgaccccatggtgacattgtcattaaacttaggactgtcatttgctgagcttagacgtatgtatctgttcctgaattccagcggcttactagtccttccacaggctgggcttctgactccccatccatcttag

SEQ ID NO: 208619 - DNA, 606 bp, Artificial Sequence
  derived and/or modified sequence
atgaaggtgcacatgcttgttggggttttggttatggtgggcttcacagttggtaaggtgccagtgccagatattaggacatgtcacttctgcttagttgaggacccctctgtgggatgcatctccggaagcgaaaagtgcacgatttcctcatccagtctgtgtatggtgatcacaatttattatgacgtcaaagtccgcttcatcgtgaggggatgcggccagtacatctcttaccgatgtcaggaaaaaagaaatacttacttcgccgaatactggtatcaggctcaatgttgtcagtatgactactgcaattcttggagttctccacagttgcaaagctccctccctgagccccatgaccgcccactggccctacctctatccgactcccagatccaatggttctatcaagcgctgaacctgtccttacctctacccaacttccacgccggcacagagcctgacggtctcgaccccatggtcacactctcacttaacctggggctgtccttcgccgaactcagacgcatgtatctctttctgaattcctctggtctcctcgtgcttccacaggcaggcctgttaactccacaccccagctag

SEQ ID NO: 208620 - DNA, 1903 bp, Artificial Sequence
  derived and/or modified sequence
gactttggttactgtcctcgtgtgtactgtgagaaccagccaatgcttcccattggtgtgctggtcatggtgggcttcacagtaggaaaggttcctgttcccgacatccggacgtgccacttctgcctcgtagaagacccttctgtaggatgcatttcaggctcagagaagtgtaccatcagcagctcatccctgtgcatggtgatcaccatctattatgatgtcaaggttcgcttcatcgttcgaggctgtggacagtacatttcctaccgctgccaagaaaaacgcaacacctactttgcagagtactggtatcaggcccagtgctgtcagtacgattattgcaactcctggtcaagcccccaactccagagctctctgccggagccccatgacaggcccctggccctgcctctgtctgactcccagattcagtggttctaccaggccctgaacctctccctgcccctccccaatttccatgctgggacggagcctgatggcctggaccccatggtcacactgtccctgaacctgggcttgtcttttgctgagctgcgccgcatgtacttgttcctcaatagttcaggacttttggttcttccccaggctggactcttgacacctcacccttcctgaattccacagtgcaaatatctttctgtaacaccctcagcatcctgcactgccctctctgaaaacacccacattctttggtcactgtgatttcttaggcctccgtctgttgtaccactagcatctatatgacttttgtgtaattttctctcttgaactctggtgctgtttttttgtttgtttgagacaaagtctcgctctgtcacccagggtggagtgcagtggcatgatctctgctcactacaacctccacctcccgggttccagcgattctcctgcctcagcctcccgagtagctgggactacaggcgtgcaccaccacgcctggctaattttttgtatttttagtagagacggggtttcaccatgttggtcaggctggtctcgaactcctgacctcgtaatctgccctcctcgacctcccaaagtgccgggattacaggtgtgagccactgtgcctggctgagctctggtgctgttcttccccctagaaaagaatctctagtgtggattctgcccagacaggctgacctgagaaaggcacagtggttcctccattccttccccatcatctgagtgttccagtatcccccatccctctcaatccagtcacctgcctattgacatctagctctgtttcccctgtcttgtccatgtctctaagacccagtaccagactgaactagcagcaagaaggacgaggaggccgggcatggtggctcacgccggtaatcccagcactttgggaggccgaggtgggcggatcacttgagattgggagtttgagaccagcctggccaacatggtaaaacccgctctctattaaaaatagaaaaatcagctgggtgtggtggcacacctctgtaatcccagctactcaggaggctgagacaggagaatcacttgaacccgggaggcagaggttgcagtgagccgagatcgcgccactgcactccagcctgggtgacacagtgagactccgtctccaaaaaaaaggatgaggaatagaattctgtgcagatgtcctgacttggcaattttgtgtccctgcctcactgtctccaccaacccccgcctgtcctagtgttgttctgcctcctgtcctctcttgctctcttgtcagtctctggcttcctcggccccatttcacttcactgagtcctgacacccatctccctaggggcctgtgagaggagagggaagggtctgttctgctcagctccatgtcccccattttcctccacaataaactgggactgggctaaaa

SEQ ID NO: 208621 - DNA, 441 bp, Artificial Sequence
  derived and/or modified sequence
atggtgataacaatttattatgacgtgaaggtgcgcttcatcgttagaggttgtggtcaatatattagttacaggtgtcaagagaaacgcaatacatatttcgccgagtactggtaccaagcgcaatgttgccagtacgattattgcaacagctggtcatctccacagcttcagtcctcccttccagagccacatgatcgacctctcgccttaccgttatccgactctcaaatccagtggttttaccaggcactcaatctgtctctccccttgcctaattttcatgccggcactgagccagatggattggaccccatggttacgctctccctgaatttaggccttagctttgccgaacttagacggatgtatttgttcctaaatagcagcggactactcgtattacctcaggccgggctcttaaccccccacccctcttag

SEQ ID NO: 208622 - DNA, 639 bp, Artificial Sequence
  derived and/or modified sequence
gattttggatactgcccgcgagtttattgtgaaaaccaacccatgcttcctatcggtgtgcttgtgatggtcggctttacggtaggaaaggttcctgtaccggatattcgcacctgccatttttgtctggtggaagatccctctgtgggctgcatctctggcagtgagaaatgcacaatttcctccagtagtctgtgtatggttattactatttattacgacgtgaaggttcgctttattgtcaggggctgcggtcaatacataagttatcgttgtcaagagaaaagaaatacttattttgcagagtattggtatcaggcccagtgctgtcaatacgattactgcaattcatggtcctcccctcagttacagtcttccctgcctgagccccacgatcgacccctggcgctccccctttcagattctcaaatccaatggttctatcaagccctcaatctctccctgcccctccctaatttccatgccggcaccgaaccagacggcctggatcccatggtcactctctccctgaatctggggctgtcatttgccgaacttaggcgaatgtatctgttcctgaacagctctggactcctggtcctgccacaagccggattgctgaccccccacccgtcatag

SEQ ID NO: 208623 - DNA, 1870 bp, Artificial Sequence
  derived and/or modified sequence
atgaaggtccatatgcttgtaggtgtgctggtcatggtgggcttcacagtaggaaaggttcctgttcccgacatccggacgtgccacttctgcctcgtagaagacccttctgtaggatgcatttcaggctcagagaagtgtaccatcagcagctcatccctgtgcatggtgatcaccatctattatgatgtcaaggttcgcttcatcgttcgaggctgtggacagtacatttcctaccgctgccaagaaaaacgcaacacctactttgcagagtactggtatcaggcccagtgctgtcagtacgattattgcaactcctggtcaagcccccaactccagagctctctgccggagccccatgacaggcccctggccctgcctctgtctgactcccagattcagtggttctaccaggccctgaacctctccctgcccctccccaatttccatgctgggacggagcctgatggcctggaccccatggtcacactgtccctgaacctgggcttgtcttttgctgagctgcgccgcatgtacttgttcctcaatagttcaggacttttggttcttccccaggctggactcttgacacctcacccttcctgaattccacagtgcaaatatctttctgtaacaccctcagcatcctgcactgccctctctgaaaacacccacattctttggtcactgtgatttcttaggcctccgtctgttgtaccactagcatctatatgacttttgtgtaattttctctcttgaactctggtgctgtttttttgtttgtttgagacaaagtctcgctctgtcacccagggtggagtgcagtggcatgatctctgctcactacaacctccacctcccgggttccagcgattctcctgcctcagcctcccgagtagctgggactacaggcgtgcaccaccacgcctggctaattttttgtatttttagtagagacggggtttcaccatgttggtcaggctggtctcgaactcctgacctcgtaatctgccctcctcgacctcccaaagtgccgggattacaggtgtgagccactgtgcctgtctgagctctggtgctgttcttccccctagaaaagaatctctagtgtggattctgcccagacaggctgacctgagaaaggcacagtggttcctccattccttccccatcatctgagtgttccagtatcccccatccctctcaatccagtcacctgcctattgacatctagctctgtttcccctgtcttgtccatgtctctaagacccagtaccagactgaactagcagcaagaaggacgaggaggccgggcatggtggctcacgccggtaatcccagcactttgggaggccgaggtgggcggatcacttgagattgggagtttgagaccagcctggccaacatggtaaaacccgctctctattaaaaatagaaaaatcagctgggtgtggtggcacacctctgtaatcccagctactcaggaggctgagacaggagaatcacttgaacccgggaggcagaggttgcagtgagccgagatcgcgccactgcactccagcctgggtgacacagtgagactccgtctccaaaaaaaaggatgaggaatagaattctgtgcagatgtcctgacttggcaattttgtgtccctgcctcactgtctccaccaacccccgcctgtcctggtgttgttctgcctcctgtcctctcttgctctcttgtcagtctctggcttcctcggccccatttcacttcactgagtcctgacacccatctccctaggggcctgtgagaggagagggaagggtctgttctgctcagctccatgtcccccattttcctccacaataaactgggactgggctaaaa

SEQ ID NO: 208624 - DNA, 639 bp, Artificial Sequence
  derived and/or modified sequence
gacttcgggtactgtccccgagtgtattgcgaaaaccaacccatgctaccaatcggagttctcgtaatggtcgggttcactgtgggcaaagtccccgtgccagatattagaacctgtcatttttgtctagttgaagacccatcggtggggtgcatatctggatccgaaaagtgtaccatctcttcttccagcttatgcatggttataaccatatactacgacgtcaaagtgcggtttatcgttagaggctgcggccagtatatttcctatcgatgccaagaaaaacgaaacacatattttgcagaatattggtatcaggcacagtgctgtcaatatgattattgcaacagttggtctagcccgcagctacagtctagcctccccgagccccacgatcgacccttggctctccctttgtctgactcccagattcaatggttttatcaagccctaaacctcagtcttcccctgcccaactttcatgccgggactgagcctgatggactggatcccatggtcacgctctcactcaacttgggcctttcatttgcagagttgcgcaggatgtatttgttcctcaattcctccggcctgctcgtcctcccccaggccggattactcactcctcacccctcttag

SEQ ID NO: 208625 - DNA, 606 bp, Artificial Sequence
  derived and/or modified sequence
atgaaggttcatatgttagtcggggtcttagtcatggtcggctttacagtgggtaaagtacctgtgccagacattcgtacctgccatttttgcctcgttgaggatcctagtgtgggctgcatatctggttcagagaagtgtaccatctcaagttcctcattatgtatggtgatcacaatctactacgatgtaaaagtccggttcatcgtgcgtgggtgcggacaatatatttcatatcgctgccaggagaaacggaatacctatttcgctgaatactggtaccaagcgcagtgctgccagtacgattactgtaactcttggtcatctccgcagcttcaaagttctttacccgaacctcacgatagaccactggccctccccctcagcgattcccaaatacaatggttttaccaagcacttaatctgtccctacccttgcccaacttccatgcaggcaccgagcccgatggtctggatcccatggtgacattgagtctcaacctcggcctatctttcgccgaactccgaagaatgtatctcttcttgaacagctccggactgctagtccttccacaggctggtcttctgacaccgcatccctcctag

SEQ ID NO: 208626 - DNA, 606 bp, Artificial Sequence
  derived and/or modified sequence
atgaaagtccacatgctggtgggggtgctggtgatggtagggttcacagtgggcaaagtccctgttcctgacattcgaacttgtcacttttgtctggttgaggatccatcagtcggctgtattagtggctcggaaaagtgcactatctcttccagtagtctgtgcatggttattacaatttactacgatgtgaaggtgcggttcatagtgcggggttgcggacaatacatcagctatcgctgccaagaaaaaagaaacacatattttgccgagtattggtatcaggcacagtgttgccaatacgattattgtaactcctggtcttcacctcaactgcagagcagtctccctgagcctcatgacagacctttggccctgccccttagcgactcccaaattcagtggttctaccaggccttaaaccttagcctaccgctaccaaattttcacgctggaactgaacccgatggcctggaccctatggtaactctatcactaaatctgggactaagctttgccgagctgagaagaatgtacttatttttgaattcatcagggctgctggtgctaccccaagccggtctgctgactccccatccgagttag

SEQ ID NO: 208627 - DNA, 606 bp, Artificial Sequence
  derived and/or modified sequence
atgaaagtgcatatgctggtgggtgtactcgtgatggttgggttcacggtcgggaaagtccctgtcccggacatcagaacatgtcacttttgcttagtggaagatccgtctgttgggtgtatcagcgggtcagagaagtgtaccatctcaagtagcagcctatgtatggtaatcactatatactatgacgttaaggttaggtttatcgtccggggttgtggacaatatatttcttatcgctgtcaagaaaaaagaaacacctattttgcagagtattggtatcaggcccaatgttgtcagtacgattactgtaattcttggtcctctccgcaacttcagtcttcactgcccgaaccccacgacagacccttggcccttcccttgagtgacagccagatacaatggttctaccaagctttaaatctttctttgccactgccaaacttccatgctggcactgaaccagatggcctcgaccccatggtgaccttgtctttgaatctcggcctgagttttgctgaactgcgccgtatgtatcttttcttgaactctagtgggctgctcgtacttccacaagccggattgcttacgccacacccaagttag

SEQ ID NO: 208628 - DNA, 606 bp, Artificial Sequence
  derived and/or modified sequence
atgaaggttcatatgttagtgggcgtactggtgatggtgggattcacagttggtaaggttcctgttccagacattagaacctgtcacttctgcctcgtagaggatccttccgtcggctgcatcagtggctctgaaaaatgcactatctcttcttctagcttatgcatggtcataactatctactatgacgtcaaggtgcggttcatcgtgagaggctgtggacagtacataagttatcggtgtcaagaaaaacgtaatacatatttcgctgaatattggtaccaggctcagtgctgtcagtacgattattgtaactcctggtcttctccacagttacagtcctcgctcccagaacctcatgatcgccctctcgctttgccactgtccgacagccaaatccaatggttctaccaggctcttaacctctctttacccttacctaactttcacgccggcacggaaccagatgggctcgaccccatggtgacattgtcattaaacttaggactgtcatttgctgagcttagacgtatgtatctgttcctgaattccagcggcttactagtccttccacaggctgggcttctgactccccatccatcttag

SEQ ID NO: 208629 - DNA, 1870 bp, Artificial Sequence
  derived and/or modified sequence
atgaaggtccatatgcttgtaggtgtgctggtcatggtgggcttcacagtaggaaaggttcctgttcccgacatccggacgtgccacttctgcctcgtagaagacccttctgtaggatgcatttcaggctcagagaagtgtaccatcagcagctcatccctgtgcatggtgatcaccatctattatgatgtcaaggttcgcttcatcgttcgaggctgtggacagtacatttcctaccgctgccaagaaaaacgcaacacctactttgcagagtactggtatcaggcccagtgctgtcagtacgattattgcaactcctggtcaagcccccaactccagagctctctgccggagccccatgacaggcccctggccctgcctctgtctgactcccagattcagtggttctaccaggccctgaacctctccctgcccctccccaatttccatgctgggacggagcctgatggcctggaccccatggtcacactgtccctgaacctgggcttgtcttttgctgagctgcgccgcatgtacttgttcctcaatagttcaggacttttggttcttccccaggctggactcttgacacctcacccttcctgaattccacagtgcaaatatctttctgtaacaccctcagcatcctgcactgccctctctgaaaacacccacattctttggtcactgtgatttcttaggcctccgtctgttgtaccactagcatctatatgacttttgtgtaattttctctcttgaactctggtgctgtttttttgtttgtttgagacaaagtctcgctctgtcacccagggtggagtgcagtggcatgatctctgctcactacaacctccacctcccgggttccagcgattctcctgcctcagcctcccgagtagctgggactacaggcgtgcaccaccacgcctggctaattttttgtatttttagtagagacggggtttcaccatgttggtcaggctggtctcgaactcctgacctcgtaatctgccctcctcgacctcccaaagtgccgggattacaggtgtgagccactgtgcctgtctgagctctggtgctgttcttccccctagaaaagaatctctagtgtggattctgcccagacaggctgacctgagaaaggcacagtggttcctccattccttccccatcatctgagtgttccagtatcccccatccctctcaatccagtcacctgcctattgacatctagctctgtttcccctgtcttgtccatgtctctaagacccagtaccagactgaactagcagcaagaaggacgaggaggccgggcatggtggctcacgccggtaatcccagcactttgggaggccgaggtgggcggatcacttgagattgggagtttgagaccagcctggccaacatggtaaaacccgctctctattaaaaatagaaaaatcagctgggtgtggtggcacacctctgtaatcccagctactcaggaggctgagacaggagaatcacttgaacccgggaggcagaggttgcagtgagccgagatcgcgccactgcactccagcctgggtgacacagtgagactccgtctccaaaaaaaaggatgaggaatagaattctgtgcagatgtcctgacttggcaattttgtgtccctgcctcactgtctccaccaacccccgcctgtcctagtgttgttctgcctcctgtcctctcttgctctcttgtcagtctctggcttcctcggccccatttcacttcactgagtcctgacacccatctccctaggggcctgtgagaggagagggaagggtctgttctgctcagctccatgtcccccattttcctccacaataaactgggactgggctaaaa

SEQ ID NO: 208630 - DNA, 1870 bp, Artificial Sequence
  derived and/or modified sequence
atgaaggtccatatgcttgtaggtgtgctggtcatggtgggcttcacagtaggaaaggttcctgttcccgacatccggacgtgccacttctgcctcgtagaagacccttctgtaggatgcatttcaggctcagagaagtgtaccatcagcagctcatccctgtgcatggtgatcaccatctattatgatgtcaaggttcgcttcatcgttcgaggctgtggacagtacatttcctaccgctgccaagaaaaacgcaacacctactttgcagagtactggtatcaggcccagtgctgtcagtacgattattgcaactcctggtcaagcccccaactccagagctctctgccggagccccatgacaggcccctggccctgcctctgtctgactcccagattcagtggttctaccaggccctgaacctctccctgcccctccccaatttccatgctgggacggagcctgatggcctggaccccatggtcacactgtccctgaacctgggcttgtcttttgctgagctgcgccgcatgtacttgttcctcaatagttcaggacttttggttcttccccaggctggactcttgacacctcacccttcctgaattccacagtgcaaatatctttctgtaacaccctcagcatcctgcactgccctctctgaaaacacccacattctttggtcactgtgatttcttaggcctccgtctgttgtaccactagcatctatatgacttttgtgtaattttctctcttgaactctggtgctgtttttttgtttgtttgagacaaagtctcgctctgtcacccagggtggagtgcagtggcatgatctctgctcactacaacctccacctcccgggttccagcgattctcctgcctcagcctcccgagtagctgggactacaggcgtgcaccaccacgcctggctaattttttgtatttttagtagagacggggtttcaccatgttggtcaggctggtctcgaactcctgacctcgtaatctgccctcctcgacctcccaaagtgccgggattacaggtgtgagccactgtgcctggctgagctctggtgctgttcttccccctagaaaagaatctctagtgtggattctgcccagacaggctgacctgagaaaggcacagtggttcctccattccttccccatcatctgagtgttccagtatcccccatccctctcaatccagtcacctgcctattgacatctagctctgtttcccctgtcttgtccatgtctctaagacccagtaccagactgaactagcagcaagaaggacgaggaggccgggcatggtggctcacgccggtaatcccagcactttgggaggccgaggtgggcggatcacttgagattgggagtttgagaccagcctggccaacatggtaaaacccgctctctattaaaaatagaaaaatcagctgggtgtggtggcacacctctgtaatcccagctactcaggaggctgagacaggagaatcacttgaacccgggaggcagaggttgcagtgagccgagatcgcgccactgcactccagcctgggtgacacagtgagactccgtctccaaaaaaaaggatgaggaatagaattctgtgcagatgtcctgacttggcaattttgtgtccctgcctcactgtctccaccaacccccgcctgtcctagtgttgttctgcctcctgtcctctcttgctctcttgtcagtctctggcttcctcggccccatttcacttcactgagtcctgacacccatctccctaggggcctgtgagaggagagggaagggtctgttctgctcagctccatgtcccccattttcctccacaataaactgggactgggctaaaa

SEQ ID NO: 208631 - DNA, 606 bp, Artificial Sequence
  derived and/or modified sequence
atgaaggtgcacatgctggtgggcgtgctggtgatggtgggcttcaccgtgggcaaggtgcccgtgcccgacatcagaacctgccacttctgcctggtggaggaccccagcgtgggctgcatcagcggcagcgagaagtgcaccatcagcagcagcagcctgtgcatggtgatcaccatctactacgacgtgaaggtgagattcatcgtgagaggctgcggccagtacatcagctacagatgccaggagaagagaaacacctacttcgccgagtactggtaccaggcccagtgctgccagtacgactactgcaacagctggagcagcccccagctgcagagcagcctgcccgagccccacgacagacccctggccctgcccctgagcgacagccagatccagtggttctaccaggccctgaacctgagcctgcccctgcccaacttccacgccggcaccgagcccgacggcctggaccccatggtgaccctgagcctgaacctgggcctgagcttcgccgagctgagaagaatgtacctgttcctgaacagcagcggcctgctggtgctgccccaggccggcctgctgaccccccaccccagctag

SEQ ID NO: 208632 - DNA, 441 bp, Artificial Sequence
  derived and/or modified sequence
atggtgatcaccatctactacgacgtgaaggtgagattcatcgtgagaggctgcggccagtacatcagctacagatgccaggagaagagaaacacctacttcgccgagtactggtaccaggcccagtgctgccagtacgactactgcaacagctggagcagcccccagctgcagagcagcctgcccgagccccacgacagacccctggccctgcccctgagcgacagccagatccagtggttctaccaggccctgaacctgagcctgcccctgcccaacttccacgccggcaccgagcccgacggcctggaccccatggtgaccctgagcctgaacctgggcctgagcttcgccgagctgagaagaatgtacctgttcctgaacagcagcggcctgctggtgctgccccaggccggcctgctgaccccccaccccagctag

SEQ ID NO: 208633 - DNA, 639 bp, Artificial Sequence
  derived and/or modified sequence
gacttcggctactgccccagagtgtactgcgagaaccagcccatgctgcccatcggcgtgctggtgatggtgggcttcaccgtgggcaaggtgcccgtgcccgacatcagaacctgccacttctgcctggtggaggaccccagcgtgggctgcatcagcggcagcgagaagtgcaccatcagcagcagcagcctgtgcatggtgatcaccatctactacgacgtgaaggtgagattcatcgtgagaggctgcggccagtacatcagctacagatgccaggagaagagaaacacctacttcgccgagtactggtaccaggcccagtgctgccagtacgactactgcaacagctggagcagcccccagctgcagagcagcctgcccgagccccacgacagacccctggccctgcccctgagcgacagccagatccagtggttctaccaggccctgaacctgagcctgcccctgcccaacttccacgccggcaccgagcccgacggcctggaccccatggtgaccctgagcctgaacctgggcctgagcttcgccgagctgagaagaatgtacctgttcctgaacagcagcggcctgctggtgctgccccaggccggcctgctgaccccccaccccagctag

SEQ ID NO: 208634 - DNA, 606 bp, Artificial Sequence
  derived and/or modified sequence
atgaaagttcacatgctggtaggcgtactggtgatggtgggttttactgtgggaaaggtgcctgtgccagatatcaggacatgccacttttgcctggtggaggatccatctgtcggatgtatttctgggtctgaaaaatgtaccataagcagctcgagtttatgcatggtgattaccatttattacgacgtgaaggtgcgattcattgtacgggggtgcgggcagtacatcagctaccgttgtcaagagaagcggaatacgtacttcgctgagtattggtaccaggctcaatgttgccagtatgattactgtaacagttggagttcaccacaactacagtccagcctccctgagccacacgaccggcccctggcactgccactgtcagactcccagatccagtggttctatcaggccctgaatctgtccctcccactccccaacttccacgcggggacagagccagacggtttagacccaatggtgacattgagtcttaatctgggcctgagtttcgcagagctccggcggatgtacctgttccttaacagctccggcttgctggtactccctcaagctggcctgctcacaccacaccctagttag

SEQ ID NO: 208635 - DNA, 441 bp, Artificial Sequence
  derived and/or modified sequence
atggtaattaccatttattatgatgtgaaagtccgctttattgttcggggctgtggacagtacatttcctaccgctgtcaggaaaagaggaacacatatttcgccgagtattggtatcaagcacagtgttgccagtacgactactgcaacagttggagctctcctcagcttcaaagctccctaccagagccacacgacaggcccctggccctgcccctgagtgatagccagatacaatggttctaccaggctctcaatctctcactgcctctccctaactttcacgccggaactgaaccagatggtctggatccaatggtgactctgtccttgaacctggggctctcatttgctgaattgcgaagaatgtatctattcttaaacagcagcggattactggtgctgccccaggcagggctcctaacccctcatccatcctag

SEQ ID NO: 208636 - DNA, 639 bp, Artificial Sequence
  derived and/or modified sequence
gattttgggtactgtccacgcgtgtattgtgaaaatcagcccatgttgccaattggtgtactcgtcatggtggggtttacggtgggcaaagtgccagtgcccgatattagaacttgtcacttctgcctcgtcgaagatccatccgtcggatgcatatccggaagcgaaaaatgcaccatctcttcatcctctctgtgcatggtcatcacaatttactatgatgtgaaagttcgttttattgtccggggatgtggacagtatatatcatatcgctgccaggagaagcgaaatacctacttcgctgagtattggtaccaggcgcagtgctgtcagtatgactactgtaattcttggtcttcaccgcagctgcagagctcattgcctgagccccacgaccgtcccctcgccctgccgttatccgactcacaaatccagtggttctatcaggccctcaatctgagcctgcctttgcctaactttcacgctgggaccgagcctgacggcctggatcctatggtgacactctctttaaacctgggtcttagttttgccgaactcaggaggatgtacctgtttctcaactccagcggccttctcgtactgccccaagccggccttttaactccacacccctcttag

SEQ ID NO: 208637 - DNA, 639 bp, Artificial Sequence
  derived and/or modified sequence
gacttcggctactgtccacgggtgtactgcgaaaaccaacccatgttgcctatcggggtgctggttatggttggatttaccgtgggcaaagtcccagtccccgatataaggacttgtcacttctgccttgttgaggatccttcggtaggatgtatctctggtagcgaaaagtgtaccatctcatcaagcagtctgtgtatggtgattaccatttactatgatgtaaaggtaaggttcattgtgaggggatgtgggcaatacattagctacaggtgccaggagaagcgcaatacatactttgcagagtactggtatcaggcacaatgttgccagtacgactactgcaattcctggtccagcccccagctgcagtcatctctcccagaacctcatgacaggccactggcacttcctctcagcgattcccagattcagtggttttatcaggctttgaacttatccttacctctaccaaactttcacgccgggacagagccggatggcctcgacccgatggtcaccttaagtttgaaccttggattaagttttgccgagctgcggcgaatgtatttgttcttgaacagttccggtttacttgttttgccccaggcgggcttgctaaccccccatccaagctag

SEQ ID NO: 208638 - DNA, 606 bp, Artificial Sequence
  derived and/or modified sequence
atgaaggtccatatgttagtaggtgtgctagtgatggtaggatttaccgtcggaaaggtgccggttcccgatattcgtacatgccatttctgcctggtggaggatccaagtgtcggttgcataagcgggtcggaaaagtgcacaattagctcttccagcctgtgtatggtgatcaccatctactacgatgtgaaggttaggtttatcgtcagaggatgtggccaatacattagctataggtgtcaagagaagcggaacacatactttgcagagtactggtaccaggcgcagtgctgtcagtacgactattgtaatagctggtccagcccgcaactgcagagcagtttgccagagccccacgaccgcccactcgcacttcctctctccgactcacaaattcagtggttttatcaagcactcaatctctctcttcctctgccaaattttcatgccgggaccgagcccgacggccttgatcccatggtgactctatccctgaacctaggcttgtcatttgcagaactgcggcggatgtacttattcttaaactccagtggacttcttgtgctgccacaggcaggccttcttacacctcacccatcctag

SEQ ID NO: 208639 - DNA, 606 bp, Artificial Sequence
  derived and/or modified sequence
atgaaagtgcatatgctggtcggagtgctagtgatggtgggattcaccgtggggaaggtgccggttccagatatccgaacctgtcacttttgtcttgtagaggaccctagcgtagggtgtatcagcggctccgaaaagtgcacaattagtagtagttcactgtgtatggtgataaccatctactacgatgttaaagtgcgcttcattgtgcgcggctgtggacaatatatctcatatcggtgccaggagaaaagaaacacttactttgcggaatactggtaccaggcacagtgttgtcagtatgactactgtaattcatggtctagcccacaacttcaaagctccttacctgaaccccatgatcggccgctggcactgcccctgtccgactcccaaatccaatggttttatcaggccctaaatctatctctcccactgcccaatttccacgccggcacagaacccgatggactcgacccaatggtaaccctcagtctgaacctcggcctgtcctttgcggagttgcggcgtatgtatctcttcctgaactcttccggacttcttgtgctgcctcaggccgggctcttgacccctcatccctcctag

SEQ ID NO: 208640 - DNA, 606 bp, Artificial Sequence
  derived and/or modified sequence
atgaaggtccatatgctcgtaggtgtcctcgtaatggtggggttcactgttggaaaagtgcccgtgcccgacatcagaacctgccacttctgcctggtggaggatccaagtgtgggatgtatctcaggttcagagaagtgcacaatctcaagcagcagtctgtgcatggttataactatatactatgatgtaaaagtgcgattcatcgtccgcgggtgtggccaatacatcagttataggtgtcaggaaaaacgcaatacctattttgcagagtattggtatcaagcacagtgttgccagtacgactactgcaacagctggtcctccccccagctacaatcgtcacttccagaaccccacgatagaccactggctttaccgctatcagacagtcaaattcagtggttttatcaggccctcaacttgagcctgccccttcccaatttccacgcagggactgagccagatggcctcgacccgatggttacgcttagtttgaatcttggtctgtcttttgctgagctgcgccggatgtatttatttctgaattcttccggcttactggttcttccccaagctggactcctcacgcctcacccttcttag

SEQ ID NO: 208641 - DNA, 606 bp, Artificial Sequence
  derived and/or modified sequence
atgaaagtgcacatgttagtgggggtactcgtgatggtcgggttcactgtgggcaaagtgccggtccctgacataaggacttgtcacttttgcctggttgaggatccatccgtgggctgcatcagcggctcagaaaaatgtactatttcatcgagcagcctgtgcatggtgattactatctactacgacgtgaaggtgcggtttatcgttcgagggtgcggacagtacatctcctaccgatgtcaagaaaagcggaatacctatttcgccgaatattggtatcaggctcagtgttgtcagtatgactattgtaacagctggagttccccgcaattacagtcttcactccccgaaccccacgaccgtccactggctttaccattatccgattcccaaattcagtggttttatcaggccctcaaccttagtttgcctctgcccaacttccatgccggcacagaaccagacgggcttgatcccatggtgactctttcactgaatctcgggctctcttttgccgagttgcgcaggatgtatctttttttgaattcttctggcctgctggtcttgcctcaagcaggcctactgacaccccatccctcctag

SEQ ID NO: 208642 - DNA, 606 bp, Artificial Sequence
  derived and/or modified sequence
atgaaggtgcacatgctggtgggcgtgctggtgatggtgggcttcaccgtgggcaaggtgcctgtgcctgacatccgcacctgccacttctgcctggtggaggaccccagcgtgggctgcatcagcggcagcgagaagtgcaccatcagcagcagcagcctgtgcatggtgatcaccatctactatgatgtgaaggtgcgcttcatcgtgcggggctgcggccagtacatctcctaccgctgccaggagaagaggaacacctactttgctgagtactggtaccaggcccagtgctgccagtatgactactgcaacagctggagcagcccccagctgcagagcagcctgcctgagccccatgaccggcccctggccctgcccctgagtgacagccagatccagtggttctaccaggccctgaacctgagcctgcccctgcccaacttccacgccggcacagagccagatggcctggaccccatggtgaccctgagcctgaacctgggcctgagctttgctgagctgcggaggatgtacctgttcctgaacagcagcggcctgctggtgctgccccaggccggcctgctgaccccccaccccagctag

SEQ ID NO: 208643 - DNA, 441 bp, Artificial Sequence
  derived and/or modified sequence
atggtgatcaccatctactatgatgtgaaggtgcgcttcatcgtgcggggctgcggccagtacatctcctaccgctgccaggagaagaggaacacctactttgctgagtactggtaccaggcccagtgctgccagtatgactactgcaacagctggagcagcccccagctgcagagcagcctgcctgagccccatgaccggcccctggccctgcccctgagtgacagccagatccagtggttctaccaggccctgaacctgagcctgcccctgcccaacttccacgccggcacagagccagatggcctggaccccatggtgaccctgagcctgaacctgggcctgagctttgctgagctgcggaggatgtacctgttcctgaacagcagcggcctgctggtgctgccccaggccggcctgctgaccccccaccccagctag

SEQ ID NO: 208644 - DNA, 639 bp, Artificial Sequence
  derived and/or modified sequence
gactttggctactgcccccgggtgtactgtgagaaccagcccatgctgcccatcggcgtgctggtgatggtgggcttcaccgtgggcaaggtgcctgtgcctgacatccgcacctgccacttctgcctggtggaggaccccagcgtgggctgcatcagcggcagcgagaagtgcaccatcagcagcagcagcctgtgcatggtgatcaccatctactatgatgtgaaggtgcgcttcatcgtgcggggctgcggccagtacatctcctaccgctgccaggagaagaggaacacctactttgctgagtactggtaccaggcccagtgctgccagtatgactactgcaacagctggagcagcccccagctgcagagcagcctgcctgagccccatgaccggcccctggccctgcccctgagtgacagccagatccagtggttctaccaggccctgaacctgagcctgcccctgcccaacttccacgccggcacagagccagatggcctggaccccatggtgaccctgagcctgaacctgggcctgagctttgctgagctgcggaggatgtacctgttcctgaacagcagcggcctgctggtgctgccccaggccggcctgctgaccccccaccccagctag

SEQ ID NO: 208645 - DNA, 2654 bp, Artificial Sequence
  derived and/or modified sequence
accaggacagatttgtgctcagtggattgggtggtgtttttagtatggagcagaacagaattcctaggactgcgtgtgatgaaatgcaaggtcaaaaggaaaagacaaagcatatttcaaagatgagaaatatttgtttggatatctatgactgtctgtttatactgtaaggggcttaatcagcagctccatcttttagttttagttctaaaggaaaagtagcctaaagtcagtataactaaagggtggaacgaggtgggacaaggtccggaattgctgctcagtgatgtgtgtgtgcctgccgctggtggagctgagactgctcatctcagaaggatggggatgcttgatttcctggccaggttgtcccagcacagtggggattggccctgttgtatgacgaagacagcacatggtggcagagatagatactaacccatggactttccaagggagggaataggtctttggagggtatgcaagacaaaggtagacactggataaagaacccggtagtgcccaggtattaccccatctgggccattactcccacactcaggaaccagacgttgtgggtgaggacatgctgtccctcctgccaagtaataacttccttcccagccaggatcctgccccaagtaggaatatagctctgcatttacagcagctcctgctcagaccttgtcaaaaccaccctgcagcttaggattaaggagcatggtcacaggaaggtggggtttcagggcatcccctcaggaactgcccatctccccagaattccaaaatgaaggtccatatgcttgtaggtgtgctggtcatggtgggcttcacagtaggaaaggttcctgttcccgacatccggacgtgccacttctgcctcgtagaagacccttctgtaggatgcatttcaggctcagagaagtgtaccatcagcagctcatccctgtgcatggtgatcaccatctattatgatgtcaaggttcgcttcatcgttcgaggctgtggacagtacatttcctaccgctgccaagaaaaacgcaacacctactttgcagagtactggtatcaggcccagtgctgtcagtacgattattgcaactcctggtcaagcccccaactccagagctctctgccggagccccatgacaggcccctggccctgcctctgtctgactcccagattcagtggttctaccaggccctgaacctctccctgcccctccccaatttccatgctgggacggagcctgatggcctggaccccatggtcacactgtccctgaacctgggcttgtcttttgctgagctgcgccgcatgtacttgttcctcaatagttcaggacttttggttcttccccaggctggactcttgacacctcacccttcctgaattccacagtgcaaatatctttctgtaacaccctcagcatcctgcactgccctctctgaaaacacccacattctttggtcactgtgatttcttaggcctccgtctgttgtaccactagcatctatatgacttttgtgtaattttctctcttgaactctggtgctgtttttttgtttgtttgagacaaagtctcgctctgtcacccagggtggagtgcagtggcatgatctctgctcactacaacctccacctcccgggttccagcgattctcctgcctcagcctcccgagtagctgggactacaggcgtgcaccaccacgcctggctaattttttgtatttttagtagagacggggtttcaccatgttggtcaggctggtctcgaactcctgacctcgtaatctgccctcctcgacctcccaaagtgccgggattacaggtgtgagccactgtgcctgtctgagctctggtgctgttcttccccctagaaaagaatctctagtgtggattctgcccagacaggctgacctgagaaaggcacagtggttcctccattccttccccatcatctgagtgttccagtatcccccatccctctcaatccagtcacctgcctattgacatctagctctgtttcccctgtcttgtccatgtctctaagacccagtaccagactgaactagcagcaagaaggacgaggaggccgggcatggtggctcacgccggtaatcccagcactttgggaggccgaggtgggcggatcacttgagattgggagtttgagaccagcctggccaacatggtaaaacccgctctctattaaaaatagaaaaatcagctgggtgtggtggcacacctctgtaatcccagctactcaggaggctgagacaggagaatcacttgaacccgggaggcagaggttgcagtgagccgagatcgcgccactgcactccagcctgggtgacacagtgagactccgtctccaaaaaaaaggatgaggaatagaattctgtgcagatgtcctgacttggcaattttgtgtccctgcctcactgtctccaccaacccccgcctgtcctagtgttgttctgcctcctgtcctctcttgctctcttgtcagtctctggcttcctcggccccatttcacttcactgagtcctgacacccatctccctaggggcctgtgagaggagagggaagggtctgttctgctcagctccatgtcccccattttcctccacaataaactgggactgggctaaaa

SEQ ID NO: 208646 - DNA, 606 bp, Artificial Sequence
  derived and/or modified sequence
atgaaggtgcacatgctggtgggcgtgctggtgatggtgggcttcacagtaggcaaagtgcccgttccagacattagaacctgccacttctgtcttgtagaggacccctcagtcggctgtatttctgggtctgagaaatgcaccatcagtagctcttccctgtgcatggtgattacaatttattacgacgtgaaagttcgctttatcgtgcgcggctgtgggcaatatatctcctaccgatgtcaggaaaaacgcaacacctactttgcagaatactggtatcaggcccagtgttgccagtacgactactgcaacagctggtcctctccacagctgcagagttctcttcccgaacctcacgataggccgttggcactgcctctgagcgattcccagattcagtggttctaccaggctctgaacctcagcctcccactacccaacttccacgccggaacggaacctgatgggttggatccaatggtgactttatccctgaatttgggcctgtcgtttgcagaattacggaggatgtacttgtttctaaactcaagcggactgttagtcttaccccaggctggtctgctcaccccccacccaagctag

SEQ ID NO: 208647 - DNA, 441 bp, Artificial Sequence
  derived and/or modified sequence
atggtgatcaccatctactacgacgtgaaggtgcggttcatcgtgcgtggctgcggccagtacatctcgtacagatgtcaggagaaaagaaatacatactttgcagaatattggtaccaggcacagtgctgccagtatgactactgcaactcctggtcaagcccccagctccagagctcattacctgagccacacgaccgccccctggccttgcccctgtcagactcccagattcagtggttctatcaagctctgaacttaagcttgcccctgcccaatttccacgccggtactgaaccggatgggctagatccaatggtgaccttatctctcaatctgggccttagttttgccgagctgcggaggatgtatttgttccttaactccagcggtttattggtgctgccccaggccgggctgctgactcctcacccatcgtag

SEQ ID NO: 208648 - DNA, 639 bp, Artificial Sequence
  derived and/or modified sequence
gacttcggctactgcccccgggtgtactgcgagaaccagcccatgctgccaataggggtcttagtaatggtgggatttaccgtgggaaaggtgcctgtgccagatatcaggacgtgtcatttctgtctcgtggaagacccttctgttggctgtattagcggtagtgagaagtgcaccattagctctagctcactgtgcatggttatcacaatctactatgacgtgaaagtgagattcattgtacgcggatgcggccagtacatttcctatcgctgtcaggagaagcggaacacgtatttcgctgagtactggtatcaagcccagtgctgccaatacgactattgcaactcatggtccagccctcagctgcagagcagcctgcccgaacctcacgacagacccttggcattaccactctcagacagccagatacagtggttttaccaggcactgaatctgagcctaccactgcccaacttccatgcaggcactgagcccgatggcctggatcctatggtgactctgtcgctgaatctgggcctgtcgttcgcagaactccgtcgaatgtacctgttcctgaatagcagcggcctgcttgtgctgccccaggccggtctgctcaccccacatccctcttag

SEQ ID NO: 208649 - DNA, 639 bp, Artificial Sequence
  derived and/or modified sequence
gacttcggctactgcccccgggtgtactgcgagaaccagcccatgctccctattggtgttctagtgatggtgggattcacagttggtaaagtgccagtgccggacattcgcacatgccacttttgcttggtcgaagatccctctgtgggatgcatcagtggaagcgagaaatgcactatcagttcgagctcactgtgcatggtcattacgatctactacgatgtcaaggtccgctttatagtacgggggtgcggccagtacatttcctatcgttgccaagagaaacgcaacacgtacttcgcagagtactggtatcaggcacagtgctgccagtatgattattgtaactcttggagctctcctcagctgcaatccagcctcccagagcctcacgaccgtcctctcgccctgcccctctcagactctcagatacagtggttttaccaggcactgaatctctcactaccactacctaactttcacgccggcacagagcccgacgggctagaccccatggtcacgctgagcttgaacctcggcctctccttcgctgagctgagaaggatgtacctcttcttgaattcctccggccttctcgtcttaccgcaggctggacttctgactccccatcccagttag

SEQ ID NO: 208650 - DNA, 606 bp, Artificial Sequence
  derived and/or modified sequence
atgaaggtgcacatgctggtgggcgtgctggtgatggtgggcttcactgtgggtaaggtacctgtcccagatatccgaacctgtcacttctgcctcgtggaggacccttctgtggggtgcatttccgggagtgagaaatgcacaatctcttccagtagtttgtgcatggtgatcacaatctactatgacgtaaaggtgaggtttattgtccgcggctgcggacagtacatctcgtacaggtgccaggagaagagaaatacctacttcgccgaatactggtatcaagcccagtgttgccagtatgactattgcaacagctggtcttcaccccaattacaatcttctcttcctgaaccccacgaccggcctcttgctcttcctctctctgatagccaaattcagtggttttatcaggcactcaatctgtctctaccacttcccaacttccatgccggtacagaacctgatggtctagatccaatggtgacactgtcgcttaatctcggtttgtcttttgccgagctccgcaggatgtatctgtttctgaattcctccggtctgctagtactgcctcaggccgggctgctgacaccacacccctcttag

SEQ ID NO: 208651 - DNA, 606 bp, Artificial Sequence
  derived and/or modified sequence
atgaaggtgcacatgctggtgggcgtgctggtgatggtgggcttcaccgttgggaaagttccagtgccggacatccgtacttgtcatttttgtctggtcgaggacccctcagtgggatgcatcagtgggagcgagaagtgcaccatctcaagctcctccctgtgcatggtgatcactatttactatgatgtgaaggtgcgcttcattgtgagagggtgcgggcagtatatttcctaccggtgtcaggagaaaaggaatacctactttgctgagtattggtaccaggcacaatgctgtcagtacgactactgtaacagctggtccagtcctcaactccaaagcagccttccggagcctcatgacaggccattggcgctaccgctgagcgattcgcagattcagtggttctaccaggccctgaatttgtccctgccgctccccaactttcacgctggtactgagcctgatggcttagaccccatggtgactttgtctctcaatctgggattaagttttgccgagctccgcaggatgtacctctttctcaacagcagtggactactagtgttgcctcaggctggattgttgaccccacacccatcctag

SEQ ID NO: 208652 - DNA, 606 bp, Artificial Sequence
  derived and/or modified sequence
atgaaggtgcacatgctggtgggcgtgctggtgatggtgggcttcacagtggggaaagtgccggtacctgatattagaacttgccacttctgtctggtagaagaccccagtgtggggtgcatctccgggagtgagaagtgcacgattagttcttcatccttgtgtatggtcatcaccatctactatgatgttaaggtacgatttattgttcggggctgtgggcagtacatcagctatcgctgtcaggaaaagagaaacacatacttcgctgaatactggtaccaggctcagtgctgtcaatacgactactgtaattcgtggagcagtccacagttacagtcctccctaccagagcctcatgacaggccgttagccctcccactgagcgatagccagattcagtggttttaccaggccctgaacttgagtcttcctctgcccaactttcacgcaggtaccgagccagacggcctggatcccatggtcacgctgagcctgaatctgggcctgagcttcgccgagttgcgacgcatgtacttgtttctgaactcctctggtctgctagtgctgccacaggccgggctgctgacaccgcatccttcctag

SEQ ID NO: 208653 - DNA, 606 bp, Artificial Sequence
  derived and/or modified sequence
atgaaggtgcacatgctggtgggcgtgctggtgatggtgggcttcactgtcgggaaggtcccagtgccggatatccggacttgccatttctgtctggtggaggacccctctgtgggctgcatctccggttccgagaaatgtactataagtagctccagtctttgcatggtgattaccatctactatgacgtgaaagttcgattcatagtcagggggtgtgggcagtacatctcctataggtgccaggagaaacgcaatacttatttcgcggagtactggtaccaggctcagtgctgtcagtatgactattgcaatagttggagtagcccccagttgcagtctagcctccctgaaccccacgatagaccactcgccttgccactgtctgactcacagatccagtggttttaccaggcgctgaatctgagcctgcccctccccaatttccacgctggcaccgagcctgacggactggatcccatggtcaccttgtcgcttaatctcggtctaagtttcgcagaacttcgtaggatgtatctatttttgaatagttccggattgctcgttctgccacaggcaggcctgctcaccccacacccatcttag

SEQ ID NO: 208654 - DNA, 639 bp, Artificial Sequence
  derived and/or modified sequence
gacttcggctactgccccagagtgtactgcgagaaccagcccatgctgcccatcggcgtgctggtgatggtgggcttcaccgtgggcaaggtgcccgtgcccgacatcagaacctgccacttctgcctggtggaggaccccagcgtgggctgcatcagcggcagcgagaagtgcaccatcagcagcagcagcctgtgcatggtgatcaccatctactacgacgtgaaggtgagattcatcgtgagaggctgcggccagtacatcagctacagatgccaggagaagagaaacacctacttcgccgagtactggtaccaggcccagtgctgccagtacgactactgcaacagctggagcagcccccagctgcagagcagcctgcccgagccccacgacagacccctggccctgcccctgagcgacagccagatccagtggttctaccaggccctgaacctgagcctgcccctgcccaacttccacgccggcaccgagcccgacggcctggaccccatggtgaccctgagcctgaacctgggcctgagcttcgccgagctgtgcagaatgtacctgttcctgaacagcagcggcctgctggtgctgccccaggccggcctgctgaccccccaccccagctag

SEQ ID NO: 208655 - DNA, 606 bp, Artificial Sequence
  derived and/or modified sequence
atgaaggtgcacatgctggtgggcgtgctggtgatggtgggcttcaccgtgggcaaggtgcccgtgcccgacatcagaacctgccacttctgcctggtggaggaccccagcgtgggctgcatcagcggcagcgagaagtgcaccatcagcagcagcagcctgtgcatggtgatcaccatctactacgacgtgaaggtgagattcatcgtgagaggctgcggccagtacatcagctacagatgccaggagaagagaaacacctacttcgccgagtactggtaccaggcccagtgctgccagtacgactactgcaacagctggagcagcccccagctgcagagcagcctgcccgagccccacgacagacccctggccctgcccctgagcgacagccagatccagtggttctaccaggccctgaacctgagcctgcccctgcccaacttccacgccggcaccgagcccgacggcctggaccccatggtgaccctgagcctgaacctgggcctgagcttcgccgagctgtgcagaatgtacctgttcctgaacagcagcggcctgctggtgctgccccaggccggcctgctgaccccccaccccagctag

SEQ ID NO: 208656 - DNA, 639 bp, Artificial Sequence
  derived and/or modified sequence
gacttcgggtactgtccacgggtatattgcgagaaccagcccatgcttccgataggtgtgttggttatggtgggcttcacggttggcaaagtccctgtgcctgacattcgaacttgtcatttttgtctcgttgaggatccctcagtgggttgcatctctggatctgaaaaatgtaccatatcgtccagttctttgtgtatggttattacaatctactatgatgtgaaggtccgatttatcgtcaggggatgcggccagtacatctcttataggtgtcaggaaaaacgaaacacctatttcgccgaatactggtatcaagctcagtgttgccagtatgattactgcaacagctggtcttcaccccagcttcaaagcagcctccccgagcctcacgatcgtccactggctctccccctgtcagatagtcagatccagtggttctatcaggcacttaacctgtcactcccactgcccaacttccacgcagggacagagcctgatggtcttgaccctatggttaccctttcgctaaacctggggctttccttcgccgaactgtgccgcatgtacctctttctaaattcctccggcctgctggtgctcccccaggctggtctgctcaccccacacccctcatag

SEQ ID NO: 208657 - DNA, 639 bp, Artificial Sequence
  derived and/or modified sequence
gattttgggtattgtcctagagtgtactgtgagaaccagcccatgctgcccattggcgtgcttgtgatggtggggtttaccgtgggcaaggtgccggtccccgacatccgtacctgtcatttttgtcttgtggaggacccaagcgtgggctgcatttctggatcggagaagtgcaccatctcgagctcctcactctgtatggtgataactatttactacgacgtgaaagttagatttatcgtaagaggctgtgggcagtacatctcatacagatgtcaagagaaacggaacacctattttgcggagtactggtatcaagcccagtgttgtcaatacgactattgcaacagctggagctcaccacagctgcagtctagtctccccgagcctcatgaccggcctctcgcacttcctctgagcgatagccagattcagtggttttatcaagctctcaacctctcactccctcttcctaatttccacgcaggcactgagccagatggcctcgaccctatggtgaccctgtctctgaatctcggtctctctttcgccgagctacgacgcatgtacttattcctgaacagcagcggcttgctggttctaccgcaggctggtttacttactccacatccctcctag

SEQ ID NO: 208658 - DNA, 639 bp, Artificial Sequence
  derived and/or modified sequence
gactttgggtattgcccccgagtgtattgcgagaaccaacccatgctgcccatcggggttctggtaatggtggggttcacggtggggaaggtcccggtgccagatataagaacctgccacttctgtctcgtggaggacccaagcgtgggctgcatcagtggcagcgaaaaatgcacgatttcgtcctcttctttatgcatggtgataactatatattacgatgtgaaagttaggtttattgtgcggggatgcggccagtatattagctacagatgtcaagagaagcgcaatacgtactttgccgagtactggtatcaggctcaatgctgccaatacgattattgcaatagctggagttccccccagcttcaatcctcccttcccgagccacacgaccgccccctagcgctgcctctgagcgacagccagatccagtggttctaccaggctctgaacttaagcctgccactgccgaactttcacgccggaacagagccggacggcctcgatcccatggtgacactgagtctaaacctcggtctgtcatttgcagaactgagaagaatgtatctctttctgaactctagcgggctcctagtccttccccaagctggactgttgacgccccacccctcatag

SEQ ID NO: 208659 - DNA, 639 bp, Artificial Sequence
  derived and/or modified sequence
gactttggctattgtcctagggtttactgcgagaatcagcctatgctacctattggggtgctggtgatggtgggcttcactgtcgggaaagtcccagtacccgacattcgcacatgccatttctgtctcgtggaagatccatccgttggatgtattagcggttccgagaaatgcactatctctagtagtagtttgtgcatggtcattacgatctactatgacgtgaaggtgcgcttcatcgtgagagggtgcggacagtacatttcttatcgctgtcaagaaaagcggaatacatacttcgctgaatactggtatcaggcgcagtgctgtcagtacgattactgcaacagttggagcagcccgcaacttcagagctccctgcccgagcctcacgatcggccgttggctctacctctttctgattcccagatacagtggttctatcaggcactcaacctctctctgccactgcctaactttcacgccggcacggagcccgacgggttggatcccatggtgactctctcattaaacttggggctcagttttgcagagttgtgtagaatgtacctcttcctcaactcaagcggacttctagtgctgccacaggcaggcctgctgactcctcatccctcatag

SEQ ID NO: 208660 - DNA, 606 bp, Artificial Sequence
  derived and/or modified sequence
atgaaggtccacatgctggtgggcgtgctggtcatggttggcttcaccgttggcaaagtcccagtccctgatatccggacatgccacttttgcctcgtggaggatccttcggtgggctgcatttctgggtccgaaaagtgcacaatttcaagttcttcgctttgcatggtgattactatttactacgatgttaaggtgcgctttattgtacgaggttgtgggcagtatatttcctaccgttgccaggaaaaaagaaacacctacttcgcagaatattggtatcaggctcagtgttgtcagtacgattattgcaatagctggagttcacctcagcttcaatcctctctgccagagccccacgaccggcctttagcactgcccctctccgatagccaaatccaatggttctatcaggccctgaatctatctctgcctttgccaaacttccatgcgggcacagagccagacggattggaccccatggtgactctatccctaaatcttgggctttcattcgcagagctgtgcaggatgtacctttttctaaacagcagcggactcctggtgctacctcaggccggcctcctgactccacatccttcatag

SEQ ID NO: 208661 - DNA, 606 bp, Artificial Sequence
  derived and/or modified sequence
atgaaggtgcatatgcttgtcggagtattagtgatggtgggttttactgtcggaaaagtgccagttcctgacattaggacctgtcatttttgtcttgtggaggacccgagtgtgggatgtatatccgggagcgagaaatgtactatttctagcagctccttgtgcatggtgatcactatctattacgatgtcaaggtgaggttcatagtacgtggctgtggtcagtatatatcctaccgctgccaagagaaaaggaacacctatttcgcagaatattggtaccaagctcaatgttgccaatatgactattgtaattcctggtcgagcccccagttgcagagttctctgccagaaccacatgacagaccacttgcgctgcccctttcagacagccagatccagtggttttaccaggcgctgaacctgagtctgcccctgcccaattttcatgctggaaccgagcccgacggcctcgacccaatggttaccctgtcactgaacctggggctaagctttgcggagctctgccgcatgtacctcttcctgaactcatccggtctcctggttttaccccaggcagggctcttgaccccgcatccaagctag

SEQ ID NO: 208662 - DNA, 639 bp, Artificial Sequence
  derived and/or modified sequence
gactttggctactgcccccgggtgtactgtgagaaccagcccatgctgcccatcggcgtgctggtgatggtgggcttcaccgtgggcaaggtgcctgtgcctgacatccgcacctgccacttctgcctggtggaggaccccagcgtgggctgcatcagcggcagcgagaagtgcaccatcagcagcagcagcctgtgcatggtgatcaccatctactatgatgtgaaggtgcgcttcatcgtgcggggctgcggccagtacatctcctaccgctgccaggagaagaggaacacctactttgctgagtactggtaccaggcccagtgctgccagtatgactactgcaacagctggagcagcccccagctgcagagcagcctgcctgagccccatgaccggcccctggccctgcccctgagtgacagccagatccagtggttctaccaggccctgaacctgagcctgcccctgcccaacttccacgccggcacagagccagatggcctggaccccatggtgaccctgagcctgaacctgggcctgagctttgctgagctgtgcaggatgtacctgttcctgaacagcagcggcctgctggtgctgccccaggccggcctgctgaccccccaccccagctag

SEQ ID NO: 208663 - DNA, 606 bp, Artificial Sequence
  derived and/or modified sequence
atgaaggtgcacatgctggtgggcgtgctggtgatggtgggcttcaccgtgggcaaggtgcctgtgcctgacatccgcacctgccacttctgcctggtggaggaccccagcgtgggctgcatcagcggcagcgagaagtgcaccatcagcagcagcagcctgtgcatggtgatcaccatctactatgatgtgaaggtgcgcttcatcgtgcggggctgcggccagtacatctcctaccgctgccaggagaagaggaacacctactttgctgagtactggtaccaggcccagtgctgccagtatgactactgcaacagctggagcagcccccagctgcagagcagcctgcctgagccccatgaccggcccctggccctgcccctgagtgacagccagatccagtggttctaccaggccctgaacctgagcctgcccctgcccaacttccacgccggcacagagccagatggcctggaccccatggtgaccctgagcctgaacctgggcctgagctttgctgagctgtgcaggatgtacctgttcctgaacagcagcggcctgctggtgctgccccaggccggcctgctgaccccccaccccagctag

SEQ ID NO: 208664 - DNA, 1903 bp, Artificial Sequence
  derived and/or modified sequence
gactttggttactgtcctcgtgtgtactgtgagaaccagccaatgcttcccattggtgtgctggtcatggtgggcttcacagtaggaaaggttcctgttcccgacatccggacgtgccacttctgcctcgtagaagacccttctgtaggatgcatttcaggctcagagaagtgtaccatcagcagctcatccctgtgcatggtgatcaccatctattatgatgtcaaggttcgcttcatcgttcgaggctgtggacagtacatttcctaccgctgccaagaaaaacgcaacacctactttgcagagtactggtatcaggcccagtgctgtcagtacgattattgcaactcctggtcaagcccccaactccagagctctctgccggagccccatgacaggcccctggccctgcctctgtctgactcccagattcagtggttctaccaggccctgaacctctccctgcccctccccaatttccatgctgggacggagcctgatggcctggaccccatggtcacactgtccctgaacctgggcttgtcttttgctgagctgtgccgcatgtacttgttcctcaatagttcaggacttttggttcttccccaggctggactcttgacacctcacccttcctgaattccacagtgcaaatatctttctgtaacaccctcagcatcctgcactgccctctctgaaaacacccacattctttggtcactgtgatttcttaggcctccgtctgttgtaccactagcatctatatgacttttgtgtaattttctctcttgaactctggtgctgtttttttgtttgtttgagacaaagtctcgctctgtcacccagggtggagtgcagtggcatgatctctgctcactacaacctccacctcccgggttccagcgattctcctgcctcagcctcccgagtagctgggactacaggcgtgcaccaccacgcctggctaattttttgtatttttagtagagacggggtttcaccatgttggtcaggctggtctcgaactcctgacctcgtaatctgccctcctcgacctcccaaagtgccgggattacaggtgtgagccactgtgcctggctgagctctggtgctgttcttccccctagaaaagaatctctagtgtggattctgcccagacaggctgacctgagaaaggcacagtggttcctccattccttccccatcatctgagtgttccagtatcccccatccctctcaatccagtcacctgcctattgacatctagctctgtttcccctgtcttgtccatgtctctaagacccagtaccagactgaactagcagcaagaaggacgaggaggccgggcatggtggctcacgccggtaatcccagcactttgggaggccgaggtgggcggatcacttgagattgggagtttgagaccagcctggccaacatggtaaaacccgctctctattaaaaatagaaaaatcagctgggtgtggtggcacacctctgtaatcccagctactcaggaggctgagacaggagaatcacttgaacccgggaggcagaggttgcagtgagccgagatcgcgccactgcactccagcctgggtgacacagtgagactccgtctccaaaaaaaaggatgaggaatagaattctgtgcagatgtcctgacttggcaattttgtgtccctgcctcactgtctccaccaacccccgcctgtcctagtgttgttctgcctcctgtcctctcttgctctcttgtcagtctctggcttcctcggccccatttcacttcactgagtcctgacacccatctccctaggggcctgtgagaggagagggaagggtctgttctgctcagctccatgtcccccattttcctccacaataaactgggactgggctaaaa

SEQ ID NO: 208665 - DNA, 807 bp, Artificial Sequence
  derived and/or modified sequence
gactttggttactgtcctcgtgtgtactgtgagaaccagccaatgcttcccattggtgtgctggtcatggtgggcttcacagtaggaaaggttcctgttcccgacatccggacgtgccacttctgcctcgtagaagacccttctgtaggatgcatttcaggctcagagaagtgtaccatcagcagctcatccctgtgcatggtgatcaccatctattatgatgtcaaggttcgcttcatcgttcgaggctgtggacagtacatttcctaccgctgccaagaaaaacgcaacacctactttgcagagtactggtatcaggcccagtgctgtcagtacgattattgcaactcctggtcaagcccccaactccagagctctctgccggagccccatgacaggcccctggccctgcctctgtctgactcccagattcagtggttctaccaggccctgaacctctccctgcccctccccaatttccatgctgggacggagcctgatggcctggaccccatggtcacactgtccctgaacctgggcttgtcttttgctgagctgcgccgcatgtacttgttcctcaatagttcaggacttttggttcttccccaggctggactcttgacacctcacccttcctgaattccacagtgcaaatatctttctgtaacaccctcagcatcctgcactgccctctctgaaaacacccacattctttggtcactgtgatttcttaggcctccgtctgttgtaccactagcatctatatgacttttgtgtaattttctctcttgaactctggtgctgttt

SEQ ID NO: 208666 - DNA, 1264 bp, Artificial Sequence
  derived and/or modified sequence
cttcgcctgccgcggtcgggtccgcggcctgcgctgtagcggtcgccgccgttccctggaagtagcaacttccctaccccaccccagtcctggtccccgtccagccgctgacgtgaagatgagcagctcagaggaggtgtcctggatttcctggttctgtgggctccgtggcaatgaattcttctgtgaagtggatgaagactacatccaggacaaatttaatcttactggactcaatgagcaggtccctcactatcgacaagctctagacatgatcttggacctggagcctgatgaagaactggaagacaaccccaaccagagtgacctgattgagcaggcagccgagatgctttatggattgatccacgcccgctacatccttaccaaccgtggcatcgcccagatgttggaaaagtaccagcaaggagactttggttactgtcctcgtgtgtactgtgagaaccagccaatgcttcccattggcctttcagacatcccaggtgaagccatggtgaagctctactgccccaagtgcatggatgtgtacacacccaagtcatcaagacaccatcacacggatggcgcctacttcggcactggtttccctcacatgctcttcatggtgcatcccgagtaccggcccaagagacctgccaaccagtttgtgcccagttcctgttcccgacatccggacgtgccacttctgcctcgtagaagacccttctgtaggatgcatttcaggctcagagaagtgtaccatcagcagctcatccctgtgcatggtgatcaccatctattatgatgtcaaggttcgcttcatcgttcgaggctgtggacagtacatttcctaccgctgccaagaaaaacgcaacacctactttgcagagtactggtatcaggcccagtgctgtcagtacgattattgcaactcctggtcaagcccccaactccagagctctctgccggagccccatgacaggcccctggccctgcctctgtctgactcccagattcagtggttctaccaggccctgaacctctccctgcccctccccaatttccatgctgggacggagcctgatggcctggaccccatggtcacactgtccctgaacctgggcttgtcttttgctgagctgcgccgcatgtacttgttcctcaatagttcaggacttttggttcttccccaggctggactcttgacacctcacccttcctgaattccacagtgcaaatatctttctgtaacaccctcagcatc

SEQ ID NO: 208667 - DNA, 1270 bp, Artificial Sequence
  derived and/or modified sequence
cttcgcctgccgcggtcgggtccgcggcctgcgctgtagcggtcgccgccgttccctggaagtagcaacttccctaccccaccccagtcctggtccccgtccagccgctgacgtgaagatgagcagctcagaggaggtgtcctggatttcctggttctgtgggctccgtggcaatgaattcttctgtgaagtggatgaagactacatccaggacaaatttaatcttactggactcaatgagcaggtccctcactatcgacaagctctagacatgatcttggacctggagcctgatgaagaactggaagacaaccccaaccagagtgacctgattgagcaggcagccgagatgctttatggattgatccacgcccgctacatccttaccaaccgtggcatcgcccagatgttggaaaagtaccagcaaggagactttggttactgtcctcgtgtgtactgtgagaaccagccaatgcttcccattggcctttcagacatcccaggtgaagccatggtgaagctctactgccccaagtgcatggatgtgtacacacccaagtcatcaagacaccatcacacggatggcgcctacttcggcactggtttccctcacatgctcttcatggtgcatcccgagtaccggcccaagagacctgccaaccagtttgtgcccagttcctgttcccgacatccggacgtgccacttctgcctcgtagaagacccttctgtaggatgcatttcaggctcagagaagtgtaccatcagcagctcatccctgtgcatggtgatcaccatctattatgatgtcaaggttcgcttcatcgttcgaggctgtggacagtacatttcctaccgctgccaagaaaaacgcaacacctactttgcagagtactggtatcaggcccagtgctgtcagtacgattattgcaactcctggtcaagcccccaactccagagctctctgccggagccccatgacaggcccctggccctgcctctgtctgactcccagattcagtggttctaccaggccctgaacctctccctgcccctccccaatttccatgctgggacggagcctgatggcctggaccccatggtcacactgtccctgaacctgggcttgtcttttgctgagctgcgccgcatgtacttgttcctcaatagttcaggacttttggttcttccccaggctggactcttgacacctcacccttcctgaattccacagtgcaaatatctttctgtaacaccctcagcatcctgcac

SEQ ID NO: 208668 - DNA, 1870 bp, Artificial Sequence
  derived and/or modified sequence
atgaaggtccatatgcttgtaggtgtgctggtcatggtgggcttcacagtaggaaaggttcctgttcccgacatccggacgtgccacttctgcctcgtagaagacccttctgtaggatgcatttcaggctcagagaagtgtaccatcagcagctcatccctgtgcatggtgatcaccatctattatgatgtcaaggttcgcttcatcgttcgaggctgtggacagtacatttcctaccgctgccaagaaaaacgcaacacctactttgcagagtactggtatcaggcccagtgctgtcagtacgattattgcaactcctggtcaagcccccaactccagagctctctgccggagccccatgacaggcccctggccctgcctctgtctgactcccagattcagtggttctaccaggccctgaacctctccctgcccctccccaatttccatgctgggacggagcctgatggcctggaccccatggtcacactgtccctgaacctgggcttgtcttttgctgagctgtgccgcatgtacttgttcctcaatagttcaggacttttggttcttccccaggctggactcttgacacctcacccttcctgaattccacagtgcaaatatctttctgtaacaccctcagcatcctgcactgccctctctgaaaacacccacattctttggtcactgtgatttcttaggcctccgtctgttgtaccactagcatctatatgacttttgtgtaattttctctcttgaactctggtgctgtttttttgtttgtttgagacaaagtctcgctctgtcacccagggtggagtgcagtggcatgatctctgctcactacaacctccacctcccgggttccagcgattctcctgcctcagcctcccgagtagctgggactacaggcgtgcaccaccacgcctggctaattttttgtatttttagtagagacggggtttcaccatgttggtcaggctggtctcgaactcctgacctcgtaatctgccctcctcgacctcccaaagtgccgggattacaggtgtgagccactgtgcctggctgagctctggtgctgttcttccccctagaaaagaatctctagtgtggattctgcccagacaggctgacctgagaaaggcacagtggttcctccattccttccccatcatctgagtgttccagtatcccccatccctctcaatccagtcacctgcctattgacatctagctctgtttcccctgtcttgtccatgtctctaagacccagtaccagactgaactagcagcaagaaggacgaggaggccgggcatggtggctcacgccggtaatcccagcactttgggaggccgaggtgggcggatcacttgagattgggagtttgagaccagcctggccaacatggtaaaacccgctctctattaaaaatagaaaaatcagctgggtgtggtggcacacctctgtaatcccagctactcaggaggctgagacaggagaatcacttgaacccgggaggcagaggttgcagtgagccgagatcgcgccactgcactccagcctgggtgacacagtgagactccgtctccaaaaaaaaggatgaggaatagaattctgtgcagatgtcctgacttggcaattttgtgtccctgcctcactgtctccaccaacccccgcctgtcctagtgttgttctgcctcctgtcctctcttgctctcttgtcagtctctggcttcctcggccccatttcacttcactgagtcctgacacccatctccctaggggcctgtgagaggagagggaagggtctgttctgctcagctccatgtcccccattttcctccacaataaactgggactgggctaaaa

SEQ ID NO: 208669 - DNA, 639 bp, Artificial Sequence
  derived and/or modified sequence
gacttcggctactgcccccgggtgtactgcgagaaccagcccatgctgcccatcggagtgttggtcatggtaggatttaccgttggaaaagtccccgttccagacatccggacttgtcatttctgccttgtggaggacccctccgtaggatgcattagcgggtcagagaagtgcactattagtagctcttctttgtgtatggtgatcacaatttactatgatgtcaaggttagatttatagtgcgtgggtgcgggcagtatatcagctatagatgtcaagaaaagagaaatacctatttcgcggagtattggtaccaggcccagtgctgccagtacgattattgcaatagctggagttccccccaactgcagtcttccctgcccgagccgcatgatcgcccactcgcactgcctctctcagacagtcagattcagtggttttaccaggcactcaatctcagtctgcctctacccaactttcatgccggcaccgaacccgacggcctggatccaatggtaaccctgagcctcaacttgggactgagctttgccgaactgtgcaggatgtatctgttcctgaactcatcggggctgttggtgctgccacaagctgggctcttaaccccacatccctcgtag

SEQ ID NO: 208670 - DNA, 639 bp, Artificial Sequence
  derived and/or modified sequence
gacttcggctactgcccccgggtgtactgcgagaaccagcccatgcttccaattggtgtgctggtgatggttggcttcacagtcggaaaggtgcctgtgccagatatccggacatgtcacttttgtttggttgaggatccgtccgtgggttgtatctccggctctgaaaagtgtactatctcctctagtagcttgtgcatggtcatcactatctactacgacgtgaaggtacggttcattgtccgcggatgcggacagtatatctcttatcggtgccaggaaaaacgaaatacatactttgcagaatactggtatcaggcacagtgttgtcagtacgactactgcaattcctggtcatcaccgcagctacagtcctcactcccagagccgcacgatagacccttggcactgcccctttccgattcacaaattcagtggttctaccaggcgctgaacctaagtctgcctctgccaaatttccatgccggcactgagcctgacggcctggatcccatggtgacattgtccctcaatctgggcctatcttttgctgagctcaggcggatgtacctattcttgaatagcagtgggctgttagtactgccacaggctggcctcttgactccacacccgagttag

SEQ ID NO: 208671 - DNA, 639 bp, Artificial Sequence
  derived and/or modified sequence
gacttcggctactgcccccgggtgtactgcgagaaccagcccatgttgcctatcggtgtgctagtgatggtgggtttcaccgtaggcaaagtccccgtgcctgatatcaggacatgtcacttctgtctggtagaagatcccagcgtcgggtgtataagcggaagcgagaaatgcaccatcagctcatctagtctctgtatggtgatcacaatctactacgatgttaaggtgcggtttatcgtccgaggatgcggccagtacatctcatataggtgtcaggaaaaacggaacacgtattttgctgaatactggtaccaggcccagtgttgtcaatacgactattgtaactcctggagctctccccaattgcagagctctctccctgagccacacgaccggcccctggccctgcctctgtctgattcgcaaatccagtggttctatcaggccctcaatttgagtctgccgctgccaaattttcatgcaggcactgaacccgacggcctcgatcccatggtgacactgtctttgaacctgggactatcattcgccgagcttcgccgaatgtatttgttcttgaattctagcggtctactcgtattgccccaggccggcctcctgactccccaccccagctag

SEQ ID NO: 208672 - DNA, 639 bp, Artificial Sequence
  derived and/or modified sequence
gacttcggctactgcccccgggtgtactgcgagaaccagcccatgctgcctattggtgtgctcgtgatggttggctttaccgttgggaaggttcctgttcccgatattaggacatgccacttttgcctggtagaggatccgagcgtgggctgcatctcgggtagcgaaaagtgtacaatctccagctcttcactatgtatggtgatcacaatctactacgatgtaaaggtgcgctttattgtacggggctgtggacagtatatctcctaccggtgtcaggaaaagcggaacacatacttcgcggagtattggtaccaggcccagtgttgtcagtatgactactgcaattcgtggtccagtccccagttgcagagttctcttcccgagccacacgaccgccccctggctctgcctctcagcgactcacaaatccagtggttctaccaggctcttaacttatcccttccactacctaatttccatgccggtacagagccagatggcctagatcccatggtaaccctgagcctgaacctgggacttagcttcgcagagctctgcagaatgtatttattcctgaacagttccggtctacttgtgttaccccaggctggtctccttacacctcacccgtcgtag

SEQ ID NO: 208673 - DNA, 606 bp, Artificial Sequence
  derived and/or modified sequence
atgaaggtgcacatgctggtgggcgtgctggtgatggtgggcttcaccgtggggaaagtcccagttccagatatcaggacgtgtcacttctgcctcgtggaggaccccagcgtggggtgtatctcagggtccgaaaaatgtaccattagctcttcatctttgtgcatggtgattacgatttactacgatgtgaaagtcaggtttatagttcgaggatgtgggcagtatattagctacagatgtcaagagaagcggaacacgtatttcgcagaatattggtatcaagcacaatgttgccagtacgactactgtaactcctggtcatccccacagctacagagctcactgcccgagccacacgatcgcccgcttgccctgccactgagtgattcccaaatacagtggttttaccaagcactgaacctcagtctccccttgccaaatttccatgctgggacggagccagatggcctcgaccctatggttaccctcagcctcaatttgggccttagcttcgctgaactttgccgaatgtacctatttctcaatagcagcgggctcctggtgctgccccaggccgggttgctgaccccacatccatcctag

SEQ ID NO: 208674 - DNA, 606 bp, Artificial Sequence
  derived and/or modified sequence
atgaaggtgcacatgctggtgggcgtgctggtgatggtgggcttcacagtgggaaaggtgccagttcccgatattcggacatgccacttctgcttggtcgaggacccgtctgttgggtgtatcagcgggagtgaaaaatgtaccataagcagctcttcactctgtatggtcatcaccatttactatgatgtaaaggtcaggttcatcgtaaggggatgtggacagtacatctcttataggtgtcaggaaaagagaaatacctactttgcagagtactggtaccaggcgcaatgctgtcagtacgattactgtaactcctggtcttctccacagctgcagtcttctctgccggaacctcatgacagaccccttgctttaccactgagcgattcacagatccagtggttttatcaggcattgaatctctcgttgccattgccaaacttccatgcaggcacggaacccgacggcctcgacccgatggtcacactgagtttaaatctgggtctctccttcgccgagctttgtcggatgtatctttttctgaacagtagcggcctactggttctgccacaggccggactcctgactccacacccatcttag

SEQ ID NO: 208675 - DNA, 639 bp, Artificial Sequence
  derived and/or modified sequence
gactttggttactgcccaagagtgtactgcgagaaccagcctatgttaccaatcggtgttctggtaatggtgggatttacagttggaaaagtgccagtccccgacatccgtacctgccatttttgcctggtcgaggacccaagtgtgggctgcattagtggaagcgagaaatgcacaatctcctcctcaagcttatgcatggtgatcacgatctactacgacgttaaggtcagattcatagtcaggggctgtggtcagtatatctcgtataggtgtcaggagaaacggaacacttattttgccgagtactggtatcaggcccagtgttgccagtatgattactgcaattcttggagcagcccccagcttcagtctagtctacctgagcctcatgacaggccgctggccctgccattatccgatagccaaatccagtggttctatcaggccctaaatttatcattaccactcccaaacttccacgcaggcactgagcctgacgggctcgatcctatggtaacccttagtctcaatctggggctgagctttgccgaactctgcagaatgtacctgttcctgaacagtagtgggctcttagtgctcccacaggccggattattgactccccacccctcctag

SEQ ID NO: 208676 - DNA, 639 bp, Artificial Sequence
  derived and/or modified sequence
gattttgggtattgtcccagggtgtattgcgaaaaccagcctatgttgcctatcggcgtactggtgatggtgggttttacagtggggaaggtgccagtaccggacatacgcacatgccatttttgtctggtggaggatccctcggtagggtgtataagtggaagcgaaaaatgtacaataagctcttcctctctgtgcatggtcatcacaatttattatgacgtgaaggtgcgattcattgtgcggggatgcggacagtacatttcttaccgctgccaagagaagcgcaacacttactttgctgagtattggtatcaggctcagtgttgccagtatgactactgcaactcatggtcctccccacagttgcagagctcccttccggagcctcatgaccggccactcgctctaccactctctgatagccagatccaatggttctaccaggcactcaacctgtccctgccgttacctaacttccatgcgggaacagagccagatggcttggaccccatggtgaccctgtccttgaacttggggctgtcatttgccgaactgcgacggatgtatttgtttctgaattctagtggcctcctcgtactgccacaggcgggtctgttgacacctcacccttcctag

SEQ ID NO: 208677 - DNA, 639 bp, Artificial Sequence
  derived and/or modified sequence
gattttggctactgcccaagggtgtattgtgaaaatcaaccaatgttgcctatcggagttctcgtcatggtcgggttcacagtgggtaaagtcccagtccccgacattagaacctgccacttctgcctggttgaggatccctccgtgggctgcatttctgggtccgaaaaatgcacaatctcttcttccagtttgtgcatggtgatcacaatatattacgacgtcaaagtgagattcatcgttcgtggatgcggacaatatattagctaccgctgtcaagagaagcgcaacacgtactttgcggaatattggtaccaggcccaatgttgccaatacgattactgtaattcttggtctagcccccaacttcagtcttcgttacccgagcctcacgacaggcctctcgctctcccactgtcagacagtcagattcagtggttttaccaggccctgaatctatccctcccactgcccaactttcacgccggtaccgaaccagacggacttgaccccatggtgactttaagcctcaatctgggcctgagtttcgcggaactgcggcgaatgtatttgttcctcaactcttcaggactgttggttctgccccaggctgggctgttgacccctcaccctagctag

SEQ ID NO: 208678 - DNA, 639 bp, Artificial Sequence
  derived and/or modified sequence
gacttcggatactgtccaagggtgtattgcgagaaccagccgatgctgccaatcggcgtgctcgtgatggtgggtttcacggtcggtaaagtccccgtccccgatattagaacgtgtcacttttgtcttgttgaggacccctccgtgggctgcattagcggatcggagaaatgcacaatatcatcctctagcctgtgtatggtcatcactatatactacgacgtgaaagtgcgctttatagtcagaggctgcgggcagtacatttcctacagatgtcaggaaaagcgtaatacttatttcgctgagtattggtaccaggcccagtgctgtcagtatgactattgcaatagctggtcatcgccacagttgcagagttctctcccagagccacatgacaggcctctggcactgccattgagtgattcacaaattcaatggttctaccaggccctgaatctgagtctgcctctgcctaactttcacgctgggaccgaaccagatggactcgatccaatggtgacccttagcctcaacttgggcctgtcattcgccgaactttgcagaatgtacctgtttctgaatagctcaggcctcctggtgctgccacaggctggactcttgaccccacaccctagctag

SEQ ID NO: 208679 - DNA, 606 bp, Artificial Sequence
  derived and/or modified sequence
atgaaggttcacatgctggtcggggttctcgttatggtggggttcacggtggggaaggtgcccgtgccggatatcagaacttgccatttctgtctcgtcgaggacccaagcgttggttgtatctctggaagtgagaaatgtacaatcagttcgagcagtctatgtatggttattacgatctactacgatgtaaaggtccgcttcatcgttcgcggttgtggccagtacatcagctacagatgtcaggagaaacgtaatacatattttgccgaatattggtatcaggcacaatgctgccagtacgattactgcaacagctggtcctccccacagctgcagagttctctgcctgagccccacgatcgcccactcgccctccctctgtccgatagccagatccagtggttctaccaagcacttaatctctcattgcctctcccaaacttccacgcgggtactgaacctgatggcttggatcctatggtcactctgagcctaaatctcggtctttccttcgccgaactctgccgaatgtatctattcctcaactcaagcggcctgctcgtgctgccgcaggccggactgctaacccctcacccttcctag

SEQ ID NO: 208680 - DNA, 606 bp, Artificial Sequence
  derived and/or modified sequence
atgaaagtgcacatgttggttggcgtcctcgtgatggttggcttcacagtgggaaaagtcccggtcccagatattcggacatgccatttttgcctggtggaagatccatccgtcggatgtatctcaggttctgagaagtgtacaatcagcagctcatctctgtgtatggtaatcaccatttactatgacgtgaaagtgcggtttatcgtccgcggatgcggccagtacatttcctataggtgccaggagaaaaggaatacatattttgcagaatattggtaccaggcccagtgctgtcagtacgattactgcaacagttggagctcaccacagctgcagagctccttgcccgagccccacgacaggcctctcgctttacccctgagtgactcacagatccagtggttttatcaggcccttaacttgtccctgcctcttccgaattttcacgctggtaccgaacccgatggactggacccaatggttaccctcagtttgaacctcggtctcagttttgctgagctgtgtcggatgtatctcttcctaaactcatcgggtctgttagtgctcccccaggccggtctcctgacacctcatcccagctag

SEQ ID NO: 208681 - DNA, 2487 bp, Artificial Sequence
  derived and/or modified sequence
cttcgcctgccgcggtcgggtccgcggcctgcgctgtagcggtcgccgccgttccctggaagtagcaacttccctaccccaccccagtcctggtccccgtccagccgctgacgtgaagatgagcagctcagaggaggtgtcctggatttcctggttctgtgggctccgtggcaatgaattcttctgtgaagtggatgaagactacatccaggacaaatttaatcttactggactcaatgagcaggtccctcactatcgacaagctctagacatgatcttggacctggagcctgatgaagaactggaagacaaccccaaccagagtgacctgattgagcaggcagccgagatgctttatggattgatccacgcccgctacatccttaccaaccgtggcatcgcccagatgttggaaaagtaccagcaaggagactttggttactgtcctcgtgtgtactgtgagaaccagccaatgcttcccattggcctttcagacatcccaggtgaagccatggtgaagctctactgccccaagtgcatggatgtgtacacacccaagtcatcaagacaccatcacacggatggcgcctacttcggcactggtttccctcacatgctcttcatggtgcatcccgagtaccggcccaagagacctgccaaccagtttgtgcccagttcctgttcccgacatccggacgtgccacttctgcctcgtagaagacccttctgtaggatgcatttcaggctcagagaagtgtaccatcagcagctcatccctgtgcatggtgatcaccatctattatgatgtcaaggttcgcttcatcgttcgaggctgtggacagtacatttcctaccgctgccaagaaaaacgcaacacctactttgcagagtactggtatcaggcccagtgctgtcagtacgattattgcaactcctggtcaagcccccaactccagagctctctgccggagccccatgacaggcccctggccctgcctctgtctgactcccagattcagtggttctaccaggccctgaacctctccctgcccctccccaatttccatgctgggacggagcctgatggcctggaccccatggtcacactgtccctgaacctgggcttgtcttttgctgagctgcgccgcatgtacttgttcctcaatagttcaggacttttggttcttccccaggctggactcttgacacctcacccttcctgaattccacagtgcaaatatctttctgtaacaccctcagcatcctgcactgccctctctgaaaacacccacattctttggtcactgtgatttcttaggcctccgtctgttgtaccactagcatctatatgacttttgtgtaattttctctcttgaactctggtgctgtttttttgtttgtttgagacaaagtctcgctctgtcacccagggtggagtgcagtggcatgatctctgctcactacaacctccacctcccgggttccagcgattctcctgcctcagcctcccgagtagctgggactacaggcgtgcaccaccacgcctggctaattttttgtatttttagtagagacggggtttcaccatgttggtcaggctggtctcgaactcctgacctcgtaatctgccctcctcgacctcccaaagtgccgggattacaggtgtgagccactgtgcctggctgagctctggtgctgttcttccccctagaaaagaatctctagtgtggattctgcccagacaggctgacctgagaaaggcacagtggttcctccattccttccccatcatctgagtgttccagtatcccccatccctctcaatccagtcacctgcctattgacatctagctctgtttcccctgtcttgtccatgtctctaagacccagtaccagactgaactagcagcaagaaggacgaggaggccgggcatggtggctcacgccggtaatcccagcactttgggaggccgaggtgggcggatcacttgagattgggagtttgagaccagcctggccaacatggtaaaacccgctctctattaaaaatagaaaaatcagctgggtgtggtggcacacctctgtaatcccagctactcaggaggctgagacaggagaatcacttgaacccgggaggcagaggttgcagtgagccgagatcgcgccactgcactccagcctgggtgacacagtgagactccgtctccaaaaaaaaggatgaggaatagaattctgtgcagatgtcctgacttggcaattttgtgtccctgcctcactgtctccaccaacccccgcctgtcctagtgttgttctgcctcctgtcctctcttgctctcttgtcagtctctggcttcctcggccccatttcacttcactgagtcctgacacccatctccctaggggcctgtgagaggagagggaagggtctgttctgctcagctccatgtcccccattttcctccacaataaactgggactgggctaaaa

SEQ ID NO: 208682 - DNA, 2487 bp, Artificial Sequence
  derived and/or modified sequence
cttcgcctgccgcggtcgggtccgcggcctgcgctgtagcggtcgccgccgttccctggaagtagcaacttccctaccccaccccagtcctggtccccgtccagccgctgacgtgaagatgagcagctcagaggaggtgtcctggatttcctggttctgtgggctccgtggcaatgaattcttctgtgaagtggatgaagactacatccaggacaaatttaatcttactggactcaatgagcaggtccctcactatcgacaagctctagacatgatcttggacctggagcctgatgaagaactggaagacaaccccaaccagagtgacctgattgagcaggcagccgagatgctttatggattgatccacgcccgctacatccttaccaaccgtggcatcgcccagatgttggaaaagtaccagcaaggagactttggttactgtcctcgtgtgtactgtgagaaccagccaatgcttcccattggcctttcagacatcccaggtgaagccatggtgaagctctactgccccaagtgcatggatgtgtacacacccaagtcatcaagacaccatcacacggatggcgcctacttcggcactggtttccctcacatgctcttcatggtgcatcccgagtaccggcccaagagacctgccaaccagtttgtgcccagttcctgttcccgacatccggacgtgccacttctgcctcgtagaagacccttctgtaggatgcatttcaggctcagagaagtgtaccatcagcagctcatccctgtgcatggtgatcaccatctattatgatgtcaaggttcgcttcatcgttcgaggctgtggacagtacatttcctaccgctgccaagaaaaacgcaacacctactttgcagagtactggtatcaggcccagtgctgtcagtacgattattgcaactcctggtcaagcccccaactccagagctctctgccggagccccatgacaggcccctggccctgcctctgtctgactcccagattcagtggttctaccaggccctgaacctctccctgcccctccccaatttccatgctgggacggagcctgatggcctggaccccatggtcacactgtccctgaacctgggcttgtcttttgctgagctgcgccgcatgtacttgttcctcaatagttcaggacttttggttcttccccaggctggactcttgacacctcacccttcctgaattccacagtgcaaatatctttctgtaacaccctcagcatcctgcactgccctctctgaaaacacccacattctttggtcactgtgatttcttaggcctccgtctgttgtaccactagcatctatatgacttttgtgtaattttctctcttgaactctggtgctgtttttttgtttgtttgagacaaagtctcgctctgtcacccagggtggagtgcagtggcatgatctctgctcactacaacctccacctcccgggttccagcgattctcctgcctcagcctcccgagtagctgggactacaggcgtgcaccaccacgcctggctaattttttgtatttttagtagagacggggtttcaccatgttggtcaggctggtctcgaactcctgacctcgtaatctgccctcctcgacctcccaaagtgccgggattacaggtgtgagccactgtgcctgtctgagctctggtgctgttcttccccctagaaaagaatctctagtgtggattctgcccagacaggctgacctgagaaaggcacagtggttcctccattccttccccatcatctgagtgttccagtatcccccatccctctcaatccagtcacctgcctattgacatctagctctgtttcccctgtcttgtccatgtctctaagacccagtaccagactgaactagcagcaagaaggacgaggaggccgggcatggtggctcacgccggtaatcccagcactttgggaggccgaggtgggcggatcacttgagattgggagtttgagaccagcctggccaacatggtaaaacccgctctctattaaaaatagaaaaatcagctgggtgtggtggcacacctctgtaatcccagctactcaggaggctgagacaggagaatcacttgaacccgggaggcagaggttgcagtgagccgagatcgcgccactgcactccagcctgggtgacacagtgagactccgtctccaaaaaaaaggatgaggaatagaattctgtgcagatgtcctgacttggcaattttgtgtccctgcctcactgtctccaccaacccccgcctgtcctggtgttgttctgcctcctgtcctctcttgctctcttgtcagtctctggcttcctcggccccatttcacttcactgagtcctgacacccatctccctaggggcctgtgagaggagagggaagggtctgttctgctcagctccatgtcccccattttcctccacaataaactgggactgggctaaaa

SEQ ID NO: 208683 - RNA, 606 nt, Artificial Sequence
  derived and/or modified sequence
augaagguccacauguuagugggaguacuggugauggucggauucaccgucgggaaggugccagucccugauauucgcacaugccacuucuguuuagucgaggacccaagcgucggaugcauuuccggaucagaaaaaugcaccaucuccagcuccucucuguguaugguaaucaccauuuauuaugacguaaaagugcgguucaucgugcgagguugugggcaguacauuucuuacagaugccaggagaagagaaauaccuauuuugcugaguauugguaccaggcucaauguugucaguacgacuauuguaauucauggucaucaccccaguugcagucuagucugcccgagccucaugaucguccacuugcccugccucugucugacucucagauccaaugguucuaccaggcacuuaaucucucguuaccucuaccaaauuuucaugccgggaccgaaccagacggccucgacccuaugguaacccuuucccucaaucucgggcuguccuucgcugaguuacguagaauguaccuuuuccugaauaguucuggacugcuggugcugccucaggccgggcuguugacuccgcacccgucuuag

SEQ ID NO: 208684 - RNA, 441 nt, Artificial Sequence
  derived and/or modified sequence
auggucauuaccauuuauuacgauguuaaggugcgguucaucguacguggauguggucaauacauuuccuaccgaugccaggagaaaagaaauaccuauuucgccgaauacugguaccaggcccaauguugucaguacgauuauuguaauucuuggucuuccccacagcugcagagcagcuuacccgagccacacgacagaccccuagcccugccucucagcgacucucagauccagugguuuuaucaggcccucaaccugucauugcccuugccuaacuuccacgcaggcacugagcccgauggauuggaccccaugguuacgcucucccugaauuuaggccuuagcuuugccgaacuuagacggauguauuuguuccuaaauagcagcggacuacucguauuaccucaggccgggcucuuaaccccccaccccucuuag

SEQ ID NO: 208685 - RNA, 639 nt, Artificial Sequence
  derived and/or modified sequence
gauuucgguuacugccccaggguauacugcgaaaaucagccaaugcuccccauaggcguucuugucaugguaggguuuacugucggaaagguucccgugcccgauauccggacaugccauuuuugcuugguggaagaucccucugucgguugcauuucugggagugaaaaguguacuauuagcucaucuucucuguguauggucaucacuauuuacuaugacgucaagguuagguucauuguacgagggugcggucaguacaucucauacaggugccaggagaagagaaauaccuauuucgcugaguauugguaccaggcccaaugcugccaguacgacuacugcaauucauggaguucuccacagcuacagucuucuuuaccugagccccaugacaggccccuggcauugccucugagcgacucccaaauucaaugguucuaccaggcccugaaucuaucccugccucuuccaaauuuccacgcugguacagagcccgacggccuggauccgaugguuacccugagucugaaccugggccuguccuucgcugaacuacgccggauguaucuguuucugaacucaucaggccugcucgugcuuccccaggcuggccugcugacgccccauccaucauag

SEQ ID NO: 208686 - RNA, 639 nt, Artificial Sequence
  derived and/or modified sequence
gauuuuggcuauugcccccgggucuauugcgagaaucagccuaugcugcccauaggcgugcuggugauggucggauuuacagugggcaagguccccgugccugacaucagaacaugccacuucugcuuaguggaagauccuucaguugguuguauuuccggaagcgagaaguguaccaucaguuccucaagccucuguauggugaucacgaucuauuaugacgucaaaguccgcuucauaguccgagggugcggccaguauauuucuuaucguugucaagaaaaaagaaacaccuauuuugccgaauacugguaccaagcacaauguugucaguaugacuacugcaauucguggucuaguccucagcugcagucaucacuccccgaaccccaugauaggccccuugcccuuccacuguccgacucucagauucagugguucuaccaggcuuuaaaccuuagccugccacugccuaacuuucacgcuggaacugagcccgauggccucgauccuauggucacccugucccuuaaccucggucucuccuuugccgagcugcggcgaauguaucuuuuucugaauucaucaggucuuuuagugcugccucaagcugggcuguugacuccacauccaucauag

SEQ ID NO: 208687 - RNA, 606 nt, Artificial Sequence
  derived and/or modified sequence
augaaggugcacaugcucguuggcguacuagugauggucggcuucacaguugguaaaguccccgucccugauauaagaaccugucauuucugccugguagaagauccgucugugggguguaucucuggcagugaaaagugcacgaucucuaguucuagucugugcauggugaucaccauauacuacgacgucaagguccgcuucauuguccgagguugugggcaguacaucucguacagaugucaggagaagcggaauacuuauuucgccgaguacugguaucaagcucagugcugccaauacgacuacugcaauucauggucaucuccucaacugcaaaguagcuuaccugagccucacgaccgaccccuggcccucccucuaagcgauagccagauccagugguuuuaccaagcacucaaccuuucccuuccucuuccuaacuuccacgccggcacugagcccgacggucuggaucccaugguaacccuuucucugaauuuggggcucagcuucgcugaguugaggcgaauguaucuauucuuaaauucgucuggccuuuuggugcugccucaggcuggacuauugaccccucaccccucguag

SEQ ID NO: 208688 - RNA, 606 nt, Artificial Sequence
  derived and/or modified sequence
augaaaguccacaugcugguuggagugcuggugaugguuggauuuacuguuggaaaggugcccgugccugacauccguacuugucacuuuugccuaguugaggaccccucugucggcuguauuagcggauccgagaaguguacaauuuccaguucaucucucuguauggucaucacaauuuauuacgacgucaaagugagauucaucguaagagggugugggcaguacauauccuaucgaugucaggagaaaagaaauaccuacuuugcugaauauugguaucaggcccagugcugccaguacgauuauuguaacuccuggucuucaccucaacugcagagcagucucccugagccucaugacagaccuuuggcccugccccuuagcgacucccaaauucagugguucuaccaggccuuaaaccuuagccuaccgcuaccaaauuuucacgcuggaacugaacccgauggccuggacccuaugguaacucuaucacuaaaucugggacuaagcuuugccgagcugagaagaauguacuuauuuuugaauucaucagggcugcuggugcuaccccaagccggucugcugacuccccauccguccuag

SEQ ID NO: 208689 - RNA, 606 nt, Artificial Sequence
  derived and/or modified sequence
augaagguacauaugcuuguuggggugcuggugauggugggauuuacagucggaaaggugcccgugccugacauacgcaccugccacuuuugucucguggaagauccuagcguaggcuguauuuccggcucagagaaauguaccauuuccucuaguucgcucuguauggugaucaccauuuacuaugauguaaaggugcgguuuaucguccgcggaugugggcaauacauuucuuauagaugucaggagaagcgcaacacauacuuugccgaguauugguaccaagcucaguguugucaguacgauuacuguaauucuugguccucuccgcaacuucagucuucacugcccgaaccccacgacagacccuuggcccuucccuugagugacagccagauacaaugguucuaccaagcuuuaaaucuuucuuugccacugccaaacuuccaugcuggcacugaaccagauggccucgaccccauggugaccuugucuuugaaucucggccugaguuuugcugaacugcgccguauguaucuuuucuugaacucuagugggcugcucguacuuccacaagccggauugcuuacgccacacccaagcuag

SEQ ID NO: 208690 - RNA, 606 nt, Artificial Sequence
  derived and/or modified sequence
augaaaguccauaugcugguggguguucuggugauggugggauucacaguugggaaagugccuguccccgacauucgcaccugucacuuuugccucguagaagacccguccguuggauguauuucaggaagcgaaaaguguacaauuucuuccagcagccugugcauggucauaacaaucuacuacgacguaaaaguucguuucauugugcggggcugcggacaauacauuagcuaccgcugccaggaaaaaaggaauaccuacuuugcugaguacugguaccaggcacagugcugucaguacgauuauuguaacuccuggucuucuccacaguuacaguccucgcucccagaaccucaugaucgcccucucgcuuugccacuguccgacagccaaauccaaugguucuaccaggcucuuaaccucucuuuacccuuaccuaacuuucacgccggcacggaaccagaugggcucgaccccauggugacauugucauuaaacuuaggacugucauuugcugagcuuagacguauguaucuguuccugaauuccagcggcuuacuaguccuuccacaggcugggcuucugacuccccauccaucuuag

SEQ ID NO: 208691 - RNA, 606 nt, Artificial Sequence
  derived and/or modified sequence
augaaggugcacaugcuuguugggguuuugguuauggugggcuucacaguugguaaggugccagugccagauauuaggacaugucacuucugcuuaguugaggaccccucugugggaugcaucuccggaagcgaaaagugcacgauuuccucauccagucuguguauggugaucacaauuuauuaugacgucaaaguccgcuucaucgugaggggaugcggccaguacaucucuuaccgaugucaggaaaaaagaaauacuuacuucgccgaauacugguaucaggcucaauguugucaguaugacuacugcaauucuuggaguucuccacaguugcaaagcucccucccugagccccaugaccgcccacuggcccuaccucuauccgacucccagauccaaugguucuaucaagcgcugaaccuguccuuaccucuacccaacuuccacgccggcacagagccugacggucucgaccccauggucacacucucacuuaaccuggggcuguccuucgccgaacucagacgcauguaucucuuucugaauuccucuggucuccucgugcuuccacaggcaggccuguuaacuccacaccccagcuag

SEQ ID NO: 208692 - RNA, 441 nt, Artificial Sequence
  derived and/or modified sequence
auggugauaacaauuuauuaugacgugaaggugcgcuucaucguuagagguuguggucaauauauuaguuacaggugucaagagaaacgcaauacauauuucgccgaguacugguaccaagcgcaauguugccaguacgauuauugcaacagcuggucaucuccacagcuucaguccucccuuccagagccacaugaucgaccucucgccuuaccguuauccgacucucaaauccagugguuuuaccaggcacucaaucugucucuccccuugccuaauuuucaugccggcacugagccagauggauuggaccccaugguuacgcucucccugaauuuaggccuuagcuuugccgaacuuagacggauguauuuguuccuaaauagcagcggacuacucguauuaccucaggccgggcucuuaaccccccaccccucuuag

SEQ ID NO: 208693 - RNA, 639 nt, Artificial Sequence
  derived and/or modified sequence
gauuuuggauacugcccgcgaguuuauugugaaaaccaacccaugcuuccuaucggugugcuugugauggucggcuuuacgguaggaaagguuccuguaccggauauucgcaccugccauuuuugucugguggaagaucccucugugggcugcaucucuggcagugagaaaugcacaauuuccuccaguagucuguguaugguuauuacuauuuauuacgacgugaagguucgcuuuauugucaggggcugcggucaauacauaaguuaucguugucaagagaaaagaaauacuuauuuugcagaguauugguaucaggcccagugcugucaauacgauuacugcaauucaugguccuccccucaguuacagucuucccugccugagccccacgaucgaccccuggcgcucccccuuucagauucucaaauccaaugguucuaucaagcccucaaucucucccugccccucccuaauuuccaugccggcaccgaaccagacggccuggaucccauggucacucucucccugaaucuggggcugucauuugccgaacuuaggcgaauguaucuguuccugaacagcucuggacuccugguccugccacaagccggauugcugaccccccacccgucauag

SEQ ID NO: 208694 - RNA, 639 nt, Artificial Sequence
  derived and/or modified sequence
gacuucggguacuguccccgaguguauugcgaaaaccaacccaugcuaccaaucggaguucucguaauggucggguucacugugggcaaaguccccgugccagauauuagaaccugucauuuuugucuaguugaagacccaucgguggggugcauaucuggauccgaaaaguguaccaucucuucuuccagcuuaugcaugguuauaaccauauacuacgacgucaaagugcgguuuaucguuagaggcugcggccaguauauuuccuaucgaugccaagaaaaacgaaacacauauuuugcagaauauugguaucaggcacagugcugucaauaugauuauugcaacaguuggucuagcccgcagcuacagucuagccuccccgagccccacgaucgacccuuggcucucccuuugucugacucccagauucaaugguuuuaucaagcccuaaaccucagucuuccccugcccaacuuucaugccgggacugagccugauggacuggaucccauggucacgcucucacucaacuugggccuuucauuugcagaguugcgcaggauguauuuguuccucaauuccuccggccugcucguccucccccaggccggauuacucacuccucaccccucuuag

SEQ ID NO: 208695 - RNA, 606 nt, Artificial Sequence
  derived and/or modified sequence
augaagguucauauguuagucggggucuuagucauggucggcuuuacaguggguaaaguaccugugccagacauucguaccugccauuuuugccucguugaggauccuagugugggcugcauaucugguucagagaaguguaccaucucaaguuccucauuauguauggugaucacaaucuacuacgauguaaaaguccgguucaucgugcgugggugcggacaauauauuucauaucgcugccaggagaaacggaauaccuauuucgcugaauacugguaccaagcgcagugcugccaguacgauuacuguaacucuuggucaucuccgcagcuucaaaguucuuuacccgaaccucacgauagaccacuggcccucccccucagcgauucccaaauacaaugguuuuaccaagcacuuaaucugucccuacccuugcccaacuuccaugcaggcaccgagcccgauggucuggaucccauggugacauugagucucaaccucggccuaucuuucgccgaacuccgaagaauguaucucuucuugaacagcuccggacugcuaguccuuccacaggcuggucuucugacaccgcaucccuccuag

SEQ ID NO: 208696 - RNA, 606 nt, Artificial Sequence
  derived and/or modified sequence
augaaaguccacaugcuggugggggugcuggugaugguaggguucacagugggcaaagucccuguuccugacauucgaacuugucacuuuugucugguugaggauccaucagucggcuguauuaguggcucggaaaagugcacuaucucuuccaguagucugugcaugguuauuacaauuuacuacgaugugaaggugcgguucauagugcgggguugcggacaauacaucagcuaucgcugccaagaaaaaagaaacacauauuuugccgaguauugguaucaggcacaguguugccaauacgauuauuguaacuccuggucuucaccucaacugcagagcagucucccugagccucaugacagaccuuuggcccugccccuuagcgacucccaaauucagugguucuaccaggccuuaaaccuuagccuaccgcuaccaaauuuucacgcuggaacugaacccgauggccuggacccuaugguaacucuaucacuaaaucugggacuaagcuuugccgagcugagaagaauguacuuauuuuugaauucaucagggcugcuggugcuaccccaagccggucugcugacuccccauccgaguuag

SEQ ID NO: 208697 - RNA, 606 nt, Artificial Sequence
  derived and/or modified sequence
augaaagugcauaugcugguggguguacucgugaugguuggguucacggucgggaaagucccugucccggacaucagaacaugucacuuuugcuuaguggaagauccgucuguuggguguaucagcgggucagagaaguguaccaucucaaguagcagccuauguaugguaaucacuauauacuaugacguuaagguuagguuuaucguccgggguuguggacaauauauuucuuaucgcugucaagaaaaaagaaacaccuauuuugcagaguauugguaucaggcccaauguugucaguacgauuacuguaauucuugguccucuccgcaacuucagucuucacugcccgaaccccacgacagacccuuggcccuucccuugagugacagccagauacaaugguucuaccaagcuuuaaaucuuucuuugccacugccaaacuuccaugcuggcacugaaccagauggccucgaccccauggugaccuugucuuugaaucucggccugaguuuugcugaacugcgccguauguaucuuuucuugaacucuagugggcugcucguacuuccacaagccggauugcuuacgccacacccaaguuag

SEQ ID NO: 208698 - RNA, 606 nt, Artificial Sequence
  derived and/or modified sequence
augaagguucauauguuagugggcguacuggugauggugggauucacaguugguaagguuccuguuccagacauuagaaccugucacuucugccucguagaggauccuuccgucggcugcaucaguggcucugaaaaaugcacuaucucuucuucuagcuuaugcauggucauaacuaucuacuaugacgucaaggugcgguucaucgugagaggcuguggacaguacauaaguuaucggugucaagaaaaacguaauacauauuucgcugaauauugguaccaggcucagugcugucaguacgauuauuguaacuccuggucuucuccacaguuacaguccucgcucccagaaccucaugaucgcccucucgcuuugccacuguccgacagccaaauccaaugguucuaccaggcucuuaaccucucuuuacccuuaccuaacuuucacgccggcacggaaccagaugggcucgaccccauggugacauugucauuaaacuuaggacugucauuugcugagcuuagacguauguaucuguuccugaauuccagcggcuuacuaguccuuccacaggcugggcuucugacuccccauccaucuuag

SEQ ID NO: 208699 - protein, 175 aa, Artificial Sequence
  derived and/or modified sequence
MASRKAGTRGKVAATKQAQRGSSNVFSMFEQAQIQEFKEAFSCIDQNRDGIICKADLRETYSQLGKVSVPEEELDAMLQEGKGPINFTVFLTLFGEKLNGTDPEEAILSAFRMFDPSGKGVVNKDEFKQLLLTQADKFSPAEVEQMFALTPMDLAGNIDYKSLCYIITHGDEKEE

SEQ ID NO: 208700 - protein, 148 aa, Artificial Sequence
  derived and/or modified sequence
MFEQAQIQEFKEAFSCIDQNRDGIICKADLRETYSQLGKVSVPEEELDAMLQEGKGPINFTVFLTLFGEKLNGTDPEEAILSAFRMFDPSGKGVVNKDEFKQLLLTQADKFSPAEVEQMFALTPMDLAGNIDYKSLCYIITHGDEKEE

SEQ ID NO: 208701 - DNA, 528 bp, Artificial Sequence
  derived and/or modified sequence
atggccagtagaaaagcaggtacaaggggcaaagtggctgctactaagcaggcccagcgggggagcagtaatgtgttctccatgtttgagcaggctcagatccaagagtttaaagaggcttttagctgcatcgatcagaacagagacgggatcatctgcaaagccgacctgcgcgagacctacagtcagctgggcaaggtgagcgttcctgaggaagaactagatgccatgcttcaggagggtaagggtcctatcaactttactgtctttttaactctgtttggcgagaagctgaatgggactgatccggaggaagccattctttctgcttttcggatgtttgacccatccggtaaaggagttgtgaacaaagatgaattcaagcaactgctcctcacgcaggccgataagttcagtcccgctgaagtggaacaaatgttcgccctgacccctatggatctggcagggaacatcgattacaagagcttgtgttatatcatcacccacggcgacgaaaaggaggaatag

SEQ ID NO: 208702 - DNA, 447 bp, Artificial Sequence
  derived and/or modified sequence
atgttcgaacaggcccagatccaggagtttaaggaagcatttagttgcatcgatcagaatcgagatggcattatctgcaaggccgatttgcgcgaaacctatagtcagctgggcaaagtgagtgtgccagaagaggagctcgacgcaatgctgcaggaaggcaagggccccattaactttaccgtgttccttacgctgtttggagagaaactgaacgggaccgaccccgaggaagccatcctctccgccttccgcatgttcgaccctagcggaaagggcgtggtgaacaaggacgagttcaagcagctgttactcactcaggctgacaagttttccccagccgaggtcgaacagatgtttgcactgacacccatggatctggcgggtaatattgattacaagtctctttgctatatcatcactcacggagacgagaaagaagaatag

SEQ ID NO: 208703 - DNA, 528 bp, Artificial Sequence
  derived and/or modified sequence
atggccagcaggaaggccggcacccggggcaaggtggccgccaccaagcaggcccagaggggcagcagcaatgtgttctccatgtttgagcaggcccagatccaggagttcaaggaggccttcagctgcatcgaccagaacagagatggcatcatctgcaaggctgacctgcgggagacctacagccagctgggcaaggtgtctgtgcctgaggaggagctggatgccatgctgcaggagggcaagggccccatcaacttcaccgtcttcctgaccctgtttggagagaagctgaatggaacagatcctgaggaggccatcctgagcgccttcaggatgtttgaccccagcgggaaaggagtggtgaacaaggatgagttcaagcagctgctgctgacccaggccgacaagttcagccctgctgaggtggagcagatgtttgccctgacccccatggacctggccggcaacatcgactacaagagcctgtgctacatcatcacccatggagatgagaaggaggagtag

SEQ ID NO: 208704 - DNA, 447 bp, Artificial Sequence
  derived and/or modified sequence
atgtttgagcaggcccagatccaggagttcaaggaggccttcagctgcatcgaccagaacagagatggcatcatctgcaaggctgacctgcgggagacctacagccagctgggcaaggtgtctgtgcctgaggaggagctggatgccatgctgcaggagggcaagggccccatcaacttcaccgtcttcctgaccctgtttggagagaagctgaatggaacagatcctgaggaggccatcctgagcgccttcaggatgtttgaccccagcggcaagggcgtggtgaacaaggatgagttcaagcagctgctgctgacccaggccgacaagttctccccagctgaggtggagcagatgtttgccctgacccccatggacctggccggcaacatcgactacaagagcctgtgctacatcatcacccatggagatgagaaggaggagtag

SEQ ID NO: 208705 - DNA, 528 bp, Artificial Sequence
  derived and/or modified sequence
atggccagccggaaggccggcacccggggcaaggtggccgccaccaaacaagcccagcgcggaagtagtaacgtgttttccatgtttgaacaggctcagatccaggagttcaaagaggctttttcatgtatcgaccagaaccgggatggcatcatctgcaaggcagatttgcgggaaacttacagccagttaggcaaagtatcagttcccgaagaggagctggacgctatgctccaggaggggaagggccccattaacttcacggtttttctcacattattcggggagaagctgaacggaacagaccctgaggaagcaattctgtcagcattccgcatgttcgacccgagcggcaaaggagtggtcaacaaggatgagttcaagcagctgctgcttacgcaagccgataaattctcccctgcggaggttgagcagatgttcgcactgacccctatggatctcgcaggtaatatagactacaaaagcctatgttatatcatcacgcacggagatgaaaaggaagagtag

SEQ ID NO: 208706 - DNA, 612 bp, Artificial Sequence
  derived and/or modified sequence
gacagcagccacacctctgcagagagaatggccagcaggaaggcggggacccggggcaaggtggcagccaccaagcaggcccaacgtggttcttccaacgtcttttccatgtttgaacaagcccagatacaggagttcaaagaagccttcagctgtatcgaccagaatcgtgatggcatcatctgcaaggcagacctgagggagacctactcccagctggggaaggtgagtgtcccagaggaggagctggacgccatgctgcaagagggcaagggccccatcaacttcaccgtcttcctcacgctctttggggagaagctcaatgggacagaccccgaggaagccatcctgagtgccttccgcatgtttgaccccagcggcaaaggggtggtgaacaaggatgagttcaagcagcttctcctgacccaggcagacaagttctctccagctgaggtggagcagatgttcgccctgacacccatggacctggcggggaacatcgactacaagtcactgtgctacatcatcacccatggagacgagaaagaggaatgaggggcagggccaggcccacgggggggcacctcaataaactctgttgcaaaattggaa

SEQ ID NO: 208707 - DNA, 791 bp, Artificial Sequence
  derived and/or modified sequence
aagaaaggctagcggtctcccaggtgctggcctttgggctgggggagcagagttttctgtgcttgtgttgggttgagggtggtccccagggagaggaagaggatcctggccctggctctcctgggaatgctctgggactgtgcatgatgggtggggtggggagactctgaggagttggggagaggacccctccctactcacagtgttgcaggccagcaggaaggcggggacccggggcaaggtggcagccaccaagcaggcccaacgtggttcttccaacgtcttttccatgtttgaacaagcccagatacaggagttcaaagaagccttcagctgtatcgaccagaatcgtgatggcatcatctgcaaggcagacctgagggagacctactcccagctggggaaggtgagtgtcccagaggaggagctggacgccatgctgcaagagggcaagggccccatcaacttcaccgtcttcctcacgctctttggggagaagctcaatgggacagaccccgaggaagccatcctgagtgccttccgcatgtttgaccccagcggcaaaggggtggtgaacaaggatgagttcaagcagcttctcctgacccaggcagacaagttctctccagctgaggtggagcagatgttcgccctgacacccatggacctggcggggaacatcgactacaagtcactgtgctacatcatcacccatggagacgagaaagaggaatgaggggcagggccaggcccacgggggggcacctcaataaactctgttgcaaaattgg

SEQ ID NO: 208708 - DNA, 447 bp, Artificial Sequence
  derived and/or modified sequence
atgttcgagcaggcccagatccaggagttcaaggaggccttcagctgtattgatcagaatagggatgggatcatctgtaaggctgacctgcgggagacatacagccagcttggaaaggtcagtgtaccggaggaagaactggacgccatgctgcaagagggcaaagggccaatcaatttcacagtgttcctcacactgtttggagaaaaactgaatggcacagaccctgaggaggcaatactaagcgcattccggatgttcgatccctccggcaaaggagttgtaaacaaagatgaattcaaacagttactcttgacccaggccgataagtttagtcctgctgaagttgagcaaatgttcgcgctaaccccaatggacttagctggaaacatcgattataaaagcctgtgttatatcattactcatggcgacgaaaaggaggaatag

SEQ ID NO: 208709 - DNA, 528 bp, Artificial Sequence
  derived and/or modified sequence
atggctagcaggaaggcgggaaccaggggaaaagtggcagccaccaaacaggcacagagaggaagtagcaacgtcttttcaatgtttgaacaggcgcagatacaggaattcaaggaggccttctcatgcatcgaccagaatagagacgggatcatctgcaaagcagacctacgggaaacctattcacaactgggcaaagtgtctgtccctgaggaggaactcgatgctatgctccaggaaggcaaaggacccataaacttcaccgtcttcctcaccctgttcggtgagaaacttaacggaacggaccctgaggaggcgattctgtcggctttcaggatgtttgacccatctggtaaaggcgtggtgaacaaggatgaatttaaacagcttctgcttacccaggctgacaaattttcccctgccgaggtagagcagatgttcgccctgactcccatggatctggccggtaacattgactataaaagcttgtgttacatcatcacccacggtgatgaaaaagaagaatag

SEQ ID NO: 208710 - DNA, 447 bp, Artificial Sequence
  derived and/or modified sequence
atgttcgaacaagctcaaatccaggagtttaaggaggccttctcttgcatcgaccaaaacagggacgggataatctgcaaagccgatttgcgtgagacctatagccaactggggaaagtgagtgtgccagaagaagagctggatgctatgttgcaggaggggaaaggaccaattaactttacagttttcctcactctcttcggcgagaaactgaatgggactgacccagaagaggcaattctctccgcctttagaatgtttgacccctctggcaagggagtcgttaataaagatgagttcaaacagctgctcctcacacaggctgacaagtttagccccgctgaagtcgagcagatgtttgctctgactcctatggatttggcgggaaatatcgattataaatcgctatgctacatcattacacacggtgatgagaaggaagagtag

SEQ ID NO: 208711 - DNA, 528 bp, Artificial Sequence
  derived and/or modified sequence
atggccagcagaaaggccggcaccagaggcaaggtggccgccaccaagcaggcccagagaggcagcagcaacgtgttcagcatgttcgagcaggcccagatccaggagttcaaggaggccttcagctgcatcgaccagaacagagacggcatcatctgcaaggccgacctgagagagacctacagccagctgggcaaggtgagcgtgcccgaggaggagctggacgccatgctgcaggagggcaagggccccatcaacttcaccgtgttcctgaccctgttcggcgagaagctgaacggcaccgaccccgaggaggccatcctgagcgccttcagaatgttcgaccccagcggcaagggcgtggtgaacaaggacgagttcaagcagctgctgctgacccaggccgacaagttcagccccgccgaggtggagcagatgttcgccctgacccccatggacctggccggcaacatcgactacaagagcctgtgctacatcatcacccacggcgacgagaaggaggagtag

SEQ ID NO: 208712 - DNA, 447 bp, Artificial Sequence
  derived and/or modified sequence
atgttcgagcaggcccagatccaggagttcaaggaggccttcagctgcatcgaccagaacagagacggcatcatctgcaaggccgacctgagagagacctacagccagctgggcaaggtgagcgtgcccgaggaggagctggacgccatgctgcaggagggcaagggccccatcaacttcaccgtgttcctgaccctgttcggcgagaagctgaacggcaccgaccccgaggaggccatcctgagcgccttcagaatgttcgaccccagcggcaagggcgtggtgaacaaggacgagttcaagcagctgctgctgacccaggccgacaagttcagccccgccgaggtggagcagatgttcgccctgacccccatggacctggccggcaacatcgactacaagagcctgtgctacatcatcacccacggcgacgagaaggaggagtag

SEQ ID NO: 208713 - protein, 2506 aa, Artificial Sequence
  derived and/or modified sequence
MEVLQCDGCDFRAPSYEDLKAHIQDVHTAFLQPTDVAEDNVNELRCGSVNASNQTEVEFSSIKDEFAIAEDLSGQNATSLGTGGYYGHSPGYYGQHIAANPKPTNKFFQCKFCVRYFRSKNLLIEHTRKVHGAQAEGSSSGPPVPGSLNYNIMMHEGFGKVFSCQFCTYKSPRRARIIKHQKMYHKNNLKETTAPPPAPAPMPDPVVPPVSLQDPCKELPAEVVERSILESMVKPLTKSRGNFCCEWCSYQTPRRERWCDHMMKKHRSMVKILSSLRQQQEGTNLPDVPNKSAPSPTSNSTYLTMNAASREIPNTTVSNFRGSMGNSIMRPNSSASKFSPMSYPQMKPKSPHNSGLVNLTERSRYGMTDMTNSSADLETNSMLNDSSSDEELNEIDSENGLSAMDHQTSGLSAEQLMGSDGNKLLETKGIPFRRFMNRFQCPFCPFLTMHRRSISRHIENIHLSGKTAVYKCDECPFTCKSSLKLGAHKQCHTGTTSDWDAVNSQSESISSSLNEGVVSYESSSINGRKSGVMLDPLQQQQPPQPPPPPPPPPPSQPQPLQQPQPPQLQPPHQVPPQPQTQPPPTQQPQPPTQAAPLHPYKCTMCNYSTTTLKGLRVHQQHKHSFCDNLPKFEGQPSSLPLENETDSHPSSSNTVKKSQTSILGLSSKNNFVAKASRKLANDFPLDLSPVKKRTRIDEIASNLQSKINQTKQQEDAVINVEDDEEEEEDNEVEIEVELDREEEPTEPIIEVPTSFSAQQIWVRDTSEPQKEPNFRNITHDYNATNGAEIELTLSEDEEDYYGSSTNLKDHQVSNTALLNTQTPIYGTEHNSENTDFGDSGRLYYCKHCDFNNKSARSVSTHYQRMHPYIKFSFRYILDPNDHSAVYRCLECYIDYTNFEDLQQHYGEHHPEAMNVLNFDHSDLIYRCRFCSYTSPNVRSLMPHYQRMHPTVKINNAMIFSSYVVEQQEGLNTESQTLREILNSAPKNMATSTPVARGGGLPATFNKNTPKTFTPECENQKDPLVNTVVVYDCDVCSFASPNMHSVLVHYQKKHPEEKASYFRIQKTMRMVSVDRGSALSQLSFEVGAPMSPKMSNMGSPPPPQPPPPDLSTELYYCKHCSYSNRSVVGVLVHYQKRHPEIKVTAKYIRQAPPTAAMMRGVEGPQGSPRPPAPIQQLNRSSSERDGPPVENEMFFCQHCDYGNRTVKGVLIHYQKKHRDFKANADVIRQHTATIRSLCDRNQKKPASCVLVSPSNLERDKTKLRALKCRQCSYTSPYFYALRKHIKKDHPALKATVTSIMRWAFLDGLIEAGYHCEWCIYSHTEPNGLLLHYQRRHPEHYVDYTYMATKLWAGPDPSPPSLTMPAEAKTYRCRDCVFEAVSIWDITNHYQAFHPWAMNGDESVLLDIIKEKDAVEKPILSSEELAGPVNCENSIPTPFPEQEAECPEDARLSPEKSLQLASANPAISSTPYQCTVCQSEYNNLHGLLTHYGKKHPGMKVKAADFAQDIDINPGAVYKCRHCPYINTRIHGVLTHYQKRHPSIKVTAEDFVHDVEQSADISQNDVEETSRIFKQGYGAYRCKLCPYTHGTLEKLKIHYEKYHNQPEFDVFSQSPPKLPVPLEPEMTTEVSPSQVSITEEEVGEEPVSTSHFSTSHLVSHTVFRCQLCKYFCSTRKGIARHYRIKHNNVRAQPEGKNNLFKCALCAYTNPIRKGLAAHYQKRHDIDAYYTHCLAASRTISDKPNKVIIPSPPKDDSPQLSEELRRAVEKKKCSLCSFQSFSKKGIVSHYMKRHPGVFPKKQHASKLGGYFTAVYADEHEKPTLMEEEERGNFEKAEVEGEAQEIEWLPFRCIKCFKLSFSTAELLCMHYTDHHSRDLKRDFIILGNGPRLQNSTYQCKHCDSKLQSTAELTSHLNIHNEEFQKRAKRQERRKQLLSKQKYADGAFADFKQERPFGHLEEVPKIKERKVVGYKCKFCVEVHPTLRAICNHLRKHVQYGNVPAVSAAVKGLRSHERSHLALAMFTREDKYSCQYCSFVSAFRHNLDRHMQTHHGHHKPFRCKLCSFKSSYNSRLKTHILKAHAGEHAYKCSWCSFSTMTISQLKEHSLKVHGKALTLPRPRIVSLLSSHSHHSSQKATPAEEVEDSNDSSYSEPPDVQQQLNHYQSAALARNNSRVSPVPLSGAAAGTEQKTEAVLHCEFCEFSSGYIQSIRRHYRDKHGGKKLFKCKDCSFYTGFKSAFTMHVEAGHSAVPEEGPKDLRCPLCLYHTKYKRNMIDHIVLHREERVVPIEVCRSKLSKYLQGVVFRCDKCTFTCSSDESLQQHIEKHNELKPYKCQLCYYETKHTEELDSHLRDEHKVSRNFELVGRVNLDQLEQMKEKMESSSSDDEDKEEEMNSKAEDRELMRFSDHGAALNTEKRFPCEFCGRAFSQGSEWERHVLRHGMALNDTKQVSREEIHPKEIMENSVKMPSIEEKEDDEAIGIDFSLKNETVAICVVTADKSLLENAEAKKE

SEQ ID NO: 208714 - DNA, 7521 bp, Artificial Sequence
  derived and/or modified sequence
atggaggtgctgcagtgcgacggctgcgacttcagagcccccagctacgaggacctgaaggcccacatccaggacgtgcacaccgccttcctgcagcccaccgacgtggccgaggacaacgtgaacgagctgagatgcggcagcgtgaacgccagcaaccagaccgaggtggagttcagcagcatcaaggacgagttcgccatcgccgaggacctgagcggccagaacgccaccagcctgggcaccggcggctactacggccacagccccggctactacggccagcacatcgccgccaaccccaagcccaccaacaagttcttccagtgcaagttctgcgtgagatacttcagaagcaagaacctgctgatcgagcacaccagaaaggtgcacggcgcccaggccgagggcagcagcagcggcccccccgtgcccggcagcctgaactacaacatcatgatgcacgagggcttcggcaaggtgttcagctgccagttctgcacctacaagagccccagaagagccagaatcatcaagcaccagaagatgtaccacaagaacaacctgaaggagaccaccgcccccccccccgcccccgcccccatgcccgaccccgtggtgccccccgtgagcctgcaggacccctgcaaggagctgcccgccgaggtggtggagagaagcatcctggagagcatggtgaagcccctgaccaagagcagaggcaacttctgctgcgagtggtgcagctaccagacccccagaagagagagatggtgcgaccacatgatgaagaagcacagaagcatggtgaagatcctgagcagcctgagacagcagcaggagggcaccaacctgcccgacgtgcccaacaagagcgcccccagccccaccagcaacagcacctacctgaccatgaacgccgccagcagagagatccccaacaccaccgtgagcaacttcagaggcagcatgggcaacagcatcatgagacccaacagcagcgccagcaagttcagccccatgagctacccccagatgaagcccaagagcccccacaacagcggcctggtgaacctgaccgagagaagcagatacggcatgaccgacatgaccaacagcagcgccgacctggagaccaacagcatgctgaacgacagcagcagcgacgaggagctgaacgagatcgacagcgagaacggcctgagcgccatggaccaccagaccagcggcctgagcgccgagcagctgatgggcagcgacggcaacaagctgctggagaccaagggcatccccttcagaagattcatgaacagattccagtgccccttctgccccttcctgaccatgcacagaagaagcatcagcagacacatcgagaacatccacctgagcggcaagaccgccgtgtacaagtgcgacgagtgccccttcacctgcaagagcagcctgaagctgggcgcccacaagcagtgccacaccggcaccaccagcgactgggacgccgtgaacagccagagcgagagcatcagcagcagcctgaacgagggcgtggtgagctacgagagcagcagcatcaacggcagaaagagcggcgtgatgctggaccccctgcagcagcagcagcccccccagccccccccccccccccccccccccccccccagccagccccagcccctgcagcagccccagcccccccagctgcagcccccccaccaggtgcccccccagccccagacccagcccccccccacccagcagccccagccccccacccaggccgcccccctgcacccctacaagtgcaccatgtgcaactacagcaccaccaccctgaagggcctgagagtgcaccagcagcacaagcacagcttctgcgacaacctgcccaagttcgagggccagcccagcagcctgcccctggagaacgagaccgacagccaccccagcagcagcaacaccgtgaagaagagccagaccagcatcctgggcctgagcagcaagaacaacttcgtggccaaggccagcagaaagctggccaacgacttccccctggacctgagccccgtgaagaagagaaccagaatcgacgagatcgccagcaacctgcagagcaagatcaaccagaccaagcagcaggaggacgccgtgatcaacgtggaggacgacgaggaggaggaggaggacaacgaggtggagatcgaggtggagctggacagagaggaggagcccaccgagcccatcatcgaggtgcccaccagcttcagcgcccagcagatctgggtgagagacaccagcgagccccagaaggagcccaacttcagaaacatcacccacgactacaacgccaccaacggcgccgagatcgagctgaccctgagcgaggacgaggaggactactacggcagcagcaccaacctgaaggaccaccaggtgagcaacaccgccctgctgaacacccagacccccatctacggcaccgagcacaacagcgagaacaccgacttcggcgacagcggcagactgtactactgcaagcactgcgacttcaacaacaagagcgccagaagcgtgagcacccactaccagagaatgcacccctacatcaagttcagcttcagatacatcctggaccccaacgaccacagcgccgtgtacagatgcctggagtgctacatcgactacaccaacttcgaggacctgcagcagcactacggcgagcaccaccccgaggccatgaacgtgctgaacttcgaccacagcgacctgatctacagatgcagattctgcagctacaccagccccaacgtgagaagcctgatgccccactaccagagaatgcaccccaccgtgaagatcaacaacgccatgatcttcagcagctacgtggtggagcagcaggagggcctgaacaccgagagccagaccctgagagagatcctgaacagcgcccccaagaacatggccaccagcacccccgtggccagaggcggcggcctgcccgccaccttcaacaagaacacccccaagaccttcacccccgagtgcgagaaccagaaggaccccctggtgaacaccgtggtggtgtacgactgcgacgtgtgcagcttcgccagccccaacatgcacagcgtgctggtgcactaccagaagaagcaccccgaggagaaggccagctacttcagaatccagaagaccatgagaatggtgagcgtggacagaggcagcgccctgagccagctgagcttcgaggtgggcgcccccatgagccccaagatgagcaacatgggcagccccccccccccccagccccccccccccgacctgagcaccgagctgtactactgcaagcactgcagctacagcaacagaagcgtggtgggcgtgctggtgcactaccagaagagacaccccgagatcaaggtgaccgccaagtacatcagacaggccccccccaccgccgccatgatgagaggcgtggagggcccccagggcagccccagaccccccgcccccatccagcagctgaacagaagcagcagcgagagagacggcccccccgtggagaacgagatgttcttctgccagcactgcgactacggcaacagaaccgtgaagggcgtgctgatccactaccagaagaagcacagagacttcaaggccaacgccgacgtgatcagacagcacaccgccaccatcagaagcctgtgcgacagaaaccagaagaagcccgccagctgcgtgctggtgagccccagcaacctggagagagacaagaccaagctgagagccctgaagtgcagacagtgcagctacaccagcccctacttctacgccctgagaaagcacatcaagaaggaccaccccgccctgaaggccaccgtgaccagcatcatgagatgggccttcctggacggcctgatcgaggccggctaccactgcgagtggtgcatctacagccacaccgagcccaacggcctgctgctgcactaccagagaagacaccccgagcactacgtggactacacctacatggccaccaagctgtgggccggccccgaccccagcccccccagcctgaccatgcccgccgaggccaagacctacagatgcagagactgcgtgttcgaggccgtgagcatctgggacatcaccaaccactaccaggccttccacccctgggccatgaacggcgacgagagcgtgctgctggacatcatcaaggagaaggacgccgtggagaagcccatcctgagcagcgaggagctggccggccccgtgaactgcgagaacagcatccccacccccttccccgagcaggaggccgagtgccccgaggacgccagactgagccccgagaagagcctgcagctggccagcgccaaccccgccatcagcagcaccccctaccagtgcaccgtgtgccagagcgagtacaacaacctgcacggcctgctgacccactacggcaagaagcaccccggcatgaaggtgaaggccgccgacttcgcccaggacatcgacatcaaccccggcgccgtgtacaagtgcagacactgcccctacatcaacaccagaatccacggcgtgctgacccactaccagaagagacaccccagcatcaaggtgaccgccgaggacttcgtgcacgacgtggagcagagcgccgacatcagccagaacgacgtggaggagaccagcagaatcttcaagcagggctacggcgcctacagatgcaagctgtgcccctacacccacggcaccctggagaagctgaagatccactacgagaagtaccacaaccagcccgagttcgacgtgttcagccagagcccccccaagctgcccgtgcccctggagcccgagatgaccaccgaggtgagccccagccaggtgagcatcaccgaggaggaggtgggcgaggagcccgtgagcaccagccacttcagcaccagccacctggtgagccacaccgtgttcagatgccagctgtgcaagtacttctgcagcaccagaaagggcatcgccagacactacagaatcaagcacaacaacgtgagagcccagcccgagggcaagaacaacctgttcaagtgcgccctgtgcgcctacaccaaccccatcagaaagggcctggccgcccactaccagaagagacacgacatcgacgcctactacacccactgcctggccgccagcagaaccatcagcgacaagcccaacaaggtgatcatccccagcccccccaaggacgacagcccccagctgagcgaggagctgagaagagccgtggagaagaagaagtgcagcctgtgcagcttccagagcttcagcaagaagggcatcgtgagccactacatgaagagacaccccggcgtgttccccaagaagcagcacgccagcaagctgggcggctacttcaccgccgtgtacgccgacgagcacgagaagcccaccctgatggaggaggaggagagaggcaacttcgagaaggccgaggtggagggcgaggcccaggagatcgagtggctgcccttcagatgcatcaagtgcttcaagctgagcttcagcaccgccgagctgctgtgcatgcactacaccgaccaccacagcagagacctgaagagagacttcatcatcctgggcaacggccccagactgcagaacagcacctaccagtgcaagcactgcgacagcaagctgcagagcaccgccgagctgaccagccacctgaacatccacaacgaggagttccagaagagagccaagagacaggagagaagaaagcagctgctgagcaagcagaagtacgccgacggcgccttcgccgacttcaagcaggagagacccttcggccacctggaggaggtgcccaagatcaaggagagaaaggtggtgggctacaagtgcaagttctgcgtggaggtgcaccccaccctgagagccatctgcaaccacctgagaaagcacgtgcagtacggcaacgtgcccgccgtgagcgccgccgtgaagggcctgagaagccacgagagaagccacctggccctggccatgttcaccagagaggacaagtacagctgccagtactgcagcttcgtgagcgccttcagacacaacctggacagacacatgcagacccaccacggccaccacaagcccttcagatgcaagctgtgcagcttcaagagcagctacaacagcagactgaagacccacatcctgaaggcccacgccggcgagcacgcctacaagtgcagctggtgcagcttcagcaccatgaccatcagccagctgaaggagcacagcctgaaggtgcacggcaaggccctgaccctgcccagacccagaatcgtgagcctgctgagcagccacagccaccacagcagccagaaggccacccccgccgaggaggtggaggacagcaacgacagcagctacagcgagccccccgacgtgcagcagcagctgaaccactaccagagcgccgccctggccagaaacaacagcagagtgagccccgtgcccctgagcggcgccgccgccggcaccgagcagaagaccgaggccgtgctgcactgcgagttctgcgagttcagcagcggctacatccagagcatcagaagacactacagagacaagcacggcggcaagaagctgttcaagtgcaaggactgcagcttctacaccggcttcaagagcgccttcaccatgcacgtggaggccggccacagcgccgtgcccgaggagggccccaaggacctgagatgccccctgtgcctgtaccacaccaagtacaagagaaacatgatcgaccacatcgtgctgcacagagaggagagagtggtgcccatcgaggtgtgcagaagcaagctgagcaagtacctgcagggcgtggtgttcagatgcgacaagtgcaccttcacctgcagcagcgacgagagcctgcagcagcacatcgagaagcacaacgagctgaagccctacaagtgccagctgtgctactacgagaccaagcacaccgaggagctggacagccacctgagagacgagcacaaggtgagcagaaacttcgagctggtgggcagagtgaacctggaccagctggagcagatgaaggagaagatggagagcagcagcagcgacgacgaggacaaggaggaggagatgaacagcaaggccgaggacagagagctgatgagattcagcgaccacggcgccgccctgaacaccgagaagagattcccctgcgagttctgcggcagagccttcagccagggcagcgagtgggagagacacgtgctgagacacggcatggccctgaacgacaccaagcaggtgagcagagaggagatccaccccaaggagatcatggagaacagcgtgaagatgcccagcatcgaggagaaggaggacgacgaggccatcggcatcgacttcagcctgaagaacgagaccgtggccatctgcgtggtgaccgccgacaagagcctgctggagaacgccgaggccaagaaggagtag

SEQ ID NO: 208715 - DNA, 7521 bp, Artificial Sequence
  derived and/or modified sequence
atggaagtgttgcagtgcgacggatgtgattttcgtgctccatcatacgaggatctgaaagcccacatccaggacgtccatactgctttcctgcagcctacagacgtggcagaagacaacgtgaacgagctgaggtgcggttcggtcaacgcttccaatcagactgaggttgaatttagcagtatcaaggacgaattcgccattgcggaagatctgagcggccagaacgctacaagcctcgggacgggagggtactatgggcatagcccagggtactatggccagcatattgccgctaaccctaagcccacaaacaagtttttccagtgtaagttctgcgtccgctattttcggagtaaaaaccttttaatcgagcacactcgaaaagtccacggcgcacaggccgaaggcagttcttccggtcctcccgtgcctggttcgctgaactacaatataatgatgcacgaagggttcggcaaggtgttctcttgtcaattttgtacctataagtcaccacggagagcaagaatcatcaagcaccagaagatgtatcacaagaataacctcaaggagacaacagctcctcctcccgctcccgccccaatgcccgaccccgtcgtccccccggtgtctttacaggacccctgtaaggagctccctgccgaagtggtggagcgctcaatcctcgaaagcatggtaaagccactaaccaagtctagggggaatttctgctgcgagtggtgctcctatcagacaccccggagagaacggtggtgtgaccacatgatgaaaaagcatcgctctatggttaagatactgtcaagccttcggcagcagcaagagggaaccaaccttccagacgtacccaataagtctgcccctagccctacttccaacagcacttatctgactatgaacgccgcctctcgtgagatacctaacaccaccgtttctaactttcgcggctccatgggcaactccatcatgagacccaattcgtcagctagcaaattttcgcccatgtcttacccccagatgaagcctaaatccccccacaacagcggcctggtgaaccttaccgagaggagcagatacggcatgaccgacatgacgaacagtagcgcagacctggaaaccaacagcatgctcaacgactcgtcatccgacgaggaactcaacgaaatcgacagcgaaaacgggctctcggccatggaccatcaaacaagtggcttgtctgccgagcagctcatggggagcgacggcaacaagttacttgagaccaagggaatcccatttcgtagatttatgaaccgcttccagtgtcccttctgtccttttctgactatgcaccgcagaagtatcagccgtcacattgaaaacattcatctatctggcaaaactgctgtgtataagtgtgacgagtgtcctttcacatgtaagagtagcctgaagctcggcgcgcataagcaatgccataccgggacaacaagcgactgggatgctgtcaactctcagtccgaatcaatctcttcatctctgaatgaaggtgtagtgagctacgaatccagttctatcaacggccgaaaaagcggcgtgatgcttgacccgcttcagcaacagcagcctccccagccccctccaccacctccccctcctccccctagtcagccacagccactgcagcagccacaacccccacaactccagccacctcaccaggttccgccgcagccccaaacacagcccccccctacacaacagccacagccacctacacaggcagcccctctgcatccatacaaatgcaccatgtgtaactatagtacaactactctcaaaggcctgagggtgcaccagcagcacaaacatagcttttgtgacaatctcccaaagtttgagggccagcccagctccctccccctagagaatgagacagactctcacccttctagtagcaataccgtgaagaagtctcagacttccatcctagggctctcctctaagaacaatttcgttgccaaggcatcccgaaaactggctaacgattttcctctggatctgtcgccagtgaaaaaacgcacaaggatagatgagatcgcaagcaacttacagtcgaagattaaccaaacaaagcagcaggaggatgccgtgataaatgtggaggatgatgaagaagaggaagaagacaacgaagttgaaatagaggtagagttggacagagaagaggagccaacagaacccatcattgaagtgcctactagtttcagcgcccaacagatttgggtgagagacacctctgaaccccagaaggaacctaattttcggaatatcacccacgattacaacgcgactaacggcgccgaaatagaattgacgttaagtgaggacgaagaagattattatggctcatccacaaatctaaaagaccaccaagtgtctaacaccgccttacttaatacacagacacctatatacggcaccgagcataactccgaaaatactgattttggagattctgggagactgtactattgcaaacactgcgatttcaacaataagagcgcccgtagcgtctcgactcactatcagcgcatgcacccctatatcaagttttcattcagatatatcctggacccgaacgaccacagcgcagtgtatagatgtctggaatgctatatagattacacaaatttcgaggacctgcaacaacactacggtgagcatcatccggaggcaatgaacgtcctgaatttcgatcattctgatttgatataccgctgtaggttttgtagctatactagccctaacgtgcgctcgctcatgccacattatcagaggatgcatccaacagtgaagattaacaatgctatgattttttcatcctacgtcgtggagcaacaggaaggactgaacaccgaaagccagaccctcagggagattctaaactccgcaccgaagaatatggccacctctacgcccgtggcacgtggcggagggttgcccgccacatttaacaaaaatacccctaagacatttacaccagaatgtgagaatcaaaaggacccactggtcaataccgtggtcgtctacgactgtgacgtgtgctccttcgcctcccccaatatgcactctgtgctggtgcattatcagaaaaaacatcccgaggagaaagctagctattttagaattcaaaagactatgcggatggtcagtgtcgatagaggatcggctctctcccagttgagtttcgaggtcggagctccaatgagccccaagatgtcgaatatgggctcccctcctccaccacaacccccccctccagatctttccactgaattgtattactgcaagcactgctcctattcaaacaggagcgtcgtgggagtcctagtacattaccagaagagacatcccgagattaaagtgaccgctaagtacatacggcaagcccctcctacagcagctatgatgcgcggggtcgaaggccctcagggtagcccccgtccaccagcgcccatccaacaactgaataggtccagctcagaacgcgatggccctcccgtggagaacgagatgtttttttgtcagcattgcgattacggtaatcggacagtgaaaggggttctcatccattaccagaaaaagcatagggattttaaagctaacgctgatgtgatccgccaacacaccgctacaatccggtctctctgcgaccgcaatcaaaagaaacccgcctcctgtgtgctggtaagtcctagcaacctggaaagggataagaccaagctaagggccctcaagtgccgccagtgcagttacaccagtccatacttctatgcactgagaaagcacattaagaaggaccatcctgcactgaaggctacagtgacctcaatcatgcgttgggccttcctggatggcctcattgaagccggctaccactgcgagtggtgtatttattcacatactgagccaaacggcctactcttacactaccagcgccggcacccagagcactacgtcgattacacgtatatggcgacgaaactttgggccggccctgaccccagcccaccttctctgactatgcccgctgaagcaaagacgtacaggtgcagggactgtgtgtttgaggcggtctcaatctgggatatcaccaatcactatcaggcgttccatccctgggccatgaatggggatgaaagcgtcctgctggatatcatcaaggagaaggatgccgtcgagaagcctatccttagtagcgaagaacttgctggacctgtaaattgtgagaattctatccctacccctttccccgagcaggaagccgagtgccccgaggacgctagactttcccctgaaaagtccctccaactagcaagtgcgaatccagctatttctagtaccccctaccagtgcacagtgtgccagagtgaatacaacaaccttcacgggttgttgactcactacgggaagaaacaccctggaatgaaggtgaaggcagccgactttgctcaagatatcgatataaaccccggcgccgtgtacaagtgccggcattgcccctatatcaacacgagaatacatggtgttctgacccactaccaaaagcggcacccgtcgatcaaagtgaccgccgaggactttgttcacgacgtggagcagtccgccgacatcagccagaatgacgttgaggaaacatcaaggattttcaagcagggctacggggcatacagatgtaaactctgtccctacacccatggaaccctggaaaaactgaaaatccattacgagaagtatcacaatcagccggaattcgatgtcttttcgcagtcaccccctaaattaccggtgcccctcgagcccgaaatgacaactgaagtcagtccttcccaggtcagtatcacagaggaagaggtcggcgaggagccagtgtctacatcacatttttctacaagtcatctagtcagccacaccgtattccggtgccagctgtgtaaatatttttgttcaacccgcaaagggattgcccggcattatcgtatcaaacacaacaacgtcagagcccagcccgaggggaaaaataatctgttcaaatgcgccctgtgtgcctatacaaaccccatcaggaaaggcctggcggctcattaccaaaagcgacacgacattgatgcgtattatacccactgcttggcggctagccgtactatctccgacaagcccaacaaggtaattataccatctcctccaaaggacgatagccctcagttatcagaggaacttcgacgagccgtagaaaagaagaaatgctccctttgttcattccagagtttttccaaaaaaggtatcgtatctcattacatgaaacgacatcctggagtcttcccaaaaaaacaacatgccagcaaactgggcggatactttaccgccgtctacgcggatgagcacgagaagcccacactgatggaggaagaggagaggggaaattttgagaaggctgaagtcgagggtgaagcccaggaaattgagtggcttcctttccgctgcattaaatgctttaagctgtctttctccacagctgaactcctttgcatgcattacaccgaccaccactctcgggacctgaagagggacttcattatcctgggtaatggccctcggctgcaaaactccacctaccagtgtaaacactgcgactcaaaactgcagagcacagcagagctgacttcgcatttaaatatccataatgaggaattccagaaacgggccaaacggcaggagcggcgtaaacaattgttgtcaaaacaaaaatacgcagacggtgcgtttgctgactttaaacaggagcggccgtttggacatctcgaggaggtgcccaaaattaaagaacgcaaagtggtaggatataagtgcaagttctgtgtggaagtgcacccaacactgcgggcaatctgcaaccatctgcgcaaacatgtgcagtatggcaatgttccagcagtgtcggccgccgtgaaagggttaagatcacacgaaaggagccacctggccctggcaatgtttactagagaagacaaatattcttgtcagtattgttccttcgtgtctgccttcagacacaacctggatcgccacatgcaaacccatcacggccaccacaagccctttagatgtaagttgtgttcctttaagtccagttacaactccaggttgaaaacccacatccttaaagctcacgcaggcgagcacgcgtataagtgctcatggtgttcattttctaccatgaccatctctcagctcaaggagcactccttgaaggtgcatggaaaggcactcacgctaccaaggccacgtatcgtatccctgctgagttcacactcgcaccactcatcccagaaagctacccctgccgaagaagtggaggattctaatgatagcagttactccgagccgcctgacgtccagcagcagctaaatcattaccagtccgctgctctggcccgcaataactcccgggtgtcccccgtgcccctcagtggcgctgcagcaggtaccgaacagaaaaccgaagcggtgttgcattgtgagttttgtgaattttcgtccgggtacattcaaagtattagaagacactatagggacaagcacgggggcaagaagctgttcaagtgtaaggactgctcattttatacggggttcaagtcagcatttacaatgcatgtcgaggctggacatagcgccgtgcctgaagagggccccaaagacctccgctgtccactttgtctttatcatactaagtataaacggaatatgatcgatcacatcgttctccatcgggaggagcgcgtcgtgccaatcgaggtgtgtcgtagtaagctcagtaagtacctccagggggtagtctttagatgtgacaaatgcacatttacatgttctagcgacgagagtctccagcagcatatcgaaaaacacaacgaactcaaaccttataaatgccaactctgctactacgagacaaaacataccgaagaactggattcgcacctgcgtgacgaacataaggttagccgaaacttcgaacttgtcggacgggtgaacctcgatcagctggagcagatgaaggagaaaatggagtccagtagcagtgatgacgaggacaaagaggaggagatgaatagcaaagccgaggatcgcgaactgatgaggttctctgatcacggggccgctctcaacaccgaaaagcggtttccatgcgagttttgtgggcgagcctttagtcaggggagtgagtgggaacgacatgttctccggcatggcatggcgctgaacgacacgaaacaagtgagccgcgaggagattcaccccaaggagatcatggaaaattccgtcaagatgccttctatagaggaaaaggaggatgacgaggccatcggtattgacttctccttaaaaaacgaaacagttgccatatgcgttgtaacagccgataaaagcctgctagagaacgctgaagccaagaaagagtag

SEQ ID NO: 208716 - DNA, 7521 bp, Artificial Sequence
  derived and/or modified sequence
atggaggtgctgcagtgtgatggctgtgacttccgggcccccagctatgaggacctgaaggcccacatccaggatgtgcacacagccttcctgcagcccacagatgtggccgaggacaacgtgaatgagctgcgctgtggctctgtgaatgccagcaaccagacagaggtggagttcagcagcatcaaggatgaatttgccatcgccgaggacctgagcggccagaatgccaccagcctgggcaccggcggctactacggccacagccctggctactacggccagcacatcgccgccaaccccaagcccaccaacaagttcttccagtgcaagttctgtgtgcgctacttccgcagcaagaacctgctgattgagcacaccaggaaggtgcatggagcccaggccgagggcagcagcagcggcccccctgtgcccggcagcctgaactacaacatcatgatgcatgagggctttgggaaggtgttcagctgccagttctgcacctacaagagcccccggcgggcccgcatcatcaagcaccagaagatgtaccacaagaacaacctgaaggagaccacagcccctcctccagccccagcccccatgccagaccctgtggtgccccctgtgtccctgcaggacccctgcaaggagctgcctgctgaggtggtggagaggagcatcctggagagcatggtgaagcccctgaccaagagccggggcaacttctgctgtgagtggtgcagctaccagaccccccggcgggagcgctggtgtgaccacatgatgaagaagcaccgctccatggtgaagatcctgagcagcctgcggcagcagcaggagggcaccaacctgcctgatgtgcccaacaagagcgcccccagccccaccagcaacagcacctacctgaccatgaatgctgccagccgggagatccccaacaccaccgtgagcaacttccggggctccatgggcaacagcatcatgaggcccaacagcagcgccagcaagttcagccccatgagctacccccagatgaagcccaagagcccccacaacagcggcctggtgaacctgacagagaggagccgctatggcatgacagacatgaccaacagcagcgctgacctggagaccaacagcatgctgaatgacagcagcagtgatgaggagctgaatgaaattgattctgaaaatggcctgagcgccatggaccaccagaccagcggcctgtctgctgagcagctgatgggcagtgatggcaacaagctgctggagaccaagggcatccccttccgccgcttcatgaaccgcttccagtgccccttctgccccttcctgaccatgcacagaagaagcatcagccgccacatcgagaacatccacctgagcggcaagacagctgtgtacaagtgtgatgagtgccccttcacctgcaagagcagcctgaagctgggcgcccacaagcagtgccacacaggcaccaccagtgactgggatgctgtgaacagccagagcgagagcatcagcagcagcctgaatgaaggagtggtgtcctatgagagcagcagcatcaatggaaggaagagcggcgtgatgctggaccccctgcagcagcagcagcccccccagcccccacctcctcctcctcctcctccacccagccagccccagcccctgcagcagccccagcccccccagctgcagcccccccaccaggtgcccccccagccccagacccagcccccacccacccagcagccccagccccccacccaggccgcccccctgcacccctacaagtgcaccatgtgcaactacagcaccaccaccctgaagggcctgcgggtgcaccagcagcacaagcacagcttctgtgacaacctgcccaagtttgagggccagcccagcagcctgcccctggagaatgaaacagacagccaccccagcagcagcaacacagtgaagaagagccagaccagcatcctgggcctgagcagcaagaacaactttgtggccaaggccagcaggaagctggccaatgacttccccctggacctgagccctgtgaagaagaggaccagaattgatgaaattgccagcaacctgcagagcaagatcaaccagaccaagcagcaggaggatgctgtgatcaacgtggaggatgatgaggaggaggaggaggacaatgaggtggagattgaggtggagctggaccgggaggaggagcccacagagcccatcatcgaggtgcccaccagcttcagcgcccagcagatctgggtgcgggacaccagcgagccccagaaggagcccaacttcaggaacatcacccatgactacaatgccaccaatggagctgagattgagctgaccctgtctgaagatgaggaggactactacggcagcagcaccaacctgaaggaccaccaggtgagcaacacagccctgctgaacacccagacccccatctatggaacagagcacaacagcgagaacacagactttggagacagcggccgcctgtactactgcaagcactgtgacttcaacaacaagagcgcccggtctgtgtccacccactaccagaggatgcacccctacatcaagttctccttccgctacatcctggaccccaatgaccacagcgctgtgtaccgctgcctggagtgctacatcgactacaccaactttgaggacctgcagcagcactatggagagcaccaccctgaggccatgaatgtgctgaactttgaccacagcgacctgatctaccgctgccgcttctgcagctacaccagccccaacgtgcgcagcctgatgccccactaccagaggatgcaccccaccgtgaagatcaacaatgccatgatcttcagcagctatgtggtggagcagcaggagggcctgaacacagagagccagaccctgcgggagatcctgaacagcgcccccaagaacatggccaccagcacccctgtggcccggggcggcggcctgcctgccaccttcaacaagaacacccccaagaccttcaccccagaatgtgagaaccagaaggaccccctggtgaacacagtggtggtgtatgactgtgatgtgtgcagctttgccagccccaacatgcacagcgtgctggtgcactaccagaagaagcaccctgaggagaaggccagctacttccgcatccagaagaccatgaggatggtgtctgtggaccggggcagcgccctgagccagctgagctttgaggtgggcgcccccatgagccccaagatgagcaacatgggcagccccccaccaccccagcccccacctccagacctgagcacagagctgtactactgcaagcactgcagctacagcaacagatctgtggtgggcgtgctggtgcactaccagaagaggcaccctgagatcaaggtgacagccaagtacatccggcaggccccacccacagctgccatgatgagaggagtggagggcccccagggcagcccccggcccccagcccccatccagcagctgaacagaagcagcagcgagagagatggcccccctgtggagaatgagatgttcttctgccagcactgtgactatggcaacagaacagtgaagggcgtgctgatccactaccagaagaagcaccgggacttcaaggccaatgctgatgtgatccggcagcacacagccaccatccgcagcctgtgtgacaggaaccagaagaagccagccagctgtgtgctggtgagccccagcaacctggagcgggacaagaccaagctgcgggccctgaagtgccggcagtgcagctacaccagcccctacttctacgccctgaggaagcacatcaagaaggaccacccagccctgaaggccaccgtgaccagcatcatgcgctgggccttcctggatggcctcatcgaggccggctaccactgtgagtggtgcatctacagccacacagagcccaacggcctgctgctgcactaccagaggaggcaccctgagcactacgtggactacacctacatggccaccaagctgtgggccggccctgaccccagcccccccagcctgaccatgcctgctgaggccaagacctaccgctgccgggactgtgtgtttgaggccgtgtccatctgggacatcaccaaccactaccaggccttccacccctgggccatgaatggagatgaatctgtgctgctggacatcatcaaggagaaggatgctgtggagaagcccatcctgagcagcgaggagctggccggccctgtgaactgtgagaacagcatccccacccccttccctgagcaggaggctgaatgtccagaagatgcccggctgagccctgagaagagcctgcagctggccagcgccaacccagccatcagcagcaccccctaccagtgcaccgtgtgccagagcgagtacaacaacctgcacggcctgctgacccactacggcaagaagcaccctggcatgaaggtgaaggctgctgactttgcccaggacatcgacatcaaccctggagctgtgtacaagtgccgccactgcccctacatcaacacccgcatccacggcgtgctgacccactaccagaagaggcaccccagcatcaaggtgacagctgaggactttgtgcatgatgtggagcagagcgctgacatcagccagaatgatgtggaggagaccagccgcatcttcaagcagggctacggggcctaccgctgcaagctgtgcccctacacccacggcaccctggagaagctgaagatccactatgagaagtaccacaaccagcctgagtttgatgtgttcagccagagcccccccaagctgcctgtgcccctggagcctgagatgaccacagaggtgagccccagccaggtgtccatcacagaggaggaggtgggggaggagcctgtgtccaccagccacttcagcaccagccacctggtgagccacacagtgttccgctgccagctgtgcaagtacttctgcagcaccaggaaaggaattgcccggcactaccgcatcaagcacaacaacgtgcgggcccagcctgagggcaagaacaacctcttcaagtgtgccctgtgtgcctacaccaaccccatcaggaagggcctggccgcccactaccagaagagacatgacattgatgcctactacacccactgcctggccgccagcaggaccatcagtgacaagcccaacaaggtgatcatccccagcccccccaaggatgacagcccccagctgtctgaggagctgcggcgggctgtggagaagaagaagtgcagcctgtgcagcttccagagcttcagcaagaagggcatcgtgagccactacatgaagaggcaccctggggtcttccccaagaagcagcacgccagcaagctgggcggctacttcaccgctgtgtatgcagatgaacatgagaagcccaccctgatggaggaggaggagcggggcaactttgagaaggccgaggtggagggggaggcccaggagattgagtggctgcccttccgctgcatcaagtgcttcaagctgtccttcagcacagctgagctgctgtgcatgcactacacagaccaccacagccgggacctgaagagggacttcatcatcctgggcaatggcccccggctgcagaacagcacctaccagtgcaagcactgtgacagcaagctgcagagcacagctgagctgaccagccacctgaacatccacaatgaggagttccagaagagggccaagaggcaggagaggaggaagcagctgctgagcaagcagaagtatgcagatggagcctttgctgacttcaagcaggagcggcccttcggccacctggaggaggtgcccaagatcaaggagaggaaggtggtgggctacaagtgcaagttctgtgtggaggtgcaccccaccctgcgggccatctgcaaccacctgaggaagcacgtgcagtatggaaatgtgcctgctgtgtctgctgctgtgaagggcctgcggagccatgagaggagccacctggccctggccatgttcacccgggaggacaagtacagctgccagtactgcagctttgtgtctgccttccgccacaacctggacagacacatgcagacccaccacggccaccacaagcccttccgctgcaagctgtgcagcttcaagagcagctacaacagccggctgaagacccacatcctgaaggcccacgccggggagcacgcctacaagtgctcctggtgcagcttcagcaccatgaccatcagccagctgaaggagcacagcctgaaggtgcacggcaaggccctgaccctgccccggcccagaattgtgtccctgctgagcagccacagccaccacagcagccagaaggccaccccagctgaggaggtggaggacagcaatgacagcagctacagcgagcccccagatgtgcagcagcagctgaaccactaccagagcgctgccctggccaggaacaacagccgggtgtcccctgtgcccctgtctggagctgctgctggaacagagcagaagacagaagctgtgctgcactgtgagttctgtgagttcagcagcggctacatccagagcatcagaagacactacagagacaagcacggcggcaagaagctgttcaagtgcaaggactgcagcttctacacaggcttcaagagcgccttcaccatgcacgtggaggccggccacagcgctgtgcctgaggagggccccaaggacctgcgctgccccctgtgcctgtaccacaccaagtacaagaggaacatgattgaccacatcgtgctgcaccgggaggagcgggtggtgcccatcgaggtgtgccgcagcaagctgagcaagtacctgcagggcgtggtgttccgctgtgacaagtgcaccttcacctgcagcagtgatgagagcctgcagcagcacatcgagaagcacaatgagctgaagccctacaagtgccagctgtgctactatgagaccaagcacacagaggagctggacagccacctgagagatgagcacaaggtgtccaggaactttgagctggtgggccgggtgaacctggaccagctggagcagatgaaggagaagatggagagcagcagcagtgatgatgaggacaaggaggaggagatgaacagcaaggccgaggaccgggagctgatgaggttcagtgaccacggggccgccctgaacacagagaagcgcttcccctgtgagttctgtggccgggccttcagccagggcagcgagtgggagcggcacgtgctgcggcacggcatggccctgaatgacaccaagcaggtgtcccgggaggagatccaccccaaggagatcatggagaacagcgtgaagatgcccagcattgaggagaaggaggatgatgaggccatcggcatcgacttcagcctgaagaatgaaacagtggccatctgtgtggtgacagctgacaagagcctgctggagaatgctgaggccaagaaggagtag

SEQ ID NO: 208717 - DNA, 7521 bp, Artificial Sequence
  derived and/or modified sequence
atggaggtgctgcagtgcgacggctgcgacttccgggcccccagctatgaggatctgaaggcgcatatccaggatgtccacacagcatttctgcagcccaccgacgtcgccgaggacaacgtaaatgaattgaggtgcggttctgtgaacgcatctaatcagactgaagtcgaattttcctctataaaggacgagttcgccatcgctgaggatctgagtggccagaacgcaacctctttgggaacaggtggctattacggacactctcctggatactacggccaacatatcgctgccaaccccaaacctacaaataagttctttcagtgtaagttttgcgtcaggtacttccggtccaaaaatctgttgattgaacatacccggaaagtccacggggcacaggccgagggatcctcttctggcccccccgtccctggcagccttaactacaacattatgatgcatgagggtttcggaaaggttttttcttgtcagttttgcacttacaaaagtcctcggagggctcgcatcattaagcatcagaagatgtatcacaaaaacaatctcaaagagaccactgcaccacctcccgccccggcacctatgcccgatccagtcgtgcctcctgtcagtctgcaggacccctgtaaagaactccctgctgaggtggtggaacgatcgatcctggaaagcatggtgaagccccttaccaaatctaggggcaatttctgctgcgagtggtgtagttatcagactccaaggagagagagatggtgcgatcacatgatgaagaagcataggtctatggtgaaaattttgtcatccctgagacagcaacaggagggcaccaacttaccggacgttccaaataagagtgcgccttctcccacttcaaactctacgtatcttacaatgaatgctgcctcacgtgagattcctaatactactgtctcgaactttagagggtcgatgggaaactcaatcatgcgccccaatagtagtgcttctaaattctctcccatgagttacccccagatgaagcctaaatccccccacaactctggcctagtgaacctaacagagaggagcagatatggcatgacagacatgactaactctagcgcagaccttgaaacaaattcgatgcttaacgatagtagcagcgatgaagagttgaacgaaatcgatagtgagaacgggctaagcgcaatggatcaccagactagcggactcagcgcggagcagctgatggggagcgatgggaataagctgctggagacaaagggaatcccctttcgccggttcatgaacaggttccagtgtcctttttgcccattcctcaccatgcatagaaggtctatttcccggcatattgaaaatatacacctttctggtaagacagccgtatacaagtgcgatgagtgtcccttcacttgcaagtcctcgctcaagctgggggcccacaaacagtgtcataccggaaccaccagcgactgggatgctgtcaattcgcagagcgagagtatcagctccagcctcaacgagggggttgtgtcctatgagagttctagtattaatggccgcaagtccggcgtcatgctcgatccactgcaacaacaacaaccacctcagccgcccccccccccaccaccaccaccgcctagtcagccccagcctctgcaacaacctcagcccccccaacttcagcctccccaccaggtgcctccccagccccagactcagccgcccccaactcagcagcctcagccgcctacccaagctgctccattacacccctacaagtgcactatgtgcaactatagcacaaccacgctgaagggtctcagggtgcaccagcagcacaagcactctttttgcgataatttacccaagtttgagggtcaaccctctagccttccactggaaaacgaaaccgactcccatcctagctcctcgaataccgtgaaaaaaagtcagacatcgatcctcggattgtcctccaaaaataacttcgttgctaaagcaagccgcaaactggctaatgactttcctcttgacctctctccggtcaagaagagaactaggatcgatgagatcgcctcgaacctgcagagtaagataaaccaaacaaagcaacaggaggacgctgtaataaacgtcgaggacgacgaggaggaggaggaggataacgaggtcgaaatcgaggtggaacttgatcgcgaagaagaacccactgaacctatcatcgaggttcccacgtcattttccgcccaacagatttgggtgcgggatactagcgagccacaaaaggagcctaatttccgcaacatcacccacgattacaacgctactaatggagcagagatcgagttgaccctcagcgaggacgaagaggactattacggctcaagtacaaacctgaaggatcaccaagtatctaacactgcgttgttaaacacacagactccaatctatgggactgaacacaattcagaaaataccgatttcggcgattcaggccgcttgtattactgcaaacattgcgattttaacaataaatccgcgcgcagcgtctccacgcactaccagcggatgcacccttatatcaagtttagtttccgatacatactggacccaaacgaccattctgctgtctaccgttgtcttgagtgctatatcgactacacaaacttcgaagacctgcagcagcattatggtgaacatcaccccgaagcgatgaatgttctgaattttgaccattcagacttgatataccgctgccgattttgttcctacactagccccaatgtaagatcgctcatgccccactatcagcggatgcatcccacagtgaagatcaataacgcgatgatctttagtagctacgtcgttgagcaacaggaagggcttaacactgagagtcagaccctacgcgagatacttaatagcgcacccaagaacatggccacctccacaccagtggcccggggaggaggcctcccggctacctttaacaaaaatactcccaaaacattcacacccgagtgcgagaaccagaaagatccactggttaacactgtcgtcgtctatgattgcgacgtgtgctctttcgcctcacctaatatgcattcagtgctcgtgcattatcagaaaaagcacccagaggagaaagcctcctactttagaatccaaaagacaatgcgcatggtctccgtcgacagaggctctgccctttcgcagctgagcttcgaagttggcgctcctatgtcccctaaaatgtctaacatgggctccccaccccccccccaaccccccccacccgatctgtccacagagctgtactattgcaagcattgcagctattccaacaggtctgtcgtcggagtgctcgtacactatcaaaagaggcacccagagatcaaagtcaccgcgaagtatatacgccaggcacctccaactgctgccatgatgcggggtgttgaaggaccccaggggtccccaaggccgcctgcacccatccaacagctcaatagatcgtccagcgagcgggacggcccccccgtggagaacgaaatgtttttctgccagcactgcgactacggaaatcggactgtgaaaggcgtgctcatccactatcagaaaaaacaccgcgacttcaaagcaaatgccgatgtgatcaggcagcacacagcgaccatccgaagcctttgtgaccggaaccagaagaagccagcatcttgcgtcctggtttcccctagcaacctagagagggataagaccaagctgcgggcacttaagtgcaggcagtgttcctacacctctccatatttttacgctcttaggaaacacattaagaaggaccacccggccctaaaggccacagttacttctattatgagatgggccttcttggacggactgatcgaagctgggtatcactgcgaatggtgcatttactcacataccgagccaaacggtcttctcttgcactatcagaggaggcaccccgaacactacgtggactacacttatatggccactaaattgtgggccgggcctgacccctcacccccgtcgctcaccatgcccgccgaggcaaagacttaccgctgtcgcgattgtgtgttcgaagcggtgagtatctgggatatcactaatcactaccaggcttttcatccttgggctatgaacggcgatgagagtgtccttctcgatattattaaggaaaaggatgccgtcgagaagccaatactcagcagtgaagaattagccgggccagttaattgcgaaaatagcattcccacgccttttcccgagcaggaagctgaatgtcccgaggacgcacgcttaagtccagaaaagtccctccagttggccagcgccaatcccgctatcagtagcaccccctatcagtgcactgtgtgccaaagcgagtacaacaatctgcacggactcttgacccactacgggaaaaaacatcccggtatgaaggtgaaggcggccgatttcgcccaagatattgatataaaccctggagccgtatacaagtgccgccattgtccgtatattaacaccaggatacacggtgttcttacacactaccagaagcgacacccttctattaaggttacagcagaagactttgtgcacgatgttgagcaatccgccgacatcagccagaacgatgtcgaagaaacgtctcgtattttcaaacaaggttatggcgcataccgctgcaaactctgtccttacacacacggtacgctggaaaagctaaaaatccactacgagaagtaccacaaccaacccgaattcgacgtgttcagtcagagtccaccgaaattgccggtgccactggaaccggagatgacaaccgaagtctctccctcgcaggtaagcatcactgaggaagaagtcggcgaggaacccgtcagcactagtcactttagcacgagccaccttgtttctcatactgtgttcaggtgccaactctgcaaatatttttgttcaacccgcaagggcatcgcacgacattataggattaagcacaataatgtgagggcccagcctgagggaaaaaacaacctgtttaaatgtgcactgtgcgcctacaccaatcccattagaaaggggcttgccgcccactaccagaaacggcatgacatagacgcttactatacccactgtctggccgcctcccggactatctctgacaagccaaataaagtgattatcccatcacctccaaaggacgactccccacaactctccgaggaattgagacgcgccgtggaaaaaaagaaatgtagcctgtgcagcttccaatccttcagcaagaagggtattgtgagtcattatatgaaaagacatccaggggtgttcccgaagaagcagcatgcctctaaactcggcgggtatttcaccgcagtttacgcagacgaacacgagaagccaaccctcatggaggaggaagagcgcggaaacttcgaaaaagcagaggtagagggtgaggcgcaggagattgaatggcttcctttccgttgtatcaaatgctttaaactgtccttcagcacagccgagttgctatgtatgcattacactgaccatcactccagagatctcaaacgtgacttcatcatcctgggaaacggtccacgtttgcagaactcgacctatcagtgtaaacactgcgattctaaattgcagtccaccgccgagttgacatcccacctgaacatccataatgaggagttccaaaagcgtgcaaaacgccaggagcgtagaaaacaattgctttccaagcagaaatacgccgacggcgcatttgccgattttaaacaggagcggccgttcggccatttggaagaggtgcccaaaatcaaggagcggaaagttgtgggttataaatgcaaattttgcgtcgaggtgcatccgacccttcgggccatctgcaatcatttgcgcaaacatgttcagtatggcaacgtgccggccgtctctgctgccgtcaaaggactcagatcccacgagcgctctcatctggccctggctatgtttacgcgcgaggataagtactcttgccaatactgttcttttgtgtcagccttcaggcacaacctggaccgccatatgcaaactcatcacggacaccacaagcctttcaggtgcaaactctgttcctttaagtcgagctataattccagattgaagacacatatcctcaaagcccacgcaggcgagcatgcctacaaatgtagctggtgctcattctcaaccatgactatctctcaactcaaggaacacagcctgaaggtccacggaaaagcactgaccctccctcgcccccgcatcgtgtcactgctatccagccacagccatcattcatctcagaaggcgacaccagccgaggaggtagaagattcaaacgacagctcgtactccgagccccccgatgtgcaacaacagctcaatcactaccagagtgccgctctggctcggaacaatagccgcgtaagtcctgttccattaagtggcgcagcggctggaaccgagcagaaaacagaggcggtgctgcactgcgagttttgtgaatttagcagcggttacatccaaagcataaggcgacattaccgggataaacatggaggtaagaaactctttaagtgtaaggattgtagcttctatacaggctttaagtctgcgttcactatgcatgtggaggcaggccactctgcagtgcctgaggagggtcctaaagatctaagatgtccgctttgtctctaccataccaaatataagaggaatatgatcgatcatattgtgctacacagagaggagcgggtggtgcccattgaggtgtgcaggtctaaactgagtaagtacttacagggcgtggttttccgctgcgacaaatgtacattcacctgctcgagcgatgagagtttgcaacagcatatagaaaaacacaatgaactgaagccctacaaatgtcagctctgctattatgaaaccaagcacactgaggagttagattctcacctgagggacgagcacaaggtcagccggaatttcgagcttgtgggccgggtgaacctggatcagctggaacagatgaaggagaagatggagtcttcctcctcagacgacgaggacaaggaagaagagatgaatagcaaagcggaagatagagaattgatgcggttttcggaccatggagccgcgttaaatacggagaagagattcccctgcgagttctgcggccgagccttctcgcaaggcagtgaatgggagagacatgtgctgcgccacggcatggctctaaacgataccaaacaggtgagtcgagaagagattcatccgaaggaaatcatggagaactcggtgaagatgccaagcatcgaagagaaggaggacgacgaagccataggtatagacttttcacttaagaacgaaacagtagccatctgcgtggtaactgcagacaaatcccttctggaaaatgctgaggcaaaaaaagagtag

SEQ ID NO: 208718 - DNA, 7521 bp, Artificial Sequence
  derived and/or modified sequence
atggaagttctgcaatgcgacggctgtgacttccgtgctcccagctatgaagacctcaaggctcacatccaagatgtccataccgcatttttgcagccaacagacgtggcagaggacaacgtaaacgagctccggtgtggatccgtgaacgctagcaaccagaccgaggtggaattctcttccatcaaagatgagtttgcaatcgccgaagacttatctggacagaacgccacatctcttggtaccggcggatactacggccactcccccggatattatgggcaacatattgctgccaatcccaaacccactaataagttctttcagtgcaaattctgcgttcggtactttagaagtaaaaatcttttgattgagcatacccggaaggtgcacggagcccaggcagagggctccagcagcggacctcccgtacccggatctctgaactataatattatgatgcatgaaggctttgggaaagtcttcagctgccaattctgtacttacaaaagtcctagacgggctagaatcatcaagcaccaaaagatgtatcataagaacaatcttaaagaaaccaccgctccccctcctgctcctgccccaatgcctgacccggtggtgccaccagtgagtctgcaggacccttgtaaggaactgccagcagaggtcgtagagcggagtattctggaatcaatggtaaagcccctaacaaaatctcggggtaacttctgctgtgaatggtgctcctatcagaccccgcgtcgcgagaggtggtgcgatcacatgatgaagaagcataggtcaatggtcaagattttaagcagcctcagacagcagcaggaggggaccaacttgccagacgtgccaaacaagtccgccccttccccaacatctaatagcacatacctgactatgaatgcggcaagtcgggagattcccaacacgactgtgtccaactttcgtggtagcatgggcaatagtattatgagacccaacagctccgcttccaagttcagccccatgtcttacccccaaatgaagcccaagagcccacataacagtggcctggtgaacctcaccgagcgcagcaggtacggcatgacagacatgaccaactccagcgctgatctggagactaacagtatgctcaacgattcctcctcagatgaagagctgaatgaaattgatagtgagaatggccttagtgccatggatcaccagacttccgggctaagtgctgaacagctgatggggtccgatgggaataagctgctcgagaccaaaggcatcccatttcgtcgcttcatgaaccgatttcagtgccccttttgtccttttctcacaatgcaccggcgtagtattagtcggcacatcgaaaacatccatttgagtggcaaaacagctgtgtacaagtgtgatgaatgcccgtttacctgcaagagctccctcaaattgggcgcacacaagcagtgtcatactggaaccacttccgattgggatgccgtgaactcgcagtcagaatcaataagcagctcactgaacgagggggtcgttagttacgaatcgtctagcattaatggtcggaagagtggcgtgatgctggacccccttcaacagcaacagccgcctcagccaccgcctccccctccaccaccgcctcctagccagccccagcccctccagcagccccagccgcctcagctccaaccaccccatcaggtcccgcctcagcctcaaacccaacctcctcccacgcagcagccacagcccccaacgcaagccgctcctttacatccctacaaatgtaccatgtgcaactactctacaaccactctaaagggactgagggtccaccaacagcataaacactccttttgtgacaatttacccaaatttgaaggccaacccagtagcctcccactcgaaaatgaaacagattcccatccaagcagcagcaacactgtcaagaagtctcagacctctattctgggccttagttccaagaacaatttcgtggctaaggcctcgaggaaattggccaatgatttccccctcgatttgtcgcctgtcaagaaaagaacccggattgacgaaatcgccagcaacctccagagcaaaattaaccaaacaaagcagcaggaggacgccgttatcaacgtagaggatgacgaggaggaggaggaggacaacgaagttgaaatcgaggtagagttagaccgggaggaagagcccactgagccaatcatcgaggtgcccacaagcttttccgcacagcaaatctgggtccgcgatacaagcgaaccccagaaagaaccgaacttcaggaacattacccacgattataacgccactaatggggcagagattgaactgactcttagtgaagacgaggaggattattatggaagctccactaacctcaaggatcatcaggtgagcaacacggcacttttaaacacccagacaccgatctatggcacagaacacaattcggagaatactgacttcggggattccggcagactttattattgtaaacactgcgatttcaacaacaaatccgctaggtctgtgtccacccactaccagcgcatgcatccctatataaaattctctttccggtacatactggaccctaatgaccatagcgccgtttacaggtgcctagagtgctatatcgactacactaatttcgaagatctgcagcagcattacggtgagcatcatcccgaggctatgaatgtcctcaattttgatcacagcgatctgatttatagatgcagattctgttcttatacaagtcctaatgtccggtctctcatgccgcactatcagaggatgcatccaactgtgaaaatcaataatgccatgattttcagttcgtatgtggtggagcaacaggagggtctgaacacggagagtcagaccctacgagaaatacttaattctgcacctaaaaacatggcgaccagtacgcctgtggccagaggcggtggtctgccggctactttcaataagaacacccctaagaccttcactccggagtgcgagaatcagaaagacccgctcgttaacaccgtcgtggtttacgactgtgatgtctgctcattcgcttctccgaacatgcattccgtcctggtccactaccagaagaaacatccagaggaaaaggcttcatatttccgcattcagaagaccatgaggatggttagcgtcgatagaggtagcgcactctcacagctctcattcgaagtgggagcaccaatgtctccaaagatgtcaaatatgggtagcccgcctccccctcagcccccacctccagatctctccaccgagctgtactattgtaaacattgtagctattccaataggtctgtcgttggagtgctcgtacactaccagaagcgccaccccgaaattaaggtgactgccaagtatatcagacaagccccacctaccgcagccatgatgcgcggagtggagggaccccaggggtccccaagaccaccagccccaattcaacagctgaatagaagttctagcgagagagatggccctcccgttgaaaacgagatgttcttctgccagcactgtgattatggcaatagaacggtgaagggagtgttgattcactaccagaagaaacaccgagatttcaaggctaacgccgacgtcattaggcagcacactgcgaccattaggagcctgtgcgaccggaaccagaaaaaacccgcatcctgtgttttggtatctccctctaatcttgagcgtgacaagacgaaattacgcgctctcaagtgccggcaatgctcttacactagcccttatttctatgcactcaggaagcacataaagaaagaccatccagccctcaaggctaccgtcacctcaatcatgcgctgggccttccttgatggcttgatcgaggcaggctaccactgtgagtggtgcatctattcacatactgagcccaatggtcttcttctccactaccagagaaggcatcccgagcactacgttgactatacttacatggcaaccaagctgtgggcaggaccggacccctcccctccctcattgactatgccggcagaagccaagacatataggtgtagagactgtgtgtttgaagccgtgtccatctgggacatcactaaccattatcaggcatttcacccgtgggcaatgaatggtgacgaatccgtgctgcttgatatcatcaaggagaaggatgccgtagagaagcccatcctgagcagcgaagaactcgccggaccagtcaattgtgaaaattccatcccgacgcctttcccagagcaagaggcggagtgtcctgaggatgcccgacttagccccgaaaagagtctgcaacttgcttcggccaaccctgccattagttcaactccataccaatgcacagtctgtcagagcgagtataataatctgcacggattgctgacccactacgggaagaaacatccgggaatgaaagtgaaggcagctgattttgcccaagacatagatattaatcccggtgccgtctacaaatgcagacattgcccttacatcaacacacgcatccacggcgtgctgactcactaccagaagaggcatcctagtataaaggtaaccgccgaagatttcgtgcacgatgttgaacagtccgccgacatatctcagaacgatgtcgaggagacctctaggattttcaagcagggatacggggcatatcgatgtaagttgtgcccctatacccacggaaccctggaaaaattaaagatccactacgaaaagtaccacaaccagcctgaattcgacgtgttctctcagagccccccaaagctgcctgtgccgctcgagcctgagatgaccactgaggtgagcccttcacaggtttcgattaccgaagaggaggtcggggaagaacccgtctcaacttctcactttagcacgagtcatctcgttagccataccgtgtttagatgccagctgtgtaagtacttttgctctacccgtaaaggcatcgccagacattaccgcatcaaacataataatgtgcgagctcagccagagggcaagaataacctgttcaagtgcgctctatgcgcctacacgaacccaataaggaagggtctggctgcccattatcaaaaaaggcatgacatcgacgcctactacacacattgtctcgccgcttccaggacaataagcgacaaacccaataaggtgataataccaagtccgccaaaggacgacagccctcagttgtccgaggaactgagacgtgccgtggagaagaagaaatgtagtctgtgctcctttcagtcttttagcaaaaagggaatcgtctctcattacatgaaacgacacccaggagtctttcctaagaaacagcatgcgtccaagttgggaggttatttcacagccgtctacgctgacgagcacgaaaaacctacactaatggaagaagaggagcgaggcaacttcgagaaagcggaggtagaaggggaggcgcaagagattgaatggctgccattccggtgtatcaaatgttttaagctgtcctttagcactgcggaacttttgtgcatgcactatacggatcatcactctagagacctcaaacgagattttataatcttagggaacggccctcgcctgcagaacagtacttaccagtgtaagcactgtgatagtaaactgcagtccacagccgaacttacaagccacctaaacatccacaatgaagagttccaaaaacgggctaagagacaggaacgccgtaaacagctcctgtccaagcaaaagtatgccgacggagcctttgctgactttaagcaagagaggcctttcgggcatctggaggaggttcccaagatcaaagagagaaaggtggttggatataagtgtaaattttgtgtcgaggtgcatccgacgttgagggccatttgcaaccacctgcgaaagcatgtgcagtatgggaatgtaccagctgttagcgctgcggtcaagggactccgcagtcatgagcgatctcacctggcactggcgatgttcacgcgcgaagacaaatatagctgccagtactgttcttttgtttcggctttcagacataatcttgacagacatatgcagacccatcacggccatcataaacctttccgttgcaagctgtgttcattcaagagcagttacaacagtcgcctgaaaacccatatcctcaaagcgcatgctggggaacatgcttacaagtgctcttggtgctcgttttcgaccatgacaatctcccagctcaaggagcactctttgaaggtgcacggaaaagcacttaccctccctagacccaggatcgtgtcattgctgagctcccatagccaccacagtagccagaaagccaccccagcagaggaggtggaagattcaaatgactcaagctattctgagcctcccgacgtccagcagcaactgaaccattaccaaagtgccgcactggccagaaataactcccgtgtgagtcctgtgccactgagcggcgcagctgctgggaccgaacagaagaccgaggctgttctgcactgtgaattctgcgaattcagcagcggttatattcaaagcatccgcagacactacagggacaaacacggaggaaaaaagttattcaagtgtaaggattgctcattctacaccggtttcaaaagtgcgttcaccatgcatgtcgaggccggtcattctgcagtgcctgaggaaggaccaaaggatcttagatgcccattgtgcttgtaccacaccaagtataaaagaaacatgattgaccacatcgtcctccacagagaagagagagtcgtacctattgaggtatgccggtcaaaactctcaaagtatttgcagggagtagtcttccgatgtgacaagtgtacatttacctgctccagcgacgagagcctgcagcaacacatagaaaaacacaatgagttaaaaccctataaatgccagctttgctattacgaaactaagcataccgaggagctggattcgcacctgcgcgacgagcacaaggtatccaggaattttgagctggtagggcgtgttaatctggatcagctggagcagatgaaggaaaaaatggaatctagtagttccgacgacgaggacaaggaggaggagatgaatagtaaggccgaagaccgggagcttatgcgcttctccgaccatggagccgcactcaatactgaaaagaggttcccttgtgagttctgcgggagagctttctcccaggggtctgagtgggagaggcacgttcttagacacggaatggctctcaatgacacaaaacaagtgtctcgggaagagatccatccgaaggagattatggaaaacagcgttaagatgccttcgatcgaggaaaaagaggacgatgaagccatcggaattgatttctcacttaaaaatgagaccgtggccatctgcgttgtcaccgcagataagtccctgctggaaaatgctgaggcaaagaaggagtaa

SEQ ID NO: 208719 - DNA, 10414 bp, Artificial Sequence
  derived and/or modified sequence
ggagagggagggagggagagagagagagagggagagagacggatatctcaggtcatctgcagctgcagcgagtctgaggagccgaggaaggcagggaagatggcgatcctccattgctgagacccggcagaagcacatgagactcccaaacaacttccacaacaataacccgagcaggaagaggagaaagagaaagaggataaggaggcggtggggctggagaacccgaagcacctcccggcgccgggacgcttcttctgttcctaatgtgagaggctagacccagatcatggaggtgcttcagtgtgatggctgtgatttccgagccccgtcttatgaagatctcaaggcacacattcaggatgtccacacggcatttctgcagccaactgatgttgctgaggacaatgtgaatgagctacgatgtgggtccgtgaatgccagtaatcagacagaggtggagttttcttctataaaggatgaatttgccattgcagaagatttatcaggtcaaaatgcaacttcattggggaccggaggttactatggccacagtccaggatattatggtcagcatattgccgctaatcccaaaccaacaaacaagttttttcaatgcaagttctgtgtacgctacttcaggtcaaaaaacctcctcatagaacacactagaaaggtccatggagctcaagctgaagggagttcatcaggaccccctgtcccgggatccttaaattataatatcatgatgcacgagggatttggaaaggtcttctcttgccagttttgcacatacaagtcaccaagaagggcaagaataattaagcatcagaagatgtatcacaaaaacaatttgaaggagaccactgctcccccacctgctcctgctccaatgccagaccctgtggttccgcccgtatcactgcaggacccctgcaaggaactgccagcagaggttgtggagcgcagcatcttagagtctatggtcaagcctttgaccaaatctcgaggcaacttttgttgtgagtggtgcagctaccagaccccccgccgagaacgctggtgtgaccacatgatgaagaaacaccgcagtatggtcaagatcctttccagtctcagacagcaacaagaaggaactaatctacctgatgtgccgaacaagagtgcccccagccccacttccaactccacctatctgaccatgaatgctgcaagccgggagatacccaatactaccgtctccaacttcaggggctccatgggcaactccatcatgagacccaattcttcagcttccaagttttcgcccatgtcttaccctcagatgaagccgaagtcacctcacaattctggtctagttaacttgacagagagatcccgttatggaatgactgacatgaccaattcttctgctgacctggaaactaacagcatgctaaatgactctagttctgatgaagagttaaatgaaatagacagtgagaatggtttaagtgctatggatcaccagacatcaggcctgtctgcagagcagctgatgggctcagatggcaacaaattattggagaccaaggggattccatttagaagattcatgaataggttccagtgccccttttgtcctttcctcaccatgcatcgacgtagcatctctcgtcacatagaaaacatccacttatctggaaagacagctgtctacaaatgtgacgaatgtccgtttacttgcaagagctcgttgaaacttggggctcacaaacagtgtcacacgggtacaacgtcagattgggatgctgtgaattcccagagtgaaagcatttcttcctcactgaatgaaggtgtggtgtcttatgagagctcaagcatcaatggtagaaagtcaggagtcatgttggatcccttgcagcagcaacagccaccgcagccaccaccaccgccgccgccaccaccaccatcacagccacagccactgcagcagccacagccaccacagctgcagccaccacatcaggtgccaccccagccacaaacacagccaccaccaacgcagcagccacagccacccacacaagccgcacctctgcacccatacaaatgcaccatgtgtaattactccaccacaactctgaaagggctaagagtccatcagcagcataaacattcattctgtgacaacttgccaaaattcgaggggcagccctcaagcctaccattggaaaatgagacagacagccacccctcttccagcaacactgtgaagaaaagtcagacctcaattcttgggttgtcctccaagaacaattttgtagctaaagcctctaggaagctcgccaatgactttcctctagatttgtcacccgtgaagaagagaaccaggattgacgagatagcaagcaaccttcagagcaaaattaaccaaaccaaacagcaggaagatgcagtgatcaatgttgaggatgatgaagaggaagaggaagacaacgaagtcgagatagaggttgagttggacagggaggaagaaccgacagaacccatcatagaggttcccacttccttttctgcccaacagatatgggtaagagataccagtgagccccagaaagagcccaacttcagaaacatcacccacgattacaatgccaccaatggggctgagattgagctcaccctttctgaagatgaagaggattattatggctcctcaacaaacttgaaagatcaccaagtttccaatactgctctgctgaatacccaaactcccatctatgggactgagcacaatagtgaaaacacagactttggtgactctggaaggctttactattgtaaacactgtgactttaacaacaaatctgcccggagtgttagcacccactaccaacgaatgcacccatacattaaattcagctttaggtacatcttggaccccaatgatcacagtgcagtgtacaggtgcctggaatgctacatcgattacaccaacttcgaagatctccagcagcattatggcgagcaccacccagaagccatgaatgtactcaactttgatcactcggacctgatctaccggtgtcggttttgttcatacacgagcccgaatgttagaagcctgatgccacattaccaaagaatgcatcccacggtgaagatcaacaacgcgatgatattttcaagctatgtcgtggagcagcaggaagggctgaatacagaatcccagaccctgagggagattctgaattcggctcccaagaacatggcgacttccacacctgtggctcgtggtggtggtttgccagctacgttcaacaaaaacactcctaagacctttactcctgaatgtgaaaatcagaaggaccctttggtcaacactgttgttgtttatgattgtgatgtttgttcgtttgcaagccccaacatgcattctgtcttggttcattatcagaagaaacaccccgaagaaaaggcttcctactttaggatccagaaaactatgcgaatggtgtctgtggacaggggctctgccctttctcaattatcatttgaggtgggtgctccaatgtctcccaaaatgtccaacatgggttccccaccccccccacaacccccgccaccagacctcagtactgagctttactactgcaaacactgttcctacagcaatcggtcagttgtgggagtgcttgtccactaccagaaaagacacccagaaataaaggttactgccaaatatatcagacaggctcctcccacagctgcaatgatgagaggggtcgaagggccccaaggctccccccggccacccgcccccatacaacagctgaaccgaagcagctctgagagagatggccctcctgtggagaatgagatgttcttttgccagcactgtgattatgggaaccggacggtcaaaggggtactcattcattatcagaagaagcaccgagacttcaaggccaatgcagatgtgatccggcagcatacggccaccattcgaagcctctgcgaccgaaatcagaagaagcctgccagctgcgtgcttgtctccccctctaatctggagcgggacaaaacgaaactccgagcactcaaatgtaggcagtgctcatatacctccccctacttctatgcactgaggaagcatatcaagaaagaccaccccgccctgaaagccacagtcacgtccatcatgcgatgggcatttctagatggcttgatagaagctggctaccactgcgagtggtgcatctactcccatacggagcccaacggtttgctcctgcattaccaacggaggcatccagaacactatgttgattacacctacatggctactaaactgtgggctgggccagacccatcccctccctctctcacaatgccagccgaagccaaaacctacagatgcagggactgtgttttcgaagctgtttccatctgggacatcactaatcactaccaagcattccacccctgggccatgaatggtgatgagtcagtgctactggacatcatcaaggagaaagatgctgtggagaagcccattctttcatccgaagagttggcaggccctgtgaattgtgaaaacagtatacccacccctttcccggagcaggaagctgaatgtccagaggatgcaagactgtcccctgagaaaagcctgcagctagcttcagccaaccccgccatatcctccaccccataccagtgcacggtatgccaatctgagtataacaacttgcacggccttctcactcattatgggaagaagcaccctggcatgaaagtgaaggctgctgactttgcccaggacattgacatcaacccaggtgccgtctacaaatgcaggcattgcccatacatcaacacccgcatccacggcgtactgacccactaccagaagcgacacccgtccatcaaggtgaccgctgaggactttgtgcacgacgtagagcagtctgctgacatatcccagaatgacgtggaggagacgagcaggatcttcaagcaagggtatggcgcctaccggtgcaaactgtgtccgtacacacacggcactttggagaaactaaaaatccactacgagaagtatcacaatcagcctgaatttgatgtcttttcccagtcgcccccgaagctgccagtccccctcgagcccgagatgaccactgaagtgagcccttcccaagtctccatcactgaggaggaggtgggagaggagcccgtgtccacttctcacttctctacctcccacctggtctcccacactgtgttccggtgccagctctgcaagtacttctgctccacgaggaaggggatcgccaggcactaccgcatcaagcacaataatgtccgagcccagccagaaggcaagaacaacctcttcaagtgtgccctgtgtgcctacaccaaccccatccgcaaaggtctggcagcccactaccagaagcgccacgacattgatgcgtattacactcactgcttggcagcctccaggaccatcagcgacaagcccaacaaagtgatcatcccatccccgcccaaggacgactcccctcagctgagcgaggaactccggcgggcagtggagaagaaaaagtgctccttgtgctctttccagtcgttcagcaagaagggcatcgtgtcccattacatgaaacgccacccaggggtgttcccaaagaagcagcacgccagcaagttggggggctacttcacggccgtctatgcagatgagcatgagaagcccacactgatggaagaagaggagagaggcaactttgagaaagccgaggtggagggtgaagctcaggaaatcgagtggctcccattccgctgcatcaaatgcttcaagctgtcctttagcactgcagagctgctgtgcatgcattacactgaccaccacagtcgggacctaaagagggacttcatcattctgggcaacggcccccgcttgcagaactccacctaccagtgtaagcactgtgatagcaaactgcaaagcacagccgagctgacctcacacttgaacattcacaatgaggaattccagaagcgtgccaaacgtcaggagaggaggaaacagcttttgagcaagcagaaatatgcagatggtgcttttgcagatttcaaacaagagaggccttttggtcacttagaagaggtgccaaagatcaaggagaggaaagtggtgggctacaaatgtaaattctgtgtggaagtgcacccaacgctccgagccatctgcaatcacctccgaaagcacgtccagtatggcaatgtcccagctgtgtcagctgctgtgaaggggctgcgttctcatgagaggagccacctggccctggccatgtttacccgcgaggacaagtacagctgccagtattgctcgtttgtttctgctttcaggcacaatttggatcgccatatgcaaacccaccacggacaccataaaccattccgatgcaaactctgctccttcaagtcctcctataacagccggctgaaaacacatatactcaaagctcatgctggtgagcatgcctacaagtgttcttggtgctcattctccaccatgacaatcagccagctgaaggaacactccctcaaggtccacggaaaagccctgaccctccccaggccacggatcgtcagtctcctctcctcacactcccaccactcctcccaaaaagctaccccggctgaagaagtggaagactccaatgactcatcatattcagagcccccagatgttcagcagcagttgaaccactatcagtcagctgccctggcaaggaacaacagccgtgttagccctgtgcctctttctggggctgctgctggcactgagcagaaaactgaagccgtgcttcactgcgaattctgtgaattctcctccggctacatccagagcatcaggcgtcattaccgggacaagcatggtgggaagaagcttttcaagtgcaaagactgctccttttacacaggctttaaatctgcttttactatgcacgtggaagctgggcactcagcagttcccgaggagggccccaaagatcttcgctgtcctctctgcctctatcacaccaaatacaagcgcaacatgattgaccacatcgtgctgcaccgagaagagcgtgttgtccccattgaagtttgccggtccaaactgtccaaatacttgcagggagtagttttccgctgtgataagtgtaccttcacctgctccagtgatgagagcctccagcaacatatagaaaagcacaatgaactgaaaccttacaaatgccagctctgctactatgagaccaagcacacggaggaactggacagccaccttcgggatgagcataaggtaagccgtaactttgagctggttggacgggttaacttggatcagctggaacagatgaaggagaaaatggagagctccagcagcgatgatgaggacaaggaagaagaaatgaacagcaaggctgaagacagagagctgatgagattttctgaccacggggctgctcttaacactgagaagcgttttccatgtgaattttgtggacgggcgttttcacagggctctgagtgggaaagacatgtgctgagacacggcatggcattgaatgacaccaagcaggtgagcagagaagaaatccacccaaaagagatcatggagaacagtgttaaaatgccctccatagaggaaaaggaagatgacgaggccattgggatagacttttccctaaagaatgaaacagtagccatctgtgtagtaactgccgacaaatctctcctggagaatgcagaggccaaaaaagaatgagcgtttggtgaaattcttaatcaaaccttacttgaacagtgatgaaaaagtgggagggctggcttgggctgagaagggagggacagaaaagagaagacagaacaaagctgctttttaggactgaacaatctattttcaaagcactggtacctgtgtgagtgagtatgtaaattaaagttatttaaatggttggaatatgtggctccttttccatcactacatcttttcttccggatcttcatcatggaagtttcatttgttgcggaatatggaagcacctcccaatggtacggtgcaccctgtggtggtcttggacagtatgtggaaacagaagctccatgacggtagaagacttctcattggggagcaactttttgacgcacaacttttggtgcgtttttctagttttaataccttaagctttttcaagacctaactgcagccgctttgggaaaaaaaaacaaaaaacaaaaaacagaaaacaaaaaaaaaaaaactgctttgcataaaacagtcacctgtttcctagtacctcaaacttaaccaagggaactctctgcatttgtcagtactacctgtcgtcgttgtggttaaatgtagagagaactgctgggcaagatggtgaatggagaaaaaaaaagagttttaaagaaaggaacacaaattgtgcttaaaatccccatgtgggttttatttcttaaaatactgtgatttttttaattattttagtaaaaaacaaaacaaaaaaaagaaacagactttaattattagataactgtttgtgaattgtcatcctttattccaggtaagctgtttattagtgttcaactataatttagaatttggtagattcatgtgagctaattttaaggtgattgtggagttttgtttgccacatgtttattttctatcaatttgagtgttacaaacacagcacaattcagtttttcatatgaattgtttttcgtgtgtgtgttgttattgttgttttaatttcggggcaagggagatttagttttttgtgaataggaatgtttttattttaaacatggaaataacaaagaagttaactttcttttttttttttttttttttttttaatttaactaaagaaccaaactttcggcacagctatgcagcttgtgggccagacgaggaggtcctcctcacccttttgttgcctgtcaaattcacgcattatccgtctcataaataatttctgttaggattggctggcttttgtgtgtgattttaaaatctgtgttttgtttctgctggcattgtgttttgttgggggttttcatttatttaggggacgaggggatgtactagaatcccatccctttcgtgagagtggacaagaaataacatatcctacaaggagcctggagaactactttctttctttctttttttttttttttttttttttttaaatctagctgccagctgctctgtcccccatatcagctttttcaggagggagcagcttagactaaatctaagcctacatttataatatgttctgattgtgaacaaagggtttcgttccaaaaaatagaaaagaacttttcttgaagcctaggttttagaagcccgtgtgtgtgtgtgcttggatgtgtgtgtgcgtgtatgagtgtgtgtgtgcatgtgtgcacgtgtgaatcctttggttttcatgtttttttttttttttttttacttggaagggttgtgggagggtgggagggaagaaagggaaggggaattgctgagatgacagtgtcccacacagcttcaaataaaatccatggaaagatgttgcatttgtggaataagtgcttacttgaaaagcatgttcttcttttattttcttactgttaagaatttttatttgtaggatgtttgttttaatttaatttttttaagggatgggggccatcatgtggaaaccagaaaatggggaaagtgtgaactatccagacaaagattcattttgtgtctatatttgtttttaattggcctcatttcaaatgtattaaacagttccatacctggattgggtgtttgtaatggttaccaaaaaacaaacaaaaaaagaaagaaaaaggaaaaaaaaaaagaaaataattgtgacatgcttttatcactactttatttttcaaataacatgtaaatattgtaatccattggattttgttttgctaacctgttaataaaaatatgggaccattatccttttaacaaggctagaatgtcatttttttctttttcaaacatatacctgatattttgtggccgcacattttggatgcattattataattctgttgactgtaatgacatagaatttacaacattttttgttgttgtttaatttatacagaggacatttttttcagagcttgagagaagaaaataaatagcaaaatgataacctattgactccagtaatcagtgtttcccaatacttcataagagatagggagaccctgagtccttgaagccaagggtttaaaaacaaaacaaaaacaaaaaaaaccacaagtaggttattcaagttgtttgcaacatacattttgtaatgaaatgtgagaaattaataaagaatttttttcacatgtg

SEQ ID NO: 208720 - protein, 248 aa, Artificial Sequence
  derived and/or modified sequence
MKLTFFLGLLALISCFTPSESQRFSRRPYLPGQLPPPPLYRPRWVPPSPPPPYDSRLNSPLSLPFVPGRVPPSSFSRFSQAVILSQLFPLESIRQPRLFPGYPNLHFPLRPYYVGPIRILKPPFPPIPFFLAIYLPISNPEPQINITTADTTITTNPPTTATATTSTSTKPTMTISSSTVPISSTPEPATSISAATPAASTENTTQILANRPHTVLLNATVQVTTSNQTILSSPAFKSFWQKLFAIFG

SEQ ID NO: 208721 - DNA, 1040 bp, Artificial Sequence
  derived and/or modified sequence
aactccaataaaaatccagacagaggtatttaagaagaaaggcttttctatcaaagttctttctcttcttggacttttaaattgtggctacctaaattgagtatctggcaagagtaagattaagcagtaatttgttccaaagaagaatcttctaccaaggagcaactttaaagaatgaaattaactttcttcttgggcctgttggctcttatttcatgtttcacacccagtgagagtcaaagattctccagaagaccatatctacctggccagctgccaccacctccactctacaggccaagatgggttccaccaagtcccccacctccctatgactcaagacttaattcaccactttctcttccctttgtcccagggcgagttccaccatcttctttctctcgatttagccaagcagtcattctatctcaactctttccattggaatctattagacaacctcgactctttccgggttatccaaacctacatttcccactaagaccttactatgtaggacctattaggatattaaaacccccatttcctcctattcctttttttcttgctatttaccttcctatctctaaccctgagccccaaataaacatcaccaccgcagatacaacaatcaccacaaatccccccaccactgcaacagcaaccaccagcacttccacaaaacccacaatgacgatcagctcctcaacagtacctatctcttcaacaccagagcctgccacctccatatcagcagcaacccccgcagcatctactgaaaatactactcaaattctcgccaaccgtcctcacacagtattgctcaatgccactgtccaagttacgacttccaaccaaactatattaagcagcccagcctttaaaagtttttggcaaaaactctttgccatttttggttgaacatgcaataaatgatattttccaaactgctctgatatcttagaagaaataaactgcaatgattttgatggaaccaaccctgatctaaccagcacactaaataaagtatttgagcaata

SEQ ID NO: 208722 - DNA, 747 bp, Artificial Sequence
  derived and/or modified sequence
atgaagctcacctttttcttaggactcttagctctcattagctgctttaccccctccgaaagtcagcgattctcgcgccgaccctacctacctggccagcttccccctcctcccctatatagacccagatgggtaccgccttcccctcctcccccttacgattcaagactgaatagccctcttagcttgccgttcgtcccagggagggtaccccctagctcgttctctcggttttcacaggccgtgatactgagtcagctcttccccctcgagtctattcgacaaccaaggctgttccctgggtacccgaacctgcactttccactgcgcccatactacgtgggaccgataaggatcctcaagcccccatttccacctatccctttctttttggccatttacctgcccatcagcaaccctgagccgcagataaacataacgactgcagacactacaatcacaactaatcccccaacaacggccactgcgaccaccagcacatcaacgaagccaactatgacaatctctagctctacggtacccatttccagtacacccgagccggcaacctcaattagtgccgcaacccccgcagcatcgaccgagaatactacccaaatccttgcaaataggccacataccgtcctgttaaatgctaccgtgcaggtgacaaccagtaaccagactattttgtcgagtcccgcattcaagtccttctggcagaagttatttgcaatttttggctag

SEQ ID NO: 208723 - DNA, 747 bp, Artificial Sequence
  derived and/or modified sequence
atgaaactgaccttcttcctggggctgctcgccctgatctcgtgtttcacacccagcgagagtcagcgcttttctcgtagaccttacctgcctggccaattaccacctccacccctgtaccgccccagatgggtacctccttccccccctccaccttatgacagtagactgaactcaccactctccctacctttcgtgccaggacgcgtcccgccttccagctttagcagattctcgcaagcagtcattctctcacaactgttccccctcgaatccatcagacaacctaggttgttcccaggctacccaaacttgcatttcccactaagaccttactacgtcgggcccatccggatcctgaaacctccttttccccccatcccgttcttccttgccatctatctgccaatttcaaaccccgagccccagatcaatataacgacagccgacaccactatcaccacaaaccctccaacaacggctactgcaactacatccacctcaactaagcccacaatgacaataagcagctccaccgtccctatcagcagtacccctgagcctgctacatccatcagtgccgccacacccgcagcttcaacagagaatacgactcagatactggccaacaggccccacacagtactgctcaacgcgacagttcaagtaacgacctcaaatcaaacgatcctctcaagtcctgcatttaaaagtttttggcagaaattatttgcgatcttcggatag

SEQ ID NO: 208724 - DNA, 747 bp, Artificial Sequence
  derived and/or modified sequence
atgaagttgacattcttcttaggtctgctggccctcatttcctgttttacaccgtccgaaagccagcgattctcccgccgcccttacctccctgggcaactgccacctcctcccctgtacaggccgagatgggtgccaccatcacctcccccaccctacgatagccgcctcaattcacctctgtccctgccattcgttccaggccgggtgcctcccagctcatttagccgcttttctcaagctgtgatacttagccaactattccctctggaatccataagacaacctcgactgttccccggatacccgaatcttcacttccctcttagaccgtattatgtgggacctatccgaatactgaagccgccttttcccccaatcccattctttctggccatctacctccctatctcaaaccccgaaccgcagattaacattaccaccgccgacacaacgatcacaacaaacccgccgacaaccgcaactgccacaacctcaacaagcactaagccaacaatgaccatcagctcgtccaccgtcccaatctcatctacacccgaacccgccacatcgatatcagctgctactcccgccgcctcaacagagaacactacgcagatcctcgcaaatcgccctcacacagtccttctcaatgcaaccgttcaggtgaccacctctaatcagaccatactttcatctccagcattcaagtctttttggcaaaagttgttcgcaattttcggatag

SEQ ID NO: 208725 - DNA, 747 bp, Artificial Sequence
  derived and/or modified sequence
atgaagctgaccttcttcctgggcctgctggccctgatcagctgcttcacccccagcgagagccagagattcagcagaagaccctacctgcccggccagctgccccccccccccctgtacagacccagatgggtgccccccagccccccccccccctacgacagcagactgaacagccccctgagcctgcccttcgtgcccggcagagtgccccccagcagcttcagcagattcagccaggccgtgatcctgagccagctgttccccctggagagcatcagacagcccagactgttccccggctaccccaacctgcacttccccctgagaccctactacgtgggccccatcagaatcctgaagccccccttcccccccatccccttcttcctggccatctacctgcccatcagcaaccccgagccccagatcaacatcaccaccgccgacaccaccatcaccaccaacccccccaccaccgccaccgccaccaccagcaccagcaccaagcccaccatgaccatcagcagcagcaccgtgcccatcagcagcacccccgagcccgccaccagcatcagcgccgccacccccgccgccagcaccgagaacaccacccagatcctggccaacagaccccacaccgtgctgctgaacgccaccgtgcaggtgaccaccagcaaccagaccatcctgagcagccccgccttcaagagcttctggcagaagctgttcgccatcttcggctag

SEQ ID NO: 208726 - DNA, 747 bp, Artificial Sequence
  derived and/or modified sequence
atgaaactgacgttttttcttggactgctcgctctaatctcctgcttcacaccctcagaaagccagcgcttcagccgaagaccctacttaccaggccagctgccacccccccccctttatcggccacgttgggtgccgccaagcccacctccaccatacgactcgcgcctgaatagccccctttcactgccatttgttcccggccgtgtgccgccaagctcattcagtcggttctcccaggcagttattctctctcaactctttcctctcgagagcatccggcagcctagattgtttcctgggtaccccaacctgcatttccctctcagaccctactatgtaggtcctattcggattctgaaaccaccttttcctcctattcctttctttctggccatatacttgcccatctccaatccagaaccccaaattaacatcactacagctgacactacgataacaacaaacccaccgaccactgctacagctaccacctcgaccagcactaagcccaccatgaccatctccagcagcacggtgcctattagttcaactcccgagccggctacgtcaatctctgccgccacccccgccgctagtacagagaacaccacgcagatactggcaaatcggccccatacagtcctgctcaacgctacagtgcaagtgactactagcaatcagactattctcagttctcccgctttcaaaagcttttggcagaagttattcgctatttttggatag

SEQ ID NO: 208727 - DNA, 747 bp, Artificial Sequence
  derived and/or modified sequence
atgaagctgaccttcttcctgggcctgctggccctgatcagctgcttcaccccatctgagagccagcgcttcagccggcggccctacctgcccggccagctgcccccaccacccctgtaccggccccgctgggtgccccccagccccccaccaccctatgacagccggctgaacagccccctgagcctgccctttgtgcccggccgggtgccccccagcagcttcagccgcttcagccaggccgtcatcctgagccagctgttccccctggagagcatccggcagcccaggctcttccctggctaccccaacctgcacttccccctgcggccctactacgtgggccccatccgcatcctgaagccacccttcccccccatccccttcttcctggccatctacctgcccatcagcaaccctgagccccagatcaacatcaccacagctgacaccaccatcaccaccaacccccccaccacagccacagccaccaccagcaccagcaccaagcccaccatgaccatcagcagcagcacagtgcccatcagcagcaccccagagcccgccaccagcatctctgctgccaccccagctgccagcacagagaacaccacccagatcctggccaaccggccccacacagtgctgctgaatgccaccgtgcaggtgaccaccagcaaccagaccatcctgagcagccctgccttcaagagcttctggcagaagctgtttgccatctttggatag

SEQ ID NO: 208728 - DNA, 747 bp, Artificial Sequence
  derived and/or modified sequence
atgaagctgaccttcttcctgggcctgctggccctgatcagctgctttacgccctccgaatcccagagattctccaggcgtccttacctccccggtcagctcccaccaccccccctgtacaggccgcgctgggtgcctccttccccccctcccccttatgacagcaggctgaactctcccctgtccctgccattcgtaccaggaagggtgcctcctagtagcttctcccgattcagccaagccgtcattctctcccagctatttcctttagaatccatcaggcagcctcgcctttttccagggtaccccaacttacattttcccctcagaccgtattatgttgggccaatcagaattctgaagccaccgttcccccctattccatttttcttggctatatacctgcccatctcaaacccggagcctcagattaacattaccacggccgatacgacgatcacaaccaatcctcccacaacggccacagccactacctcgactagcaccaagcctacaatgactatctcctcctcaactgtgcccatctcctcaacacccgaacctgccacgagcatttcggcggctactcccgccgccagcaccgaaaacactacccagattctggctaataggccccataccgtgctcttgaacgctacagttcaggtcaccacttcaaatcagactattctgtcctcccctgcatttaaaagtttctggcaaaaactgtttgcaatctttggttag

SEQ ID NO: 208729 - RNA, 747 nt, Artificial Sequence
  derived and/or modified sequence
augaaacugaccuucuuccuggggcugcucgcccugaucucguguuucacacccagcgagagucagcgcuuuucucguagaccuuaccugccuggccaauuaccaccuccaccccuguaccgccccagauggguaccuccuucccccccuccaccuuaugacaguagacugaacucaccacucucccuaccuuucgugccaggacgcgucccgccuuccagcuuuagcagauucucgcaagcagucauucucucacaacuguucccccucgaauccaucagacaaccuagguuguucccaggcuacccaaacuugcauuucccacuaagaccuuacuacgucgggcccauccggauccugaaaccuccuuuuccccccaucccguucuuccuugccaucuaucugccaauuucaaaccccgagccccagaucaauauaacgacagccgacaccacuaucaccacaaacccuccaacaacggcuacugcaacuacauccaccucaacuaagcccacaaugacaauaagcagcuccaccgucccuaucagcaguaccccugagccugcuacauccaucagugccgccacacccgcagcuucaacagagaauacgacucagauacuggccaacaggccccacacaguacugcucaacgcgacaguucaaguaacgaccucaaaucaaacgauccucucaaguccugcauuuaaaaguuuuuggcagaaauuauuugcgaucuucggauag

SEQ ID NO: 208730 - RNA, 747 nt, Artificial Sequence
  derived and/or modified sequence
augaaguugacauucuucuuaggucugcuggcccucauuuccuguuuuacaccguccgaaagccagcgauucucccgccgcccuuaccucccugggcaacugccaccuccuccccuguacaggccgagaugggugccaccaucaccucccccacccuacgauagccgccucaauucaccucugucccugccauucguuccaggccgggugccucccagcucauuuagccgcuuuucucaagcugugauacuuagccaacuauucccucuggaauccauaagacaaccucgacuguuccccggauacccgaaucuucacuucccucuuagaccguauuaugugggaccuauccgaauacugaagccgccuuuucccccaaucccauucuuucuggccaucuaccucccuaucucaaaccccgaaccgcagauuaacauuaccaccgccgacacaacgaucacaacaaacccgccgacaaccgcaacugccacaaccucaacaagcacuaagccaacaaugaccaucagcucguccaccgucccaaucucaucuacacccgaacccgccacaucgauaucagcugcuacucccgccgccucaacagagaacacuacgcagauccucgcaaaucgcccucacacaguccuucucaaugcaaccguucaggugaccaccucuaaucagaccauacuuucaucuccagcauucaagucuuuuuggcaaaaguuguucgcaauuuucggauag

SEQ ID NO: 208731 - protein, 698 aa, Artificial Sequence
  derived and/or modified sequence
MLSPKIRQARRARSKSLVMGEQSRSPGRMPCPHRLGPVLKAGWLKKQRSIMKNWQQRWFVLRGDQLFYYKDKDEIKPQGFISLQGTQVTELPPGPEDPGKHLFEISPGGAGEREKVPANPEALLLMASSQRDMEDWVQAIRRVIWAPLGGGIFGQRLEETVHHERKYGPRLAPLLVEQCVDFIRERGLTEEGLFRMPGQANLVRDLQDSFDCGEKPLFDSTTDVHTVASLLKLYLRELPEPVVPFARYEDFLSCAQLLTKDEGEGTLELAKQVSNLPQANYNLLRYICKFLDEVQAYSNVNKMSVQNLATVFGPNILRPQVEDPVTIMEGTSLVQHLMTVLIRKHSQLFTAPVPEGPTSPRGGLQCAVGWGSEEVTRDSQGEPGGPGLPAHRTSSLDGAAVAVLSRTAPTGPGSRCSPGKKVQTLPSWKSSFRQPRSLSGSPKGGGSSLEVPIISSGGNWLMNGLSSLRGHRRASSGDRLKDSGSVQRLSTYDNVPAPGLVPGIPSVASMAWSGASSSESSVGGSLSSCTACRASDSSARSSLHTDWALEPSPLPSSSEDPKSLDLDHSMDEAGAGASNSEPSEPDSPTREHARRSEALQGLVTELRAELCRQRTEYERSVKRIEEGSADLRKRMSRLEEELDQEKKKYIMLEIKLRNSERAREDAERRNQLLQREMEEFFSTLGSLTVGAKGARAPK

SEQ ID NO: 208732 - DNA, 2097 bp, Artificial Sequence
  derived and/or modified sequence
atgctatcccccaaaatcagacaggcacgccgggctcgatccaaaagcctggtaatgggtgaacagtcacgttccccagggcggatgccatgcccacataggctcggcccggtgttgaaagcaggctggctgaaaaagcagcgttctataatgaagaactggcagcaaaggtggttcgttctgcgaggggatcagttattttactataaagataaagacgaaatcaaaccccaaggcttcatttcactgcagggcactcaggttacagagttgcccccaggccctgaggatcctgggaagcacctgttcgagattagcccaggcggagccggagaaagagagaaagtgcccgcaaaccctgaggctctgctacttatggccagttcccagagagatatggaagactgggtgcaggctatccgtagggtcatctgggcccccctgggaggaggcattttcggccagcgacttgaggagacagttcaccatgaaagaaaatacggccctcgcctggccccactgctggtagagcagtgtgtagatttcattagggagagaggactgactgaggagggattatttcgcatgccaggccaggctaatctggtccgcgacctgcaagattcgtttgattgtggagaaaaacccctgtttgatagtacaacggacgtgcacaccgtggcctcattgctaaaactatacctgagggagttgcccgaaccagtcgtgccgttcgcccgctacgaggacttcctgagttgcgcccaactgctgacaaaggatgaaggcgagggaaccctggaactcgcaaaacaagtgtccaacctcccccaggcaaattataatctgctgcgctacatttgtaagttcctggacgaggtccaggcttattcaaacgtcaataaaatgtccgtacaaaacctggctacagtatttggaccaaatatcctgcggcctcaagtcgaagatcccgttacaatcatggaggggacaagcttagtccagcacctgatgactgtgttgatcagaaagcattctcaactctttaccgccccagtgcctgagggcccaacaagtcctaggggcggccttcagtgtgcagtggggtggggcagcgaggaagtgacccgggattcccagggtgagcctggtggccccgggctgcctgcacacagaacctcttcccttgacggggcggccgtggcagtgctgtcaaggactgccccaaccgggcccggctcgcgttgcagcccaggcaagaaagtccagacactccctagctggaagagctccttccggcagccacggagcctgagcggttcaccgaaaggaggcggatcaagcctggaagtgcctataataagcagcggcggtaactggctgatgaatggattatcatcactgcgaggccatcggcgagcatcctctggggaccgattgaaagactccgggtcagtgcagcgcctgtcgacctatgacaatgtgcctgcgccagggttagtccccggaataccaagcgtcgcctctatggcctggtccggggcatcctctagtgaatcctccgtgggcggatcccttagttcctgcacagcatgccgggcaagcgactctagtgcgagaagtagcttgcataccgactgggctctcgagcctagtccacttccatcgagttccgaagatccaaaaagccttgacctagatcactctatggatgaggcaggtgctggcgcaagcaatagcgagccctctgaaccagactcccccacgagagaacatgcccggaggagcgaagcactgcagggcctcgtgaccgagcttagggccgaactgtgcagacagcgcactgaatatgaacgatccgtgaaaaggattgaggagggttctgctgatctgcgcaaaaggatgtctagactggaggaggaactcgatcaggaaaagaagaagtacattatgcttgagatcaaactgagaaactctgagcgggcacgcgaagacgctgaaaggcgcaaccagctgttgcagagggaaatggaagaattctttagcactctgggttccctgactgtgggagctaaaggagctcgcgctcccaagtag

SEQ ID NO: 208733 - DNA, 2097 bp, Artificial Sequence
  derived and/or modified sequence
atgctgagccccaagatccggcaggcccggcgggcccggagcaagagcctggtgatgggagagcagagccgcagccctggccgcatgccctgcccccaccggctgggccctgtgctgaaggccggctggctgaagaagcagaggagcatcatgaagaactggcagcagcgctggtttgtgctgcggggggaccagctgttctactacaaggacaaggatgagatcaagccccagggcttcatcagcctgcagggcacccaggtgacagagctgcccccaggccctgaggaccccgggaagcacctgtttgagatcagccctggaggagctggggagcgggagaaggtgcctgccaaccctgaggccctgctgctgatggccagcagccagagggacatggaggactgggtgcaggccatcagaagagtcatctgggcccccctgggcggcggcatcttcggccagaggctggaggagaccgtgcaccacgagaggaaatatggcccccggctggcccccctgctggtggagcagtgtgtggacttcatccgggagcggggcctgacagaggagggcctcttcaggatgcctggccaggccaacctggtgcgggacctgcaggacagctttgactgtggggagaagcccctgtttgacagcaccacagatgtgcacacagtggccagcctgctgaagctgtacctgcgggagctgcctgagcctgtggtgccctttgcccgctatgaggacttcctgagctgtgcccagctgctgaccaaggatgaaggagagggcaccctggagctggccaagcaggtgagcaacctgccccaggccaactacaacctgctgcgctacatctgcaagttcctggatgaggtgcaggcctacagcaatgtgaacaagatgtctgtgcagaacctggccaccgtgtttggccccaacatcctgcggccccaggtggaggaccctgtgaccatcatggagggcaccagcctggtgcagcacctgatgacagtgctgatcaggaagcacagccagctgttcaccgcccctgtgcctgagggccccaccagcccccggggcggcctgcagtgtgctgtgggctggggcagcgaggaggtgacccgggacagccagggcgagcccggcggccctggcctgcctgcccacaggaccagcagcctggatggagctgctgtggccgtgctgagcaggacagcccccaccggccctggcagccgctgcagccctgggaagaaggtgcagaccctgcccagctggaagagcagcttccggcagcccaggagcctgagcggcagccccaagggcggcggcagcagcctggaggtgcccatcatcagcagcggcggcaactggctgatgaatggcctgagcagcctgcggggccaccggcgggccagcagcggggaccggctgaaggacagcggctctgtgcagaggctgagcacctatgacaacgtgcctgcccctggcctggtgcccggcatccccagcgtggcctccatggcctggagcggggccagcagcagcgagagctctgtgggcggcagcctgagcagctgcacagcctgccgggccagtgacagcagcgcccggagcagcctgcacacagactgggccctggagcccagccccctgcccagcagcagcgaggaccccaagagcctggacctggaccacagcatggatgaagctggagctggggccagcaacagcgagcccagcgagccagacagccccacccgggagcacgcccggcgctctgaggccctgcagggcctggtgacagagctgcgggcagagctgtgccggcagaggacagaatatgaaagatctgtgaagagaattgaggagggcagcgctgacctgaggaagaggatgagccggctggaggaggagctggaccaggagaagaagaagtacatcatgctggagatcaagctgagaaattctgagcgggcccgggaggatgctgagaggaggaaccagctgctgcagcgggagatggaggagttcttcagcaccctgggcagcctgactgtgggcgccaagggggcccgggcccccaagtag

SEQ ID NO: 208734 - DNA, 2097 bp, Artificial Sequence
  derived and/or modified sequence
atgctgagccccaagatccggcaggcccggcgggcccggagcaagagccttgtgatgggggaacagtcacggtcccccggccggatgccttgcccccaccgcctcggcccagtccttaaagctgggtggttgaagaagcagcgttcaattatgaagaactggcagcagcgctggtttgtactgaggggtgaccagctcttttactacaaggataaagatgaaatcaaaccacaaggtttcatctcactacagggtacgcaggtcacagagctacctcctggaccagaggacccaggaaaacatcttttcgagatcagccctggaggcgctggagaacgtgaaaaggtgcccgcaaacccagaggctctgctactcatggctagtagccaacgggatatggaggattgggtccaggctatcagaagagtaatctgggcgccactgggtggggggatcttcggacaaaggttggaggaaactgtccaccatgaaaggaagtatggccctcgtctagccccgttactagtcgagcaatgcgtcgacttcatcagggaaaggggcttgaccgaggaaggacttttccgaatgcctggacaggccaatctggtaagggacctccaggactcattcgattgtggcgaaaaacctctcttcgactccactactgatgtacataccgtggcctcccttttaaagctgtatctccgcgagttgccagaacctgttgtgcccttcgccagatatgaagattttctaagttgcgcacagctgcttaccaaagatgaaggggaggggactctggaattggcaaagcaggtcagtaatttgccacaagctaattacaatctgctgcgatacatttgcaagtttctggacgaagttcaggcttattccaatgttaataaaatgagcgtgcagaacttagccacggtttttggacccaacatactgaggccacaggttgaggaccccgtgaccataatggagggcacaagcctggtgcaacaccttatgaccgtcctgatccgtaaacattcccagctctttacggcccctgtgccggaaggccctacaagccctagaggcggtctgcagtgcgctgtggggtgggggagcgaggaggttacaagggactcccagggggagcctgggggaccggggttgcccgcacaccggacctcttccctggacggcgcggccgttgctgtcctctctaggacagccccaactggtcccggatcccggtgcagtccagggaagaaagtgcagaccctgccctcttggaagagctctttcaggcagcctcgtagcctctcaggttctcctaagggcggcggatcctcactcgaagtgccgataataagctccgggggcaattggctaatgaacggcctctcctctctgcgtgggcaccgacgggcttcatccggcgatcgcctcaaagacagcggatccgttcagcgcctgagcacgtacgacaatgtgccggccccaggcctggttcccggcataccgtcggtcgccagcatggcttggagtggcgcctcatcctctgaatcttcagtggggggaagcctctctagctgcacagcgtgtcgagctagcgactcctcagctcggagctcactgcacacagattgggctctcgagccatcaccgcttccttcctcatctgaagatcccaaaagccttgatctggaccattccatggacgaagcaggggctggtgcttcaaattctgaaccaagcgaacctgactcacctacaagggaacacgccagacgctcagaagcacttcaagggctggtgaccgagttgcgcgcagagctgtgtcggcagaggaccgagtatgagcggtccgtaaaaagaattgaagaaggatcagcagatctgagaaagaggatgtccaggttagaggaggagctcgaccaagaaaaaaagaagtatataatgctggaaataaagctcaggaactccgaacgggctagagaggatgcggagaggagaaatcagcttctgcagagagagatggaggagttttttagcacactcggttcacttactgtgggcgccaagggggcccgagctcctaaatag

SEQ ID NO: 208735 - DNA, 2097 bp, Artificial Sequence
  derived and/or modified sequence
atgctgtcccccaaaatcaggcaggcgagaagggctaggtctaagtcattggtcatgggagagcagagccgttctcccggacggatgccttgtccccataggcttggaccagtgctgaaggctggctggctcaaaaaacagcggtcaatcatgaaaaactggcagcagcggtggtttgtgcttcgcggagaccaactgttctactacaaggataaagacgaaatcaagccacagggatttatttctctgcaaggtacccaggtcactgaacttccccctggccctgaggacccaggcaaacatttattcgagatctccccaggaggtgccggagaacgtgaaaaggtgccagccaacccagaggctctgttgttgatggctagtagccagagagacatggaagattgggttcaagccatccggagggttatctgggccccactgggaggaggaatctttggacaaagactggaggagaccgtgcaccacgaaaggaagtacggccctcgcttggctcctctgttagttgagcagtgcgtcgattttatccgcgaacgcggactgactgaagaagggctgttccgaatgccaggccaagcaaatctcgtccgtgacttgcaagacagtttcgactgcggcgagaaacccctctttgatagcactactgacgtgcatacggttgcaagtttactgaaactctatcttagagagctccccgaaccagtcgtgccgttcgccagatatgaggatttcctgagctgtgcacagctgcttaccaaagatgaaggcgagggtaccctggaactcgccaagcaggtcagcaaccttccccaggctaattacaatcttctgcggtacatttgtaaatttctggacgaggtgcaagcttattccaacgttaataaaatgtctgtccagaatttggccaccgtgttcggcccaaacattcttcgcccacaggtggaggacccagtaaccatcatggaggggacctccttagtgcagcacctgatgacggtgctgattagaaagcacagccagctgtttactgcaccggttcctgaaggccctactagtccgagaggcggacttcagtgcgctgttgggtgggggtctgaggaagttacacgggacagccagggcgagcctgggggtccgggactaccagctcacaggacaagctccctggacggcgctgccgttgcggttctttcacggaccgctccaactggaccagggtccagatgctctcccggtaaaaaagttcagaccctcccaagctggaagtcctcctttcgtcaaccacgcagcctctcaggctctcctaagggcggaggctcctcactcgaggtgcctattatctcgagtgggggaaactggctaatgaatggcctgtctagtctcaggggacaccgccgtgcatccagcggggaccgcctcaaggactctggttcagtgcaaaggctctctacttatgacaacgtgccagcaccaggcctggtgcccggtattccctctgtggcttcaatggcctggtcaggcgcaagctctagcgagagctctgtcggtgggagcctgtccagctgtactgcatgtagagccagtgattcttctgctcgatcctccctccacaccgactgggcccttgagccttcacccttgcccagtagctctgaggatccaaagagtctggatttggaccattccatggacgaagcaggggctggcgcttccaacagcgagccttctgagcccgactcacccactcgggagcacgcgaggcgctcagaggctttgcaaggattggtgacggaactacgggctgaactatgcaggcagcgcacggagtacgagagaagtgtgaagcggattgaggagggtagcgctgatcttagaaagcggatgagcaggctagaggaggagttagaccaggagaaaaaaaagtacattatgttagagatcaagctgaggaactcagagagggcccgagaggatgccgaacgacgtaatcagctcttgcagcgcgaaatggaagagttcttttcaactctgggcagcttaacggtgggcgcaaaaggggcacgagcgccaaaatag

SEQ ID NO: 208736 - DNA, 2751 bp, Artificial Sequence
  derived and/or modified sequence
ggactgccccgccctggtccagtgattgatcagcagtgattactgaggctttaatggtccgcttggatgggaattaattctgggatggataaataatgcatcgaggtttatgtagtccaaggcgagccgtccgtccggagccaggagaggtagccgagggagcctgacgggtgacgccagcggccacggggccccgaacgagcaggacatgaggggcgactaggcgcgaggacgagcaaaagcaagtggatgacagcatgaacggccctgcggggctggccggacggctgcaagaacatgctgagcccaaagatcaggcaggccaggagggcccgctccaaaagcctagtgatgggggagcagagccggagccctgggcggatgccgtgccctcacaggctgggccccgtgctgaaggcgggctggctgaagaagcagaggagcatcatgaagaactggcagcagcgctggtttgtgctgcgtggggatcagcttttctactacaaggacaaagatgagatcaagccccagggatttatttctctacaagggacacaggtgactgaacttcctcctggccccgaggacccagggaagcacctctttgagatcagcccaggtggtgccggggagcgggagaaggtgccggccaaccccgaggcgctcctgctcatggccagctcccagcgtgacatggaggactgggtgcaggccatccgccgagtcatctgggccccgctgggcggagggatctttgggcagcgcctagaggaaacagtccaccacgagcggaagtatggcccccgcctggcgcccctgctggtggagcagtgtgtggacttcatccgggagcgcgggctcactgaggaggggctgttccgcatgccaggccaggccaacctggtgagggacctgcaggattccttcgactgtggggagaagccactgtttgacagcacaacagacgtgcacacggtggcctccctgctgaagctgtacctgcgggagctccccgagcccgtggtccccttcgccaggtacgaggacttcctcagctgcgcccagctgctcaccaaggacgagggggagggcactctggagttggctaaacaagtgagcaaccttcctcaggcaaattacaacctgctcagatacatctgcaagtttctggatgaagttcaggcatactcaaatgtcaacaagatgagtgtccagaatctggcaaccgtttttggacctaacattctgcggccacaggtagaggacccagtaaccatcatggaaggcacttccctcgtccagcacctgatgaccgtcctcatccgcaaacacagccagctcttcacggcaccggtcccggaagggcccacctccccgcgcgggggcctgcaatgcgcagtggggtggggctccgaggaggtcaccagggacagccaaggagagcccggcggccccggcctgcccgcgcacaggacctcttccctggacggggcggccgtggcggtgctctccagaacagcccccacggggccggggagccggtgcagccctgggaagaaggtgcagaccctgcccagttggaagtcctccttccggcagccgaggtccctatcgggaagcccgaaggggggcggctcatccctggaggtgcccatcatctcctccggcgggaactggcttatgaacgggctgtcctccctgcgcggacaccgccgggcctcgtcgggagaccggctcaaggactcgggctccgtgcagagactctccacctacgacaatgtgcccgcgccgggcctggtccccggcatacccagcgtggccagtatggcgtggtccggggcctcgtccagcgagtcgtcggtggggggctcactcagcagctgcacggcctgccgcgccagcgactcgtctgcccgcagttccctgcacaccgactgggccctggagccctccccgctccccagcagcagcgaggaccccaagtccctggacctggaccacagcatggacgaggcgggcgcgggtgccagcaacagcgagcccagcgagccggacagccccacccgggaacacgcgcgccgctccgaggccttacaggggctggtcactgagctcagggccgagctgtgccgccagcggactgagtacgagaggagtgtgaaaagaatcgaagaagggagtgctgacctgagaaaacgaatgtcccggttagaagaagaactggaccaggaaaagaaaaaatacatcatgctggaaataaagctgcggaactctgaacgggcgcgggaggatgcggagaggaggaaccagctgttgcagagggaaatggaggagtttttttcgaccctaggaagcttgactgttggggcaaaaggtgccagggccccaaagtaaaaggaatggcagagctcacttctgtaccacgtctgctggtctccagccttgtatggagttagaagcgtctgtatctctggagcagccaggcgctctggagccagctggagagagagagatcctgatacctctgtggggactgtggggacttttgggaccccacacactccaggtgggatcagatgctgctccaaccatgcagttcctggtgagggtcagaaggggacggtaccaagagtagcgcttagcccttacccaggaaatatccttcatggccacagaaatggagggcgcccaggatccaggcagccaccgggaacagtcagctttctttattaaatgtgctcacaaagcatg

SEQ ID NO: 208737 - DNA, 2097 bp, Artificial Sequence
  derived and/or modified sequence
atgctgagccccaagatcagacaggccagaagagccagaagcaagagcctggtgatgggcgagcagagcagaagccccggcagaatgccctgcccccacagactgggccccgtgctgaaggccggctggctgaagaagcagagaagcatcatgaagaactggcagcagagatggttcgtgctgagaggcgaccagctgttctactacaaggacaaggacgagatcaagccccagggcttcatcagcctgcagggcacccaggtgaccgagctgccccccggccccgaggaccccggcaagcacctgttcgagatcagccccggcggcgccggcgagagagagaaggtgcccgccaaccccgaggccctgctgctgatggccagcagccagagagacatggaggactgggtgcaggccatcagaagagtgatctgggcccccctgggcggcggcatcttcggccagagactggaggagaccgtgcaccacgagagaaagtacggccccagactggcccccctgctggtggagcagtgcgtggacttcatcagagagagaggcctgaccgaggagggcctgttcagaatgcccggccaggccaacctggtgagagacctgcaggacagcttcgactgcggcgagaagcccctgttcgacagcaccaccgacgtgcacaccgtggccagcctgctgaagctgtacctgagagagctgcccgagcccgtggtgcccttcgccagatacgaggacttcctgagctgcgcccagctgctgaccaaggacgagggcgagggcaccctggagctggccaagcaggtgagcaacctgccccaggccaactacaacctgctgagatacatctgcaagttcctggacgaggtgcaggcctacagcaacgtgaacaagatgagcgtgcagaacctggccaccgtgttcggccccaacatcctgagaccccaggtggaggaccccgtgaccatcatggagggcaccagcctggtgcagcacctgatgaccgtgctgatcagaaagcacagccagctgttcaccgcccccgtgcccgagggccccaccagccccagaggcggcctgcagtgcgccgtgggctggggcagcgaggaggtgaccagagacagccagggcgagcccggcggccccggcctgcccgcccacagaaccagcagcctggacggcgccgccgtggccgtgctgagcagaaccgcccccaccggccccggcagcagatgcagccccggcaagaaggtgcagaccctgcccagctggaagagcagcttcagacagcccagaagcctgagcggcagccccaagggcggcggcagcagcctggaggtgcccatcatcagcagcggcggcaactggctgatgaacggcctgagcagcctgagaggccacagaagagccagcagcggcgacagactgaaggacagcggcagcgtgcagagactgagcacctacgacaacgtgcccgcccccggcctggtgcccggcatccccagcgtggccagcatggcctggagcggcgccagcagcagcgagagcagcgtgggcggcagcctgagcagctgcaccgcctgcagagccagcgacagcagcgccagaagcagcctgcacaccgactgggccctggagcccagccccctgcccagcagcagcgaggaccccaagagcctggacctggaccacagcatggacgaggccggcgccggcgccagcaacagcgagcccagcgagcccgacagccccaccagagagcacgccagaagaagcgaggccctgcagggcctggtgaccgagctgagagccgagctgtgcagacagagaaccgagtacgagagaagcgtgaagagaatcgaggagggcagcgccgacctgagaaagagaatgagcagactggaggaggagctggaccaggagaagaagaagtacatcatgctggagatcaagctgagaaacagcgagagagccagagaggacgccgagagaagaaaccagctgctgcagagagagatggaggagttcttcagcaccctgggcagcctgaccgtgggcgccaagggcgccagagcccccaagtag

SEQ ID NO: 208738 - protein, 1312 aa, Artificial Sequence
  derived and/or modified sequence
MEEEDESRGKTEESGEDRGDGPPDRDPTLSPSAFILRAIQQAVGSSLQGDLPNDKDGSRCHGLRWRRCRSPRSEPRSQESGGTDTATVLDMATDSFLAGLVSVLDPPDTWVPSRLDLRPGESEDMLELVAEVRIGDRDPIPLPVPSLLPRLRAWRTGKTVSPQSNSSRPTCARHLTLGTGDGGPAPPPAPSSASSSPSPSPSSSSPSPPPPPPPPAPPAPPAPRFDIYDPFHPTDEAYSPPPAPEQKYDPFEPTGSNPSSSAGTPSPEEEEEEEEEEEEEEEDEEEEEGLSQSISRISETLAGIYDDNSLSQDFPGDESPRPDAQPTQPTPAPGTPPQVDSTRADGAMRRRVFVVGTEAEACREGKVSVEVVTAGGAALPPPLLPPGDSEIEEGEIVQPEEEPRLALSLFRPGGRAARPTPAASATPTAQPLPQPPAPRAPEGDDFLSLHAESDGEGALQVDLGEPAPAPPAADSRWGGLDLRRKILTQRRERYRQRSPSPAPAPAPAAAAGPPTRKKSRRERKRSGEAKEAASSSSGTQPAPPAPASPWDSKKHRSRDRKPGSHASSSARRRSRSRSRSRSTRRRSRSTDRRRGGSRRSRSREKRRRRRRSASPPPATSSSSSSRRERHRGKHRDGGGSKKKKKRSRSRGEKRSGDGSEKAPAPAPPPSGSTSCGDRDSRRRGAVPPSIQDLTDHDLFAIKRTITVGRLDKSDPRGPSPAPASSPKREVLYDSEGLSGEERGGKSSQKDRRRSGAASSSSSSREKGSRRKALDGGDRDRDRDRDRDRDRSSKKARPPKESAPSSGPPPKPPVSSGSGSSSSSSSCSSRKVKLQSKVAVLIREGVSSTTPAKDAASAGLGSIGVKFSRDRESRSPFLKPDERAPTEMAKAAPGSTKPKKTKVKAKAGAKKTKGTKGKTKPSKTRKKVRSGGGSGGSGGQVSLKKSKADSCSQAAGTKGAEETSWSGEERAAKVPSTPPPKAAPPPPALTPDSQTVDSSCKTPEVSFLPEEATEEAGVRGGAEEEEEEEEEEEEEEEEEEQQPATTTATSTAAAAPSTAPSAGSTAGDSGAEDGPASRVSQLPTLPPPMPWNLPAGVDCTTSGVLALTALLFKMEEANLASRAKAQELIQATNQILSHRKPPSSLGMTPAPVPTSLGLPPGPSSYLLPGSLPLGGCGSTPPTPTGLAATSDKREGSSSSEGRGDTDKYLKKLHTQERAVEEVKLAIKPYYQKKDITKEEYKDILRKAVHKICHSKSGEINPVKVSNLVRAYVQRYRYFRKHGRKPGDPPGPPRPPKEPGPPDKGGPGLPLPPL

SEQ ID NO: 208739 - protein, 219 aa, Artificial Sequence
  derived and/or modified sequence
MEEEDESRGKTEESGEDRGDGPPDRDPTLSPSAFILRAIQQAVGSSLQGDLPNDKDGSRCHGLRWRRCRSPRSEPRSQESGGTDTATVLDMATDSFLAGLVSVLDPPDTWVPSRLDLRPGESEDMLELVAEVRIGDRDPIPLPVPSLLPRLRAWRTGKTVSPQSNSSRPTCARHLTLGTGDGPCPTPCPLLCILLPFPFSLIFLPFPSPTPTAPSPQFH

SEQ ID NO: 208740 - DNA, 3939 bp, Artificial Sequence
  derived and/or modified sequence
atggaggaggaggacgagagtcgcggcaagacagaagagagtggggaggaccggggagacggcccgccagacagggaccctacattaagcccatctgcttttattctgcgagctattcagcaggcagtgggatcttccttgcagggggacctgccgaacgataaggacgggtcgagatgtcacggcctccgctggcgacggtgtagatctccacgttctgagcctcgcagtcaagagtctggcgggactgatacagctacagtgctggacatggccacagacagttttctcgcaggcctcgtgagtgtgctggaccccccagacacctgggtgcctagtaggctagacctgcggccaggcgagagcgaagacatgctcgagctggtcgccgaggtgaggattggagatcgggatccgattcccctccccgtgccgtctcttctccctcgcttacgggcctggaggacaggcaaaacagtgtccccacagagcaatagcagtcggccgacctgtgcacgacatctgacactgggaacgggcgatggcgggccagctcccccacctgctccctcctcggcttctagttctccctccccaagtccttcgtcctcaagtccttcacctcctcctccgcccccccctccagccccgccagcccccccagccccccgttttgatatctatgatccattccatccaaccgatgaggcttactctcccccccccgctcctgagcaaaaatacgacccatttgaacccaccggatccaacccttcctctagcgccgggacccccagcccggaagaagaagaggaggaggaggaagaagaagaagaggaagaggaggatgaggaggaagaggaaggactgagccagtccattagccgcatcagtgaaactcttgctggcatctacgacgacaactcgctgagtcaggactttcctggcgatgaaagtcccaggcctgacgcacagcctactcagccgacccctgctcctgggacacctccccaggtagacagcactagggctgatggcgccatgagacggagagtgttcgtggtgggtactgaagccgaggcctgccgcgagggcaaggtatctgttgaggttgtgactgctggcggagccgctttgccgcctccattgctcccccctggcgactccgagattgaagaaggcgaaatcgtccaacctgaagaagagcccaggctggctctttccctcttccgccccgggggaagagcagcccgccccacgcctgctgccagcgctacccccactgctcaaccactgcctcagcctccagctccacgcgccccagagggggatgactttctgagtctccacgcagaaagcgacggagaaggcgcactccaggttgatttgggagagcccgcgcccgctccacccgcagctgattcacggtggggaggattggacctgagaagaaagatcttaacacagcgccgggagaggtacaggcaacggagcccaagtccagccccggcccccgctccggccgccgctgctgggccccccacgagaaagaaatcccgccgtgagagaaagcgaagcggggaggccaaggaagccgcttcctcttcctcagggacacagcccgcacccccagcacctgctagcccgtgggatagtaaaaagcaccgcagtagggaccgcaagccggggagtcatgccagcagcagtgcccgacgtagaagtcgctccaggtccaggtctcgatctacccggagacggtctcggagtactgacagaagaagaggcggctcaagacgcagccggtctcgggagaagcgaaggcgtagacgccggtccgcttctccaccgccagctactagcagctcaagcagcagtaggagagagcgccatcggggcaagcacagagacggcggtgggtctaagaaaaaaaagaaacgctccaggtccaggggggaaaaacggtcaggagatggaagcgagaaggctcctgcacccgctcctccgcctagtggcagtacctcgtgcggcgaccgcgactcaaggcggagaggcgctgtgcctccatccatccaggatctcacggaccacgacctcttcgcaatcaagaggacaatcacggtcgggcgattagataaaagcgatccacggggacctagccctgcccccgccagcagtcccaaacgcgaggtactgtatgattctgaaggcctatctggagaagaacgaggaggtaagtcgtcccaaaaggatcggagaaggtccggcgccgcctccagttcaagctcttcccgggagaagggctctaggcggaaggcactcgacgggggagatcgtgacagagatcgggatcgagatagggacagagacaggagctctaagaaagcacggcccccgaaagagagtgctccctccagcggccctccccccaaacccccagtatcatcaggttctggctcgtcctctagttcctcttcctgttcaagccgcaaggtaaaactccagagtaaagtggctgtgttaatcagggagggggtgtcctccactactccagctaaagatgcagcctccgcaggtctgggctcaattggtgttaagtttagcagagatagagaatctaggagccctttcctaaaaccagatgagcgcgcgcccacagaaatggcaaaggctgctcccggtagcacaaagcccaagaaaactaaggtaaaggccaaagcgggggctaagaagaccaaaggtaccaagggcaaaacaaagccgtccaagaccagaaaaaaggttaggtcgggaggtgggtctggcgggagcggggggcaggtctccctgaaaaaatccaaagccgacagttgctcacaggctgctgggacgaaaggagcagaagagacctcatggtcaggcgaagagcgggccgctaaggtgccgtccactcccccaccaaaggccgctcctccacccccggcacttacccctgactcacagactgttgacagcagctgtaagacccccgaagtgagttttcttcctgaggaggccactgaagaagccggggtcagaggaggagccgaagaggaagaggaggaggaggaagaggaagaggaggaggaagaagaagaggagcagcagccagccactactaccgccacatccacagccgccgccgcacctagcacagcaccaagcgcaggttctacggccggcgactcaggcgccgaggatggcccagcttcgcgcgtgagccaactgcccactttacccccaccgatgccatggaacttacctgctggggtggactgtactacaagcggggttctggccttgacagcgcttctgttcaagatggaagaagcaaaccttgcctcccgtgctaaggctcaggaactgatccaggccaccaaccagatcctgtcccatcggaagccaccttcttcattaggcatgactcctgcaccggttccaacctctctgggactgcctcccggcccctcctcctatctgctccctggctcccttcccttaggcggctgtggatccacccctccaacaccaaccggtctggcggctactagcgacaagcgcgaggggtctagctcctccgagggtcgtggtgacacagacaagtacctgaagaaactccacacccaagagagagcagttgaggaagtcaagctagcaatcaagccctattaccagaagaaggacatcacaaaggaggaatacaaggatatcctgcggaaggccgtgcacaaaatttgtcatagtaagagcggcgagataaatccggtcaaagtcagcaatctcgttcgggcctatgttcaacgctacagatactttagaaaacacgggcgaaagccaggcgatcccccaggacctccccgccctccgaaagagccaggaccgccagacaagggggggcccggcctgccactcccacccttatag

SEQ ID NO: 208741 - DNA, 660 bp, Artificial Sequence
  derived and/or modified sequence
atggaagaagaggatgagagtcggggtaagactgaggaatctggtgaggatagaggcgacggtccacctgatagagaccccacactgtcacctagcgccttcattctaagggccattcagcaggcggtcggttccagcctgcaaggtgatctacccaacgacaaagacgggagtaggtgtcacggacttagatggcgaagatgccgaagcccgcggagtgaaccacgctctcaggagtccggcggcactgacacagctacagtcctcgacatggcaaccgatagtttcttagcggggcttgtctctgtgctcgaccccccagacacatgggttccgagtcgactcgacctccggcctggggagagcgaggatatgcttgagctggtggccgaggttaggataggtgaccgcgacccaatccccctgccagttccctctctgctgcctaggctgagagcttggcggaccggcaagacagtcagcccgcagagtaatagtagccggcccacatgcgcccgacacttgaccctgggcactggcgacggcccttgtcccacaccatgccctctcctctgtattctgctacccttcccctttagcctgatttttcttccatttccaagcccgactcccactgcaccctccccccaattccactag

SEQ ID NO: 208742 - DNA, 3939 bp, Artificial Sequence
  derived and/or modified sequence
atggaggaggaggatgagagccggggcaagacagaggagagcggggaggacagaggagatggccccccagaccgggaccccaccctgagccccagcgccttcatcctgcgggccatccagcaggccgtgggcagcagcctgcagggcgacctgcccaatgacaaggatggcagccgctgccacggcctgcgctggaggcgctgccgcagccccaggtctgagcccaggagccaggagagcggcggcacagacacagccaccgtgctggacatggccacagacagcttcctggccggcctggtgtctgtgctggaccccccagacacctgggtgcccagccggctggacctgcggcctggagagagcgaggacatgctggagctggtggccgaggtgcgcatcggggaccgggaccccatccccctgcctgtgcccagcctgctgccccggctgcgggcctggaggacaggcaagacagtgagcccccagagcaacagcagccggcccacctgtgcccggcacctgaccctgggcactggagatggcggccctgcccctcctccagcccccagcagcgccagcagcagccccagccccagccccagcagcagcagccccagccccccacctcctcctcctcctccagcccccccagcccccccagcccccaggtttgacatctatgaccccttccaccccacagatgaggcctacagccccccaccagcccctgagcagaagtatgacccctttgagcccaccggcagcaaccccagcagcagcgctggcacccccagccctgaggaggaggaggaggaggaggaggaggaggaggaggaggaggaggatgaggaggaggaggagggcctgagccagagcatcagccgcatcagcgagaccctggccggcatctatgatgacaacagcctgagccaggacttccctggagatgagagccccaggccagatgcccagcccacccagcccaccccagcccctggcaccccaccccaggtggacagcaccagggcagatggagccatgagaagaagagtgtttgtggtgggcacagaagctgaggcctgccgggagggcaaggtgtctgtggaggtggtgacagctgggggcgccgccctgcccccacccctgctgcccccaggggacagcgagattgaggagggggagatcgtgcagcctgaggaggagccccggctggccctgagcctcttccggcctgggggccgggccgcccggcccaccccagctgccagcgccacccccacagcccagcccctgccccagcccccagccccccgggccccagaaggagatgacttcctgagcctgcatgctgagagtgatggagagggcgccctgcaggtggacctgggggagcccgccccagcccccccagctgctgacagccgctggggcggcctggacctgcggaggaagatcctgacccagaggcgggagcgctaccggcagaggagccccagccctgccccagccccagccccagctgctgctgctggcccccccaccaggaagaagagccggcgggagaggaagaggtctggagaggccaaggaggccgccagcagcagcagcggcacccagcctgcccccccagccccagccagcccctgggacagcaagaagcacaggagccgggacaggaagccaggcagccacgccagcagcagcgcccggcggcgcagccgcagccgcagccgcagccgcagcaccaggagaagaagccgcagcacagacagaagaagaggaggcagccgccgcagccgcagccgggagaagagaagaagaagaagaagaagtgccagccccccaccagccaccagcagcagcagcagcagccggcgggagcggcaccggggcaagcacagagatggcggcggcagcaagaagaagaagaagaggagccgcagcagaggagagaagaggtctggagatggcagcgagaaggccccagccccagcccccccacccagcggcagcaccagctgtggggaccgggacagcagaagaagaggagctgtgcccccatccatccaggacctgacagaccatgacctgtttgccatcaagaggaccatcaccgtgggccgcctggacaagagtgacccccggggccccagccctgccccagccagcagccccaagcgggaggtgctgtatgacagcgagggcctgagcggggaggagcggggcggcaagagcagccagaaggacagaagaagaagtggggccgccagcagcagcagcagcagccgggagaagggcagcaggaggaaggccctggatggaggagaccgggaccgggaccgggaccgggaccgggaccgggacaggagcagcaagaaggcccggccccccaaggagagcgcccccagcagcggccccccacccaagccccctgtgagcagcggcagcggcagcagcagcagcagcagcagctgcagcagcaggaaggtgaagctgcagagcaaggtggccgtgctgatccgggagggcgtgagcagcaccaccccagccaaggatgctgccagcgctggcctgggcagcattggagtgaagttcagccgggaccgggagagccgcagccccttcctgaagccagatgagcgggcccccacagagatggccaaggccgcccctggcagcaccaagcccaagaagaccaaggtgaaggccaaggccggggccaagaagaccaagggcaccaagggcaagaccaagcccagcaagaccaggaagaaggtgcgcagcggcggcggcagcggcggcagcggcggccaggtgtccctgaagaagagcaaggctgacagctgcagccaggccgccggcaccaagggagctgaggagacctcctggagcggggaggagcgggccgccaaggtgcccagcaccccaccacccaaggccgcccctcctcctccagccctgaccccagacagccagacagtggacagcagctgcaagaccccagaggtgtccttcctgcctgaggaggccacagaggaggccggcgtgcggggcggcgctgaggaggaggaggaggaggaggaggaggaggaggaggaggaggaggaggaggagcagcagcctgccaccaccacagccaccagcacagctgctgctgcccccagcacagcccccagcgctggcagcacagctggggacagcggggctgaagatggccctgccagccgggtgtcccagctgcccaccctgcccccacccatgccctggaacctgcctgctggggtggactgcaccaccagcggcgtgctggccctgacagccctgctcttcaagatggaggaggccaacctggccagccgggccaaggcccaggagctgatccaggccaccaaccagatcctgagccacaggaagccacccagcagcctgggcatgaccccagcccctgtgcccaccagcctgggcctgcccccaggccccagcagctacctgctgcccggcagcctgcccctgggcggctgcggcagcaccccacccacccccaccggcctggccgccaccagtgacaagcgggagggcagcagcagcagcgagggccgcggggacacagacaagtacctgaagaagctgcacacccaggagagagctgtggaggaggtgaagctggccatcaagccctactaccagaagaaggacatcaccaaggaggagtacaaggacatcctgaggaaggctgtgcacaagatctgccacagcaagtctggagagatcaaccctgtgaaggtgagcaacctggtgcgggcctacgtgcagcgctaccgctacttcaggaagcacggcaggaagccaggggaccccccaggcccccccaggcctcccaaggagcccggccccccagacaagggcggccctggcctgcccctgccccccctgtag

SEQ ID NO: 208743 - DNA, 660 bp, Artificial Sequence
  derived and/or modified sequence
atggaggaggaggatgagagccggggcaagacagaggagagcggggaggacagaggagatggccccccagaccgggaccccaccctgagccccagcgccttcatcctgcgggccatccagcaggccgtgggcagcagcctgcagggcgacctgcccaatgacaaggatggcagccgctgccacggcctgcgctggaggcgctgccgcagccccaggtctgagcccaggagccaggagagcggcggcacagacacagccaccgtgctggacatggccacagacagcttcctggccggcctggtgtctgtgctggaccccccagacacctgggtgcccagccggctggacctgcggcctggagagagcgaggacatgctggagctggtggccgaggtgcgcatcggggaccgggaccccatccccctgcctgtgcccagcctgctgccccggctgcgggcctggaggacaggcaagacagtgagcccccagagcaacagcagccggcccacctgtgcccggcacctgaccctgggcactggagatggcccctgccccaccccctgccccctgctgtgcatcctgctgcccttccccttcagcctcatcttcctgcccttccccagccccacccccacagcccccagcccccagttccactag

SEQ ID NO: 208744 - DNA, 3939 bp, Artificial Sequence
  derived and/or modified sequence
atggaggaggaggacgagagccggggcaagaccgaggagagcggcgaagatagaggcgatggaccacccgacagagatccaaccctgagtcctagcgcttttattctacgcgctatccagcaggctgtaggatcctcactacagggcgatctgcccaatgataaggacggctcacgttgtcatggtctgcgctggcggcgttgccgatctcctaggtcggagccgcggagccaggagagcggcgggactgacaccgctacagtcttggacatggcaacagacagcttcctagccggcctcgtctcagttctcgatccacccgacacatgggtcccatcacggttggacctgcgcccaggtgaaagcgaggatatgctcgaactggtggccgaggtgcggataggggatcgggaccccattcccctgccagtgccctctctcctgcctcggctgagggcgtggcgcacaggaaaaactgtctctccacagtctaacagcagtcggcccacatgcgcccggcacctaactctgggaacaggagatggcggccctgctcccccccctgctcccagcagcgcctcttcatctcctagtccctctccatcttcctcttcccccagcccaccaccacctcccccccctcccgccccccccgcccctcctgccccaaggttcgacatttacgatcccttccaccctaccgacgaggcctactcaccaccaccagcgcccgagcagaaatatgatccctttgaacccacaggatcaaaccctagttcttccgcaggaacgccttctccagaggaggaggaggaagaggaggaggaagaagaggaagaggaagaggatgaagaggaagaggagggattatctcagagcatctcaagaatatccgagacactggccggaatctatgatgataattctctgtcccaggattttcccggagacgagagccccaggccagacgctcagccgactcaacccacccccgccccgggaactcctccacaggttgattccacccgtgctgacggggccatgaggcggcgggtgttcgtggtaggtacagaagcagaagcttgccgggaggggaaagtgtccgtggaggtggtgactgctgggggcgcagctctgcctccaccactgctgcctccaggtgactctgaaatagaggaaggagaaatagtgcaaccagaggaggagccacggctcgccctgtctctgttccgccccggcggaagagcagccagaccaacacctgcagcatctgcaacacctacagctcaacctctgcctcagcctcctgcaccccgggctcctgaaggcgatgactttctgagcctccatgctgagtctgacggcgagggcgctctgcaagtggatctcggagaacccgccccagcccctcctgctgctgacagcagatggggcgggttggatctccgcagaaagattctaacccagagacgcgagcggtataggcagagatctccttcacctgcgccagccccggcgccagctgcggccgcgggcccccctacccgcaagaaaagccgccgagaacgcaaaagatctggtgaggcaaaagaggccgcaagttcctcctctggtactcaacccgcgccccccgctccagctagtccctgggattccaagaagcaccggtcccgggacaggaagccgggctcgcacgctagcagctctgctagaaggcgcagtaggtccaggtctagatcccgctctacccggaggagaagtagaagcactgatcgtcgccgggggggctcaagaaggtcaaggtcccgcgagaagagacgaaggagacgtcggtccgcttcccccccacccgctaccagttcttcttccagctctcgccgggaaagacaccgcgggaagcatcgggacggaggcggttccaagaagaagaaaaagcggagccggtcacgcggtgagaagcggagcggcgatggcagcgaaaaagccccagcccctgcccctcctccctccgggtcgacctcctgcggagatagagacagcaggcggaggggcgccgttccgccatctatccaagatcttacagatcacgatctgttcgcgatcaaacggacaatcacggtcggcagactggacaagtctgatccacgtggcccttcaccagcgcccgcctcaagcccgaaaagggaagtactgtatgacagcgaagggttgagcggggaagagcggggagggaagtcctctcaaaaagacaggagaaggagcggagctgcgtcctcatcaagcagcagtcgagaaaagggtagccggagaaaagccctggacggaggggatagggacagggacagggatagagaccgcgaccgtgaccggagttcaaagaaagcacgccctcctaaggaatcagcacccagctctggcccccccccaaaaccccctgtatcgagtggatccggctcttctagctcctccagcagctgctccagccgaaaggtaaaactccagtccaaagtcgcagtactcatcagggaaggagtgtcatcaacaacccccgccaaagacgccgcttcagccgggctcgggtcaatcggcgtcaaattctccagagacagggagtctcgaagcccctttctgaagcctgatgagcgcgctcctacagagatggccaaagccgccccaggaagcacaaaaccgaaaaagacaaaggtaaaagcaaaagccggagccaagaaaacaaaagggaccaagggtaaaacaaagccaagcaagacgcgaaagaaggtcaggagtggtggcggaagcgggggaagcggtggccaggtcagtttaaagaagtccaaggccgactcctgtagccaggctgctggcacgaagggtgcagaagagacgtcctggagcggggaggaacgagcggccaaagtaccttccaccccacccccaaaagccgcccctcctccacctgctctgaccccagactcgcaaaccgtcgactcttcctgtaagacaccagaggtcagttttcttcccgaagaagccacggaagaggcaggggtgcggggcggggctgaagaggaggaagaggaggaggaagaagaggaggaggaagaggaagaggaagagcaacagcccgcgacaaccacagccacttcgacggccgctgccgctccttccaccgcaccaagcgcagggagtactgcgggagattcgggcgctgaggatggtcccgcttctagagtatcccagctccctacgctccccccacccatgccctggaacttgcctgcgggggtggattgcaccactagtggcgtgctggcgctgacagccctgttgttcaaaatggaggaagcgaatctggctagcagggccaaggctcaggagctcatccaagctactaatcagatcttgtctcataggaagcctccatctagtctgggcatgaccccagccccagtgccgacatctttggggctgcccccgggcccatcctcctatctcctgcctggatcccttccccttggaggttgcggaagtactcccccaactcctacaggattagcggcaactagcgacaaaagagagggctccagctcctctgagggcagaggtgatacggataagtatcttaagaagctgcatacgcaagaacgggcagtggaggaagtaaagctcgctatcaagccctattatcagaagaaggacataactaaagaggaatacaaagatattcttcgcaaagcagtgcacaagatctgccattcaaagagcggggagatcaaccccgttaaagtgtccaatctggtccgagcctacgtgcagcgctataggtactttcgaaaacacggacgaaaacccggagatccccctggcccaccaaggccaccaaaggaaccaggcccacccgacaagggagggccgggactccccctgcctccgctttag

SEQ ID NO: 208745 - DNA, 660 bp, Artificial Sequence
  derived and/or modified sequence
atggaggaggaggacgagagccggggcaagaccgaggagagcggcgaggatcgcggagacggacccccagacagggaccctaccctaagcccctccgccttcatcttacgagccattcagcaggctgtcggttcttcgttacaaggggatctgcccaacgacaaagatggcagcagatgtcatggcctacgttggcgccggtgccgaagtcccagatctgaaccccgaagccaggaaagtggcgggacagacacagctaccgtgctggatatggcaacggacagtttcctggctggtctggtgtccgtactggatccgcctgacacatgggtaccctcccggttagatcttcggccgggagagtcagaggacatgcttgaactggttgctgaagtgcgcattggcgacagagaccccattcccttgcctgtcccttccctcctcccccgcttgcgcgcatggcggacagggaagactgtctcaccacagagcaactcttcacgccctacatgtgcccgccacctgacactgggaacaggtgacgggccttgcccaacgccatgcccattgttgtgcattttactaccgtttccatttagcttgatctttctcccttttcctagccccacccctacagctccgagtccacagtttcattag

SEQ ID NO: 208746 - DNA, 3939 bp, Artificial Sequence
  derived and/or modified sequence
atggaggaggaagacgagtccagagggaagaccgaagagtcaggggaggaccgcggagatggcccaccggaccgcgatcccaccctttcacctagcgcatttatactgcgagccatacagcaggcagtcggatcttctcttcagggggacctgcctaatgacaaagacgggagcaggtgccacggactgaggtggcggaggtgccggtcccccaggtctgagccacgcagtcaggaatccggcggtacagacactgcaactgtgctcgacatggctacagactcatttttggctgggctcgtgtctgtcttggaccccccagatacttgggttccttctagattagacctgcgtcctggcgagtcggaagacatgctggagttggttgccgaggtccggatcggggacagagaccccattcccctgcccgtgcccagtttattgccccgtctgagagcctggcggacaggaaagactgtctcccctcagtccaactcctcacgaccgacctgtgctaggcatctgacgctgggtactggagacggagggccagctccaccacccgcaccaagttccgcgtcatctagccctagcccctccccttcctcaagttccccctctccaccacccccaccaccacccccagcccctcctgccccacctgcaccaagattcgacatctacgatccattccaccctaccgatgaagcttactcaccgcctcctgccccagagcagaagtacgacccatttgaaccgaccgggtcaaacccttcttctagtgctggcaccccgtccccagaagaggaggaagaggaggaggaggaggaagaggaggaagaagaggatgaggaggaggaggagggactatctcaatctatctcccgaatctctgaaactcttgccggaatttacgatgacaattcgcttagccaggattttcccggagatgagtcccctagacccgatgcccaaccgacacagccaacgccagctcccggtactccccctcaagttgattccaccagagctgacggtgccatgcggaggagggtctttgtggtgggcaccgaggctgaagcctgtagggagggaaaagtatcagtggaggtggtcactgcgggaggagccgcactaccacctcctctactaccgccaggcgactctgaaatcgaggagggggaaattgtgcagccagaggaggagcccaggctagctttgtcgctgttcaggccaggaggcagggcagcacggccaactccagccgctagcgcaacacccacagctcagccattaccccagcctcctgcccctagggcccctgagggagacgattttttgtcactgcacgctgaaagcgatggtgaaggtgcccttcaggtcgaccttggagaaccagccccagcgcctcctgccgcagattcacggtggggtggcctagacttgcgcagaaaaattctcacccagcggagggagagatacagacagaggtcaccatcccccgctcctgctcccgcaccagcagccgcagcgggaccacccacccgcaaaaaatccagacgcgaaaggaaacgtagcggggaggcgaaagaagcggcaagcagcagttctggtacacagccggctccgcctgccccagcaagcccctgggatagtaaaaagcataggagcagagatcgcaaacctggctcccatgcttccagtagtgcacgacggaggtcacggagccggtcccgaagtagatccacaaggaggcgatcccggagtactgatagaagacgcggagggagcaggcgcagtagaagccgggagaaaagaaggaggcggaggcgttcggcatctccaccaccagccacctcaagtagcagtagctctcgacgcgaaaggcacagggggaagcacagagacggcggaggctcaaagaagaagaagaaacgatcaaggagccgcggtgagaagaggtcaggagacgggtccgagaaagctcccgcaccggctcccccaccctccggctccaccagctgtggcgatcgggactctaggcgcaggggcgcagtacctcccagcatacaggacctcacagatcatgacctattcgccattaagcggactatcactgtggggaggctggacaagagcgatcccagagggccatcaccggcacctgcatcatctcccaagcgggaggttctctatgactccgaaggactctccggagaggaacggggtgggaagagttcccagaaggataggagacgcagcggagccgcatcttcatctagctcttcgagggagaaaggctctcggagaaaggcattagacgggggagatagagatagagatcgtgatcgcgaccgtgatcgtgatcgctcctctaaaaaagcccgtccacccaaagagtcagcccctagcagcggtccaccaccaaaaccgccagtgtcatccggatccggatcttccagttcttctagttcttgcagctctagaaaagtgaaactccagagcaaagtcgcggtcctaatccgcgagggcgtcagctctacgactcccgcaaaggatgccgcttcagccggactgggaagtataggcgtaaagtttagtcgggaccgggagagtagaagcccttttctgaaacccgatgagcgggctcctacggaaatggctaaggcggcacctggctctactaagcctaaaaagacgaaagtcaaggccaaggctggggcaaagaagactaaaggcaccaagggtaagacgaagccctcaaagacgcgcaagaaggtgcgctcaggaggaggctctgggggtagcgggggacaggtgtcactgaaaaaaagcaaggcagattcctgttcacaagcggcaggaaccaaaggtgctgaggagacttcctggtccggggaagagcgggctgccaaggtgccatccacacctccacctaaggcagcacctcccccaccagcacttaccccagacagtcagaccgtagatagctcatgtaagacccccgaggtgtctttcctccctgaggaggcgaccgaagaagccggtgtgaggggaggggcagaggaagaggaagaggaggaagaagaggaggaggaggaggaggaggaagaggaacaacaaccagcgactacaacagccacttccaccgcggctgcagcaccaagcacagctcctagcgccggatctactgccggtgactccggggctgaagacggaccagcctcaagagtctcccagttgccgacattacccccacctatgccctggaatctacccgctggtgtggactgcacaacctccggggtattggccctcaccgctctgctatttaagatggaagaagccaacctcgcctcacgcgctaaagcccaggagctgatccaggctaccaaccagatccttagccaccgcaagccgcctagttccttggggatgacccccgctcccgtacctaccagtctcggactaccaccaggacccagtagctatctcctgccgggtagcctgccgcttggaggttgcggttccacaccacccacccccactgggctggccgctaccagcgataaacgcgagggttccagttcttcagaaggcaggggcgatacagataaatacctcaagaagctgcatacccaggagcgggctgtggaggaagtgaaactagctatcaagccctattaccagaaaaaggacatcacgaaggaagaatacaaggacatactaagaaaggcggtccacaagatctgccactccaaaagtggggagattaatcctgtcaaagtgtcaaacctggtgcgggcttatgtccagaggtacagatacttccggaagcacgggaggaaacccggagatccacctggacctccccgacctccaaaagagcctggcccaccagacaaaggcggacctggtctgcccttgcccccactgtag

SEQ ID NO: 208747 - DNA, 660 bp, Artificial Sequence
  derived and/or modified sequence
atggaggaggaagacgaatcgagaggtaaaaccgaagaaagcggcgaggacaggggggacggcccacctgacagagaccccaccctctctcctagcgcgttcatcctgagggctatccagcaggcagttggctcatcactgcagggcgatttgcctaacgataaggatggctcacgctgtcacggactgagatggaggaggtgtagatctccccgtagcgaaccccgtagccaggagagtggtgggaccgacaccgcaactgtccttgacatggcaactgatagcttcctcgccggactggtatctgttttagacccacctgatacatgggtgccttccagattggacctgcggcctggcgaaagcgaagatatgctggagctggtggccgaggttagaattggcgaccgagacccaatccctttgcctgtgccctccttactgcctcgcctccgtgcatggcgaacggggaaaacagtcagcccccagtccaacagctcccgtccaacatgtgctagacacctcactcttgggacaggggatgggccttgtccaacaccttgtccacttctctgcatcctgctacccttccccttctcactgattttcctgcctttcccaagcccaacccctaccgcaccaagcccacagtttcattag

SEQ ID NO: 208748 - DNA, 3939 bp, Artificial Sequence
  derived and/or modified sequence
atggaggaggaggacgagagcagaggcaagaccgaggagagcggcgaggacagaggcgacggcccccccgacagagaccccaccctgagccccagcgccttcatcctgagagccatccagcaggccgtgggcagcagcctgcagggcgacctgcccaacgacaaggacggcagcagatgccacggcctgagatggagaagatgcagaagccccagaagcgagcccagaagccaggagagcggcggcaccgacaccgccaccgtgctggacatggccaccgacagcttcctggccggcctggtgagcgtgctggacccccccgacacctgggtgcccagcagactggacctgagacccggcgagagcgaggacatgctggagctggtggccgaggtgagaatcggcgacagagaccccatccccctgcccgtgcccagcctgctgcccagactgagagcctggagaaccggcaagaccgtgagcccccagagcaacagcagcagacccacctgcgccagacacctgaccctgggcaccggcgacggcggccccgcccccccccccgcccccagcagcgccagcagcagccccagccccagccccagcagcagcagccccagcccccccccccccccccccccccccgccccccccgccccccccgcccccagattcgacatctacgaccccttccaccccaccgacgaggcctacagccccccccccgcccccgagcagaagtacgaccccttcgagcccaccggcagcaaccccagcagcagcgccggcacccccagccccgaggaggaggaggaggaggaggaggaggaggaggaggaggaggaggacgaggaggaggaggagggcctgagccagagcatcagcagaatcagcgagaccctggccggcatctacgacgacaacagcctgagccaggacttccccggcgacgagagccccagacccgacgcccagcccacccagcccacccccgcccccggcacccccccccaggtggacagcaccagagccgacggcgccatgagaagaagagtgttcgtggtgggcaccgaggccgaggcctgcagagagggcaaggtgagcgtggaggtggtgaccgccggcggcgccgccctgcccccccccctgctgccccccggcgacagcgagatcgaggagggcgagatcgtgcagcccgaggaggagcccagactggccctgagcctgttcagacccggcggcagagccgccagacccacccccgccgccagcgccacccccaccgcccagcccctgccccagccccccgcccccagagcccccgagggcgacgacttcctgagcctgcacgccgagagcgacggcgagggcgccctgcaggtggacctgggcgagcccgcccccgccccccccgccgccgacagcagatggggcggcctggacctgagaagaaagatcctgacccagagaagagagagatacagacagagaagccccagccccgcccccgcccccgcccccgccgccgccgccggcccccccaccagaaagaagagcagaagagagagaaagagaagcggcgaggccaaggaggccgccagcagcagcagcggcacccagcccgccccccccgcccccgccagcccctgggacagcaagaagcacagaagcagagacagaaagcccggcagccacgccagcagcagcgccagaagaagaagcagaagcagaagcagaagcagaagcaccagaagaagaagcagaagcaccgacagaagaagaggcggcagcagaagaagcagaagcagagagaagagaagaagaagaagaagaagcgccagccccccccccgccaccagcagcagcagcagcagcagaagagagagacacagaggcaagcacagagacggcggcggcagcaagaagaagaagaagagaagcagaagcagaggcgagaagagaagcggcgacggcagcgagaaggcccccgcccccgcccccccccccagcggcagcaccagctgcggcgacagagacagcagaagaagaggcgccgtgccccccagcatccaggacctgaccgaccacgacctgttcgccatcaagagaaccatcaccgtgggcagactggacaagagcgaccccagaggccccagccccgcccccgccagcagccccaagagagaggtgctgtacgacagcgagggcctgagcggcgaggagagaggcggcaagagcagccagaaggacagaagaagaagcggcgccgccagcagcagcagcagcagcagagagaagggcagcagaagaaaggccctggacggcggcgacagagacagagacagagacagagacagagacagagacagaagcagcaagaaggccagaccccccaaggagagcgcccccagcagcggccccccccccaagccccccgtgagcagcggcagcggcagcagcagcagcagcagcagctgcagcagcagaaaggtgaagctgcagagcaaggtggccgtgctgatcagagagggcgtgagcagcaccacccccgccaaggacgccgccagcgccggcctgggcagcatcggcgtgaagttcagcagagacagagagagcagaagccccttcctgaagcccgacgagagagcccccaccgagatggccaaggccgcccccggcagcaccaagcccaagaagaccaaggtgaaggccaaggccggcgccaagaagaccaagggcaccaagggcaagaccaagcccagcaagaccagaaagaaggtgagaagcggcggcggcagcggcggcagcggcggccaggtgagcctgaagaagagcaaggccgacagctgcagccaggccgccggcaccaagggcgccgaggagaccagctggagcggcgaggagagagccgccaaggtgcccagcacccccccccccaaggccgccccccccccccccgccctgacccccgacagccagaccgtggacagcagctgcaagacccccgaggtgagcttcctgcccgaggaggccaccgaggaggccggcgtgagaggcggcgccgaggaggaggaggaggaggaggaggaggaggaggaggaggaggaggaggaggagcagcagcccgccaccaccaccgccaccagcaccgccgccgccgcccccagcaccgcccccagcgccggcagcaccgccggcgacagcggcgccgaggacggccccgccagcagagtgagccagctgcccaccctgcccccccccatgccctggaacctgcccgccggcgtggactgcaccaccagcggcgtgctggccctgaccgccctgctgttcaagatggaggaggccaacctggccagcagagccaaggcccaggagctgatccaggccaccaaccagatcctgagccacagaaagccccccagcagcctgggcatgacccccgcccccgtgcccaccagcctgggcctgccccccggccccagcagctacctgctgcccggcagcctgcccctgggcggctgcggcagcaccccccccacccccaccggcctggccgccaccagcgacaagagagagggcagcagcagcagcgagggcagaggcgacaccgacaagtacctgaagaagctgcacacccaggagagagccgtggaggaggtgaagctggccatcaagccctactaccagaagaaggacatcaccaaggaggagtacaaggacatcctgagaaaggccgtgcacaagatctgccacagcaagagcggcgagatcaaccccgtgaaggtgagcaacctggtgagagcctacgtgcagagatacagatacttcagaaagcacggcagaaagcccggcgacccccccggcccccccagaccccccaaggagcccggcccccccgacaagggcggccccggcctgcccctgccccccctgtag

SEQ ID NO: 208749 - DNA, 660 bp, Artificial Sequence
  derived and/or modified sequence
atggaggaggaggacgagagcagaggcaagaccgaggagagcggcgaggacagaggcgacggcccccccgacagagaccccaccctgagccccagcgccttcatcctgagagccatccagcaggccgtgggcagcagcctgcagggcgacctgcccaacgacaaggacggcagcagatgccacggcctgagatggagaagatgcagaagccccagaagcgagcccagaagccaggagagcggcggcaccgacaccgccaccgtgctggacatggccaccgacagcttcctggccggcctggtgagcgtgctggacccccccgacacctgggtgcccagcagactggacctgagacccggcgagagcgaggacatgctggagctggtggccgaggtgagaatcggcgacagagaccccatccccctgcccgtgcccagcctgctgcccagactgagagcctggagaaccggcaagaccgtgagcccccagagcaacagcagcagacccacctgcgccagacacctgaccctgggcaccggcgacggcccctgccccaccccctgccccctgctgtgcatcctgctgcccttccccttcagcctgatcttcctgcccttccccagccccacccccaccgcccccagcccccagttccactag

SEQ ID NO: 208750 - DNA, 369 bp, Artificial Sequence
  derived and/or modified sequence
atgagtgccacctggtgctccccagagggacaggggatgggacaggggccaggccgtgaggtaggaggcaactccgcggcttctgggcctgccagccccattcgcgacccatgcctaagcgaggccggtctcaaagggcctccgtccgcccaccccagacggctgtgtctcttgcaccgccttgtgtgtttttccgggggattaacatctatccagctatccccaagaacctgttgtagccaccagtgggcacagcttttctcaccagcgtgttttccccagtggagagcacccggatgctccctggatgattcccggtccctcacccgtatccgtcccgtccatctccccggaccaagcttggattag

SEQ ID NO: 208751 - DNA, 611 bp, Artificial Sequence
  derived and/or modified sequence
gctttccgcgttctcccctctccgcgggcagtgctagctcgccgcggccgcctccggggtcacgattccggggtcgcccccagcacttctccgccgggtgcatcaacctgaaaaagccccttcttcctggaaaccctccttctccagcgtttcaacggggaaactgatcagctgacaccagccccagtcctgcgaggggccggcgacctttgacctttctccaaaggggaccacctggcttcatgtgtggatttccacggctcttgcccagaggcgggtacactgtgttccaatgtgccacggaactcacgcagtggcactttgtggcttcatgaaggaagaggcaggccacgcaacacttcctccccaagccaaggagaagtatcacttttagaggcagaggagcggaaggcagtgggtgtgaccaaaagtgccatttgttaaagactgttggagcagaactactgagaaaaaccaggcattgtatcttcagttgtcatcaagttcgcaatcagattggaaaagctcaacttgaagctttcttgcctgcagtgaagcagagagatagatattattcacgtaataaaaaacatgggcttcaacctgacttt

SEQ ID NO: 208752 - protein, 628 aa, Artificial Sequence
  derived and/or modified sequence
MGSCARLLLLWGCTVVAAGLSGVAGVSSRCEKACNPRMGNLALGRKLWADTTCGQNATELYCFYSENTDLTCRQPKCDKCNAAYPHLAHLPSAMADSSFRFPRTWWQSAEDVHREKIQLDLEAEFYFTHLIVMFKSPRPAAMVLDRSQDFGKTWKPYKYFATNCSATFGLEDDVVKKGAICTSKYSSPFPCTGGEVIFKALSPPYDTENPYSAKVQEQLKITNLRVQLLKRQSCPCQRNDLNEEPQHFTHYAIYDFIVKGSCFCNGHADQCIPVHGFRPVKAPGTFHMVHGKCMCKHNTAGSHCQHCAPLYNDRPWEAADGKTGAPNECRTCKCNGHADTCHFDVNVWEASGNRSGGVCDDCQHNTEGQYCQRCKPGFYRDLRRPFSAPDACKPCSCHPVGSAVLPANSVTFCDPSNGDCPCKPGVAGRRCDRCMVGYWGFGDYGCRPCDCAGSCDPITGDCISSHTDIDWYHEVPDFRPVHNKSEPAWEWEDAQGFSALLHSGKCECKEQTLGNAKAFCGMKYSYVLKIKILSAHDKGTHVEVNVKIKKVLKSTKLKIFRGKRTLYPESWTDRGCTCPILNPGLEYLVAGHEDIRTGKLIVNMKSFVQHWKPSLGRKVMDILKRECK

SEQ ID NO: 208753 - protein, 591 aa, Artificial Sequence
  derived and/or modified sequence
MGNLALGRKLWADTTCGQNATELYCFYSENTDLTCRQPKCDKCNAAYPHLAHLPSAMADSSFRFPRTWWQSAEDVHREKIQLDLEAEFYFTHLIVMFKSPRPAAMVLDRSQDFGKTWKPYKYFATNCSATFGLEDDVVKKGAICTSKYSSPFPCTGGEVIFKALSPPYDTENPYSAKVQEQLKITNLRVQLLKRQSCPCQRNDLNEEPQHFTHYAIYDFIVKGSCFCNGHADQCIPVHGFRPVKAPGTFHMVHGKCMCKHNTAGSHCQHCAPLYNDRPWEAADGKTGAPNECRTCKCNGHADTCHFDVNVWEASGNRSGGVCDDCQHNTEGQYCQRCKPGFYRDLRRPFSAPDACKPCSCHPVGSAVLPANSVTFCDPSNGDCPCKPGVAGRRCDRCMVGYWGFGDYGCRPCDCAGSCDPITGDCISSHTDIDWYHEVPDFRPVHNKSEPAWEWEDAQGFSALLHSGKCECKEQTLGNAKAFCGMKYSYVLKIKILSAHDKGTHVEVNVKIKKVLKSTKLKIFRGKRTLYPESWTDRGCTCPILNPGLEYLVAGHEDIRTGKLIVNMKSFVQHWKPSLGRKVMDILKRECK

SEQ ID NO: 208754 - protein, 605 aa, Artificial Sequence
  derived and/or modified sequence
MGSCARLLLLWGCTVVAAGLSGVAGVSSRCEKACNPRMGNLALGRKLWADTTCGQNATELYCFYSENTDLTCRQPKCDKCNAAYPHLAHLPSAMADSSFRFPRTWWQSAEDVHREKIQLDLEAEFYFTHLIVMFKSPRPAAMVLDRSQDFGKTWKPYKYFATNCSATFGLEDDVVKKGAICTSKYSSPFPCTGGEVIFKALSPPYDTENPYSAKVQEQLKITNLRVQLLKRQSCPCQRNDLNEEPQHFTHYAIYDFIVKGSCFCNGHADQCIPVHGFRPVKAPGTFHMVHGKCMCKHNTAGSHCQHCAPLYNDRPWEAADGKTGAPNECRTCKCNGHADTCHFDVNVWEASGNRSGGVCDDCQHNTEGQYCQRCKPGFYRDLRRPFSAPDACKPCSCHPVGSAVLPANSVTFCDPSNGDCPCKPGVAGRRCDRCMVGYWGFGDYGCRPCDCAGSCDPITGDCISSHTDIDWYHEVPDFRPVHNKSEPAWEWEDAQGFSALLHSVLKIKILSAHDKGTHVEVNVKIKKVLKSTKLKIFRGKRTLYPESWTDRGCTCPILNPGLEYLVAGHEDIRTGKLIVNMKSFVQHWKPSLGRKVMDILKRECK

SEQ ID NO: 208755 - DNA, 432 bp, Artificial Sequence
  derived and/or modified sequence
atgctgagaaagacctgcggcggccagcaggaggacagcagaggcatgggcccccacctgcccagagtgcccgacggcgtggtgctgggcgtggaggagcccgagggcaaggcccagggcagagtgagaggcgagctgtgccccggcgccctggccagaatccacatgggccacagctgcaccagactgagcgccgagggcatcgccatgctgctgggcaccgccggccccagcagactgcccgccgcccccgacgccagccaggcccccctgagaagcccctgggccctgagcgtggccgccgccctgtgcagccccgtgagctgccacccctgcggcagacacgtggtgaccttcggccactgccccgcccagggcccctggggcctgggcaccttcggccacagcttcttcggctgcctgtgcaagtag

SEQ ID NO: 208756 - DNA, 1887 bp, Artificial Sequence
  derived and/or modified sequence
atggggtcctgcgcgcgtctcctgttgctctggggttgtactgtcgttgccgccgggctctccggcgtggccggagtttcaagcaggtgtgaaaaagcttgcaatcctcggatggggaacttagcgcttggcaggaagctttgggctgatacgacgtgtgggcagaacgccactgagctttattgtttttatagcgaaaacaccgatttgacctgcaggcagcctaaatgtgataagtgtaatgcggcatacccacaccttgcccacctgccttcagccatggctgattcttcctttcgatttccaagaacctggtggcaaagcgcagaggatgttcacagagaaaagatccagctggacctagaggccgaattttactttactcatctgatagtcatgtttaaatctccacggcccgctgctatggttttagaccggagtcaggacttcgggaagacatggaagccatacaaatacttcgcaacaaattgctctgcaacgtttggattagaggacgacgttgtgaagaaaggtgcgatctgcacttctaagtactcttcgccattcccttgcaccggaggggaggtcatcttcaaggccctgagcccaccgtacgatacagagaatccctactccgcaaaggttcaggaacagctgaaaattacaaacttgagggtgcagctactgaagcgacagagctgcccgtgccagagaaacgacctgaatgaggaaccacagcacttcactcactacgccatctacgatttcattgtgaaagggagctgcttctgtaacggccatgccgaccagtgtattccagtgcacggattcagacccgtgaaggctcctggaacgtttcatatggtacacggaaagtgtatgtgcaaacataataccgctggaagccactgtcagcattgcgctcccctttacaacgaccgcccatgggaggcagcagacggcaaaacaggggcaccgaacgagtgtcgcacatgcaagtgtaacggccacgcggacacgtgccacttcgacgtgaatgtctgggaggcgtctggtaacaggagcggaggagtgtgcgatgattgtcagcataacacagagggacagtattgtcagcggtgcaagcccggcttttatcgcgacctacggaggcccttcagtgcccctgatgcttgcaagccttgctcttgccaccccgtcggatctgccgtccttccagcaaactcagtgacattctgtgacccttcgaatggagattgtccgtgcaaacccggagtcgcggggcggcgatgcgaccgctgcatggtaggttattggggcttcggagactatggttgccggccctgcgactgcgcaggcagctgcgaccctattaccggcgactgcatctcctcccataccgacatcgactggtatcatgaagtgccagactttaggcctgtgcacaataaaagcgaacccgcatgggagtgggaagatgctcagggcttttctgcattacttcatagcggcaagtgcgagtgcaaggagcagaccctgggtaatgcaaaagctttctgtggtatgaaatatagctacgtcctcaagattaaaatactgtcggcccacgacaagggcacccacgtggaggtgaacgtaaagattaaaaaagttctgaagagtacgaagttgaaaatcttccgggggaagcgaactctgtatcctgagtcctggactgaccggggttgcacttgtcccatactgaaccctgggctggaatacctggtggccggtcacgaagacatccgcacagggaaattaattgtgaatatgaaatctttcgtccagcattggaagcctagcctaggtagaaaagtgatggatattctcaaacgagagtgcaaatag

SEQ ID NO: 208757 - DNA, 1776 bp, Artificial Sequence
  derived and/or modified sequence
atgggtaacctggccttgggccgaaagctgtgggccgatacaacgtgtggacagaatgcaacagagctttattgtttctattctgagaataccgatctgacttgcagacaaccgaagtgcgacaaatgtaacgcggcctaccctcaccttgctcacctgcctagcgcgatggcagatagctcttttcgctttcccaggacttggtggcagtccgccgaagatgtacatcgggagaaaattcaattagatcttgaggcagagttctattttacccacctgatcgtgatgttcaagtctccgcgcccagcggctatggttctggacaggagtcaggattttggtaagacctggaaaccatacaaatactttgccaccaactgttctgcaacttttggattagaggacgacgtcgtaaagaagggtgcaatatgtacctccaagtacagttccccatttccctgcaccgggggtgaagtgatctttaaggccttgtcacctccttatgatacagagaacccatactctgcaaaagtgcaggagcagttaaagattactaatctgagagttcagctcctaaagaggcagtcatgcccttgtcagcggaacgatcttaatgaggaacctcagcattttactcattacgcaatctacgattttattgtcaaagggagttgtttctgcaacggacacgcagatcagtgcattcctgtgcatgggttccgccctgtgaaggcccctggcacctttcatatggtgcacggcaaatgtatgtgcaagcataacacagctggttcccattgtcagcactgcgctccgttatacaatgatcgaccatgggaggcagcggacggtaagaccggcgctccgaacgagtgccgcacctgcaaatgcaatgggcacgccgacacatgtcatttcgatgtcaacgtctgggaggcgagcggcaaccgttcgggaggggtttgtgacgactgccagcacaatacagaggggcagtattgccagcgctgtaagccaggcttctatagggatctccggcgccctttctctgctccagacgcatgcaagccatgtagttgccacccagtgggtagcgcggtgctgcctgcaaactctgtcactttctgtgacccttcaaatggcgattgcccatgcaagcctggggtcgcaggaagacggtgcgacagatgtatggtcggatattggggcttcggagattacgggtgtcggccttgtgattgtgcagggtcttgcgatcccatcacgggggattgtatctcttcccatacagatattgactggtatcatgaggtacccgattttagacctgtgcacaacaaatccgagccggcgtgggaatgggaagatgcacaaggcttttctgcactgctgcactccgggaagtgtgagtgcaaagaacagactctcggtaatgcaaaagcattctgtggaatgaagtactcttatgtgctcaagataaaaatccttagcgcccacgacaagggaacccatgtcgaagtgaatgtcaaaataaaaaaggtgcttaagtcgaccaagctcaagatttttcggggaaagaggactctgtaccccgagtcttggaccgataggggatgtacctgcccaatcctgaatcctggccttgagtatctcgtggcaggtcatgaagacatccggaccggcaagttgatcgtgaatatgaagtcctttgtacaacactggaaaccaagcttgggccgtaaggtgatggatatcttgaagcgcgagtgcaagtag

SEQ ID NO: 208758 - DNA, 1818 bp, Artificial Sequence
  derived and/or modified sequence
atgggatcctgcgctaggctgctgctgctgtggggctgcacagttgtcgcagctggcctgagcggagtggccggggtgagctccaggtgtgaaaaggcctgcaaccctagaatgggcaacctcgctctcggcaggaagctgtgggccgacacaacttgcgggcagaatgctacagagctctactgcttctattcagaaaacacagatcttacatgcaggcagccgaaatgcgataaatgcaacgcggcctacccccacttggcacacttaccatctgctatggctgattcatcgtttagattcccacggacatggtggcagtccgcggaagatgtgcatagagagaaaatccagctggatcttgaggccgaattttactttacccatctgatcgtcatgttcaaaagtcccagacctgcagctatggtgctggatagaagccaggacttcggtaagacttggaagccctataagtacttcgcaacaaactgttccgctacctttggattggaagacgacgttgtcaagaaaggagcgatctgcacatctaaatacagttccccttttccgtgtactggaggcgaggtgatctttaaagcgctgtctcctccgtatgataccgaaaatccatacagcgctaaggtgcaggagcagctgaagatcactaatctgcgggtccaactcctgaaacggcagtcatgcccctgtcagcggaacgatctgaatgaagaacctcaacactttactcactacgctatttatgacttcatcgtgaagggatcttgcttctgcaatggtcatgctgatcaatgtatccccgtccacgggtttcgtcccgtgaaagcccccgggaccttccacatggtgcatggcaaatgcatgtgcaagcacaatacggctggatctcactgtcagcattgtgcaccactgtacaatgatagaccctgggaggccgctgatggtaaaacaggggcccctaacgagtgccgcacatgcaaatgcaatgggcacgcggatacttgtcacttcgatgtcaatgtctgggaagcatccggcaatcgatcgggcggcgtttgtgatgattgtcagcacaataccgagggccagtactgccagagatgtaaacctgggttctatcgggacctccggcgcccgttctcggcccccgatgcttgtaagccctgttcgtgccaccccgtcgggagtgctgtactccctgcaaacagtgtgacattctgcgatccgagcaacggcgactgcccctgcaagcccggggtagcaggccggcgctgtgatcgctgtatggttggttattgggggttcggggactatggatgccggccctgtgattgtgcagggtcctgtgatcctataacaggtgactgcattagctctcatacagacatcgactggtatcatgaggtacccgattttcgtcctgtccataacaaaagcgaacccgcgtgggaatgggaggatgcccagggcttttccgctctgctgcattccgttttaaagatcaagatcctgtcagcacacgataaggggacgcacgtggaggtgaacgtgaagatcaaaaaagttcttaaatccactaagctgaaaatcttccgcgggaaaagaactctgtaccccgaatcatggacagatcggggctgcacatgtccaattctgaacccaggactggaatatctggtcgccgggcacgaggacattcgcaccggcaagcttattgtgaacatgaagtcatttgtgcaacattggaaaccctccctcggaagaaaagtgatggacatcctgaagcgcgagtgcaaatag

SEQ ID NO: 208759 - DNA, 1887 bp, Artificial Sequence
  derived and/or modified sequence
atgggcagctgtgcccggctgctgctgctgtggggctgcaccgtggtggccgccggcctgtctggagtggccggcgtgagcagccgctgtgagaaggcctgcaaccccaggatgggcaacctggccctgggcaggaagctgtgggccgacaccacctgtggccagaatgccacagagctgtactgcttctacagcgagaacacagacctgacctgccggcagcccaagtgtgacaagtgcaatgctgcctacccccacctggcccacctgcccagcgccatggctgacagcagcttccgcttccccaggacctggtggcagagcgcagaagatgtgcaccgggagaagatccagctggacctggaggccgagttctacttcacccacctgattgtgatgttcaagagccccaggcctgctgccatggtgctggacaggagccaggactttgggaagacctggaagccctacaagtactttgccaccaactgcagcgccaccttcggcctggaggatgatgtggtgaagaagggggccatctgcaccagcaagtacagcagccccttcccctgcaccggcggggaggtgatcttcaaggccctgagccccccctatgacacagagaacccctacagcgccaaggtgcaggagcagctgaagatcaccaacctgcgggtgcagctgctgaagaggcagagctgcccctgccagagaaatgacctgaatgaggagccccagcacttcacccactacgccatctatgacttcatcgtgaagggcagctgcttctgcaatggacatgctgaccagtgcatccctgtgcacggcttccggcctgtgaaggcccctggcaccttccacatggtgcacggcaagtgcatgtgcaagcacaacacagctggcagccactgccagcactgtgcccccctgtacaatgaccggccctgggaggccgcagatggcaagacaggagccccaaatgaatgtaggacctgcaagtgcaatggacatgctgacacctgccactttgatgtgaatgtgtgggaggccagcggcaacagaagtggaggagtgtgtgatgactgccagcacaacacagagggccagtactgccagcgctgcaagccaggcttctacagagacctgcggcggcccttcagcgccccagatgcctgcaagccctgcagctgccaccctgtgggcagcgctgtgctgcctgccaacagcgtgaccttctgtgaccccagcaatggagactgcccctgcaagccaggagtggccggcagaagatgtgaccgctgcatggtgggctactggggctttggagactatggctgccggccctgtgactgtgccggcagctgtgaccccatcactggagactgcatcagcagccacacagacatcgactggtaccacgaggtgcctgacttccggcctgtgcacaacaagtctgagcccgcctgggagtgggaggatgcccagggcttcagcgccctgctgcacagcgggaaatgtgagtgcaaggagcagaccctgggcaatgccaaggccttctgtggcatgaagtacagctatgtgctgaagatcaagatcctgagcgcccatgacaagggcacccacgtggaggtgaatgtgaagatcaagaaggtgctgaagagcaccaagctgaagatcttccggggcaagaggaccctgtacccagagagctggacagaccggggctgcacctgccccatcctgaaccctggcctggagtacctggtggccggccacgaggacatcagaacaggcaagctgattgtgaacatgaagagctttgtgcagcactggaagcccagcctgggcaggaaggtgatggacatcctgaagcgggagtgcaagtag

SEQ ID NO: 208760 - DNA, 1776 bp, Artificial Sequence
  derived and/or modified sequence
atgggcaacctggccctgggcaggaagctgtgggccgacaccacctgtggccagaatgccacagagctgtactgcttctacagtgaaaatacagacctgacctgccggcagcccaagtgtgacaagtgcaatgctgcctacccccacctggcccacctgcccagcgccatggctgacagcagcttccgcttccccaggacctggtggcagagcgcagaagatgtgcaccgggagaagatccagctggacctggaggccgagttctacttcacccacctgattgtgatgttcaagagccccaggcctgctgccatggtgctggacaggagccaggactttgggaagacctggaagccctacaagtactttgccaccaactgcagcgccaccttcggcctggaggatgatgtggtgaagaagggggccatctgcaccagcaagtacagcagccccttcccctgcacaggaggagaggtgatcttcaaggccctgagccccccctatgacacagagaacccctacagcgccaaggtgcaggagcagctgaagatcaccaacctgcgggtgcagctgctgaagaggcagagctgcccctgccagagaaatgacctgaatgaggagccccagcacttcacccactacgccatctatgacttcatcgtgaagggcagctgcttctgcaatggacatgctgaccagtgcatccctgtgcacggcttccggcctgtgaaggcccctggcaccttccacatggtgcacggcaagtgcatgtgcaagcacaacacagctggcagccactgccagcactgtgcccccctgtacaatgaccggccctgggaggccgcagatggcaagacaggagccccaaatgaatgtaggacctgcaagtgcaatggacatgctgacacctgccactttgatgtgaatgtgtgggaggccagcggcaacagaagtggcggcgtgtgtgatgactgccagcacaacacagagggccagtactgccagcgctgcaagccaggcttctacagagacctgcggcggcccttcagcgccccagatgcctgcaagccctgcagctgccaccctgtgggcagcgctgtgctgcctgccaacagcgtgaccttctgtgaccccagcaatggagactgcccctgcaagccaggagtggccggccgccgctgtgaccgctgcatggtgggctactggggctttggagactatggctgccggccctgtgactgtgccggcagctgtgaccccatcaccggggactgcatcagcagccacacagacatcgactggtaccacgaggtgcctgacttccggcctgtgcacaacaagtctgagcccgcctgggagtgggaggatgcccagggcttcagcgccctgctgcacagcgggaaatgtgagtgcaaggagcagaccctgggcaatgccaaggccttctgtggcatgaagtacagctatgtgctgaagatcaagatcctgagcgcccatgacaagggcacccacgtggaggtgaatgtgaagatcaagaaggtgctgaagagcaccaagctgaagatcttccggggcaagaggaccctgtacccagagagctggacagaccggggctgcacctgccccatcctgaaccctggcctggagtacctggtggccggccacgaggacatcagaacaggcaagctgattgtgaacatgaagagctttgtgcagcactggaagcccagcctgggcaggaaggtgatggacatcctgaagcgggagtgcaagtag

SEQ ID NO: 208761 - DNA, 1818 bp, Artificial Sequence
  derived and/or modified sequence
atgggcagctgtgcccggctgctgctgctgtggggctgcaccgtggtggccgccggcctgtctggagtggccggcgtgagcagccgctgtgagaaggcctgcaaccccaggatgggcaacctggccctgggcaggaagctgtgggccgacaccacctgtggccagaatgccacagagctgtactgcttctacagcgagaacacagacctgacctgccggcagcccaagtgtgacaagtgcaatgctgcctacccccacctggcccacctgcccagcgccatggctgacagcagcttccgcttccccaggacctggtggcagagcgcagaagatgtgcaccgggagaagatccagctggacctggaggccgagttctacttcacccacctgattgtgatgttcaagagccccaggcctgctgccatggtgctggacaggagccaggactttgggaagacctggaagccctacaagtactttgccaccaactgcagcgccaccttcggcctggaggatgatgtggtgaagaagggggccatctgcaccagcaagtacagcagccccttcccctgcaccggcggggaggtgatcttcaaggccctgagccccccctatgacacagagaacccctacagcgccaaggtgcaggagcagctgaagatcaccaacctgcgggtgcagctgctgaagaggcagagctgcccctgccagagaaatgacctgaatgaggagccccagcacttcacccactacgccatctatgacttcatcgtgaagggcagctgcttctgcaatggacatgctgaccagtgcatccctgtgcacggcttccggcctgtgaaggcccctggcaccttccacatggtgcacggcaagtgcatgtgcaagcacaacacagctggcagccactgccagcactgtgcccccctgtacaatgaccggccctgggaggccgcagatggcaagacaggagccccaaatgaatgtaggacctgcaagtgcaatggacatgctgacacctgccactttgatgtgaatgtgtgggaggccagcggcaacagaagtggaggagtgtgtgatgactgccagcacaacacagagggccagtactgccagcgctgcaagccaggcttctacagagacctgcggcggcccttcagcgccccagatgcctgcaagccctgcagctgccaccctgtgggcagcgctgtgctgcctgccaacagcgtgaccttctgtgaccccagcaatggagactgcccctgcaagccaggagtggccggcagaagatgtgaccgctgcatggtgggctactggggctttggagactatggctgccggccctgtgactgtgccggcagctgtgaccccatcactggagactgcatcagcagccacacagacatcgactggtaccacgaggtgcctgacttccggcctgtgcacaacaagtctgagcccgcctgggagtgggaggatgcccagggcttcagcgccctgctgcacagcgtgctgaagatcaagatcctgagcgcccatgacaagggcacccacgtggaggtgaatgtgaagatcaagaaggtgctgaagagcaccaagctgaagatcttccggggcaagaggaccctgtacccagagagctggacagaccggggctgcacctgccccatcctgaaccctggcctggagtacctggtggccggccacgaggacatcagaacaggcaagctgattgtgaacatgaagagctttgtgcagcactggaagcccagcctgggcaggaaggtgatggacatcctgaagcgggagtgcaagtag

SEQ ID NO: 208762 - DNA, 1887 bp, Artificial Sequence
  derived and/or modified sequence
atgggcagctgcgcccggctgctgctgctgtggggctgcaccgtggttgctgcaggactcagcggagtggcaggcgttagttctaggtgtgaaaaagcttgtaacccgcgcatggggaaccttgcccttggaaggaaactatgggccgataccacttgcggccagaatgccaccgaactgtactgcttttattctgaaaacactgatctgacgtgccgtcagccaaagtgtgataaatgcaatgcagcctacccccacctggcccatctgcctagcgctatggctgatagctctttccgcttcccaagaacatggtggcagagtgccgaggacgtgcaccgggagaaaattcaactcgacctagaggccgaattctacttcacacacttgattgttatgttcaagagcccgcggcccgccgcgatggtcctggataggagccaggattttggtaagacatggaaaccttataagtacttcgccaccaattgcagcgccacctttggcttagaggatgatgtggtcaaaaagggcgctatctgcaccagtaagtacagctctccattcccatgcaccggcggggaagtgatctttaaggcgctcagccctccatatgatacggaaaatccctattccgcgaaggtgcaagagcagttgaaaataacaaatctccgagttcagctgctcaagaggcaatcgtgtccatgtcaacgcaacgatttaaatgaagaacctcagcattttacccattacgccatctacgacttcatcgtgaaaggatcttgcttctgcaatggccacgccgaccagtgcattcccgtccatgggtttcgcccagtgaaagccccaggcacttttcacatggtccacgggaagtgtatgtgcaagcataataccgcaggctcccactgtcagcactgtgctcctctgtacaacgatagaccatgggaagccgccgatggcaagactggcgcgccaaacgagtgtcggacctgcaaatgcaatggccacgcagatacatgtcactttgatgttaatgtctgggaggcttctggaaatcgatcgggaggggtctgcgatgactgccagcataatactgaagggcaatattgccagaggtgcaagccggggttttatcgggatctgcgcaggcccttttctgccccggatgcttgtaaaccctgttcatgtcaccctgtgggttcagcagtccttcctgctaattccgtaacattttgtgaccccagcaacggcgattgcccttgcaaacccggagtggcgggaaggcggtgtgaccgctgtatggtcgggtattgggggttcggtgattacgggtgcagaccctgcgattgtgccgggtcttgcgacccgattaccggggactgtattagtagtcatacagatatcgactggtatcacgaggtgcctgactttcgcccggtccacaacaaatccgaacccgcttgggagtgggaagacgctcagggtttcagcgcccttctccacagtggtaaatgcgagtgtaaggagcagaccctgggaaatgcaaaggccttttgcgggatgaagtactcttacgttcttaaaattaagatcctgtccgcacacgacaaagggacgcacgtcgaagttaacgtgaaaataaagaaggtgttgaagagtactaaacttaaaattttccgtggcaaacgcacactctatccggagtcctggaccgatcggggctgcacatgccccattttgaatcccggattggaatatctcgtggccgggcatgaggacatccgaaccggaaaactaattgtaaacatgaaaagctttgtacagcactggaagccctccctgggaaggaaggtcatggacattctgaaaagggagtgcaaatag

SEQ ID NO: 208763 - DNA, 1776 bp, Artificial Sequence
  derived and/or modified sequence
atgggcaacctggccctgggccggaagctgtgggccgacaccacctgcggccagaacgcaaccgaactgtattgtttttactctgagaataccgacttgacctgtcgacagccgaaatgcgacaaatgcaatgctgcctatccccatctggctcatctgccatctgctatggccgatagctctttccggtttcctcggacctggtggcagtctgccgaggatgttcatagggagaagattcagctggatctcgaagctgagttttatttcacccatttaattgttatgttcaaatccccacgcccagcagctatggtgctggataggtcccaggacttcggcaagacctggaagccctacaagtacttcgcaactaactgttccgccacattcggcctcgaggatgacgtggttaaaaagggcgctatttgtacaagcaagtattctagtccattcccttgcaccggcggagaggtgatcttcaaggcgctgtcccctccatatgatactgaaaacccctattcagcaaaggtacaagaacagctcaagataaccaacttaagggttcagttgctgaagagacaatcatgtccttgtcagagaaacgacctgaatgaggagccccagcattttacgcattacgcgatttatgactttattgttaaagggagctgtttctgtaatggccacgccgaccagtgcattccagtgcatggctttcgtcccgtgaaagcacctggtactttccacatggtgcacggcaagtgcatgtgcaaacataacactgcaggctctcattgccagcactgcgctcccctctacaatgaccggccgtgggaagccgctgacggcaagacaggcgcccccaacgagtgccgaacatgtaagtgtaacggtcatgctgatacctgccatttcgacgttaacgtctgggaagcttccgggaaccgcagcggcggcgtatgcgacgactgtcagcacaacaccgaggggcagtattgccagaggtgtaagcctggcttttatagggacttgcgtagacctttcagcgcgcccgatgcatgtaaaccttgctcatgccacccagtgggctccgccgtgttgccagcaaattcagtcacattctgcgacccctccaacggtgattgcccctgtaagcctggggtggccggacggcgctgcgacagatgcatggtgggatactggggtttcggggattacggttgcagaccttgcgactgcgctggaagttgcgacccaatcaccggtgactgtatatcatcccacacagacatcgattggtatcacgaggttcctgattttcggcccgtgcacaataaatcagaacccgcatgggagtgggaagatgcacagggattttcagcactcctccactcagggaaatgcgagtgtaaggagcagacgttagggaacgctaaagctttttgcggtatgaaatattcttatgtccttaagatcaaaattctttctgcacacgacaagggcacccacgttgaggttaacgtgaaaataaagaaggtgttgaagagcacgaagcttaagatttttagaggaaaaagaacactgtacccagagtcttggacagatcgtggctgcacatgcccgatactgaatcccggcttggagtatctggtcgcagggcatgaagatatccggaccggcaaacttatcgtaaatatgaaatcgttcgtacagcattggaagcctagcctggggcggaaggtcatggatatactgaaacgagaatgcaaatag

SEQ ID NO: 208764 - DNA, 1818 bp, Artificial Sequence
  derived and/or modified sequence
atgggcagctgcgcccggctgctgctgctgtggggctgcaccgtggtcgccgctggtctatcaggcgttgccggggttagttcacggtgcgaaaaagcctgcaaccctaggatggggaaccttgcactcggccggaagctatgggccgatacgacatgcggtcagaacgctacagaactgtattgcttttattctgagaacacagacctaacctgcagacagcctaagtgcgacaaatgcaatgccgcgtatccccacctggcccatttgccatcggctatggccgactcatccttccgcttcccccgcacctggtggcagagtgcggaagacgttcatagggaaaagatccaattagatctagaagctgaattctactttactcacttgattgtgatgtttaagagtcccagacctgccgccatggtgctagaccggtcacaggactttggcaagacgtggaagccatacaagtatttcgcgacaaactgcagtgccaccttcggcctcgaagacgacgtcgtcaaaaaaggagcaatctgtacctctaaatatagctctcccttcccgtgtaccggcggcgaggtcatctttaaggccctgagtccaccctacgatacagaaaatccctattccgcaaaagttcaggagcagctaaaaatcacaaacctccgcgtgcagctcctgaagcggcaatcttgcccctgtcagcgaaatgacctgaatgaggaaccgcaacatttcactcactacgctatttatgatttcatcgttaaaggatcctgcttctgtaatggccacgcagatcaatgcatccctgtacatggctttcgacctgtaaaagccccaggtacctttcacatggtgcatggtaaatgcatgtgtaagcataacacggctggttctcattgtcagcattgtgctcccctttacaatgataggccctgggaagctgctgacgggaagactggggcgcccaatgaatgcagaacttgcaaatgtaatggtcatgcggacacctgtcacttcgacgtcaatgtgtgggaagctagtggtaaccggtctggtggtgtgtgtgacgactgccaacacaacacagaggggcaatactgtcagcgttgtaaacctggattttaccgagaccttcggcgacctttctccgcccccgacgcttgcaaaccctgttcctgtcacccagttgggagtgctgtgttgcccgccaactccgtcactttctgcgacccctcaaacggtgattgcccttgcaaaccgggggtcgccggacgacggtgtgacaggtgcatggtcgggtattgggggttcggtgattatggatgccggccctgcgactgcgctggatcttgtgaccccattactggcgattgcattagctcccatactgacattgactggtaccacgaagttccagattttcggccggtgcacaataaatctgagcccgcctgggagtgggaagacgcgcaaggattctctgcactgctacactctgtccttaaaatcaagattctgagtgcgcacgacaagggaacgcacgttgaagtcaatgtgaaaatcaaaaaggtgctgaagtcaaccaaattgaagatcttccggggcaaaaggaccctttacccagagtcttggacagataggggctgtacatgcccaattctgaatccaggattagagtatttggttgctggccatgaagatatcagaactggcaaactgattgtcaacatgaaatccttcgtacaacattggaagccctcactcggccgtaaggtgatggatattttgaaacgagaatgcaagtag

SEQ ID NO: 208765 - DNA, 3615 bp, Artificial Sequence
  derived and/or modified sequence
ggacgggacggagccggggcagccagaagaggtgggaaaagcggaggaggacgcccaggaggaggcggcggcggcggccgggaagtgaaaggtctcgcaaagttcagcggcggctgcgggcgccgagccccgggctagcggcagacgagcccgcagggccgctccgcggggcagcgcagccaggccggctatggtcccggggctcccgccgccccccaggtgcccgggacccgccaggccggtgcgcgagggtcaccccacctccccgcgcggtcccggcccctggctcccagctgccggcgaccgctgaccgagcccggcgccccaggaggaggaagaaaccagggccccgttccctcccgaggacggcggcgcttcatcccgcagcccagaggtctcggctccctccggcacccgcccggcccggctgctcccggctcctcccggccatggggagctgcgcgcggctgctgctgctctggggctgcacggtggtggccgcaggactgagtggagtagctggagtgagttcccgctgtgaaaaagcctgcaaccctcggatgggaaatttggctttggggcgaaaactctgggcagacaccacctgcggtcagaatgctaccgaactgtactgcttctacagtgagaacacggatctgacttgtcggcagcccaaatgtgacaagtgcaatgctgcctatcctcacctggctcacctgccatctgccatggcagactcatccttccggtttcctcgcacatggtggcagtctgcggaggatgtgcacagagaaaagatccagttagacctggaagctgaattctacttcactcacctaattgtgatgttcaagtcccccaggccggctgccatggtgctggaccgctcccaggactttgggaaaacatggaagccttataagtactttgcgactaactgctccgctacatttggcctggaagatgatgttgtcaagaagggcgctatttgtacttctaaatactccagtccttttccatgcactggaggagaggttattttcaaagctttgtcaccaccatacgatacagagaacccttacagtgccaaagttcaggagcagctgaagatcaccaaccttcgcgtgcagctgctgaaacgacagtcttgtccctgtcagagaaatgacctgaacgaagagcctcaacattttacacactatgcaatctatgatttcattgtcaagggcagctgcttctgcaatggccacgctgatcaatgcatacctgttcatggcttcagacctgtcaaggccccaggaacattccacatggtccatgggaagtgtatgtgtaagcacaacacagcaggcagccactgccagcactgtgccccgttatacaatgaccggccatgggaggcagctgatggcaaaacgggggctcccaacgagtgcagaacctgcaagtgtaatgggcatgctgatacctgtcacttcgacgttaatgtgtgggaggcatcagggaatcgtagtggtggtgtctgtgatgactgtcagcacaacacagaaggacagtattgccagaggtgcaagccaggcttctatcgtgacctgcggagacccttctcagctccagatgcttgcaaaccgtgttcctgccatccagtaggatcagctgtccttcctgccaactcagtgaccttctgcgaccccagcaatggtgactgcccttgcaagcctggggtggcagggcgacgttgtgacaggtgcatggtgggatactggggcttcggagactatggctgtcgaccatgtgactgtgcggggagctgtgaccctatcaccggagactgcatcagcagccacacagacatagactggtatcatgaagttcctgacttccgtcccgtgcacaataagagcgaaccagcctgggagtgggaggatgcgcaggggttttctgcacttctacactcaggtaaatgcgaatgtaaggaacagacattaggaaatgccaaggcattctgtggaatgaaatattcatatgtgctaaaaataaagattttatcagctcatgataaaggtactcatgttgaggtcaatgtgaagattaaaaaggtcttaaaatctaccaaactgaagattttccgaggaaagcgaacattatatccagaatcatggacggacagaggatgcacttgtccaatcctcaatcctggtttggaataccttgtagcaggacatgaggatataagaacaggcaaactaattgtgaatatgaaaagctttgtccagcactggaaaccttctcttggaagaaaagtcatggatattttaaaaagagagtgcaagtagcattaagatggatagcacataatggcacttgtctatgtacaaaacacaaactttagagcaagaagacctcagacaggaaactggaattttttaaagtgccaaaacatatagaaatgtttgaatgcatgggtcttatctaacttatctcttctggacccatgtttaaatacagttttatttcatgaagagaaatgaaaacccctacactgatatctgttttctatgggactgattctgaaattcttaactattaagaatattttaatagcagcatgacatttagcagtaatccattaagggcagtacctctaacaaggacgccttccagcttcagcgatgttacttacgtttgatgctacttaaagtaatgaatgacgttttaaggaatccctaaccctactatcagaaaaggtgtttgttaaagagccttctcttgtgtgttacgcatgaactttggtctgtaggtgttaaatggaacctctccatgtgtatatagtatttccttgtataaagcactttactacctaccacttgtgttgtgaacgtttggtgactgctgttgaaagaaggaaaagggtgtgtgagaaagcctactgaagcagcagcactgccactacatgtggacaaaagtgaccatataaaagaagttgtgctatttaactctgaatacttggagaaactaggtgaagatgcaaccagaaaggagaatatgtatgcgtgaagtctcagctttgagctggaggctagattccaagatgacagccatgatgaaactttttaaaaaactaaaccagaagagactttaaaataagagaaagaaatcataaatgtagacatatgcttggctaaaggggaaatggactttaaattttaaagagctcatttgcaatgcacttgtatacacttcaaaaattattgtagacacagaatttgttatatttttgtgcttagtatttaaacctgaacattgaaacagttttcctccttgtctttcttaacagtaatagtcattatatttacctgttttttaacacaatgtatgtgatagtcaaaaaatcacagtttttcattattattcatcttctgtacccacgcataaccactatacatagtttcttttgtacttgaatatacaaaacatgaacacagtgccatatgaataatttcacatacagaacctttttttctctgaagtcctgtggacttgcaaatatatatatatattgctttgttaatttgtttttatatttcatatatgtaataaaggaatatgatctga

SEQ ID NO: 208766 - DNA, 1971 bp, Artificial Sequence
  derived and/or modified sequence
ctagagggagtctactgctcttaggaatgttccgggagaaggactgagtggagtagctggagtgagttcccgctgtgaaaaagcctgcaaccctcggatgggaaatttggctttggggcgaaaactctgggcagacaccacctgcggtcagaatgctaccgaactgtactgcttctacagtgagaacacggatctgacttgtcggcagcccaaatgtgacaagtgcaatgctgcctatcctcacctggctcacctgccatctgccatggcagactcatccttccggtttcctcgcacatggtggcagtctgcggaggatgtgcacagagaaaagatccagttagacctggaagctgaattctacttcactcacctaattgtgatgttcaagtcccccaggccggctgccatggtgctggaccgctcccaggactttgggaaaacatggaagccttataagtactttgcgactaactgctccgctacatttggcctggaagatgatgttgtcaagaagggcgctatttgtacttctaaatactccagtccttttccatgcactggaggagaggttattttcaaagctttgtcaccaccatacgatacagagaacccttacagtgccaaagttcaggagcagctgaagatcaccaaccttcgcgtgcagctgctgaaacgacagtcttgtccctgtcagagaaatgacctgaacgaagagcctcaacattttacacactatgcaatctatgatttcattgtcaagggcagctgcttctgcaatggccacgctgatcaatgcatacctgttcatggcttcagacctgtcaaggccccaggaacattccacatggtccatgggaagtgtatgtgtaagcacaacacagcaggcagccactgccagcactgtgccccgttatacaatgaccggccatgggaggcagctgatggcaaaacgggggctcccaacgagtgcagaacctgcaagtgtaatgggcatgctgatacctgtcacttcgacgttaatgtgtgggaggcatcagggaatcgtagtggtggtgtctgtgatgactgtcagcacaacacagaaggacagtattgccagaggtgcaagccaggcttctatcgtgacctgcggagacccttctcagctccagatgcttgcaaaccgtgttcctgccatccagtaggatcagctgtccttcctgccaactcagtgaccttctgcgaccccagcaatggtgactgcccttgcaagcctggggtggcagggcgacgttgtgacaggtgcatggtgggatactggggcttcggagactatggctgtcgaccatgtgactgtgcggggagctgtgaccctatcaccggagactgcatcagcagccacacagacatagactggtatcatgaagttcctgacttccgtcccgtgcacaataagagcgaaccagcctgggagtgggaggatgcgcaggggttttctgcacttctacactcaggtaaatgcgaatgtaaggaacagacattaggaaatgccaaggcattctgtggaatgaaatattcatatgtgctaaaaataaagattttatcagctcatgataaaggtactcatgttgaggtcaatgtgaagattaaaaaggtcttaaaatctaccaaactgaagattttccgaggaaagcgaacattatatccagaatcatggacggacagaggatgcacttgtccaatcctcaatcctggtttggaataccttgtagcaggacatgaggatataagaacaggcaaactaattgtgaatatgaaaagctttgtccagcactggaaaccttctcttggaagaaaagtcatggatattttaaaaagagagtgcaagtagcattaagatggatagcacataatggcacttgtctatgtacaaaacacaaactttagagcaagaagacctcagacaggaaactggaattttttaaagtg

SEQ ID NO: 208767 - DNA, 1818 bp, Artificial Sequence
  derived and/or modified sequence
atggggagctgcgcgcggctgctgctgctctggggctgcacggtggtggccgcaggactgagtggagtagctggagtgagttcccgctgtgaaaaagcctgcaaccctcggatgggaaatttggctttggggcgaaaactctgggcagacaccacctgcggtcagaatgctaccgaactgtactgcttctacagtgagaacacggatctgacttgtcggcagcccaaatgtgacaagtgcaatgctgcctatcctcacctggctcacctgccatctgccatggcagactcatccttccggtttcctcgcacatggtggcagtctgcggaggatgtgcacagagaaaagatccagttagacctggaagctgaattctacttcactcacctaattgtgatgttcaagtcccccaggccggctgccatggtgctggaccgctcccaggactttgggaaaacatggaagccttataagtactttgcgactaactgctccgctacatttggcctggaagatgatgttgtcaagaagggcgctatttgtacttctaaatactccagtccttttccatgcactggaggagaggttattttcaaagctttgtcaccaccatacgatacagagaacccttacagtgccaaagttcaggagcagctgaagatcaccaaccttcgcgtgcagctgctgaaacgacagtcttgtccctgtcagagaaatgacctgaacgaagagcctcaacattttacacactatgcaatctatgatttcattgtcaagggcagctgcttctgcaatggccacgctgatcaatgcatacctgttcatggcttcagacctgtcaaggccccaggaacattccacatggtccatgggaagtgtatgtgtaagcacaacacagcaggcagccactgccagcactgtgccccgttatacaatgaccggccatgggaggcagctgatggcaaaacgggggctcccaacgagtgcagaacctgcaagtgtaatgggcatgctgatacctgtcacttcgacgttaatgtgtgggaggcatcagggaatcgtagtggtggtgtctgtgatgactgtcagcacaacacagaaggacagtattgccagaggtgcaagccaggcttctatcgtgacctgcggagacccttctcagctccagatgcttgcaaaccgtgttcctgccatccagtaggatcagctgtccttcctgccaactcagtgaccttctgcgaccccagcaatggtgactgcccttgcaagcctggggtggcagggcgacgttgtgacaggtgcatggtgggatactggggcttcggagactatggctgtcgaccatgtgactgtgcggggagctgtgaccctatcaccggagactgcatcagcagccacacagacatagactggtatcatgaagttcctgacttccgtcccgtgcacaataagagcgaaccagcctgggagtgggaggatgcgcaggggttttctgcacttctacactcagtgctaaaaataaagattttatcagctcatgataaaggtactcatgttgaggtcaatgtgaagattaaaaaggtcttaaaatctaccaaactgaagattttccgaggaaagcgaacattatatccagaatcatggacggacagaggatgcacttgtccaatcctcaatcctggtttggaataccttgtagcaggacatgaggatataagaacaggcaaactaattgtgaatatgaaaagctttgtccagcactggaaaccttctcttggaagaaaagtcatggatattttaaaaagagagtgcaagtag

SEQ ID NO: 208768 - DNA, 1887 bp, Artificial Sequence
  derived and/or modified sequence
atggggtcatgcgctcggctcctcttgctctggggttgcacagttgtcgccgctggcctttccggggtggcgggagtgtcatctcggtgtgaaaaggcctgtaaccccagaatgggcaacctcgcgttgggccgtaagctgtgggccgacactacctgtggccagaacgcaaccgagctgtattgtttctattctgaaaacaccgacctgacctgtcgccaacctaagtgcgacaagtgcaacgccgcttatccacatttggcacacttgccgtctgcaatggctgactctagttttcgcttcccgaggacctggtggcagtctgcggaagatgtgcatagggagaagatccaactggatctggaagcggagttttacttcactcacctcattgtcatgttcaagtccccacgacctgctgctatggttctggacagaagccaggattttggaaaaacttggaaaccctataaatatttcgctaccaactgttcagccaccttcggcttggaggatgatgtggttaagaagggtgccatctgcactagtaagtattctagcccgttcccttgcacaggtggcgaggtgatcttcaaagccctgtctcctccctatgacaccgagaatccgtactccgcaaaggtgcaggagcaactcaagataaccaatcttagggtacagttgcttaagcgccaaagctgcccatgtcagagaaatgacttgaacgaggagccacaacatttcacacattatgccatctatgacttcatcgtgaaaggttcctgtttctgtaacggacacgccgatcaatgtatacccgtgcatggctttagacctgtgaaagccccaggtactttccatatggtgcacggaaagtgtatgtgcaaacacaataccgctgggagtcattgccagcattgtgcacctctctataacgaccggccttgggaagccgctgacggtaagacgggcgctcctaacgaatgccgcacatgcaaatgcaacgggcacgctgacacttgccactttgatgtgaatgtctgggaagcttctggcaaccgcagcggtggcgtctgcgacgactgtcagcacaacacggaagggcagtactgtcagcgatgtaagccgggattctatcgggacctgcgacgaccattcagtgcaccggacgcgtgcaagccttgctcttgtcatccggtcgggtccgctgtcctcccggctaattctgttaccttctgcgatccttccaacggcgattgcccctgcaaacccggtgtggccggaagacgctgcgaccgttgcatggtgggttactggggttttggagattacggctgccgtccatgtgactgtgccggaagttgcgatcccattacaggcgactgtatttcaagccataccgatatcgactggtaccacgaggtccccgatttccggccagtgcacaataaatccgagccagcctgggaatgggaggatgcacagggattctcggccttgttgcactcaggaaagtgcgaatgcaaagagcaaactttgggaaacgcaaaagcattctgcggtatgaagtacagctacgtcctgaaaattaagattctctccgcccacgacaaaggaacccacgttgaagtgaatgtgaaaatcaagaaagtgctgaagagtacgaagctcaagatctttaggggaaaacggacgctataccccgaatcttggacagatcgcggatgcacttgtccaatcttgaatcctggcctggagtacctggtcgcaggccatgaggacataagaacaggaaaactgatcgtgaacatgaagagcttcgtgcaacactggaaacctagcttgggaagaaaagtcatggatatacttaaaagggagtgcaaatag

SEQ ID NO: 208769 - DNA, 1776 bp, Artificial Sequence
  derived and/or modified sequence
atgggcaatcttgctctggggaggaagctctgggccgacacaacttgtgggcagaacgctacggaactatactgtttctactctgagaatactgatcttacttgtaggcaacccaagtgtgataagtgcaacgccgcttatccccacctggcccacctaccatcggcaatggctgactcttccttccgatttcctcgcacctggtggcagtctgccgaggacgtgcatcgagagaagattcagttagatttagaggccgagttttacttcacccacttgatcgtgatgtttaagagccctagaccagccgctatggtgctggaccgaagtcaggactttggcaaaacctggaagccgtataagtactttgctaccaactgctcagcaaccttcggcttggaggatgatgttgtgaagaaaggagccatttgtacgtccaagtattcaagtcccttcccttgtacgggaggcgaagtaatcttcaaagcactcagccccccatacgataccgaaaatccgtatagtgccaaagtacaggagcaactgaagatcaccaacctccgtgtgcagcttctgaaaagacagagttgtccgtgccagcggaatgacctgaatgaggagccacagcacttcactcattacgctatctatgatttcatcgtcaagggctcctgcttttgcaatggacacgccgatcagtgtatccccgtgcacggctttagacccgtgaaagctcctgggacatttcacatggtccatggaaagtgcatgtgcaaacataacactgccggaagccattgtcaacactgtgcccctttgtacaacgaccggccatgggaggcagccgacggaaagaccggagcgcctaatgagtgcagaacctgtaagtgcaacggccatgccgacacatgccactttgatgtgaacgtgtgggaggcttcaggtaataggagtgggggtgtctgtgatgattgccaacacaacacggaaggccagtactgccagcgatgcaagcccggtttttaccgggacctgcgcagaccattttctgctcctgatgcatgtaaaccatgctcatgccaccccgtgggatctgcggtgctgcctgctaattctgtgacattctgcgatccttccaatggcgactgtccttgcaaacccggtgtggccggacgtcgttgtgaccggtgcatggttggatactggggcttcggagactatggctgcaggccttgcgattgtgctggtagctgtgatcccatcactggggattgtatttcttctcacacagacatcgattggtatcacgaggtaccggatttcaggccggtgcacaacaagtctgaacccgcatgggaatgggaggacgctcagggcttttctgcactgctacacagcggaaagtgcgagtgcaaggagcagactctaggcaatgcgaaagctttctgcggcatgaaatactcatacgtattgaaaatcaagatcctgagtgcacatgataaaggcactcacgtggaggtgaacgtaaagataaaaaaggtgctcaaatctacgaaactgaagatttttcgcggtaaacgaacactctatcctgaaagctggacagacagaggttgcacttgcccaattttgaaccccggattggagtatttagtggcagggcatgaggacattcggaccggaaaacttattgtgaatatgaagtccttcgtccagcattggaaaccaagcttgggccgtaaggtaatggacatcctgaagagggagtgcaagtag

SEQ ID NO: 208770 - DNA, 1818 bp, Artificial Sequence
  derived and/or modified sequence
atgggcagctgcgcccgtctgctgttactgtggggctgtactgtagttgctgctggattgtctggcgtcgcgggagtgagcagcagatgcgaaaaagcgtgtaatccccgaatgggcaatctggctttaggcagaaaattgtgggccgatacaacttgcggccagaacgcaactgaactttattgtttctacagtgaaaataccgatctcacgtgcaggcagccgaaatgcgataagtgcaacgctgcctatccgcacttggcacatctgccctctgccatggctgattcttccttcaggttcccaagaacttggtggcagagcgcggaagacgtccaccgagaaaaaattcagcttgacctggaagcagagttctactttacccacctgatcgtcatgttcaaatcacctcgtcctgccgcaatggttctggacagatcacaggactttggaaagacttggaagccttataagtactttgccactaattgttctgccaccttcggattagaagatgacgtggtgaaaaagggcgcaatatgtacaagcaagtatagctcacccttcccatgtaccgggggagaagtcatcttcaaagccctgtctcccccttacgatactgagaacccatattctgcgaaagtgcaagagcagttaaaaatcaccaatctgagagttcaactcttaaagagacaatcttgcccttgccagagaaatgaccttaacgaggaaccacaacattttacacactacgctatatacgactttatcgtcaagggttcgtgtttctgcaacgggcacgccgaccagtgtattccagttcatggattccggccagttaaggctcctggcactttccacatggtgcacggcaagtgcatgtgcaagcacaacacagcaggcagtcattgccagcattgtgccccattgtacaacgatcgaccctgggaggccgctgatgggaagacgggtgccccaaacgaatgtcggacctgtaagtgtaatggacacgctgatacgtgccacttcgatgtgaacgtgtgggaggcaagcggcaatcggtctggtggagtgtgcgacgactgtcagcacaatacggagggacagtattgtcagcggtgcaagcctggattctatagagatctgaggcgaccatttagcgcgccagacgcctgtaagccctgtagttgtcatcccgtcgggtcggcagtgctgcccgctaacagcgttaccttttgcgaccctagtaatggcgattgcccttgtaagccaggcgtggcaggtaggcgttgcgaccggtgcatggtgggctattggggctttggtgactatggatgtcgcccttgcgactgcgcaggatcctgtgaccccattacgggtgattgcatctcctctcacacagacatcgattggtatcacgaagttcccgactttcgacccgtgcacaacaagagtgagcccgcttgggaatgggaggatgctcagggcttcagcgccctcttgcattcagttctgaaaatcaaaatattgagtgcgcacgacaagggaactcacgtggaagtgaacgtgaaaatcaaaaaggtcctgaagagtaccaagctgaaaatttttcggggaaaacggacgctttatccagagtcctggactgaccgaggctgcacttgtccaatactgaatcccggattggaataccttgtggctggccacgaagacatccggaccgggaaactcatcgtaaacatgaagtctttcgtccagcactggaagccctcccttggacgaaaggtaatggacatcttaaaacgggagtgcaagtag

SEQ ID NO: 208771 - DNA, 1887 bp, Artificial Sequence
  derived and/or modified sequence
atgggcagctgcgccagactgctgctgctgtggggctgcaccgtggtggccgccggcctgagcggcgtggccggcgtgagcagcagatgcgagaaggcctgcaaccccagaatgggcaacctggccctgggcagaaagctgtgggccgacaccacctgcggccagaacgccaccgagctgtactgcttctacagcgagaacaccgacctgacctgcagacagcccaagtgcgacaagtgcaacgccgcctacccccacctggcccacctgcccagcgccatggccgacagcagcttcagattccccagaacctggtggcagagcgccgaggacgtgcacagagagaagatccagctggacctggaggccgagttctacttcacccacctgatcgtgatgttcaagagccccagacccgccgccatggtgctggacagaagccaggacttcggcaagacctggaagccctacaagtacttcgccaccaactgcagcgccaccttcggcctggaggacgacgtggtgaagaagggcgccatctgcaccagcaagtacagcagccccttcccctgcaccggcggcgaggtgatcttcaaggccctgagccccccctacgacaccgagaacccctacagcgccaaggtgcaggagcagctgaagatcaccaacctgagagtgcagctgctgaagagacagagctgcccctgccagagaaacgacctgaacgaggagccccagcacttcacccactacgccatctacgacttcatcgtgaagggcagctgcttctgcaacggccacgccgaccagtgcatccccgtgcacggcttcagacccgtgaaggcccccggcaccttccacatggtgcacggcaagtgcatgtgcaagcacaacaccgccggcagccactgccagcactgcgcccccctgtacaacgacagaccctgggaggccgccgacggcaagaccggcgcccccaacgagtgcagaacctgcaagtgcaacggccacgccgacacctgccacttcgacgtgaacgtgtgggaggccagcggcaacagaagcggcggcgtgtgcgacgactgccagcacaacaccgagggccagtactgccagagatgcaagcccggcttctacagagacctgagaagacccttcagcgcccccgacgcctgcaagccctgcagctgccaccccgtgggcagcgccgtgctgcccgccaacagcgtgaccttctgcgaccccagcaacggcgactgcccctgcaagcccggcgtggccggcagaagatgcgacagatgcatggtgggctactggggcttcggcgactacggctgcagaccctgcgactgcgccggcagctgcgaccccatcaccggcgactgcatcagcagccacaccgacatcgactggtaccacgaggtgcccgacttcagacccgtgcacaacaagagcgagcccgcctgggagtgggaggacgcccagggcttcagcgccctgctgcacagcggcaagtgcgagtgcaaggagcagaccctgggcaacgccaaggccttctgcggcatgaagtacagctacgtgctgaagatcaagatcctgagcgcccacgacaagggcacccacgtggaggtgaacgtgaagatcaagaaggtgctgaagagcaccaagctgaagatcttcagaggcaagagaaccctgtaccccgagagctggaccgacagaggctgcacctgccccatcctgaaccccggcctggagtacctggtggccggccacgaggacatcagaaccggcaagctgatcgtgaacatgaagagcttcgtgcagcactggaagcccagcctgggcagaaaggtgatggacatcctgaagagagagtgcaagtag

SEQ ID NO: 208772 - DNA, 1776 bp, Artificial Sequence
  derived and/or modified sequence
atgggcaacctggccctgggcagaaagctgtgggccgacaccacctgcggccagaacgccaccgagctgtactgcttctacagcgagaacaccgacctgacctgcagacagcccaagtgcgacaagtgcaacgccgcctacccccacctggcccacctgcccagcgccatggccgacagcagcttcagattccccagaacctggtggcagagcgccgaggacgtgcacagagagaagatccagctggacctggaggccgagttctacttcacccacctgatcgtgatgttcaagagccccagacccgccgccatggtgctggacagaagccaggacttcggcaagacctggaagccctacaagtacttcgccaccaactgcagcgccaccttcggcctggaggacgacgtggtgaagaagggcgccatctgcaccagcaagtacagcagccccttcccctgcaccggcggcgaggtgatcttcaaggccctgagccccccctacgacaccgagaacccctacagcgccaaggtgcaggagcagctgaagatcaccaacctgagagtgcagctgctgaagagacagagctgcccctgccagagaaacgacctgaacgaggagccccagcacttcacccactacgccatctacgacttcatcgtgaagggcagctgcttctgcaacggccacgccgaccagtgcatccccgtgcacggcttcagacccgtgaaggcccccggcaccttccacatggtgcacggcaagtgcatgtgcaagcacaacaccgccggcagccactgccagcactgcgcccccctgtacaacgacagaccctgggaggccgccgacggcaagaccggcgcccccaacgagtgcagaacctgcaagtgcaacggccacgccgacacctgccacttcgacgtgaacgtgtgggaggccagcggcaacagaagcggcggcgtgtgcgacgactgccagcacaacaccgagggccagtactgccagagatgcaagcccggcttctacagagacctgagaagacccttcagcgcccccgacgcctgcaagccctgcagctgccaccccgtgggcagcgccgtgctgcccgccaacagcgtgaccttctgcgaccccagcaacggcgactgcccctgcaagcccggcgtggccggcagaagatgcgacagatgcatggtgggctactggggcttcggcgactacggctgcagaccctgcgactgcgccggcagctgcgaccccatcaccggcgactgcatcagcagccacaccgacatcgactggtaccacgaggtgcccgacttcagacccgtgcacaacaagagcgagcccgcctgggagtgggaggacgcccagggcttcagcgccctgctgcacagcggcaagtgcgagtgcaaggagcagaccctgggcaacgccaaggccttctgcggcatgaagtacagctacgtgctgaagatcaagatcctgagcgcccacgacaagggcacccacgtggaggtgaacgtgaagatcaagaaggtgctgaagagcaccaagctgaagatcttcagaggcaagagaaccctgtaccccgagagctggaccgacagaggctgcacctgccccatcctgaaccccggcctggagtacctggtggccggccacgaggacatcagaaccggcaagctgatcgtgaacatgaagagcttcgtgcagcactggaagcccagcctgggcagaaaggtgatggacatcctgaagagagagtgcaagtag

SEQ ID NO: 208773 - DNA, 1818 bp, Artificial Sequence
  derived and/or modified sequence
atgggcagctgcgccagactgctgctgctgtggggctgcaccgtggtggccgccggcctgagcggcgtggccggcgtgagcagcagatgcgagaaggcctgcaaccccagaatgggcaacctggccctgggcagaaagctgtgggccgacaccacctgcggccagaacgccaccgagctgtactgcttctacagcgagaacaccgacctgacctgcagacagcccaagtgcgacaagtgcaacgccgcctacccccacctggcccacctgcccagcgccatggccgacagcagcttcagattccccagaacctggtggcagagcgccgaggacgtgcacagagagaagatccagctggacctggaggccgagttctacttcacccacctgatcgtgatgttcaagagccccagacccgccgccatggtgctggacagaagccaggacttcggcaagacctggaagccctacaagtacttcgccaccaactgcagcgccaccttcggcctggaggacgacgtggtgaagaagggcgccatctgcaccagcaagtacagcagccccttcccctgcaccggcggcgaggtgatcttcaaggccctgagccccccctacgacaccgagaacccctacagcgccaaggtgcaggagcagctgaagatcaccaacctgagagtgcagctgctgaagagacagagctgcccctgccagagaaacgacctgaacgaggagccccagcacttcacccactacgccatctacgacttcatcgtgaagggcagctgcttctgcaacggccacgccgaccagtgcatccccgtgcacggcttcagacccgtgaaggcccccggcaccttccacatggtgcacggcaagtgcatgtgcaagcacaacaccgccggcagccactgccagcactgcgcccccctgtacaacgacagaccctgggaggccgccgacggcaagaccggcgcccccaacgagtgcagaacctgcaagtgcaacggccacgccgacacctgccacttcgacgtgaacgtgtgggaggccagcggcaacagaagcggcggcgtgtgcgacgactgccagcacaacaccgagggccagtactgccagagatgcaagcccggcttctacagagacctgagaagacccttcagcgcccccgacgcctgcaagccctgcagctgccaccccgtgggcagcgccgtgctgcccgccaacagcgtgaccttctgcgaccccagcaacggcgactgcccctgcaagcccggcgtggccggcagaagatgcgacagatgcatggtgggctactggggcttcggcgactacggctgcagaccctgcgactgcgccggcagctgcgaccccatcaccggcgactgcatcagcagccacaccgacatcgactggtaccacgaggtgcccgacttcagacccgtgcacaacaagagcgagcccgcctgggagtgggaggacgcccagggcttcagcgccctgctgcacagcgtgctgaagatcaagatcctgagcgcccacgacaagggcacccacgtggaggtgaacgtgaagatcaagaaggtgctgaagagcaccaagctgaagatcttcagaggcaagagaaccctgtaccccgagagctggaccgacagaggctgcacctgccccatcctgaaccccggcctggagtacctggtggccggccacgaggacatcagaaccggcaagctgatcgtgaacatgaagagcttcgtgcagcactggaagcccagcctgggcagaaaggtgatggacatcctgaagagagagtgcaagtag

SEQ ID NO: 208774 - protein, 864 aa, Artificial Sequence
  derived and/or modified sequence
MAAPLIPLSQQIPTGNSLYESYYKQVDPAYTGRVGASEAALFLKKSGLSDIILGKIWDLADPEGKGFLDKQGFYVALRLVACAQSGHEVTLSNLNLSMPPPKFHDTSSPLMVTPPSAEAHWAVRVEEKAKFDGIFESLLPINGLLSGDKVKPVLMNSKLPLDVLGRVWDLSDIDKDGHLDRDEFAVAMHLVYRALEKEPVPSALPPSLIPPSKRKKTVFPGAVPVLPASPPPKDSLRSTPSHGSVSSLNSTGSLSPKHSLKQTQPTVNWVVPVADKMRFDEIFLKTDLDLDGYVSGQEVKEIFMHSGLTQNLLAHIWALADTRQTGKLSKDQFALAMYFIQQKVSKGIDPPQVLSPDMVPPSERGTPGPDSSGSLGSGEFTGVKELDDISQEIAQLQREKYSLEQDIREKEEAIRQKTSEVQELQNDLDRETSSLQELEAQKQDAQDRLDEMDQQKAKLRDMLSDVRQKCQDETQMISSLKTQIQSQESDLKSQEDDLNRAKSELNRLQQEETQLEQSIQAGRVQLETIIKSLKSTQDEINQARSKLSQLHESRQEAHRSLEQYDQVLDGAHGASLTDLANLSEGVSLAERGSFGAMDDPFKNKALLFSNNTQELHPDPFQTEDPFKSDPFKGADPFKGDPFQNDPFAEQQTTSTDPFGGDPFKESDPFRGSATDDFFKKQTKNDPFTSDPFTKNPSLPSKLDPFESSDPFSSSSVSSKGSDPFGTLDPFGSGSFNSAEGFADFSQMSKPPPSGPFTSSLGGAGFSDDPFKSKQDTPALPPKKPAPPRPKPPSGKSTPVSQLGSADFPEAPDPFQPLGADSGDPFQSKKGFGDPFSGKDPFVPSSAAKPSKASASGFADFTSVS

SEQ ID NO: 208775 - DNA, 2595 bp, Artificial Sequence
  derived and/or modified sequence
atggccgcccccctgatccccctgagccagcagatccccaccggcaacagcctgtacgagagctactacaagcaggtggaccccgcctacaccggcagagtgggcgccagcgaggccgccctgttcctgaagaagagcggcctgagcgacatcatcctgggcaagatctgggacctggccgaccccgagggcaagggcttcctggacaagcagggcttctacgtggccctgagactggtggcctgcgcccagagcggccacgaggtgaccctgagcaacctgaacctgagcatgcccccccccaagttccacgacaccagcagccccctgatggtgaccccccccagcgccgaggcccactgggccgtgagagtggaggagaaggccaagttcgacggcatcttcgagagcctgctgcccatcaacggcctgctgagcggcgacaaggtgaagcccgtgctgatgaacagcaagctgcccctggacgtgctgggcagagtgtgggacctgagcgacatcgacaaggacggccacctggacagagacgagttcgccgtggccatgcacctggtgtacagagccctggagaaggagcccgtgcccagcgccctgccccccagcctgatcccccccagcaagagaaagaagaccgtgttccccggcgccgtgcccgtgctgcccgccagccccccccccaaggacagcctgagaagcacccccagccacggcagcgtgagcagcctgaacagcaccggcagcctgagccccaagcacagcctgaagcagacccagcccaccgtgaactgggtggtgcccgtggccgacaagatgagattcgacgagatcttcctgaagaccgacctggacctggacggctacgtgagcggccaggaggtgaaggagatcttcatgcacagcggcctgacccagaacctgctggcccacatctgggccctggccgacaccagacagaccggcaagctgagcaaggaccagttcgccctggccatgtacttcatccagcagaaggtgagcaagggcatcgaccccccccaggtgctgagccccgacatggtgccccccagcgagagaggcacccccggccccgacagcagcggcagcctgggcagcggcgagttcaccggcgtgaaggagctggacgacatcagccaggagatcgcccagctgcagagagagaagtacagcctggagcaggacatcagagagaaggaggaggccatcagacagaagaccagcgaggtgcaggagctgcagaacgacctggacagagagaccagcagcctgcaggagctggaggcccagaagcaggacgcccaggacagactggacgagatggaccagcagaaggccaagctgagagacatgctgagcgacgtgagacagaagtgccaggacgagacccagatgatcagcagcctgaagacccagatccagagccaggagagcgacctgaagagccaggaggacgacctgaacagagccaagagcgagctgaacagactgcagcaggaggagacccagctggagcagagcatccaggccggcagagtgcagctggagaccatcatcaagagcctgaagagcacccaggacgagatcaaccaggccagaagcaagctgagccagctgcacgagagcagacaggaggcccacagaagcctggagcagtacgaccaggtgctggacggcgcccacggcgccagcctgaccgacctggccaacctgagcgagggcgtgagcctggccgagagaggcagcttcggcgccatggacgaccccttcaagaacaaggccctgctgttcagcaacaacacccaggagctgcaccccgaccccttccagaccgaggaccccttcaagagcgaccccttcaagggcgccgaccccttcaagggcgaccccttccagaacgaccccttcgccgagcagcagaccaccagcaccgaccccttcggcggcgaccccttcaaggagagcgaccccttcagaggcagcgccaccgacgacttcttcaagaagcagaccaagaacgaccccttcaccagcgaccccttcaccaagaaccccagcctgcccagcaagctggaccccttcgagagcagcgaccccttcagcagcagcagcgtgagcagcaagggcagcgaccccttcggcaccctggaccccttcggcagcggcagcttcaacagcgccgagggcttcgccgacttcagccagatgagcaagcccccccccagcggccccttcaccagcagcctgggcggcgccggcttcagcgacgaccccttcaagagcaagcaggacacccccgccctgccccccaagaagcccgccccccccagacccaagccccccagcggcaagagcacccccgtgagccagctgggcagcgccgacttccccgaggcccccgaccccttccagcccctgggcgccgacagcggcgaccccttccagagcaagaagggcttcggcgaccccttcagcggcaaggaccccttcgtgcccagcagcgccgccaagcccagcaaggccagcgccagcggcttcgccgacttcaccagcgtgagctag

SEQ ID NO: 208776 - DNA, 2774 bp, Artificial Sequence
  derived and/or modified sequence
gggaagatggcggcgccgctcatccccctctcccagcagattcccactggaaattcgttgtatgaatcttattacaagcaggtcgatccggcatacacagggagggtgggggcgagtgaagctgcgctttttctaaagaagtctggcctctcggacattatccttgggaagatatgggacttggccgatccagaaggtaaagggttcttggacaaacagggtttctatgttgcactgagactggtggcctgtgcacagagtggccatgaagttaccttgagcaatctgaatttgagcatgccaccgcctaaatttcacgacaccagcagccctctgatggtcacaccgccctctgcagaggcccactgggctgtgagggtggaagaaaaggccaaatttgatgggatttttgaaagcctcttgcccatcaatggtttgctctctggagacaaagtcaagccagtcctcatgaactcaaagctgcctcttgatgtcctgggcagggtctgggacctcagtgacattgacaaggatgggcacttggatcgagatgagttcgctgtggccatgcacttggtgtaccgagccctggagaaggagcccgtgccctccgccctgcccccgtccctcatcccaccctccaagagaaagaagactgtgttccctggcgccgtccccgtcctgcctgccagccccccaccaaaagacagcctccgctccacgccgtcccacggcagcgtcagcagcctcaacagcacagggagcctgtcccccaagcacagcctcaagcaaacacagccaacagtgaactgggtggtgcccgtggcagacaagatgcgatttgatgagatattcctgaagaccgacctggacctggatggctacgtgagtggccaggaggtgaaggagatcttcatgcactcgggcctcacccagaaccttctagcacacatatgggccctggccgatacgaggcaaacggggaagttaagcaaagaccaattcgcgttagctatgtatttcattcagcagaaggtcagtaaaggcatcgaccctcctcaagtcctctcgccggacatggtcccgccttcggagagaggcacgcccggcccggacagttcaggctctctcggctccggggagtttactggcgtgaaggagcttgatgacatcagtcaagagattgcccagttacaaagagagaaatattcactggaacaagacattcgagaaaaggaagaggcaatcagacagaaaaccagcgaggtgcaggaattacaaaatgacctagaccgggaaacaagcagtttgcaggagctcgaggctcagaaacaggatgctcaagaccgcctggacgagatggaccagcagaaggccaagctccgagacatgctgagcgacgtccggcagaagtgccaggatgagactcagatgatctcatcactgaaaacgcaaatccaatctcaggaatctgacttaaagtcccaggaagacgatctgaaccgagccaagtcggagctgaaccgattgcagcaggaggaaacccagctggagcagagcattcaggctgggcgagtccagctggaaaccatcatcaagtccctgaagtcaacgcaagacgaaatcaaccaggcaaggagcaaactttcccagctgcatgaaagccgccaggaggcccacaggagcctggagcagtatgaccaggtgctcgatggagcccatggtgccagcctgaccgacctggccaacctgagcgaaggcgtctccctggcagagaggggcagttttggagccatggatgatcctttcaaaaataaagccttgttatttagcaacaacacgcaagagttgcatccggatcctttccagacagaagaccccttcaaatctgacccatttaaaggagctgaccccttcaaaggcgacccgttccagaatgacccctttgcagaacagcagacaacttcaacagatccatttggaggggaccctttcaaagaaagtgacccattccgtggctctgccactgacgacttcttcaagaaacagacaaagaatgacccatttacctcggatccattcacgaaaaacccttccttaccttcgaagctcgacccctttgaatccagtgatcccttttcatcctccagtgtctcctcaaaaggatcagatccctttggaaccttagatcccttcggaagtgggtccttcaatagtgctgaaggctttgccgacttcagccagatgtccaagcccccaccttctggccctttcacctcctccttgggaggggcaggattctcagatgacccctttaaaagtaaacaggacactcctgctctgcctccgaagaaacctgctcctccacggcctaaaccgcccagcggtaaaagtacacctgtaagccagcttggttccgcagactttcccgaggcccccgatccattccagccactcggggctgacagcggcgacccgttccaaagtaaaaaggggtttggggacccgtttagtggaaaagacccatttgtcccctcctctgcagctaaaccttctaaggcctctgcctcgggctttgcagacttcacctctgtaagttgagtcctccgcctccgggccaccccactcccttccgcttgcagcttccctgggatttttgtctccttttaaaggcaaacctcccagcttctttagcctcttggtacctcacactctctgtccctcgcgttatttattctacactgccacttctgtaagaaaaacagtttctcaat

SEQ ID NO: 208777 - DNA, 2595 bp, Artificial Sequence
  derived and/or modified sequence
atggccgccccacttatccccttgtctcagcagattcctacagggaactctctgtatgaatcttactacaagcaggtcgaccctgcttatacgggccgtgtcggagcctctgaggctgccctgttcctgaagaaatctggcttgtctgacatcatcctgggcaagatctgggacctcgcggatcccgagggaaaggggtttcttgacaagcaggggttttatgtcgcactgcgtctagtcgcatgcgcccagtccggacacgaggttacactaagcaacttgaacctgagtatgcctccccccaaatttcatgatacttcaagtcccctgatggtaacgccaccctctgcagaagcccactgggccgtgcgggtggaggaaaaagctaagtttgacggaatattcgagtccctgttacccatcaacggcctgctgtcgggtgataaagtcaagcctgtccttatgaatagtaaactgcccttagatgttctgggtcgtgtctgggatctatcagatatagacaaagacggccacctggacagagacgagttcgctgtggcaatgcacctggtttaccgggccctcgagaaggagccggtcccctccgccttacctccctcgctcattcctccatcgaagagaaaaaagactgttttcccaggggcggtgcctgtgctgcccgctagccccccccccaaggacagcttacgcagtaccccctcacacggctctgtctccagcctgaattccacaggtagtctcagccctaagcattcgctcaaacagacccagccgactgtaaactgggtcgtacccgtggcagataaaatgcgattcgacgaaatctttctgaagactgatctggacttggatggatatgtatcaggccaggaagttaaggaaatatttatgcactccggactgacacaaaacttattggcccacatttgggctctcgcggacacgagacagactggcaagctgtcgaaagaccagttcgctctcgccatgtacttcattcagcagaaggtgagtaagggcatcgatccgccacaagtgctgagtcctgatatggtcccaccttccgaacgaggtacccctggaccagattccagcggctccctgggctcgggcgagtttacaggtgtcaaggaactggacgatatcagccaagaaatagcacagttacagcgcgaaaaatactctctcgagcaggacattcgcgaaaaagaagaagctattcgccaaaaaacaagcgaagtccaggaactgcagaacgaccttgatagagaaacatcatccctccaggagctggaggcccagaaacaggacgctcaggaccgtctcgatgaaatggaccagcaaaaagccaaacttcgcgatatgctctcagacgttagacagaagtgtcaagatgagacccagatgatctcatcccttaagactcagattcagtcgcaggaatctgacctcaagagtcaggaagacgacctgaatcgcgccaaaagcgagctgaataggcttcagcaggaggaaacacagcttgagcagtctatccaggccggcagagtccagctcgagaccatcatcaaatccctcaagagcacacaggacgagatcaaccaggctcgttctaaactcagtcaactgcacgagagtcggcaggaagcccataggtctcttgagcaatatgaccaagtcctcgacggggcacacggcgcgagtcttaccgacttagccaacctgtctgagggagtttcactggccgagcgtgggagcttcggagcgatggatgacccattcaagaataaagccctcctgtttagcaacaacacccaggaattgcatcctgatccattccaaacagaggacccattcaagtcggacccgttcaaaggagccgaccctttcaaaggggatcctttccaaaatgacccatttgcagagcagcagactacttccaccgaccccttcggtggcgaccccttcaaagaatctgacccatttagaggatccgctacagacgatttttttaaaaaacagacaaagaatgacccctttacaagcgaccccttcaccaagaatccgtctcttccgagtaaactggacccctttgagtcatctgacccattcagctcctcctctgtgagcagtaaagggtccgacccgttcggcaccctagaccctttcggctccggcagtttcaatagcgccgaagggttcgccgatttttcccaaatgagtaagccgccgccctcaggcccgtttacaagttctttgggtggggctggattcagtgatgatccttttaaaagcaaacaggacaccccagccctaccgccaaagaaacccgctccaccccgtccaaaacctccctccggcaagagtacaccagtgagtcaactcggctccgcagactttcctgaagctccagatccttttcagcccctgggggcagacagcggggacccctttcagtctaagaagggctttggagatcccttttccgggaaggacccctttgttccgtcatcagcagccaagccatccaaagccagtgctagcggatttgcggattttacgtcagtgtcttag

SEQ ID NO: 208778 - DNA, 2595 bp, Artificial Sequence
  derived and/or modified sequence
atggccgcccccctcatccccctgagccagcagatccccaccggcaacagcctgtatgagagctactacaagcaggtggaccctgcctacacaggccgggtgggcgccagcgaggccgccctcttcctgaagaagagcggcctgagtgacatcatcctgggcaagatctgggacctggccgaccctgagggcaagggcttcctggacaagcagggcttctacgtggccctgcggctggtggcctgtgcccagagcggccacgaggtgaccctgagcaacctgaacctgtccatgcccccacccaagttccatgacaccagcagccccctgatggtgaccccacccagcgctgaggcccactgggccgtgcgggtggaggagaaggccaagtttgatggcatctttgagagcctgctgcccatcaatggcctgctgagcggggacaaggtgaagcctgtgctgatgaacagcaagctgcccctggatgtgctgggccgggtgtgggacctgagtgacatcgacaaggatggccacctggacagagatgaatttgctgtggccatgcacctggtgtaccgggccctggagaaggagcctgtgcccagcgccctgccccccagcctcatcccccccagcaagaggaagaagacagtgtttcctggagctgtgcctgtgctgcctgccagccccccacccaaggacagcctgcggagcacccccagccacggctctgtgagcagcctgaacagcacaggcagcctgagccccaagcacagcctgaagcagacccagcccaccgtgaactgggtggtgcctgtggccgacaagatgagatttgatgagatcttcctgaagacagacctggacctggatggctacgtgtctggccaggaggtgaaggagatcttcatgcacagcggcctgacccagaacctgctggcccacatctgggccctggccgacacccggcagacaggcaagctgagcaaggaccagtttgccctggccatgtacttcatccagcagaaggtgtccaagggcatcgaccccccccaggtgctgagcccagacatggtgccccccagcgagcggggcaccccaggccctgacagcagcggcagcctgggcagcggggagttcaccggggtgaaggagctggatgacatcagccaggagatcgcccagctgcagcgggagaagtacagcctggagcaggacatccgggagaaggaggaggccatccggcagaagaccagcgaggtgcaggagctgcagaatgacctggaccgggagaccagcagcctgcaggagctggaggcccagaagcaggatgcccaggaccggctggatgagatggaccagcagaaggccaagctgcgggacatgctgagtgatgtgcggcagaagtgccaggatgagacccagatgatcagcagcctgaagacccagatccagagccaggagagtgacctgaagagccaggaggatgacctgaacagagccaagtctgagctgaaccggctgcagcaggaggagacccagctggagcagagcatccaggccggccgggtgcagctggagaccatcatcaagagcctgaagagcacccaggatgagatcaaccaggcccggagcaagctgagccagctgcacgagagccggcaggaggcccacaggagcctggagcagtatgaccaggtgctggatggagcccacggggccagcctgacagacctggccaacctgtctgaaggagtgtccctggccgagcggggcagctttggagccatggatgaccccttcaagaacaaggccctgctcttcagcaacaacacccaggagctgcacccagaccccttccagacagaggaccccttcaagagtgaccccttcaagggagctgaccccttcaagggggaccccttccagaatgacccctttgctgagcagcagaccaccagcacagacccctttggaggagaccccttcaaggagagtgaccccttccggggcagcgccacagatgacttcttcaagaagcagaccaagaatgaccccttcaccagtgaccccttcaccaagaaccccagcctgcccagcaagctggacccctttgagagcagtgaccccttcagcagcagctctgtgagcagcaaaggaagtgaccccttcggcaccctggaccccttcggcagcggcagcttcaacagcgctgagggctttgctgacttcagccagatgagcaagcccccaccttctggccccttcaccagcagcctgggcggggccggcttcagtgatgaccccttcaagagcaagcaggacaccccagccctgccccccaagaagccagccccaccccggcccaagcccccatctgggaagagcacccctgtgtcccagctgggcagcgctgacttccctgaggccccagaccccttccagcccctgggcgctgacagcggggaccccttccagagcaagaagggctttggagaccccttcagcggcaaggacccctttgtgcccagcagcgctgccaagcccagcaaggccagcgccagcggctttgctgacttcacctctgtgtcctag

SEQ ID NO: 208779 - DNA, 2595 bp, Artificial Sequence
  derived and/or modified sequence
atggccgcccccctgatccccctgagccagcagatccccaccggcaatagcctctatgagtcctactataagcaggtcgatccagcctacacaggacgggtgggagctagtgaagccgccctttttctcaagaaaagcggcctctcggatatcattctcggtaagatatgggatctagccgacccggaaggcaagggcttcctagacaagcaggggttctatgtcgccctcagactcgtggcttgcgcacagtcaggacacgaggtgacgctctcgaatctgaatttgtccatgcctccacctaaatttcacgatacatcgtctcctctgatggtgacacctcccagcgccgaagcccactgggccgttagagtagaagaaaaggccaagtttgatggcatcttcgagagcctcctccctatcaacggactgctgtccggggataaagtgaagcctgtattgatgaacagcaaactgccactggacgtgctgggccgcgtctgggacctgtccgacattgataaagatggccacctggatcgcgacgagttcgccgtggctatgcatctagtctatagggctctggaaaaggagcccgtgccctccgctctgccaccttccctgatccctccaagcaaaagaaaaaagactgttttccccggggcagtgccggtactccctgcttctccaccccctaaggacagtctgcgcagcacaccttctcacggtagcgtgtcctcactcaactctaccgggtccttaagtccaaaacactctctgaagcagactcaacctaccgttaactgggtggttcctgtcgccgataaaatgagattcgacgaaatctttttgaaaacagatctggatctggacgggtatgttagtggccaggaagtgaaggagatctttatgcattcaggactcactcaaaatcttctagcccatatatgggcattagccgatactaggcaaaccggcaagcttagtaaggatcagttcgctctggctatgtactttatacagcaaaaagtgtctaagggtatagatccgccccaggttttgtcccctgacatggtgccaccgtcggaaaggggaacccccggccccgacagctccgggagcctgggctccggagagtttaccggtgtaaaggaacttgatgatatctcccaggagatcgcccagctgcagagggagaagtattctctcgaacaggatattcgcgagaaagaagaagcaatccggcagaagacaagtgaggttcaagagttgcaaaacgacctcgatcgcgagacttcgagtcttcaagagctggaggcacagaagcaggacgcacaggaccgcttggacgagatggaccagcaaaaggctaaactgagggatatgttgagcgacgtgcgccagaaatgtcaggatgaaacacagatgataagtagccttaagacccaaattcagtcccaagagtccgacttaaaaagtcaggaagacgacctgaatagagctaaaagcgaactgaatcggttgcagcaagaagaaacacagctcgagcaatcgatacaggccgggagagtccagttagagacaatcatcaaatcgctaaagtctacgcaggacgagatcaatcaggcacggtcaaaactgtcccagctccatgaatctagacaggaagcccaccgcagtctggagcagtacgaccaggttctcgatggcgctcacggcgccagtctcactgatctcgcaaacctgagcgagggtgtctccctcgctgagcgtgggagctttggggcaatggacgaccccttcaagaataaagcattgctgttttctaacaatacacaggagttgcacccagacccttttcagaccgaagacccatttaagtccgatccctttaaaggcgctgacccctttaagggggatccatttcagaacgatccgttcgcagaacagcagaccactagtacagatccctttggcggcgacccattcaaggagagtgacccctttcgaggttctgcaaccgacgattttttcaagaaacagacaaaaaacgacccttttaccagcgatccctttacaaagaacccttcgttgccaagcaaactggatccgtttgagtcttccgacccttttagctcatcctctgtgagcagcaagggaagtgatcccttcgggactctggatccattcggcagtggatccttcaatagcgctgaaggattcgcagacttcagtcagatgtcaaaaccacccccctccggccctttcacaagttccctggggggggcagggtttagcgatgaccccttcaagagtaagcaggatacccctgcactaccccctaagaaaccagcccccccccggcccaagcctccatccggcaagagtacccccgtgtcccagctgggcagtgccgattttccagaggctcctgatccttttcagcccttgggagccgactctggcgacccttttcaatctaaaaagggattcggtgacccctttagcgggaaggacccctttgtgcctagtagcgctgccaaaccatctaaggcgagcgcttccggatttgcggattttacctcagtcagttag

SEQ ID NO: 208780 - DNA, 2595 bp, Artificial Sequence
  derived and/or modified sequence
atggcggctcccctcattccactctctcagcagatcccaaccggaaacagcctgtacgaatcctattataaacaagttgatccggcttatacaggccgagtaggtgcgtctgaggccgctctgttcctgaaaaaatccggcctgagtgacattatcttagggaagatctgggacctggccgacccagagggtaagggattcctggataaacaggggttctacgttgcactgcgcctggtggcgtgtgcccaatccggccatgaagttaccctgtctaacctgaacctgtccatgccccctcccaaattccacgacacctcaagcccactcatggtgacccctccctcagcagaagcacactgggccgtgcgggtggaagaaaaggcaaagttcgatggaatctttgaaagtctcttacctattaatggccttctgtctggagacaaagttaaacccgtcctgatgaacagtaaactgccattagatgtcctcggtcgggtctgggacctgtcagatatagataaagacgggcacctggacagagatgagtttgccgtcgctatgcacctggtgtaccgtgcccttgaaaaggagccagttccaagtgccttgcccccttctttaatccctccaagtaagcgaaagaaaacggtgttccctggagccgtgcccgtcctccctgcctcacctccacccaaagactccttgagatctacccccagccacgggagtgtatccagcctgaactctacgggcagcctttctccaaaacactccttaaagcagactcagccaacagtgaattgggttgttcccgttgctgacaagatgagattcgacgagatattccttaaaacagacctggacttggacgggtatgtctctgggcaggaggtgaaagagatctttatgcatagcgggctgacacagaatctgttagcgcatatatgggccctcgccgacaccaggcagaccggcaagctaagcaaggatcagtttgctctcgcaatgtatttcatccagcagaaggtgagtaagggaatcgacccccctcaggtgctgagcccagacatggtacccccttccgaaagggggacgccagggcctgactcatctggctctttagggagcggagagttcacaggagttaaagaactggatgatattagtcaagaaatagctcaactgcagcgggagaagtacagcttagagcaagacattagagagaaagaagaggccatccggcagaagaccagtgaggtgcaggagctgcagaacgacctggatagggagacatcctctctgcaggagctggaggcccaaaagcaggatgcccaagacagactggacgagatggaccaacagaaggccaagctgcgggatatgttgtccgacgtcagacaaaagtgtcaggatgaaacacaaatgatctcctccctgaagactcagattcagtcccaggaaagtgatttgaaatcccaggaggatgacctgaatagggcaaagtctgaactgaataggctgcagcaggaggagacacagctggagcagtctattcaagccggacgagtgcagctagagaccatcattaagtctttgaagtccacccaggatgagatcaatcaggccaggagtaagctgagccaacttcatgaatcccggcaggaagcacaccgttcgctggaacagtacgatcaagtactggacggggctcacggcgctagcctgaccgatctcgccaacctatcggagggagtgagtctggctgagcgcggtagtttcggtgccatggacgacccttttaagaacaaggccttgctgttttctaacaacacccaagaattgcacccagacccgttccagacagaagacccttttaagagcgatccgttcaaaggagccgacccattcaaaggcgatccattccagaatgatcctttcgcggaacagcagacgaccagcactgatccatttgggggtgacccattcaaagaaagcgacccattcagggggtcagcaaccgacgacttcttcaagaaacaaacgaaaaacgatccatttacgtcagatccattcaccaagaacccctccctgcctagtaaattggatccattcgagtcctctgaccctttcagttcctcctccgtgtcgtcaaaaggcagtgacccctttggcaccctggacccttttgggagcgggagctttaattcagcagaggggttcgcggacttctctcaaatgtccaagccgcctccaagtggccctttcacttcctcattgggaggtgccggattttccgatgacccattcaaatcgaaacaggacacacccgcactgccaccgaaaaaacctgctccacccaggccaaaacccccatcaggcaaatctacaccagtgagtcagctcgggagcgctgacttccccgaagcccctgacccttttcagcctctgggcgcagacagtggagacccatttcaaagcaaaaaggggttcggcgatccattttcgggcaaagacccctttgtgccgtcttcggcggcaaaaccttccaaggcttccgcctccggcttcgctgatttcacctctgtgagctag

SEQ ID NO: 208781 - protein, 94 aa, Artificial Sequence
  derived and/or modified sequence
MVYISNGQVLDSRSQSPWRLSLITDFFWGIAEFVVLFFKTLLQQDVKKRRSYGNSSDSRYDDGRGPPGNPPRRMGRINHLRGPSPPPMAGGCGR

SEQ ID NO: 208782 - protein, 91 aa, Artificial Sequence
  derived and/or modified sequence
MVYISNGQVLDSRSQSPWRLSLITDFFWGIAEFVVLFFKTLLQQDVKKRRSYGNSSDSRYDDGRGPPGNPPRRMGRINHLRGPSPPPMAGG

SEQ ID NO: 208783 - DNA, 285 bp, Artificial Sequence
  derived and/or modified sequence
atggtgtacatcagcaacggccaggtgctggacagcagaagccagagcccctggagactgagcctgatcaccgacttcttctggggcatcgccgagttcgtggtgctgttcttcaagaccctgctgcagcaggacgtgaagaagagaagaagctacggcaacagcagcgacagcagatacgacgacggcagaggcccccccggcaacccccccagaagaatgggcagaatcaaccacctgagaggccccagccccccccccatggccggcggctgaggcagatag

SEQ ID NO: 208784 - DNA, 276 bp, Artificial Sequence
  derived and/or modified sequence
atggtgtacatcagcaacggccaggtgctggacagcagaagccagagcccctggagactgagcctgatcaccgacttcttctggggcatcgccgagttcgtggtgctgttcttcaagaccctgctgcagcaggacgtgaagaagagaagaagctacggcaacagcagcgacagcagatacgacgacggcagaggcccccccggcaacccccccagaagaatgggcagaatcaaccacctgagaggccccagccccccccccatggccggcggctag

SEQ ID NO: 208785 - DNA, 285 bp, Artificial Sequence
  derived and/or modified sequence
atggtttacatatccaacggccaggtactcgactctcgttctcagagcccttggcgcctctccctgattaccgactttttttggggcattgctgagttcgtagtgctcttctttaagaccctgctgcagcaagatgtcaagaaacgcaggtcttacggaaactcttctgattcccgctacgatgatggacgcggtcctcctggtaatccaccccggagaatggggcgaatcaatcatctgcgggggccaagcccccccccaatggccggcggctgaggccggtag

SEQ ID NO: 208786 - DNA, 276 bp, Artificial Sequence
  derived and/or modified sequence
atggtctatatctctaacggtcaggtcttggacagcagatcccaatcgccatggcgtctctctctgatcaccgattttttttggggcattgccgaatttgtggtgctctttttcaaaacactactgcagcaagatgttaagaaacgccggtcctacggaaatagcagcgactccaggtacgatgatggcagggggccaccaggaaatcctcctcgtcggatgggtcgaatcaaccatctcaggggcccatcaccaccgcctatggctggaggatag

SEQ ID NO: 208787 - DNA, 279 bp, Artificial Sequence
  derived and/or modified sequence
atggtgtacatcagcaatggccaggtgctggacagccgcagccagagcccctggaggctgagcctcatcacagacttcttctggggcattgctgagtttgtggtgctcttcttcaagaccctgctgcagcaggatgtgaagaagagaagaagctatggcaacagcagtgacagccgctatgatgatggccggggccccccaggcaacccccccaggaggatgggccgcatcaaccacctgcggggccccagccccccacccatggccggcggccgctag

SEQ ID NO: 208788 - DNA, 276 bp, Artificial Sequence
  derived and/or modified sequence
atggtgtacatcagcaatggccaggtgctggacagccgcagccagagcccctggaggctgagcctcatcacagacttcttctggggcattgctgagtttgtggtgctcttcttcaagaccctgctgcagcaggatgtgaagaagagaagaagctatggcaacagcagtgacagccgctatgatgatggccggggccccccaggcaacccccccaggaggatgggccgcatcaaccacctgcggggccccagccccccacccatggccggcggctag

SEQ ID NO: 208789 - DNA, 285 bp, Artificial Sequence
  derived and/or modified sequence
atggtgtacatcagcaacggccaggtgctggacagccggagccagagcccatggagactgtcactcattactgatttcttttgggggatcgctgaatttgtggtgctctttttcaaaactctgttgcagcaagacgtgaagaaaagaaggtcctatgggaattcctccgattccagatatgatgacggtaggggaccgccagggaatccccctcggcgtatgggaagaattaatcatctccgtggcccctcaccaccccctatggctggaggatgaggaagatag

SEQ ID NO: 208790 - DNA, 276 bp, Artificial Sequence
  derived and/or modified sequence
atggtgtacatcagcaacggccaggtgctggacagccggagccagagcccctggagattgagcttgataaccgactttttttggggcattgcagagttcgtggttctgttcttcaaaacactgctgcaacaagacgtgaaaaagcggagaagttatggcaatagcagcgatagtaggtatgatgatgggcggggcccaccaggcaacccccccagaaggatgggccgcatcaatcacctgagaggcccgtcaccaccccctatggccggcggttag

SEQ ID NO: 208791 - DNA, 285 bp, Artificial Sequence
  derived and/or modified sequence
atggtttacatttctaacggtcaggttttagacagtcgcagtcagtccccctggagactctctctgattactgactttttctggggcatagctgagttcgtcgtgttattctttaaaaccttgctgcagcaggacgtgaagaaacgcaggagctatgggaacagctccgactctaggtacgatgacggtcggggtccgcctggcaacccaccaaggaggatgggccgaatcaaccatctgcgcggaccatcaccaccgcctatggccggtggatgaggtcgatag

SEQ ID NO: 208792 - DNA, 276 bp, Artificial Sequence
  derived and/or modified sequence
atggtctatatctccaacggtcaggtgctggacagccgcagccagagcccttggcggcttagtctcattactgacttcttttggggcattgcagagtttgtggtgctttttttcaagacccttctgcaacaagacgtgaaaaagcggaggtcctatggcaactcttcagattcacgatatgacgatggccgtggacccccaggaaatccaccccgacggatgggccgaattaaccatttgcggggtccaagcccccctcccatggctggcggatag

SEQ ID NO: 208793 - DNA, 1633 bp, Artificial Sequence
  derived and/or modified sequence
aagtcgcagatgtgacgatgcaaaaacgcccgtcgggggcgcgtctctttcagcagccaatgggctctgcccaccttcgtcctcgtcagcattttgtctaatcgcggcctgtgacgctcgaagggcggggagcagagggagatacagaaaccgacaggggccaggcgcccggtggctccgaagcggggaagtgggacaagatggtttacatctcgaacggacaagtgttggacagccggagtcagtctccatggagattatctttgataacagatttcttctggggaatagctgagtttgtggttttgtttttcaaaactctgcttcagcaagatgtgaaaaaaagaagaagctatggaaactcatctgattccagatatgatgatggaagagggccaccaggaaaccctccccgaagaatgggtagaatcaatcatctgcgtggccctagtccccctccaatggctggtggatgaggaaggtaaatgtctgctctaagaagcagacaaccggacatgcgcattcatagcagaaggaaaccatcaagaagtggaaggctgaccatgatgagcagtagatgaatgtgtatgtctaaacaaggactgctctgtgtcctcacagatgaatgaggtcatgctgggaattccctctgcagggaactggcctgactgacatgcagttccataaatgcagatgtttgtctcattacctttttgtatagtttattaaagtattaatatagttttaataagtaaatatttttaggttgcagaatggactcctcatctttatattcacgaaaaagcaatctgaagaaaacaaataaaagcctgtgtatttagcactgttagtgtcaccttttcaacttctgaaacactgttcattgttaactttttctcatttataaatcactgtatttattttagtagtatgcatagcatatctgtgctcttgaattaatttttatctttaacatatttgtctcatcaatctttaatacactgtgtctaatttgctaccaaatgtaattatcagggtatttataaaaccatagctaacaaaactgagctacaaaatgaaaatttactaaatagtttttaaaatcatggacttcagcctggcgcggtggctcatgcctgtaatcccagcactgtgggaggctgaggcgggcagatcgcctaagttcacgagtttgagaccagcctgcagcatgacgaaacctaaaataacaaaaattagccaggcgtggtagagtgcacctgtaatccctgctactcaggaggcggaggcaggagaatcgcttcaacccgggaggcggaggttgctgtgagcatgccactgcactcctgcctaggcaacagagtgagaccctgtctcaaaaaaataaataaaaccatgggcttccatgctatcttgacaaatttgcactctatagcatcactcaaaatactgcctattggctttaaactccatctgaatactgataactttcacattctttcactagagtggaagctctgagactaggaattttgttgtctttaccccagtcctttgaatagtgactacatgtaagatagtcatgtagtatttattggaaataaatatttattggaaaaacgaaaacagataa

SEQ ID NO: 208794 - DNA, 817 bp, Artificial Sequence
  derived and/or modified sequence
cgcccgtcgggggcgcgtctctttcagcagccaatgggctctgcccaccttcgtcctcgtcagcattttgtctaatcgcggcctgtgacgctcgaagggcggggagcagagggagatacagaaaccgacaggggccaggcgcccggtggctccgaagcggggaagtgggacaagatggtttacatctcgaacggacaagtgttggacagccggagtcagtctccatggagattatctttgataacagatttcttctggggaatagctgagtttgtggttttgtttttcaaaactctgcttcagcaagatgtgaaaaaaagaagaagctatggaaactcatctgattccagatatgatgatggaagagggccaccaggaaaccctccccgaagaatgggtagaatcaatcatctgcgtggccctagtccccctccaatggctggtggatgaggaaggtaaatgtctgctctaagaagcagacaaccggacatgcgcattcatagcagaaggaaaccatcaagaagtggaaggctgaccatgatgagcagtagatgaatgtgtatgtctaaacaaggactgctctgtgtcctcacagatgaatgaggtcatgctgggaattccctctgcagggaactggcctgactgacatgcagttccataaatgcagatgtttgtctcattacctttttgtatagtttattaaagtattaatatagttttaataagtaaatatttttaggttgcagaatggactcctcatctttatattcacgaaaaagcaatctgaagaaaacaaataaaagcctgtgtatttagc

SEQ ID NO: 208795 - protein, 472 aa, Artificial Sequence
  derived and/or modified sequence
MNGYGSPYLYMGGPVSQPPRAPLQRTPKCARCRNHGVLSWLKGHKRYCRFKDCTCEKCILIIERQRVMAAQVALRRQQANESLESLIPDSLRALPGPPPPGDAVAAPQPPPASQPSQPQPPRPAAELAAAAALRWTAEPQPGALQAQLAKPDLTEERLGDGKSADNTEVFSDKDTDQRSSPDVAKSKGCFTPESPEIVSVEEGGYAVQKNGGNPESRPDSPKCHAEQNHLLIEGPSGTVSLPFSLKANRPPLEVLKKIFPNQKPTVLELILKGCGGDLVSAVEVLLSSRSSVTGAERTSAEPESLALPSNGHIFEHTLSSYPISSSKWSVGSAFRVPDTLRFSADSSNVVPSPLAGPLQPPFPQPPRYPLMLRNTLARSQSSPFLPNDVTLWNTMTLQQQYQLRSQYVSPFPSNSTSVFRSSPVLPARATEDPRISIPDDGCPFVSKQSIYTEDDYDERSDSSDSRTLNTSS

SEQ ID NO: 208796 - protein, 112 aa, Artificial Sequence
  derived and/or modified sequence
MHTRKRLTQLFCFPDLTEERLGDGKSADNTEVFSDKDTDQRSSPDVAKSKGCFTPESPEIVSVEEGGYAVQKNGGNPESRPDSPKCHAEQNHLLIEGPSGTVSLPFSLKANR

SEQ ID NO: 208797 - DNA, 2184 bp, Artificial Sequence
  derived and/or modified sequence
ccgcagccaggctgccaactcattcgggagcccggggcatgaacggctacggctccccctacctgtacatgggcggcccggtgtcgcagccgccacgggcgcccctgcagcgcacgcccaagtgcgcgcgctgccgcaaccatggcgtcctgtcctggctcaagggccacaagcgttactgccgcttcaaggactgcacctgcgagaagtgcatcctcatcatcgagcggcagcgggtcatggctgcgcaggtggcgctgcgccggcagcaggccaacgagagcttggagagcctcatccccgactcgctgcgcgctctgccagggcccccgccgccgggggacgccgtcgccgccccgcagccgccgccagcctctcagccgtcgcagccgcagccgccgcgccctgctgccgagttggccgcggccgccgcgctgcgttggactgccgagccgcagcccggggctctgcaggcgcagctcgccaagccagatttgactgaagaacgacttggagacggcaagtcggcagacaatacagaggtcttcagtgacaaagacactgaccagaggagttccccagatgtggcaaagagtaagggctgcttcacccctgagagccctgagatagtgtccgtggaggaagggggatacgctgtccagaaaaacggaggcaaccccgagagccgccctgacagccccaagtgtcacgcggagcagaatcacctcctgattgagggcccctcggggactgtttctctgcccttcagcttgaaagccaacagaccgccgcttgaagtgttaaaaaagatattccccaaccagaagccaacggtgcttgagctcatcctcaagggctgtggcggggacctggtgagcgccgtggaagtccttctgtccagccgatcctcagtcacgggagcagagcgaacttccgcagaacctgagagtctagcgttgccctccaatgggcacatctttgaacacaccttgagctcctaccccatctcgtcttccaaatggtctgtgggatcagcctttcgagtcccagacacgttgaggttttctgccgactctagcaacgttgtccccagtcccttggctgggcctctgcagccccctttcccccagccaccccggtacccgctgatgctgaggaatactttggcgagaagccagtcgagcccctttttgcccaatgatgtcaccctgtggaacaccatgacgctgcagcagcagtatcagctgaggtcccagtatgtcagtcctttccccagtaactctaccagcgtcttcagaagctcgcccgtccttcctgcccgcgccacggaagaccctcggatttccatccctgatgatgggtgtccatttgtgtcaaagcagtccatttacaccgaggacgactatgacgagaggtctgactcctcagactctagaacactcaacacatcatcttaaagtggtgctggatgggtggtggccaggtgacattttctgtgcgttttgaccctgaggcatctgaggagaggccacatcttgtgtatgccctttccttctgtttgacaaagtgactgtgcttgattctatacattagcaataaaaacataacttatttaacttcttgcacttcactggaaaatgccaaatagctctgttctgtggctttagtgctgaatgtttattgtaaaagagagtctaatgttaagaatagtcttgggaaggctgggtccgtggaagatttatttggggatgtaaagctgaaggtcagccttgcacctaaacccaacctggaatgttaaatgaaataatatacttgaatgcaattttgtaaaagtggattcctcaggatatgtgaaacctaaaggaagtggttctgttgcaaatggactataaacagggacattatattcttacactaaaaatccttgcattttaaagagagatgcacttaagaatagagtgaactgctcatatgcttatttaagcttggacagttttcagagacaaaccccattaagaattactcttttcacatggctgaatcgaaacatgtgtaatgtcaatgtaaaaccaatcacagctgtgaactgcatgaaatgtattgtgaaacgaacacaagattaagctttgtcaggttaatgtagcatgttaaggactctagaaaaaaataaactaaggagacgag

SEQ ID NO: 208798 - DNA, 1419 bp, Artificial Sequence
  derived and/or modified sequence
atgaatggatacggaagcccctatttgtatatgggcggtccagtgtcccagccccctagagcacctctgcagagaacgcctaagtgcgcccggtgccgcaaccatggagtattatcttggttgaaggggcataagcggtactgcaggtttaaagattgtacctgcgagaagtgcatcctgatcatagaaagacaaagggtgatggctgctcaggtcgctctaaggcgccagcaggctaacgaatctcttgagtccttaatccccgacagccttcgggcgctccccggaccccctcctccaggggacgccgtggccgccccccagcctccccctgcttcccagccatcacagccacagcctccacgcccagctgcagagctggccgccgctgccgccctgcggtggaccgctgagccgcagccgggggccctccaggcacagttagcaaagcctgaccttacagaagagcggcttggcgatgggaagagcgcagacaataccgaggtgttcagcgacaaagacactgatcagagaagcagccctgatgtcgccaaatcgaaaggctgctttactccagaatctcccgaaattgtctctgtcgaggagggcggatacgctgtgcagaagaacggaggaaatccagaatctcggcctgacagccccaagtgccatgcggagcagaatcacctcctcattgaggggccttctggaacagttagtctaccatttagcctgaaggcaaatcgaccgcctctggaggttctgaagaaaatttttccgaatcagaaaccaacggttctggagttaatcctaaaaggatgcgggggggacctggtttctgccgtggaagtgctgttgagtagtaggtcgtccgtgaccggggccgaaagaacttcagccgaacccgaaagcctggccctgccaagtaatggccacatttttgagcacactctgagttcttatccgatcagcagttcgaaatggtctgtcgggtccgcttttcgggtccctgacaccctacgcttcagcgcagactctagcaacgtcgtcccatcgcctctcgccgggcctctccagccaccctttccacagccacctagatacccacttatgttgcgcaatacacttgctcgctcccagtcctcccccttcctaccgaatgacgtcaccttatggaacactatgacgctgcagcagcagtaccaactcagatctcagtacgtgtcccctttcccttcaaatagcacaagcgtttttcgcagttctcctgtgctgccagctcgggctacagaggaccctaggatttccattcccgacgacgggtgcccattcgtgtctaaacagagcatatacactgaggacgactacgatgaaagaagcgactctagtgactccaggaccctcaacacatcaagttag

SEQ ID NO: 208799 - DNA, 1419 bp, Artificial Sequence
  derived and/or modified sequence
atgaatggctacggcagcccctacctgtacatgggcggccctgtgtcccagcccccccgggcccccctgcagaggacccccaagtgtgcccgctgcagaaatcatggagtgctgtcctggctgaagggccacaagcgctactgccgcttcaaggactgcacctgtgagaagtgcatcctgatcatcgagcggcagagggtgatggccgcccaggtggccctgcggcggcagcaggccaatgaaagcctggagagcctcatcccagacagcctgcgggccctgcccggccccccacctcctggagatgctgtggccgccccccagcccccaccagccagccagcccagccagccccagccccccaggcctgctgctgagctggccgctgctgctgccctgcgctggacagctgagccccagcccggggccctgcaggcccagctggccaagccagacctgacagaggagcggctgggagatggcaagtctgctgacaacacagaggtgttcagtgacaaggacacagaccagaggagcagcccagatgtggccaagagcaagggctgcttcaccccagagagccctgagatcgtgtctgtggaggagggcggctatgctgtgcagaagaatggaggcaaccctgagagcaggccagacagccccaagtgccacgccgagcagaaccacctgctgattgagggccccagcggcaccgtgtccctgcccttcagcctgaaggccaaccggccccccctggaggtgctgaagaagatcttccccaaccagaagcccaccgtgctggagctgatcctgaagggctgcggcggggacctggtgtctgctgtggaggtgctgctgagcagccgcagctctgtgactggagctgagaggaccagcgctgagcctgagagcctggccctgcccagcaatggccacatctttgagcacaccctgagcagctaccccatcagcagcagcaagtggagcgtgggcagcgccttccgggtgcctgacaccctgcgcttctctgctgacagcagcaatgtggtgcccagccccctggccggccccctgcagccccccttcccccagcccccacgctaccccctgatgctgaggaacaccctggcccggagccagagcagccccttcctgcccaatgatgtgaccctgtggaacaccatgaccctgcagcagcagtaccagctgcggagccagtatgtgagccccttccccagcaacagcacctctgtgttccgcagcagccctgtgctgcctgcccgggccacagaggacccccgcatcagcatcccagatgatggctgcccctttgtgtccaagcagagcatctacacagaagatgattatgatgagaggagtgacagcagtgacagcaggaccctgaacaccagcagctag

SEQ ID NO: 208800 - DNA, 1419 bp, Artificial Sequence
  derived and/or modified sequence
atgaacggctacggcagcccctacctgtacatgggcggccccgtgtctcagcctccccgggctccccttcagcgcactcctaagtgcgcccggtgcagaaatcatggagtgctgtcctggctgaaaggccacaaacgatattgcagatttaaagattgtacctgcgaaaaatgcattctcatcatcgagagacagagagtaatggctgcccaagtggccttgcggcgccagcaggcaaatgaaagtctcgagtcgctgattcccgattcacttagggccctacctggtcccccgccacccggcgatgcagtagccgcacctcagccacccccggccagccagccctcccaaccccagcctcctcgccccgctgcagagctcgctgccgctgccgccctgcgatggactgccgaaccccagccaggggcactgcaggctcagctggctaagcccgacctcaccgaagagaggctgggagacggcaaaagtgctgacaacaccgaggtctttagtgataaggatacggaccagcgcagcagccccgacgtcgctaaaagcaagggatgcttcacacccgagtcacctgaaattgtcagcgtcgaggagggaggatatgcggtccaaaaaaatggtgggaaccctgagagccggcccgactcccccaaatgtcatgctgagcagaatcacctgctgatcgaggggccctcagggacagtcagtcttccattcagcctcaaagccaaccggccacccctggaagtcctgaaaaaaatattccccaatcagaagcccactgtattggaactgattctaaaggggtgtggcggagatctcgttagtgcagttgaggtactgctgagctctcggtctagcgtgacaggagcagaaaggacaagtgcagaacctgaaagcttggcgcttccttcaaacgggcatatcttcgagcatacactgagcagctatccaatttcttcaagtaagtggagcgttggcagtgctttccgggtgccagacacccttaggttctcagctgattccagcaatgttgttccgtcccccctggctgggcccttgcagcccccttttccccagcccccacgctatcctctgatgttgcgaaatacattagcaagatctcagagcagcccctttctacccaacgacgtgacactatggaatactatgacactgcagcagcagtatcaattgcggagccagtacgtgtccccgttcccttcaaactccacctctgtgtttcggagttcacctgtgctaccagcccgtgccacagaagacccacggatcagcattcccgacgacggttgccctttcgtgtctaaacagtccatatatacagaagacgactacgatgagcgctcagactctagtgactcccggacccttaatacgtcctcttag

SEQ ID NO: 208801 - DNA, 1419 bp, Artificial Sequence
  derived and/or modified sequence
atgaatggatacggctcaccctacctgtacatgggcggacctgtgtcacagccaccacgggcaccgctgcagcggacccctaaatgcgctagatgtagaaaccacggcgtcctgtcatggcttaaaggccacaagcggtactgtcgattcaaagactgcacgtgcgagaaatgcatcctgatcattgagagacagcgtgttatggccgctcaggtggccctcaggcgccagcaggctaacgaaagcctggagagtcttattcccgactccctgcgggcactccccggacccccacctcccggagatgcggtcgctgccccacaaccacctccggctagccagccctcacaaccacagcccccaaggcccgcagctgaactcgctgcagccgctgcactgagatggaccgctgagcctcagcccggtgctttacaagcccaactcgccaagccagaccttacagaggagcgcttaggagatgggaaaagcgccgacaacacagaggtgttttctgacaaggatacggaccagcgtagttccccggatgtggccaaaagcaaaggttgttttactcctgaaagccctgagatagtgtccgtcgaggaggggggttatgcggtgcaaaagaatggcggaaatcccgagagccgcccagattcccctaaatgtcatgccgaacagaaccacctgttaatcgagggaccctccgggacagtgtcattacccttctctctgaaagctaaccgccctccactggaggtcttgaagaaaatcttccccaatcagaagccaaccgtcctggaactgatactgaaagggtgcgggggagacctggtctccgctgtggaggttctgttgtcttcgagatcatctgtgaccggcgcagagcgaacgagtgccgaacccgagtcccttgctctcccttccaatgggcatatatttgagcacacccttagtagttaccctatctcttcctctaagtggtcagtgggaagcgcctttcgcgtgcccgatacactgcggttctccgcggacagcagtaacgtagtacccagcccactcgctgggcctttgcagcctcctttcccacagccccctagataccccctgatgctcagaaacactctggctcgcagccagtcaagtccatttcttccaaacgacgttaccctgtggaacaccatgaccctgcagcaacagtaccaactgagaagccagtatgtgtctcctttcccttccaacagcacctccgtgttccgttcctcaccggtcctaccagctcgggcaacggaggaccccaggattagtatccccgacgatgggtgtcctttcgtatcaaagcaatctatctataccgaagatgactacgatgagcgctccgattcctcagattccaggactttaaataccagttcatag

SEQ ID NO: 208802 - DNA, 2183 bp, Artificial Sequence
  derived and/or modified sequence
ccgcagccaggctgccaactcattcgggagcccggggcatgaacggctacggctccccctacctgtacatgggcggcccggtgtcgcagccgccacgggcgcccctgcagcgcacgcccaagtgcgcgcgctgccgcaaccatggcgtcctgtcctggctcaagggccacaagcgttactgccgcttcaaggactgcacctgcgagaagtgcatcctcatcatcgagcggcagcgggtcatggctgcgcaggtggcgctgcgccggcagcaggccaacgagagcttggagagcctcatccccgactcgctgcgcgctctgccagggcccccgccgccgggggacgccgtcgccgccccgcagccgccgccagcctctcagccgtcgcagccgcagccgccgcgccctgctgccgagttggccgcggccgccgcgctgcgttggactgccgagccgcagcccggggctctgcaggcgcagctcgccaagccagatttgactgaagaacgacttggagacggcaagtcggcagacaatacagaggtcttcagtgacaaagacactgaccagaggagttccccagatgtggcaaagagtaagggctgcttcacccctgagagccctgagatagtgtccgtggaggaagggggatacgctgtccagaaaaacggaggcaaccccgagagccgccctgacagccccaagtgtcacgcggagcagaatcacctcctgattgagggcccctcggggactgtttctctgcccttcagcttgaaagccaacagaccgccgcttgaagtgttaaaaaagatattccccaaccagaagccaacggtgcttgagctcatcctcaagggctgtggcggggacctggtgagcgccgtggaagtccttctgtccagccgatcctcagtcacgggagcagagcgaacttccgcagaacctgagagtctagcgttgccctccaatgggcacatctttgaacacaccttgagctcctaccccatctcgtcttccaaatggtctgtgggatcagcctttcgagtcccagacacgttgaggttttctgccgactctagcaacgttgtccccagtcccttggctgggcctctgcagccccctttcccccagccaccccggtacccgctgatgctgaggaatactttggcgagaagccagtcgagcccctttttgcccaatgatgtcaccctgtggaacaccatgacgctgcagcagcagtatcagctgaggtcccagtatgtcagtcctttccccagtaactctaccagcgtcttcagaagctcgcccgtccttcctgcccgcgccacggaagaccctcggatttccatccctgatgatgggtgtccatttgtgtcaaagcagtccatttacaccgaggacgactatgacgagaggtctgactcctcagactctagaacactcaacacatcatcttaaagtggtgctggatgggtggtggccaggtgacattttctgtgcgttttgaccctgaggcatctgaggagaggccacatcttgtgtatgccctttccttctgtttgacaaagtgactgtgcttgattctatacattagcaataaaaacataacttatttaacttcttgcacttcactggaaaatgccaaatagctctgttctgtggctttagtgctgaatgtttattgtaaaagagagtctaatgttaagaatagtcttgggaaggctgggtccgtggaagatttatttggggatgtaaagctgaaggtcagccttgcacctaaacccaacctggaatgttaaatgaaataatatacttgaatgcaattttgtaaaagtggattcctcaggatatgtgaaacctaaaggaagtggttctgttgcaaatggactataaacagggacattatattcttacactaaaaatccttgcattttaaagagagatgcacttaagaatagagtgaactgctcatatgcttatttaagcttggacagttttcagagacaaaccccattaagaattactcttttcacatggctgaatcgaaacatgtgtaatgtcaatgtaaaaccaatcacagctgtgaactgcatgaaatgtattgtgaaacgaacacaagattaagctttgtcaggttaatgtagcatgttaaggactctagaaaaaaataaactaaggagacga

SEQ ID NO: 208803 - DNA, 1419 bp, Artificial Sequence
  derived and/or modified sequence
atgaacggctacggcagcccctacctgtacatgggcggccccgtgagccagccccccagagcccccctgcagagaacccccaagtgcgccagatgcagaaaccacggcgtgctgagctggctgaagggccacaagagatactgcagattcaaggactgcacctgcgagaagtgcatcctgatcatcgagagacagagagtgatggccgcccaggtggccctgagaagacagcaggccaacgagagcctggagagcctgatccccgacagcctgagagccctgcccggcccccccccccccggcgacgccgtggccgccccccagcccccccccgccagccagcccagccagccccagccccccagacccgccgccgagctggccgccgccgccgccctgagatggaccgccgagccccagcccggcgccctgcaggcccagctggccaagcccgacctgaccgaggagagactgggcgacggcaagagcgccgacaacaccgaggtgttcagcgacaaggacaccgaccagagaagcagccccgacgtggccaagagcaagggctgcttcacccccgagagccccgagatcgtgagcgtggaggagggcggctacgccgtgcagaagaacggcggcaaccccgagagcagacccgacagccccaagtgccacgccgagcagaaccacctgctgatcgagggccccagcggcaccgtgagcctgcccttcagcctgaaggccaacagaccccccctggaggtgctgaagaagatcttccccaaccagaagcccaccgtgctggagctgatcctgaagggctgcggcggcgacctggtgagcgccgtggaggtgctgctgagcagcagaagcagcgtgaccggcgccgagagaaccagcgccgagcccgagagcctggccctgcccagcaacggccacatcttcgagcacaccctgagcagctaccccatcagcagcagcaagtggagcgtgggcagcgccttcagagtgcccgacaccctgagattcagcgccgacagcagcaacgtggtgcccagccccctggccggccccctgcagccccccttcccccagccccccagataccccctgatgctgagaaacaccctggccagaagccagagcagccccttcctgcccaacgacgtgaccctgtggaacaccatgaccctgcagcagcagtaccagctgagaagccagtacgtgagccccttccccagcaacagcaccagcgtgttcagaagcagccccgtgctgcccgccagagccaccgaggaccccagaatcagcatccccgacgacggctgccccttcgtgagcaagcagagcatctacaccgaggacgactacgacgagagaagcgacagcagcgacagcagaaccctgaacaccagcagctag

SEQ ID NO: 208804 - protein, 299 aa, Artificial Sequence
  derived and/or modified sequence
MPLSGTPAPNKKRKSSKLIMELTGGGQESSGLNLGKKISVPRDVMLEELSLLTNRGSKMFKLRQMRVEKFIYENHPDVFSDSSMDHFQKFLPTVGGQLGTAGQGFSYSKSNGRGGSQAGGSGSAGQYGSDQQHHLGSGSGAGGTGGPAGQAGRGGAAGTAGVGETGSGDQAGGEGKHITVFKTYISPWERAMGVDPQQKMELGIDLLAYGAKAELPKYKSFNRTAMPYGGYEKASKRMTFQMPKFDLGPLLSEPLVLYNQNLSNRPSFNRTPIPWLSSGEPVDYNVDIGIPLDGETEEL

SEQ ID NO: 208805 - DNA, 900 bp, Artificial Sequence
  derived and/or modified sequence
atgcccctgtcaggcacaccggccccaaacaagaagcgcaaatcgtctaagctcattatggagctgacaggggggggtcaagagtcctccgggctcaaccttggcaaaaagatatctgtgccacgggacgtgatgctcgaggagctgtcgctcctcaccaaccgcggatcaaaaatgttcaaacttcggcaaatgcgggttgagaaattcatttatgagaaccaccccgacgtattctccgatagttccatggatcacttccagaagttcctgcccacagtggggggccagctcggcacggcaggtcaaggtttctcctattctaagagcaacggcagggggggctctcaggccggagggagcggcagtgccgggcaatacggatctgatcaacagcaccatttgggctccggttcaggcgcgggcggcaccggcggacctgcggggcaggccgggcggggaggcgccgctggcacggctggggtgggggaaacaggaagcggggatcaggcggggggcgaaggcaaacacatcaccgttttcaaaacttacatttccccttgggaacgggccatgggcgtcgatccccagcagaagatggagctaggtatcgaccttttagcctacggcgcaaaagcagaattgcccaaatacaaatcattcaataggacagccatgccctatggtggatacgagaaagcctcgaagagaatgacgttccaaatgccaaagttcgatctaggcccacttctctccgagccattggttctgtacaaccaaaatctctctaatcgaccctcatttaatcggacacccatcccatggctgtcatccggcgaaccagtggattataatgtcgacattggaataccgctcgacggtgaaaccgaagaactctag

SEQ ID NO: 208806 - DNA, 900 bp, Artificial Sequence
  derived and/or modified sequence
atgcccctgagcggcaccccagcccccaacaagaagaggaagagcagcaagctgatcatggagctgactggaggcggccaggagagcagcggcctgaacctgggcaagaagatctctgtgcccagagatgtgatgctggaggagctgagcctgctgaccaacagaggcagcaagatgttcaagctgcggcagatgagggtggagaagttcatctatgagaaccacccagatgtgttcagtgacagctccatggaccacttccagaagttcctgcccaccgtgggcggccagctgggcacagctggccagggcttctcctacagcaagagcaatggccggggcggcagccaggccggcggcagcggcagcgctggccagtatggcagtgaccagcagcaccacctgggcagcggcagcggggccggcggcaccggcggccctgctggccaggccggccggggcggcgctgctggaacagctggggtgggggagactggaagtggggaccaggccggcggggagggcaagcacatcaccgtcttcaagacctacatcagcccctgggagcgggccatgggcgtggacccccagcagaagatggagctgggcatcgacctgctggcctatggagccaaggccgagctgcccaagtacaagagcttcaacagaacagccatgccctacggcggctatgagaaggccagcaagaggatgaccttccagatgcccaagtttgacctgggccccctgctgtctgagcccctggtgctgtacaaccagaacctgagcaaccggcccagcttcaacagaacacccatcccctggctgagcagcggggagcctgtggactacaacgtggacatcggcatccccctggatggagaaacagaggagctgtag

SEQ ID NO: 208807 - DNA, 1541 bp, Artificial Sequence
  derived and/or modified sequence
gtttctccctaagtgcttctttggatctcaggctctaggtgcaatgtgaaggggagtccctgggcagactgatccctggctcagacagttcagtgggagaatcccaaaggccttttccctccttcctgagcctccgggcaaggagggagggatcttggttccagggtctcagtaccccctgtgccatttgagctgcttgcgctcatcatctctattaataaccaacttccctcccccactgccagtgctgcccccacgcctgcccagctcgtgttctccggtcacagcagctcagtcctccaaagctgctggaccccagggagagctgaccactgcccgagcagccggctgaatccacctccacaatgccgctctcaggaaccccggcccctaataagaagaggaaatccagcaagctgatcatggaactcactggaggtggacaggagagctcaggcttgaacctgggcaaaaagatcagtgtcccaagggatgtgatgttggaggaactgtcgctgcttaccaaccggggctccaagatgttcaaactgcggcagatgagggtggagaagtttatttatgagaaccaccctgatgttttctctgacagctcaatggatcacttccagaagttccttccaacagtggggggacagctgggcacagctggtcagggattctcatacagcaagagcaacggcagaggcggcagccaggcagggggcagtggctctgccggacagtatggctctgatcagcagcaccatctgggctctgggtctggagctgggggtacaggtggtcccgcgggccaggctggcagaggaggagctgctggcacagcaggggttggtgagacaggatcaggagaccaggcaggcggagaaggaaaacatatcactgtgttcaagacctatatttccccatgggagcgagccatgggggttgacccccagcaaaaaatggaacttggcattgacctgctggcctatggggccaaagctgaacttcccaaatataagtccttcaacaggacggcaatgccctatggtggatatgagaaggcctccaaacgcatgaccttccagatgcccaagtttgacctggggcccttgctgagtgaacccctggtcctctacaaccaaaacctctccaacaggccttctttcaatcgaacccctattccctggctgagctctggggagcctgtagactacaacgtggatattggcatccccttggatggagaaacagaggagctgtgaggtgtttcctcctctgatttgcatcatttcccctctctggctccaatttggagagggaatgctgagcagatagcccccattgttaatccagtatccttatgggaatggagggaaaaaggagagatctacctttccatcctttactccaagtccccactccacgcatccttcctcaccaactcagagctccccttctacttgctccatatggaacctgctcgtttatggaatttgctctgccaccagtaacagtcaataaacttcaaggaaaatgaa

SEQ ID NO: 208808 - DNA, 900 bp, Artificial Sequence
  derived and/or modified sequence
atgcccctgagcggcacccccgcccccaacaagaagcggaagagctccaaattaattatggagctgactggaggagggcaggagtcaagcggcctcaatctcggtaagaagatcagcgtccctcgcgacgtgatgctagaggaactgagtttgctcactaacagaggctccaaaatgtttaagctgagacagatgcgtgtcgaaaaatttatctacgagaaccatcccgacgtattcagtgactctagtatggatcactttcagaagttcctccccacagttggcgggcagctgggcactgccggccaaggtttttcctattcaaagtccaacggacgtggaggttcccaggcgggcggatctggtagcgccggccaatatgggtctgaccagcagcatcatctggggtcaggcagcggggccggaggaaccgggggcccagccggccaggccggacgcggcggcgctgctggcacagcgggcgtgggcgagacaggtagcggtgatcaggctgggggagaagggaagcacataaccgtatttaaaacgtatatttccccatgggaacgggccatgggcgtcgacccacagcagaagatggaactgggtatcgacctgctcgcatacggggcaaaagcagagcttccaaagtataagtctttcaacagaaccgcaatgccgtacggcggatatgaaaaggcaagcaagcgcatgacttttcagatgccaaagtttgacctggggccccttcttagcgagccccttgttttgtataaccagaatctgtccaatcgtccaagcttcaataggacgccaatcccatggctgagcagcggggaacccgtcgactataacgtagatatagggatcccactcgacggcgaaacagaggagctgtag

SEQ ID NO: 208809 - DNA, 900 bp, Artificial Sequence
  derived and/or modified sequence
atgccactatctggaactcccgctccaaataagaaaagaaagtcatccaagcttatcatggagctgactggagggggtcaagaaagcagtggattgaacctgggcaagaaaatctctgttcctcgagatgtgatgttagaggagctgagcctgctgacgaatcggggatccaagatgtttaagttgcggcagatgagggtggaaaagttcatatacgaaaatcaccctgacgtcttttctgacagtagcatggatcactttcagaagttcctcccaaccgtcggcggtcagcttggaacagctggccaggggttctcgtactctaaatccaacggcaggggtggctcccaggctggaggatcggggtccgctggtcagtatggctccgatcagcaacatcacttaggcagcggctccggagccggtgggaccggcggacccgcaggacaggctggtcgaggcggtgccgcagggacagcaggtgtaggtgaaaccggctcaggcgatcaggctggaggggaaggcaaacacataaccgtcttcaaaacgtacatctctccttgggaacgtgccatgggcgtggaccctcagcaaaagatggaattgggcatcgatctactggcctacggcgctaaagcggaactgcccaaatacaaaagtttcaacagaaccgcgatgccttacgggggttacgagaaagcctcaaaacgaatgactttccagatgcccaagtttgacttgggccctttgctttccgagcctttggtgctttataaccagaatctctccaatcgtccctcctttaatcgcaccccaattccatggctttcatcaggtgagcccgtagactacaatgtagatatcggcataccgctggatggggagactgaagagctttag

SEQ ID NO: 208810 - DNA, 900 bp, Artificial Sequence
  derived and/or modified sequence
atgcccctgagcggcacccccgcccccaacaagaagagaaagagcagcaagctgatcatggagctgaccggcggcggccaggagagcagcggcctgaacctgggcaagaagatcagcgtgcccagagacgtgatgctggaggagctgagcctgctgaccaacagaggcagcaagatgttcaagctgagacagatgagagtggagaagttcatctacgagaaccaccccgacgtgttcagcgacagcagcatggaccacttccagaagttcctgcccaccgtgggcggccagctgggcaccgccggccagggcttcagctacagcaagagcaacggcagaggcggcagccaggccggcggcagcggcagcgccggccagtacggcagcgaccagcagcaccacctgggcagcggcagcggcgccggcggcaccggcggccccgccggccaggccggcagaggcggcgccgccggcaccgccggcgtgggcgagaccggcagcggcgaccaggccggcggcgagggcaagcacatcaccgtgttcaagacctacatcagcccctgggagagagccatgggcgtggacccccagcagaagatggagctgggcatcgacctgctggcctacggcgccaaggccgagctgcccaagtacaagagcttcaacagaaccgccatgccctacggcggctacgagaaggccagcaagagaatgaccttccagatgcccaagttcgacctgggccccctgctgagcgagcccctggtgctgtacaaccagaacctgagcaacagacccagcttcaacagaacccccatcccctggctgagcagcggcgagcccgtggactacaacgtggacatcggcatccccctggacggcgagaccgaggagctgtag

SEQ ID NO: 208811 - protein, 103 aa, Artificial Sequence
  derived and/or modified sequence
MGSRCAKLNTGQSPGHSPGHSTGHGRGHESSMKKLMACVSQDNFSLSSAGEEEEEEEEEGEEEEKEELPVQGKLLLLEPERQEEGHKDNAEAQQSPEPKRTPS

SEQ ID NO: 208812 - DNA, 312 bp, Artificial Sequence
  derived and/or modified sequence
atgggcagcagatgcgccaagctgaacaccggccagagccccggccacagccccggccacagcaccggccacggcagaggccacgagagcagcatgaagaagctgatggcctgcgtgagccaggacaacttcagcctgagcagcgccggcgaggaggaggaggaggaggaggaggagggcgaggaggaggagaaggaggagctgcccgtgcagggcaagctgctgctgctggagcccgagagacaggaggagggccacaaggacaacgccgaggcccagcagagccccgagcccaagagaacccccagctag

SEQ ID NO: 208813 - DNA, 312 bp, Artificial Sequence
  derived and/or modified sequence
atgggctctaggtgcgccaaactgaatacgggccagagcccagggcacagcccaggccactccaccggacatggaagaggccatgaaagttctatgaagaagctgatggcatgtgtgtctcaagacaacttttccctgagttcggcgggcgaagaggaagaagaggaagaggaggagggggaggaggaagaaaaggaagagctgccagtacaggggaaactcctgttgctggaacctgagagacaggaggagggtcacaaggacaacgctgaagcccagcagtcacccgaaccgaagcgcacaccctcttag

SEQ ID NO: 208814 - DNA, 312 bp, Artificial Sequence
  derived and/or modified sequence
atgggcagccgctgtgccaagctgaacacaggccagagccctggccacagccctggccacagcacaggccacggccggggccacgagagctccatgaagaagctgatggcctgtgtgtcccaggacaacttcagcctgagcagcgctggggaggaggaggaggaggaggaggaggagggggaggaggaggagaaggaggagctgcctgtgcagggcaagctgctgctgctggagcctgagcggcaggaggagggccacaaggacaatgctgaggcccagcagagccctgagcccaagaggacccccagctag

SEQ ID NO: 208815 - DNA, 312 bp, Artificial Sequence
  derived and/or modified sequence
atgggcagccggtgcgccaagctgaacaccggccagagccccggccattccccaggccattctaccggacatgggcgtggacatgaaagctcaatgaagaagctaatggcctgtgtttctcaggataacttttcgctgtcaagcgccggtgaagaggaagaagaagaagaggaagagggtgaagaggaagagaaagaggagttgcctgtgcaaggcaaactgcttttactagagccagagcgccaagaagaaggtcataaagataacgccgaagctcagcagagccccgagcctaagaggactccgagctag

SEQ ID NO: 208816 - DNA, 312 bp, Artificial Sequence
  derived and/or modified sequence
atggggtccaggtgcgccaagctaaatacaggccaaagcccaggccacagccccggacattctactggtcacggcagagggcacgaaagcagcatgaagaagttaatggcgtgcgtgtctcaagataatttttccctcagcagtgccggtgaggaggaggaggaagaagaagaggagggagaggaagaggaaaaagaagaactaccagttcaaggcaagctcctcttgctagaacctgaacgtcaggaggagggccacaaagataacgcggaagcccagcagtccccagagccaaagcgaacgccaagctag

SEQ ID NO: 208817 - DNA, 309 bp, Artificial Sequence
  derived and/or modified sequence
atgggttcccgctgtgccaagctcaacacaggccagagcccaggccacagcccaggccacagcacgggccatggccggggccacgaatcctccatgaaaaagctcatggcctgtgtgagtcaggataacttctccttgtcatcagcgggcgaggaagaggaggaagaggaggaggagggggaagaggaggagaaagaagagctgccggtgcagggcaagctgctgctgctggagcctgagcggcaggaggagggccacaaggacaacgccgaggcccagcagagccccgagcccaagcggacaccctcc

SEQ ID NO: 208818 - protein, 299 aa, Artificial Sequence
  derived and/or modified sequence
MAPWSHPSAQLQPVGGDAVSPALMVLLCLGLSLGPRTHVQAGNLSKATLWAEPGSVISRGNSVTIRCQGTLEAQEYRLVKEGSPEPWDTQNPLEPKNKARFSIPSMTEHHAGRYRCYYYSPAGWSEPSDPLELVVTGFYNKPTLSALPSPVVTSGENVTLQCGSRLRFDRFILTEEGDHKLSWTLDSQLTPSGQFQALFPVGPVTPSHRWMLRCYGSRRHILQVWSEPSDLLEIPVSGAADNLSPSQNKSDSGTASHLQDYAVENLIRMGMAGLILVVLGILIFQDWHSQRSPQAAAGR

SEQ ID NO: 208819 - DNA, 900 bp, Artificial Sequence
  derived and/or modified sequence
atggctccatggagccaccctagtgcccagttgcagccggtggggggagacgcagtatcgcccgcactcatggtgctgctttgccttggactatccctgggtccacgcactcatgtccaggctggtaatttgtcgaaagctactttatgggcagagcccggaagcgtcatctcccggggaaattccgtcactataagatgccagggaactctggaagcccaagaatacaggctagtgaaagagggcagccctgaaccatgggacacccagaaccccctggagcccaagaacaaagccagattttccattcctagtatgacagaacatcacgctggacgataccggtgctattattatagtcccgcaggctggtcagagccctcggaccccctcgaactggtagtgactggattttataataaacccacactctccgccttaccttctccggtggtcacttccggtgaaaacgtgacattgcaatgcggatccagacttcgctttgatagatttatcttaaccgaagaaggcgatcacaagttgtcttggaccctggacagccagcttactccctctggccagtttcaagcgttgttccccgtgggtccggttactccaagccaccgttggatgttgcgctgctatggttccagacgtcacatcctgcaagtttggagtgaaccgtccgatctgcttgagatcccagtctccggggcagccgacaacctcagcccaagtcagaacaaatcggacagcggaacagcctcacatctccaggactacgctgtcgaaaacttgatccggatggggatggccggactcatcctggtggtcctggggatactcatctttcaggactggcacagtcagcggagcccgcaggcagccgcaggcagatag

SEQ ID NO: 208820 - DNA, 900 bp, Artificial Sequence
  derived and/or modified sequence
atggcaccatggtcccacccatcagcccagcttcaaccagtagggggcgatgctgtctctccagctcttatggtgctactgtgtctcggcctttcactcggaccaaggacccacgtccaggcaggcaatctgagcaaagcaactctgtgggccgaaccaggatcagtgattagtaggggcaacagcgtcactatccgttgccagggtacactcgaggctcaggagtatagactagtgaaggaaggaagccccgaaccttgggacactcagaatcccctagagcccaaaaacaaggcgcgcttctccatcccgtcaatgactgaacaccacgcaggcaggtatagatgctactattattcaccagcaggttggtccgagccttcggatccattagaattggttgtcaccggcttttataataaacccaccttgagtgccctccccagcccagttgtgaccagtggagaaaatgtgaccctgcagtgcggtagtcgccttcgattcgaccgcttcatccttaccgaggagggagaccataagttgagctggacactcgactcacagttaacaccttcaggtcaatttcaagcacttttccccgtcggtccagtcacacctagtcacagatggatgctcaggtgttatggcagccgcaggcacatcctgcaggtgtggtccgaacccagtgacctgttagagatacctgtttcgggcgccgccgacaacctaagccctagccagaacaaatctgattccggaacggcttctcatctccaggactatgcagtggaaaacctgatcaggatgggaatggccggccttatcctggtggtactgggcatcctcatcttccaggattggcattcccagaggagcccccaggcagccgcagggcgttag

SEQ ID NO: 208821 - DNA, 900 bp, Artificial Sequence
  derived and/or modified sequence
atggcaccatggtcccacccatcagcccagcttcaaccagtagggggcgatgctgtctctccagctcttatggtgctactgtgtctcggcctttcactcggaccaaggacccacgtccaggcaggcaatctgagcaaagcaactctgtgggccgaaccaggatcagtgattagtaggggcaacagcgtcactatccgttgccagggtacactcgaggctcaggagtatagactagtgaaggaaggaagccccgaaccttgggacactcagaatcccctagagcccaaaaacaaggcgcgcttctccatcccgtcaatgactgaacaccacgcaggcaggtatagatgctactattattcaccagcaggttggtccgagccttcggatccattagaattggttgtcaccggcttttataataaacccaccttgagtgccctccccagcccagttgtgaccagtggagaaaatgtgaccctgcagtgcggtagtcgccttcgattcgaccgcttcatccttaccgaggagggagaccataagttgagctggacactcgactcacagttaacaccttcaggtcaatttcaagcacttttccccgttggcccagtaacaccctctcatagatggatgttgaggtgctacggctccaggcgacacattctgcaagtgtggagcgaaccctcagacctcctggaaattcctgtttctggcgcagccgacaacctgtcaccgagccaaaacaagtcagacagcggcacagcttcacatttacaggattacgccgtagagaatcttattcggatgggcatggcaggattaattcttgtagttctcggaattctcatcttccaagattggcactcccagcgaagcccacaggctgctgccggacgctag

SEQ ID NO: 208822 - DNA, 1365 bp, Artificial Sequence
  derived and/or modified sequence
atgcagctcagcctgggctacacagccaggtgtcagatgtgtctctgctgatctgagtctgcctgtggcatggacctgcatcttccctgaagcatctccagggctgaaaaatcactgaccatggcaccatggtctcatccatctgcacagctgcagccagtgggaggagacgccgtgagccctgccctcatggttctgctctgcctcgggctgagtctgggccccaggacccacgtgcaggcagggaacctctccaaagccaccctctgggctgagccaggctctgtgatcagccgggggaactctgtgaccatccggtgtcaggggaccctggaggcccaggaataccgtctggttaaagagggaagcccagaaccctgggacacacagaacccactggagcccaagaacaaggccagattctccatcccatccatgacagagcaccatgcagggagataccgctgttactactacagccctgcaggctggtcagagcccagcgaccccctggagctggtggtgacaggattctacaacaaacccaccctctcagccctgcccagtcctgtggtgacctcaggagagaacgtgaccctccagtgtggctcacggctgagattcgacaggttcattctgactgaggaaggagaccacaagctctcctggaccttggactcacagctgacccccagtgggcagttccaggccctgttccctgtgggccctgtgacccccagccacaggtggatgctcagatgctatggctctcgcaggcatatcctgcaggtatggtcagaacccagtgacctcctggagattccggtctcaggagcagctgataacctcagtccgtcacaaaacaagtctgactctgggactgcctcacaccttcaggattacgcagtagagaatctcatccgcatgggcatggccggcttgatcctggtggtccttgggattctgatatttcaggattggcacagccagagaagcccccaagctgcagctggaaggtgaacagaagagagaacaatgcaccattgaatgctggagccttggaagcgaatctgatggtcctaggaggttcgggaagaccatctgaggcctatgccatctggactgtctgctggcaatttctttttttctttcttttcttttctttcttttttttttttttttttttttttttgagatggagtcttgctctgtcaccaggctggaatgcagtggcgcaatctgggctcactgcaacctccgcctctcgggttcaagtgattctcctgcctcagcctctggcaatttctagagggaggaatgggtgtttgagtgcagagacactggtctggggtgatccatggagga

SEQ ID NO: 208823 - DNA, 900 bp, Artificial Sequence
  derived and/or modified sequence
atggccccctggagccaccccagcgcccagctgcagcccgtgggcggcgacgccgtgagccccgccctgatggtgctgctgtgcctgggcctgagcctgggccccagaacccacgtgcaggccggcaacctgagcaaggccaccctgtgggccgagcccggcagcgtgatcagcagaggcaacagcgtgaccatcagatgccagggcaccctggaggcccaggagtacagactggtgaaggagggcagccccgagccctgggacacccagaaccccctggagcccaagaacaaggccagattcagcatccccagcatgaccgagcaccacgccggcagatacagatgctactactacagccccgccggctggagcgagcccagcgaccccctggagctggtggtgaccggcttctacaacaagcccaccctgagcgccctgcccagccccgtggtgaccagcggcgagaacgtgaccctgcagtgcggcagcagactgagattcgacagattcatcctgaccgaggagggcgaccacaagctgagctggaccctggacagccagctgacccccagcggccagttccaggccctgttccccgtgggccccgtgacccccagccacagatggatgctgagatgctacggcagcagaagacacatcctgcaggtgtggagcgagcccagcgacctgctggagatccccgtgagcggcgccgccgacaacctgagccccagccagaacaagagcgacagcggcaccgccagccacctgcaggactacgccgtggagaacctgatcagaatgggcatggccggcctgatcctggtggtgctgggcatcctgatcttccaggactggcacagccagagaagcccccaggccgccgccggcagatag

SEQ ID NO: 208824 - DNA, 900 bp, Artificial Sequence
  derived and/or modified sequence
atggcgccatggagtcacccaagcgcccagttacagccagtcggaggggacgcagtgagcccggctttgatggtgctgctgtgcctcggactctctttgggacctcgtacgcacgtccaggcagggaacctgagtaaggccactctctgggccgagcctgggtctgtcattagtcgaggcaatagcgtgacaattaggtgccaaggcactctcgaggcgcaagagtacagactggtgaaggaaggatctccagaaccctgggacacccaaaacccactcgagcccaaaaataaggcccgcttcagtattcccagcatgaccgagcaccatgccggtcgttatcgctgttattactacagccccgccggctggtccgagccaagtgatccacttgagctggttgtgactggcttttacaacaaacctacacttagcgctctcccttctcccgtcgtaactagcggcgaaaatgtgaccttacagtgtggttccaggctgagatttgataggtttatactcacagaagaaggcgaccataagctcagttggacactggattcccagttaaccccatctggtcaattccaggcactgttccctgtgggaccagtaacgccctcgcacaggtggatgctcaggtgctacggctcccgtcgccatatactgcaggtctggagtgaaccatcggatctgctggaaataccagtatctggggcagcagataacctatccccaagtcagaacaagagcgacagcggcacagcaagccacttacaggactacgccgtggagaatctgattagaatgggcatggctggcttgattttggtggtgttgggcattttaattttccaagattggcatagccagcgcagccctcaggctgcagctggaaggtag

SEQ ID NO: 208825 - DNA, 900 bp, Artificial Sequence
  derived and/or modified sequence
atggccccctggagccaccccagcgcccagctgcagcctgtgggcggagatgctgtgtccccagccctgatggtgctgctgtgcctgggcctgagcctgggccccaggacccacgtgcaggccggcaacctgagcaaggccaccctgtgggccgagcccggcagcgtcatcagccggggcaacagcgtgaccatccgctgccagggcaccctggaggcccaggagtaccgcctggtgaaggagggcagccctgagccctgggacacccagaaccccctggagcccaagaacaaggcccgcttcagcatccccagcatgacagagcaccacgccggccgctaccgctgctactactacagccctgctggctggagcgagcccagcgaccccctggagctggtggtgacaggcttctacaacaagcccaccctgagcgccctgcccagccctgtggtgaccagcggggagaatgtgaccctgcagtgtggcagccggctgcgctttgaccgcttcatcctgacagaggagggggaccacaagctgtcctggaccctggacagccagctgacccccagcggccagttccaggccctcttccctgtgggccctgtgacccccagccaccgctggatgctgcgctgctacggcagccgccgccacatcctgcaggtgtggagcgagcccagcgacctgctggagatccctgtgtctggagctgctgacaacctgagccccagccagaacaagagtgacagcggcacagccagccacctgcaggactatgctgtggagaacctgatccgcatgggcatggccggcctcatcctggtggtgctgggcatcctgatcttccaggactggcacagccagaggagcccccaggccgctgctggaagatag

SEQ ID NO: 208826 - DNA, 900 bp, Artificial Sequence
  derived and/or modified sequence
atggccccctggagccaccccagcgcccagctgcagcccgtgggcggagatgcagtctcgccagcgctgatggtgctcctttgtctgggcttgtccctggggccccgcacccacgtgcaggcgggtaatttgtctaaggcaacactctgggcagagcctggaagcgttatttcccgagggaactcggttaccatcaggtgccagggaaccctggaagcccaggagtataggctggttaaggaggggagcccggagccatgggatacccagaaccctctggagccaaagaataaagccagattcagcattccttcaatgacggaacatcatgccggtcgctataggtgctactactactcgcccgcaggatggtcagaacccagcgatccactagaactggtagtgaccgggttttataacaagcctaccttgtcagccctgccaagcccagtggtcaccagcggtgaaaatgttacgttgcaatgtggatcacgtcttagatttgatcgtttcattcttacggaggaaggagatcacaagttatcgtggacactggattctcagctgactcccagcggtcagttccaagcgttgtttcctgtgggacccgttaccccaagtcacaggtggatgctgagatgttacggttctcggcgtcatattctgcaggtgtggtcggagccaagcgatctcctagaaattcccgtgagtggagccgccgataatttatcaccttctcaaaacaagagcgatagcggcacagctagccatctccaggactacgccgtggaaaatctaattcgcatgggaatggctggcctaatcttggtcgtgttggggatcctgattttccaagactggcatagccagagatcacctcaggccgccgccggcagatag

SEQ ID NO: 208827 - RNA, 900 nt, Artificial Sequence
  derived and/or modified sequence
auggcaccauggucccacccaucagcccagcuucaaccaguagggggcgaugcugucucuccagcucuuauggugcuacugugucucggccuuucacucggaccaaggacccacguccaggcaggcaaucugagcaaagcaacucugugggccgaaccaggaucagugauuaguaggggcaacagcgucacuauccguugccaggguacacucgaggcucaggaguauagacuagugaaggaaggaagccccgaaccuugggacacucagaauccccuagagcccaaaaacaaggcgcgcuucuccaucccgucaaugacugaacaccacgcaggcagguauagaugcuacuauuauucaccagcagguugguccgagccuucggauccauuagaauugguugucaccggcuuuuauaauaaacccaccuugagugcccuccccagcccaguugugaccaguggagaaaaugugacccugcagugcgguagucgccuucgauucgaccgcuucauccuuaccgaggagggagaccauaaguugagcuggacacucgacucacaguuaacaccuucaggucaauuucaagcacuuuuccccgucgguccagucacaccuagucacagauggaugcucagguguuauggcagccgcaggcacauccugcaggugugguccgaacccagugaccuguuagagauaccuguuucgggcgccgccgacaaccuaagcccuagccagaacaaaucugauuccggaacggcuucucaucuccaggacuaugcaguggaaaaccugaucaggaugggaauggccggccuuauccuggugguacugggcauccucaucuuccaggauuggcauucccagaggagcccccaggcagccgcagggcguuag

SEQ ID NO: 208828 - RNA, 900 nt, Artificial Sequence
  derived and/or modified sequence
auggcaccauggucccacccaucagcccagcuucaaccaguagggggcgaugcugucucuccagcucuuauggugcuacugugucucggccuuucacucggaccaaggacccacguccaggcaggcaaucugagcaaagcaacucugugggccgaaccaggaucagugauuaguaggggcaacagcgucacuauccguugccaggguacacucgaggcucaggaguauagacuagugaaggaaggaagccccgaaccuugggacacucagaauccccuagagcccaaaaacaaggcgcgcuucuccaucccgucaaugacugaacaccacgcaggcagguauagaugcuacuauuauucaccagcagguugguccgagccuucggauccauuagaauugguugucaccggcuuuuauaauaaacccaccuugagugcccuccccagcccaguugugaccaguggagaaaaugugacccugcagugcgguagucgccuucgauucgaccgcuucauccuuaccgaggagggagaccauaaguugagcuggacacucgacucacaguuaacaccuucaggucaauuucaagcacuuuuccccguuggcccaguaacacccucucauagauggauguugaggugcuacggcuccaggcgacacauucugcaaguguggagcgaacccucagaccuccuggaaauuccuguuucuggcgcagccgacaaccugucaccgagccaaaacaagucagacagcggcacagcuucacauuuacaggauuacgccguagagaaucuuauucggaugggcauggcaggauuaauucuuguaguucucggaauucucaucuuccaagauuggcacucccagcgaagcccacaggcugcugccggacgcuag

SEQ ID NO: 208829 - protein, 206 aa, Artificial Sequence
  derived and/or modified sequence
MDEDVLTTLKILIIGESGVGKSSLLLRFTDDTFDPELAATIGVDFKVKTISVDGNKAKLAIWDTAGQERFRTLTPSYYRGAQGVILVYDVTRRDTFVKLDNWLNELETYCTRNDIVNMLVGNKIDKENREVDRNEGLKFARKHSMLFIEASAKTCDGVQCAFEELVEKIIQTPGLWESENQNKGVKLSHREEGQGGGACGGYCSVL

SEQ ID NO: 208830 - DNA, 621 bp, Artificial Sequence
  derived and/or modified sequence
atggatgaggacgttctcactacccttaagattctgatcataggtgaaagtggcgtgggaaagtcctcgctattgctacgtttcacagatgacacgttcgaccctgaactggctgccactatcggagttgacttcaaagtgaagacaatcagtgtcgacgggaataaggccaagctggccatctgggacaccgccggccaggaacgcttcaggactctaacccctagctactacaggggcgcacaaggcgtgatcctagtgtatgatgtgaccaggcgtgacacctttgtaaagctggataattggcttaacgaactcgagacctattgtactcggaacgatattgtcaatatgttggtgggcaataaaattgataaagagaatcgtgaggtggacagaaatgaaggactgaagtttgcccgcaaacatagcatgttgtttattgaggcttcagccaagacatgcgatggcgtccagtgcgcctttgaagagctggtggaaaagatcatccagacccctggcctgtgggaatctgagaaccagaacaaaggtgtgaaactgtctcaccgggaagagggccagggcggcggggcgtgcgggggctactgctcggttttgtag

SEQ ID NO: 208831 - DNA, 621 bp, Artificial Sequence
  derived and/or modified sequence
atggatgaagatgtgctgaccaccctgaagatcctgatcatcggggagagcggcgtgggcaagagcagcctgctgctgcgcttcacagatgacacctttgatcctgagctggccgccaccatcggcgtggacttcaaggtgaagaccatctctgtggatggcaacaaggccaagctggccatctgggacacagctggccaggagcgcttccgcaccctgacccccagctactacagaggagcccagggcgtcatcctggtgtatgatgtgacccggcgggacacctttgtgaagctggacaactggctgaatgagctggagacctactgcaccagaaatgacatcgtgaacatgctggtgggcaacaagattgacaaggaaaatcgggaggtggacagaaatgaaggcctgaagtttgccaggaagcacagcatgctgttcatcgaggccagcgccaagacctgtgatggagtgcagtgtgcctttgaggagctggtggagaagatcatccagaccccaggcctgtgggagagcgagaaccagaacaagggcgtgaagctgagccaccgggaggagggccagggcggcggggcctgtggcggctactgcagcgtgctgtag

SEQ ID NO: 208832 - DNA, 621 bp, Artificial Sequence
  derived and/or modified sequence
atggacgaggacgtgctgaccaccctgaagatcctgatcatcggcgagagcggagtgggaaaaagttccctcctcctccggttcaccgacgatacgttcgaccccgaacttgctgctactatcggcgtggatttcaaagtgaagacaatttccgttgacgggaacaaggcaaaattggccatctgggataccgccggccaggaaagattccgcacactgactccgtcatattaccgaggagcacagggggtgatcctcgtttacgatgttaccagacgcgataccttcgttaaattagacaattggctgaatgagctcgagacatattgtacaaggaacgatatcgtgaatatgctggtcggtaataaaatcgataaggaaaaccgcgaggtcgatcggaacgaggggctgaaattcgctagaaaacatagcatgctgttcattgaagcctcagccaaaacctgtgatggtgtgcagtgcgccttcgaagaacttgtagagaagatcatccaaaccccaggattgtgggaatcggagaatcaaaataaaggcgtaaagctgtcacatcgggaggaaggacagggcggcggagcttgtggtggctattgcagcgtcttgtag

SEQ ID NO: 208833 - DNA, 621 bp, Artificial Sequence
  derived and/or modified sequence
atggacgaggatgtgctgacgacactgaagatccttatcattggagagagcggggtgggtaaatcgtcactgcttctacgctttaccgacgacacctttgaccccgagctcgcagctaccatcggcgtggactttaaggttaagacgattagcgtggacgggaataaggctaaattggcaatttgggataccgcgggtcaggagcgcttcagaacactcaccccttcctattatcgtggcgcacagggagtgatcctggtctatgacgtaacccggcgagacacctttgtgaaattagacaattggctgaacgaactggagacatattgcacgcgcaatgatatcgtgaacatgctcgtaggcaataaaattgacaaggagaacagagaggtagatcgcaacgagggattgaagttcgccagaaagcacagcatgttgtttatcgaagcttctgccaaaacctgtgatggtgtgcagtgtgccttcgaggaactggttgagaaaatcatacagactccagggttatgggagtccgagaaccagaataagggcgtgaagctttcgcatagggaagaaggccagggtggcggagcctgtggaggctactgttctgtgctatag

SEQ ID NO: 208834 - DNA, 2835 bp, Artificial Sequence
  derived and/or modified sequence
tggcagacgtggagcggcgcgcatgcgcagcagctcactctgctgaagggctgagaggcgcacccgggcggccagctgggctcggagcggaacggggtcaggatggacgaggacgtgctaaccaccctgaagatcctcatcatcggcgagagtggggtgggcaagtccagcctgctcttgaggttcacagatgatacgtttgatccagaacttgcagcaacaataggtgttgactttaaggtgaaaacaatttcagtggatggaaataaggctaaacttgcaatatgggatactgctggtcaagagaggtttagaacattaactcccagctattatagaggtgcacagggtgttatattagtttatgatgtcacaagaagagatacatttgttaaactggataattggttaaatgaattggaaacatactgtacaagaaatgacatagtaaacatgctagttggaaataaaatcgataaggaaaatcgtgaagtcgatagaaatgaaggcctgaaatttgcacgaaagcattccatgttatttatagaggcaagtgcaaaaacctgtgatggtgtacaatgtgcctttgaagaacttgttgaaaagatcattcagacccctggactgtgggaaagtgagaaccagaataaaggagtcaaactgtcacacagggaagaaggccaaggaggaggagcctgtggtggttattgctctgtgttataaactctgggaaattccatctcttgcatatttgatcagatagtgacatctttctgtatataaactctttaactgctattttagggaccttgcagtttgcacataattgttttatatcatagcagtaaatatttgcaagaaatcccactcatcgaccccgggtaaaatgttatggtaagcatgcacagtttgcagtctacagtttttttatgtagcacaaaataggtgtacctttataagtacattcaattttatgatttacatttatcatgtaatttttaaaaaaatccatctatctaggatatgttgatacaaagtctgcttttgctattctttttgcttaaatactcctatcattttctgaattacttggtatttagaactcctagcaccacggggaagaatagaggtatcatcaaacgtggcaaattttctttcaggaataataaagagcatgattccacagcttttctgggatgtttgagattcttttttagtactaagcaaaattctcatcacagaatgtagcccaggccaatttataactaaatctctatttgttcagatgatgcttctaaaacagcattgataggttaaagaagcttggtatttttaatttacttcaatgattagctcagttgcttaactggagttttaatcctgtgatatgtacattggattcatgactgtgcagcatttttagttatgtggtgtttggcagaatgacaataaggttttcccccattttggtttcaggaggacatgaatagtgtgtttattgtaactcctcatacacttttaaaaccaacatcttttttcataaatgttggtagtgtttgtccaggtaccttaactgtagcttgtgtaatgttgatgaatatctgtatcttacggcttccataatggctagttgatattcaaaaacctatttctgtgttttgaggggtggggaaaaaaaacactaagtgataatttgaaaaaggcatattgcttccagattctgatgtgtgagggaaaatactgtcacaatgaaaatcttgacaatttacttaacaagtaaccagtagttcatcaaaaccaacttgtacagactaataaatctttttcacagtattcagttttctcacctcttgctattgtatattgtagatttttttcattcatgtgttatttaatttacactgatctctgctattttaaccccccaaataagttatttgtcctttaaggttggttactataatacccctcagtaagattccagtattaatttctgggcagtttgttctctgtatacaattgcaaatgataagcatttttgtgagtgaccacctttgcaatatgtttgttaatttacttcatgttgggttctttctgaaatgtacatctttacatataaaaacctcacattctacttgatttacacttcctagtctacattacatgtggttgaaggttttatacattctatatgcttttactaaatatacaagatttactactagaaatttggagaaagaacactaacacatgtacttgtgatttgttcatgttatattaaaacttgagatttgtgtatttatgtagagtctgtattgacaagactgttgttttttgctccttgagctatataataatctgtgtattggattgttgtcttgatttggtctaaatttgaatatatatgagttacttgaatataacaaaaatgaattttgtttgatagatttatattgtaacctttttctagttcttgaataaatatagcctgctttccctagatgcatttgtgtaggaagtatatacatttccctattactctcatcagctgaagaatatgtactattgtgttactcaaattatgtggctttcattttgttgttttgttgcaagcttagtgttttgtagtggaggttttgtaaatgaaacagttgtaatatctaaggtcaggcacctagtaacagggttttgttaattcttttcagaatcattgaagcagtcttaaagggtcttttgcagatggtacaaattagaacaattagaatatagtattttgagttctagtagtactgagattgacccaaacaaataaaaaactattcaatttctgagtaa

SEQ ID NO: 208835 - DNA, 621 bp, Artificial Sequence
  derived and/or modified sequence
atggacgaggacgtgctgaccaccctgaagatcctgatcatcggcgagagcggcgtgggcaagagcagcctgctgctgagattcaccgacgacaccttcgaccccgagctggccgccaccatcggcgtggacttcaaggtgaagaccatcagcgtggacggcaacaaggccaagctggccatctgggacaccgccggccaggagagattcagaaccctgacccccagctactacagaggcgcccagggcgtgatcctggtgtacgacgtgaccagaagagacaccttcgtgaagctggacaactggctgaacgagctggagacctactgcaccagaaacgacatcgtgaacatgctggtgggcaacaagatcgacaaggagaacagagaggtggacagaaacgagggcctgaagttcgccagaaagcacagcatgctgttcatcgaggccagcgccaagacctgcgacggcgtgcagtgcgccttcgaggagctggtggagaagatcatccagacccccggcctgtgggagagcgagaaccagaacaagggcgtgaagctgagccacagagaggagggccagggcggcggcgcctgcggcggctactgcagcgtgctgtag

SEQ ID NO: 208836 - protein, 518 aa, Artificial Sequence
  derived and/or modified sequence
MAETSLLEAGASAASTAAALENLQVEASCSVCLEYLKEPVIIECGHNFCKACITRWWEDLERDFPCPVCRKTSRYRSLRPNRQLGSMVEIAKQLQAVKRKIRDESLCPQHHEALSLFCYEDQEAVCLICAISHTHRAHTVVPLDDATQEYKEKLQKCLEPLEQKLQEITRCKSSEEKKPGELKRLVESRRQQILREFEELHRRLDEEQQVLLSRLEEEEQDILQRLRENAAHLGDKRRDLAHLAAEVEGKCLQSGFEMLKDVKSTLEKNIPRKFGGSLSTICPRDHKALLGLVKEINRCEKVKTMEVTSVSIELEKNFSNFPRQYFALRKILKQLIADVTLDPETAHPNLVLSEDRKSVKFVETRLRDLPDTPRRFTFYPCVLATEGFTSGRHYWEVEVGDKTHWAVGVCRDSVSRKGELTPLPETGYWRVRLWNGDKYAATTTPFTPLHIKVKPKRVGIFLDYEAGTLSFYNVTDRSHIYTFTDTFTEKLWPLFYPGIRAGRKNAAPLTIRPPTDWE

SEQ ID NO: 208837 - protein, 144 aa, Artificial Sequence
  derived and/or modified sequence
MAETSLLEAGASAASTAAALENLQVEASCSVCLEYLKEPVIIECGHNFCKACITRWWEDLERDFPCPVCRKTSRYRSLRPNRQLGSMVEIAKQLQAVKRKIRDESLCPQHHEALSLFCYEDQEAVCLICAISHTHRAHTVVPLD

SEQ ID NO: 208838 - protein, 48 aa, Artificial Sequence
  derived and/or modified sequence
MAETSLLEAGASAASTAAALENLQVEASCSVCLEYLKEPVIIECGHNF

SEQ ID NO: 208839 - protein, 518 aa, Artificial Sequence
  derived and/or modified sequence
MAETSLLEAGASAASTAAALENLQVEASCSVCLEYLKEPVIIECGHNFCKACITRWWEDLERDFPCPVCRKTSRYRSLRPNRQLGSMVEIAKQLQAVKRKIRDESLCPQHHEALSLFCYEDQEAVCLICAISHTHRAHTVVPLDDATQEYKEKLQKCLEPLEQKLQEITRCKSSEEKKPGELKRLVESRRQQILREFEELHRRLDEEQQVLLSRLEEEEQDILQRLRENAAHLGDKRRDLAHLAAEVEGKCLQSGFEMLKPVLSAREKNIPRKFGGSLSTICPRDHKALLGLVKEINRCEKVKTMEVTSVSIELEKNFSNFPRQYFALRKILKQLIADVTLDPETAHPNLVLSEDRKSVKFVETRLRDLPDTPRRFTFYPCVLATEGFTSGRHYWEVEVGDKTHWAVGVCRDSVSRKGELTPLPETGYWRVRLWNGDKYAATTTPFTPLHIKVKPKRVGIFLDYEAGTLSFYNVTDRSHIYTFTDTFTEKLWPLFYPGIRAGRKNAAPLTIRPPTDWE

SEQ ID NO: 208840 - DNA, 3354 bp, Artificial Sequence
  derived and/or modified sequence
cccagcttccactgacacgagcctcggcgcggcttccgcttccggcgagtattgtgtgtcgcgccgcggggcgggggcgaggggaggaggaaggagggaggcagcgctccggcggctccgcgccccgcactcccggacccgaagccgggaagattcctttcttgtctgttagaaacgtatgtcaaacgaggatacagtgtctggaactattggttctaagatataagtggaatgagcctggatcaggagaagtatgctgagctagagttgaaggaagcttctctttctaacaagagaaagcagagttaaattatggcagagacaagtctgttagaggctggggcctctgcagcctctacagctgcggctttggagaacttacaggtggaggcgagctgctctgtgtgcctggagtatctgaaggaacctgtcatcattgagtgtgggcacaacttctgcaaagcttgcatcacccgctggtgggaggacctagagagggacttcccttgtcctgtctgtcgaaagacatcccgctaccgcagtctccgacctaatcggcaactaggcagtatggtggaaattgccaagcagctccaggccgtcaagcggaagatccgggatgagagcctctgcccccaacaccatgaggccctcagccttttctgttatgaggaccaggaggctgtatgcttgatatgtgcaatttcccacacccaccgggcccacaccgttgtgccactggacgatgctacacaggagtacaaggaaaaactgcagaagtgtctggagcccctggaacagaagctgcaggagatcactcgctgcaagtcctctgaggagaagaagcctggtgagctcaagagactagtggaaagtcgccgacagcagatcttgagggagtttgaagagcttcataggcggctggatgaagagcagcaggtgttgctttcacgactggaagaagaggaacaggacattctgcagcgactccgagaaaatgctgctcaccttggggacaagcgccgggacctggcccacttggctgccgaggtggagggcaagtgcttacagtcaggcttcgagatgcttaaggatgtcaaaagtaccctggaaaagaatattcctagaaagttcggaggctcactctcaacgatctgtccacgggatcataaggctctccttggattagtaaaagaaatcaacagatgtgaaaaggtgaagaccatggaggtgacttcagtatccatagagctggaaaagaacttcagcaattttccccgacagtactttgccctaaggaaaatccttaaacagctaattgcggatgtgaccctggaccctgagacagctcatcctaacctagtcctgtcagaggatcgtaagagcgtcaagttcgtggagacaagactccgggatctccctgacacaccaaggcgtttcaccttctacccttgcgtcctggctactgagggtttcacctcaggtcgacactactgggaggtggaggtgggcgacaagacccactgggcagtgggtgtatgccgggactccgtgagccgaaagggcgagttgactccactccctgagactggctactggcgggtgcggctatggaatggggacaaatatgcagccaccaccacaccttttacccctttgcacatcaaggtgaaacccaagcgggtaggcatattcctagactatgaggccggcacactgtctttctacaatgtcacagaccgctctcatatctacaccttcactgatacttttactgagaaactttggcccctcttctacccaggcatccgggctggacggaagaatgctgcaccacttaccatcaggcccccaacagattgggagtgacaggttgggatgtgggaatgactggggtgaggcagggtcaagtgctacgggcctccttcccgtgtcctgctggaacgtcttcgtgtccacctgggtccagtcctgaatcatcttggagaaacaccttggtttctaggatggttttgtgtggagggggaggtaggactgggctggatgagagagcacagctgtgacttcctcctaactgtcagggtggggagctggttcccagaggattgtctaccctgaagtccatcaggttttctgttgcacaaggacgggtcaggaaggaaggagaggcttttccagaaacaaaaaatctgtgagggtctgacttgctcaaaccagaggaggaaacagaaacccctgcacatctttttagggggttctttgacccaggatagtcttgcttcttgaggtagatcacaggggtctgtgtacctctgaattcatgagagatgaatgacagatgctctcatgggtctagatattgaggagtttttctgagggcagagattggacatcaacaaggctagaagggtcagggaagtgggctaaaggaacagattcctagagattaatgaagaggagggaggtttctttggtcttctattccaagggtaaggttgcgattatgggtaagattggccagaggtaggaatgtggggagaaggagaggctgaaaagaaagcagaggagaacccaggtccctgcctcagccttcagcagagttggcttattgcctgcctctataccaataagtcagtcaccttgctcctctccagaggcaaagtggaagagatcctgcaagacacatctatcctttcacagtgttcccaagggaacttggaaaggagagtcaggtattagaggaaagagaagggtatttgtatacaaagccctggccttaaagaatgttacttagtagctactcccaaattgtcagccttcttacctggccaaggtgtccaagccagaaaggaaaaaaggttatggagtctttctcaccctaaggacagggtggaagagggtggtatatagggaagggccagataggcaacttcatttggcttgtgtgcatctggcctggaactggtgttaagccaggcttttgcttgtttgttgccatccctcaccctttgccatttcccttttcagagaatgtaaatgattttcatgttaggccaaaataaacaacttatagggtacatatgttgtcataaaaggtaaaagtgatgcatgccaaaccaaactaaaccaatttggattatctgctattcgggtaatcttcacagaaatgactgagagaagaatctgcagtttactgagggcatttcagttcctcctaccacctcaacaggactttgtccagactctcctcctcttacctttgtgccttgactgtggttctttgtggcaagatactttggttggttaaaataatatggaacaaaggatccactgaagtgaaaaaaaaaaaaaaaa

SEQ ID NO: 208841 - DNA, 1557 bp, Artificial Sequence
  derived and/or modified sequence
atggccgagaccagcctgctggaggccggcgccagcgccgccagcaccgccgccgccctggagaacctgcaggtggaggccagctgcagcgtgtgcctggagtacctgaaggagcccgtgatcatcgagtgcggccacaacttctgcaaggcctgcatcaccagatggtgggaggacctggagagagacttcccctgccccgtgtgcagaaagaccagcagatacagaagcctgagacccaacagacagctgggcagcatggtggagatcgccaagcagctgcaggccgtgaagagaaagatcagagacgagagcctgtgcccccagcaccacgaggccctgagcctgttctgctacgaggaccaggaggccgtgtgcctgatctgcgccatcagccacacccacagagcccacaccgtggtgcccctggacgacgccacccaggagtacaaggagaagctgcagaagtgcctggagcccctggagcagaagctgcaggagatcaccagatgcaagagcagcgaggagaagaagcccggcgagctgaagagactggtggagagcagaagacagcagatcctgagagagttcgaggagctgcacagaagactggacgaggagcagcaggtgctgctgagcagactggaggaggaggagcaggacatcctgcagagactgagagagaacgccgcccacctgggcgacaagagaagagacctggcccacctggccgccgaggtggagggcaagtgcctgcagagcggcttcgagatgctgaaggacgtgaagagcaccctggagaagaacatccccagaaagttcggcggcagcctgagcaccatctgccccagagaccacaaggccctgctgggcctggtgaaggagatcaacagatgcgagaaggtgaagaccatggaggtgaccagcgtgagcatcgagctggagaagaacttcagcaacttccccagacagtacttcgccctgagaaagatcctgaagcagctgatcgccgacgtgaccctggaccccgagaccgcccaccccaacctggtgctgagcgaggacagaaagagcgtgaagttcgtggagaccagactgagagacctgcccgacacccccagaagattcaccttctacccctgcgtgctggccaccgagggcttcaccagcggcagacactactgggaggtggaggtgggcgacaagacccactgggccgtgggcgtgtgcagagacagcgtgagcagaaagggcgagctgacccccctgcccgagaccggctactggagagtgagactgtggaacggcgacaagtacgccgccaccaccacccccttcacccccctgcacatcaaggtgaagcccaagagagtgggcatcttcctggactacgaggccggcaccctgagcttctacaacgtgaccgacagaagccacatctacaccttcaccgacaccttcaccgagaagctgtggcccctgttctaccccggcatcagagccggcagaaagaacgccgcccccctgaccatcagaccccccaccgactgggagtag

SEQ ID NO: 208842 - DNA, 1557 bp, Artificial Sequence
  derived and/or modified sequence
atggccgagaccagcctgctggaggccggcgccagcgccgccagcaccgccgccgccctggagaacctgcaggtggaggccagctgcagcgtgtgcctggagtacctgaaggagcccgtgatcatcgagtgcggccacaacttctgcaaggcctgcatcaccagatggtgggaggacctggagagagacttcccctgccccgtgtgcagaaagaccagcagatacagaagcctgagacccaacagacagctgggcagcatggtggagatcgccaagcagctgcaggccgtgaagagaaagatcagagacgagagcctgtgcccccagcaccacgaggccctgagcctgttctgctacgaggaccaggaggccgtgtgcctgatctgcgccatcagccacacccacagagcccacaccgtggtgcccctggacgacgccacccaggagtacaaggagaagctgcagaagtgcctggagcccctggagcagaagctgcaggagatcaccagatgcaagagcagcgaggagaagaagcccggcgagctgaagagactggtggagagcagaagacagcagatcctgagagagttcgaggagctgcacagaagactggacgaggagcagcaggtgctgctgagcagactggaggaggaggagcaggacatcctgcagagactgagagagaacgccgcccacctgggcgacaagagaagagacctggcccacctggccgccgaggtggagggcaagtgcctgcagagcggcttcgagatgctgaagcccgtgctgagcgccagagagaagaacatccccagaaagttcggcggcagcctgagcaccatctgccccagagaccacaaggccctgctgggcctggtgaaggagatcaacagatgcgagaaggtgaagaccatggaggtgaccagcgtgagcatcgagctggagaagaacttcagcaacttccccagacagtacttcgccctgagaaagatcctgaagcagctgatcgccgacgtgaccctggaccccgagaccgcccaccccaacctggtgctgagcgaggacagaaagagcgtgaagttcgtggagaccagactgagagacctgcccgacacccccagaagattcaccttctacccctgcgtgctggccaccgagggcttcaccagcggcagacactactgggaggtggaggtgggcgacaagacccactgggccgtgggcgtgtgcagagacagcgtgagcagaaagggcgagctgacccccctgcccgagaccggctactggagagtgagactgtggaacggcgacaagtacgccgccaccaccacccccttcacccccctgcacatcaaggtgaagcccaagagagtgggcatcttcctggactacgaggccggcaccctgagcttctacaacgtgaccgacagaagccacatctacaccttcaccgacaccttcaccgagaagctgtggcccctgttctaccccggcatcagagccggcagaaagaacgccgcccccctgaccatcagaccccccaccgactgggagtag

SEQ ID NO: 208843 - DNA, 1557 bp, Artificial Sequence
  derived and/or modified sequence
atggctgaaaccagtcttcttgaggcaggggcaagtgcagcctccactgcagctgccctggaaaacttgcaggttgaagcatcctgctcagtgtgccttgagtatttgaaggagcctgttattattgagtgtggtcataacttttgcaaggcttgtatcacgcgatggtgggaggacttggaacgggactttccatgtcccgtctgtcgcaagactagtaggtataggtccctccgccccaatcgccagctgggaagtatggtggagattgctaagcagctccaagccgtgaaaaggaaaatccgtgacgagtcactatgtcctcaacatcacgaggccttgtccctgttctgctatgaggaccaagaggcagtctgtctaatttgcgccatctcacacacacacagagcacataccgtggtgcctctggatgacgccacgcaggagtataaggagaaactgcagaagtgcctcgaaccccttgagcaaaaactccaggagatcacccgatgtaagtctagcgaagagaagaaacccggggagttgaagcgactggtcgagtccaggcgccaacagatcctgagggagtttgaggaactccatcggagactcgacgaagagcaacaggtgttgctgtctcggttggaggaagaggagcaggacattctccagcggctccgggagaacgctgcccatttaggagacaagcggcgcgatctggcacacctcgccgccgaggttgaaggaaaatgccttcagtctggcttcgaaatgcttaaagacgttaagtctacccttgagaagaatatacctagaaagtttggcggctccctgtctaccatctgtcccagggatcataaggccttgctcggcctggtgaaggagattaaccgatgtgaaaaggtgaaaacgatggaagtcacaagtgtcagtattgaactggagaagaacttctcaaatttccccaggcagtatttcgccctccggaagattctaaaacagttaatagccgatgttaccctggacccagagactgctcaccctaacttggtgcttagcgaggatcgcaagtccgtgaagttcgtggagacacggcttcgtgatttgcccgacacccctcgccgctttactttttacccatgtgtgttggctactgaaggattcacatccggacggcactactgggaggtggaggtaggcgacaagacacattgggccgttggtgtctgtagggactccgtgtctaggaagggagaactaactcctcttcccgaaaccggctactggcgggtgcgtctctggaacggcgacaaatacgcagccacgacaacacctttcacaccgctgcacattaaggtaaaaccaaagagagttggtatttttctcgactacgaagccgggacactaagtttttacaatgtcaccgataggagtcatatctacacgtttacagacacttttacagaaaaactgtggccactgttttatcccggtattagagccggacggaaaaatgcagccccacttaccataagacccccaacagactgggagtag

SEQ ID NO: 208844 - DNA, 1557 bp, Artificial Sequence
  derived and/or modified sequence
atggcagagacaagcctgcttgaagcgggtgcctccgccgcttcaaccgctgccgctctcgagaatctccaggtggaagcctcttgcagtgtgtgcctggaatatctgaaggaaccagtaattatcgaatgcggtcataacttctgtaaagcatgcatcacgaggtggtgggaagatctggaacgggactttccatgccctgtctgcagaaaaactagccgctaccggtcccttcggcccaaccgtcagcttgggagtatggttgagatcgcaaaacagctgcaggccgttaaaagaaaaatacgtgacgagtcgctttgccctcagcatcatgaggcattatccctgttttgctacgaggaccaggaggcagtgtgcctgatctgtgcaatctcacacacccacagagctcacaccgttgttcccctcgatgatgctacccaagagtacaaggaaaagttgcaaaaatgtctggagcccctcgaacaaaagctccaggaaatcaccaggtgcaagtcaagtgaggaaaagaagcctggggagctgaaacgcctggtggagagtcgtaggcaacagatcctgcgggagttcgaagaactgcataggcgacttgatgaagaacagcaggtgttattgtcacgcttggaggaggaggaacaagacatccttcagaggctgcgcgaaaatgcggctcaccttggagataaacgtcgcgatctggctcatttggccgccgaggtcgaggggaagtgcctgcaatctgggttcgaaatgctcaaggatgtcaaaagtacactagaaaagaacattcctagaaagtttggtgggagtctatcaacaatctgtcctagggaccataaggctctcttgggactggtaaaagagatcaatcgctgtgagaaagtgaaaaccatggaagtgacatctgtgagcatcgagcttgagaaaaatttctctaactttcctagacagtatttcgcacttaggaagatactcaaacaactaattgctgacgtgaccttggatccggaaaccgcacacccaaatctggttttgtccgaggacaggaagtccgtaaagtttgtggagacacggctgcgcgaccttcccgatactccgaggagatttacattttatccctgcgtgctagccaccgagggtttcaccagtggaaggcactactgggaagtggaagttggcgacaagacccactgggctgttggcgtgtgtcgggattccgtgtcaagaaaaggggaactcactccactacccgagaccgggtactggagagtccggctctggaacggcgacaagtacgccgctacaacaactccatttacccctctgcacattaaggtgaaacccaagagggtgggcatttttttagactatgaggcagggacacttagcttttacaatgtaacggaccgctcgcacatttatacctttaccgacacattcactgagaagctgtggcccttgttttacccggggatacgtgcaggtcgtaagaacgccgcccctttgaccatccggccccctactgactgggagtag

SEQ ID NO: 208845 - DNA, 1557 bp, Artificial Sequence
  derived and/or modified sequence
atggccgaaacctctctgctcgaggccggcgcctccgcggcatccaccgctgctgcgctcgaaaacttgcaggttgaggccagctgtagtgtctgccttgagtacctcaaggagccggtgattatagagtgtggacataacttttgcaaggcctgcataacgaggtggtgggaggatctggagagggatttcccttgtcccgtctgcagaaagacaagtagatatcgcagcctcagacccaatcgccagctcggaagcatggttgaaatcgccaagcagctgcaggccgtaaagcggaaaattagagacgagtcgctatgtccgcagcaccacgaggcattgtctttgttttgctacgaggaccaggaagccgtgtgtctgatttgtgccatatcacacacacacagagcccacacagtggtgcctctcgatgatgccacccaggagtataaggaaaagttacagaagtgtctggagcctcttgagcagaagctccaggagatcacgcggtgtaaatccagtgaggagaaaaagccaggagagctgaagagacttgtggagagccgtcggcagcagattctgcgcgagtttgaggaactgcaccgaaggctggacgaggagcagcaggtcctactttctaggttggaggaagaggaacaggacatactccaacgccttagggagaatgctgcccatttgggtgacaaacgccgggacctggctcacctcgccgcagaagttgaagggaagtgcctccagtccgggtttgagatgctcaaggacgtgaaatccactctcgaaaaaaacatccccagaaagttcggaggctcactgtctactatctgcccccgtgatcataaggcactgctgggtctggtgaaggaaatcaaccggtgcgagaaagtgaagaccatggaggtcacgagtgtgagcatagagcttgaaaagaatttctcaaatttccctcggcagtattttgcattacgcaaaatcctaaagcaactgatagccgacgtgaccctggatcccgagactgctcacccaaacctggttctttcagaggataggaagtcagtgaagtttgtggagactcggctgagagatctgcctgacacaccccgccgctttaccttctatccttgtgtgttagcgactgaggggtttacctccggtagacactattgggaggtggaggttggcgacaagacacattgggccgttggggtttgcagggacagcgtctccagaaagggagagctgaccccactgcccgagacgggctattggcgggtccgactttggaacggcgacaaatacgctgcaacgaccacccctttcacacctcttcacatcaaggtcaagcctaagcgcgtcggtatttttttggattacgaagccgggacactctctttttataatgtgacggaccgtagtcacatctataccttcaccgacaccttcactgaaaaactgtggccactcttttaccccggtatccgggcaggcagaaagaatgcagccccgcttactataaggcccccaaccgactgggaatag

SEQ ID NO: 208846 - DNA, 1557 bp, Artificial Sequence
  derived and/or modified sequence
atggcagagacaagcctcttggaagcgggtgcttcagcagcttctaccgccgccgcccttgaaaatttgcaggtggaggcctcttgtagcgtgtgcctggagtatcttaaggaaccagtcatcattgagtgcggacacaacttttgtaaggcctgtataacccgctggtgggaggatctggagagggactttccctgtcctgtgtgccggaaaacgtctagataccgttctctgcggcccaaccgccagctgggcagcatggttgaaattgcgaaacaactgcaagctgtcaaaaggaaaatccgggacgaatcactgtgcccgcagcaccatgaagccctatctctgttttgttacgaggaccaggaagcagtgtgtttgatctgtgctatcagccatacacatagggcccacaccgtcgtaccactggatgacgccacgcaggagtacaaagaaaaattgcagaaatgcctggagcccctggaacagaaacttcaggaaattaccagatgtaagagttccgaggagaaaaagccaggcgagctaaaacgcttggttgaatccaggcgccaacagatcctacgggaattcgaggaacttcatagaagactggatgaggagcagcaagtgctgttgagccggctggaagaggaggaacaggacattttgcaaagacttcgtgagaatgcggcacatttaggcgacaaacgtcgggatctggctcacctcgctgctgaggtagaaggcaaatgcctgcaatctggctttgaaatgcttaaggatgtcaaatctactctagaaaaaaatataccacggaagttcggagggtctctctctactatttgtccacgtgatcacaaggccctcctaggactcgtgaaggaaatcaaccggtgcgagaaagtgaagactatggaagtgacctcagtatccattgagctcgagaaaaacttttccaacttcccacgacagtacttcgcactgagaaagatcttaaagcaattaatcgctgacgtcaccctggatcccgagacagcgcacccaaatttggtcctgtctgaggaccgaaagtccgtcaaatttgtggaaacccgattgagagatctccccgacaccccccgccgatttaccttttacccctgtgtgttggccacggagggattcacaagtgggcggcattattgggaggtagaggtgggtgataagacacattgggcagtgggagtttgtcgtgatagcgtgtctaggaaaggtgagctgaccccattgccagagacgggatactggcgcgtgcggttgtggaacggggacaaatatgccgctaccaccacccccttcacacctctccacatcaaagttaagccaaagagggtgggcatcttcctcgactatgaggctgggacactgtctttttacaatgtcaccgataggtctcacatctacaccttcacggatacgtttaccgagaagctgtggcccctgttttatcctgggatcagggcaggccggaaaaacgcagcacccctcactatacgacctcctaccgattgggaatag

SEQ ID NO: 208847 - DNA, 1557 bp, Artificial Sequence
  derived and/or modified sequence
atggccgaaacctccctcctggaagctggcgctagtgccgcctcaacggctgctgcgctggagaatctacaagtggaggccagttgcagcgtgtgtctggagtaccttaaagaacctgttataatcgagtgcggacataatttttgcaaggcctgcattacccgctggtgggaagatctggagagagactttccttgtcccgtctgcaggaaaacgagcagatatcgaagcctccgacctaaccggcagctgggttcgatggttgaaatagcaaagcagttacaggcagtaaagagaaaaattcgtgatgagagcctctgccctcagcaccatgaagcattaagcttattctgctacgaagatcaagaggccgtgtgcctgatttgcgccatctcccatacacaccgcgctcacaccgtggtgcccttggatgacgcaacccaggaatataaagaaaagctccagaaatgcctggagcctctggagcagaagttgcaggagatcacgcgatgcaaatcctctgaggaaaagaagcccggagagcttaaacggcttgtggaatcccgacggcagcagattctcagggagtttgaagagctgcataggcggctcgatgaagagcagcaagttttgttatctaggctggaggaagaagaacaagacattctgcagcgactgcgggaaaatgcagcccatttgggcgacaagaggcgggacctagcgcatctggccgctgaggtcgagggaaagtgcctgcagagtggctttgaaatgctcaaagatgtcaagtccacactagaaaagaatattcctagaaaattcggaggtagtctgagtactatttgcccccgggaccacaaggcactgctggggctggttaaggaaattaatcgctgcgagaaggtaaaaaccatggaggtcacttccgtcagcattgagctggaaaaaaacttctctaactttccccggcagtactttgcattacgcaagatactcaagcagctcatcgctgacgtcacgctggacccagagaccgcccatccaaacctggtcctgagtgaggacaggaagtcagtcaagtttgtggagacgcgcctgcgcgatcttcccgacaccccccgcagattcacattttatccctgtgtgttggctacagagggctttacttctggccgacactactgggaagtggaggtgggcgataagacgcactgggcagttggcgtttgccgggattcggtaagcagaaaaggggagcttacccccctgcccgagaccggctactggagagtgagactgtggaatggcgacaaatacgccgccacgacaacgcctttcactcctctccacatcaaggttaagcccaagagggtgggtatttttctcgattatgaggctgggaccttgtctttctacaacgtaacagatcgttctcacatttacacgttcaccgacacttttaccgagaagctctggcccctgttctacccaggtatccgtgccggacgaaaaaacgctgcacccttgacgattagaccgcctaccgactgggagtag

SEQ ID NO: 208848 - DNA, 1557 bp, Artificial Sequence
  derived and/or modified sequence
atggctgagacctccctcttggaagcgggtgcctcagctgcctccacggccgcggcgttagaaaaccttcaggtcgaagcttcatgctccgtatgtttagaatacctgaaggaacccgttattatcgagtgcggccacaacttctgcaaggcttgcatcacccgatggtgggaagatctggagcgcgactttccctgcccggtatgtcggaagacatctaggtatcggagcctaaggcccaatagacagttaggctcgatggtggagatagcgaagcaactgcaggctgtaaaacggaaaatcagagatgaaagcctgtgtcctcagcaccacgaggctctgtctctgttctgttacgaagaccaggaggccgtatgtctcatctgcgccatcagccacacacacagagcccatacagtagtgcctcttgacgatgccacgcaggagtacaaggagaaactgcagaagtgtctggaaccactggaacaaaaactccaagaaatcacaaggtgtaagagctctgaagaaaaaaagcctggcgaactgaagagactcgttgaatctagaagacagcagatccttcgtgaatttgaggagctccaccggagactggacgaagaacagcaggtgctcctgagcagattggaggaagaggagcaagatatactccaaagattgagagaaaatgccgcccatttaggcgacaagcggcgtgatttggcgcatctagccgctgaagtcgaaggtaagtgtctacagtcgggcttcgaaatgttgaaagatgtcaaaagtacgctggaaaaaaacattccacgcaaatttgggggatccctctccactatatgccccagagaccacaaggcgcttctgggactggtgaaggaaataaatcggtgtgaaaaggttaaaactatggaggtgacttccgtctccatcgaactcgagaaaaacttcagtaatttcccaaggcagtacttcgcccttcggaagatcttgaagcagctgatcgccgatgtaaccctggaccccgaaaccgcgcacccaaatctagtcctcagcgaggaccggaaatctgtaaaattcgttgagactaggttacgcgatctccccgacacccctcggagatttactttttacccctgcgtgctggctaccgaaggattcacctccggccgacactattgggaagtggaggtaggcgataaaacccactgggccgtgggggtctgcagggacagcgtaagcaggaagggtgagcttactcctctgcctgagactggctactggcgagttcgcttatggaatggggataaatacgctgcaactacaaccccatttactccactgcacattaaagtgaagccaaaaagggtaggcatttttttagattacgaagctggtaccctctccttttataacgtcacagaccgtagccatatttacacatttacggacacttttaccgaaaagctttggcccttgttttatcccggaatccgcgcagggagaaagaacgccgctcctctgacaattcgtcccccaaccgactgggagtag

SEQ ID NO: 208849 - DNA, 1557 bp, Artificial Sequence
  derived and/or modified sequence
atggccgagacaagtctcttggaggcgggcgcttctgcggcctctactgccgcagctcttgagaacctccaggttgaagcttcctgcagtgtttgtttggagtacctgaaagaacccgttataatcgagtgcgggcataacttttgcaaggcatgcatcacaaggtggtgggaggaccttgagagagattttccttgcccggtgtgccggaagacatcaagatatagatcactgagaccaaatcgtcagctcggaagcatggtggagatcgccaaacagttacaggccgtgaagcgcaaaattcgggatgagtccctgtgccctcagcatcatgaggctctgtccctgttttgttacgaggatcaagaggctgtgtgcctgatttgcgccatttctcatacccaccgggcccacactgtggttccattggacgatgccacccaggaatacaaagagaagctgcagaagtgtctcgagcctctcgagcagaagctccaggagatcaccagatgtaaatcctccgaagagaaaaaacccggcgagctgaaaaggttggtcgagagcaggaggcagcagatactccgcgaattcgaagagctgcaccgaaggttggatgaagaacagcaggtgctcctatctcgcctcgaggaagaggagcaggatatactgcagcgtctgcgggagaatgctgctcatctcggggacaagcggagagacctcgcccacctcgcggctgaggtggagggaaaatgtctgcaatccgggtttgagatgttgaaggatgtcaaaagcacacttgagaagaacattccacggaaattcggcgggagcttgagcacaatttgccctcgcgatcacaaggccttgctgggactggtcaaagagataaatcggtgcgaaaaggtgaaaacaatggaagttacaagcgtctccatcgagctggaaaaaaatttcagtaactttccacggcagtacttcgctctgcgaaagattctgaagcaactgatcgccgacgtgaccctagatcccgagaccgcccaccctaatctcgtgctgtcagaagaccgaaagagcgtgaagttcgtggagacccggctgagagacctgccagacacaccacgccgctttacattttacccctgtgtcctagccacggaagggttcacctctggtagacactattgggaggttgaagtgggggacaaaacacactgggccgtgggtgtctgtcgggatagtgtgtcaagaaaaggagaactgacacctctgccagaaacaggttactggagggtgcgcctgtggaacggagacaaatacgctgcgaccacaactcctttcaccccgttgcacattaaggttaaacctaaacgtgtgggaatcttcttggactacgaagccggcaccctgtctttctacaatgtcacagatagaagtcacatctacacttttactgatacattcacagagaagctttggcctctgttctaccctggcatcagggcgggtcgcaaaaatgcagccccgctgactattagaccacccacggactgggagtag

SEQ ID NO: 208850 - DNA, 1557 bp, Artificial Sequence
  derived and/or modified sequence
atggcggagacaagtctgctggaggctggagcaagcgcggctagtaccgcagccgctctggaaaacctgcaagtcgaggcctcctgtagcgtctgtttggagtacctgaaggaaccagtcattattgagtgcggtcataacttttgcaaggcttgtattacaagatggtgggaagacctggaacgtgattttccatgtcccgtgtgccgcaagacttcacggtatcggtccctgagacctaaccgacagcttgggtctatggtggaaatagctaagcagttacaggccgtgaaaaggaagatccgagatgagagcctttgccctcagcatcacgaagcactgagtctgttttgttacgaggatcaagaggccgtgtgccttatttgcgccatcagccatacccacagggcccacaccgtggtcccgcttgacgacgcgacccaagagtacaaggagaagctgcagaaatgcctggagcccctggagcaaaagttacaggaaattactagatgtaagtcatctgaagaaaaaaaacctggagagctgaagagactggtggagagtagacgtcaacagatactgagggagtttgaagagctgcaccgccggttggacgaggagcaacaggtgttgctgtctagattggaggaagaagaacaggatattctgcaacgcctccgggagaacgctgctcatcttggagacaaaaggagggacctcgcacacctggctgcagaggtggaaggtaaatgtctccaatcaggcttcgagatgcttaaagatgtgaaatccacgctggagaagaacatcccacgtaagtttggaggcagcctaagtacaatttgccctcgtgatcacaaagcactgctgggcctggtgaaagaaatcaatagatgtgagaaagtgaagacaatggaagttacatctgtgtccatagagctggaaaagaacttctccaattttccacgccagtacttcgcactgcggaaaatcctaaaacagctcatcgcggacgtaacactagatcctgaaactgcacaccccaatttggtgctgtctgaagatcgcaaatccgtaaaatttgtggagactagacttagggacctccccgataccccaagaagatttaccttttatccctgtgttctggccactgagggattcacaagtggcaggcactattgggaggtggaggtgggggacaagacacactgggctgtcggagtctgcagagatagtgtgtcgagaaagggagagctgacgccactgccagagaccggatactggagggtgcgactgtggaacggagacaagtacgcagccaccactacacccttcacacctctgcatatcaaggtcaagccaaagcgagtgggcatcttcctggactacgaggctggaaccctgtcattttacaatgtgacagaccggtcgcacatttataccttcacggatacctttacagagaaactctggcctcttttctacccaggcatccgagccggacgtaaaaacgcagcgcctctgacaatcagacctcccactgattgggagtag

SEQ ID NO: 208851 - DNA, 1557 bp, Artificial Sequence
  derived and/or modified sequence
atggccgaaactagcttgctggaggccggggccagcgcagcatccaccgctgcagccctggaaaacctgcaggtggaggcctcgtgcagcgtatgtctcgagtacctcaaggagccagttataatcgagtgcgggcataacttttgcaaagcctgtattacacggtggtgggaagacctggaaagagactttccctgtcccgtatgcaggaagacttctcggtacagatcactccgcccaaacaggcagctgggttccatggtggaaatcgccaagcaactacaggcggtcaagcggaagatcagggacgaatcattgtgcccccagcaccatgaggccctgagcctattctgttatgaggaccaagaagcggtctgcctcatttgcgcaatctcccacacccacagagcacacacggttgtgcctttggatgacgccactcaagaatacaaggaaaagttacagaaatgtctcgagcctctcgagcaaaagttgcaggaaatcactaggtgcaagtccagtgaggagaagaagcccggtgaattaaagcgcctggtggagagtagaagacagcagatcctgagggaattcgaggagttgcataggcggttggatgaagagcagcaagtcctgctgtcccgtttagaggaagaggagcaggacatactgcaacgcctgagagaaaatgccgctcatctgggggacaagcggagggatctcgcccacttggccgccgaagtcgaaggaaaatgtctgcagagtggattcgaaatgctaaaacctgtgttgagtgcaagggagaaaaacatacctcggaagtttgggggcagcttaagtacgatctgtccccgtgatcataaggcgctgcttggattagttaaagagattaaccgatgcgaaaaagtgaaaactatggaagtgacatccgtatctatagaattggagaagaatttttccaattttcctaggcaatactttgccctgcggaaaatcttgaagcagctcattgccgatgtcacactggacccagaaaccgcacatcccaacctggtgctgagtgaggacagaaagtctgtaaaatttgtggagactcggctgcgagatttgccagataccccacgtaggttcactttttatccttgcgtactcgccaccgagggcttcactagtgggaggcactactgggaagttgaggtaggcgacaagacccactgggcagtgggagtgtgcagggacagcgtgagccggaagggggagttaaccccactgcccgagacgggatattggcgagtcagattgtggaacggcgataagtatgcagctaccactaccccattcacgccgttgcatatcaaagtgaaaccaaagcgagttgggatatttctcgattatgaggccggtacactctccttctacaatgtgacggatcgcagtcacatatacacctttactgacaccttcacagagaagttatggcctttgttctatccaggcattcgagccggaaggaagaatgcggcccccctgacaatccgcccaccaactgattgggagtag

SEQ ID NO: 208852 - DNA, 1557 bp, Artificial Sequence
  derived and/or modified sequence
atggctgaaacatcactcctggaagccggcgcctcagccgcctccaccgccgctgcccttgagaatttacaggttgaagccagctgttcagtgtgcttggagtacctgaaggaaccagttataatcgagtgcggccacaacttttgtaaggcctgtatcacccggtggtgggaagacctggaaagggactttccgtgtcctgtgtgcagaaagacctcaaggtaccgaagcctgcgaccaaacaggcagcttggcagcatggtcgagatcgcaaagcagttgcaggctgtgaaacgtaagatccgtgacgaatccctctgtccgcagcaccacgaggccctgagcctgttctgctacgaggatcaagaagctgtgtgtctgatttgtgccatttcgcatacacaccgcgcccacacggtggtgccgctggacgatgccacccaagaatataaggagaagctgcaaaaatgtttagagccgctagagcagaagcttcaggagatcacaaggtgtaagagctccgaggagaaaaaacctggcgaacttaagagactggtggaatctagacgacaacagatcctacgtgaattcgaggaactgcaccgacgactagatgaagagcagcaggtcctgctatcacgacttgaagaagaggagcaggatatccttcagagactacgggaaaatgctgctcatctgggagataaaaggcgggatttggctcacctggcagcagaggtggaaggcaagtgcttacagagtggtttcgagatgcttaaaccggtgctatcagctcgagagaagaatattcccagaaaatttggtggctcactgtctaccatttgtccaagagaccataaagctctcctcgggttagtcaaagagattaatcgttgcgagaaagttaagaccatggaggtcacctccgtgtccattgaacttgagaagaactttagcaattttccgagacagtattttgcactaaggaagatcctgaagcagcttattgcagatgtgacgctggatcctgagactgctcatcctaatttagtcctctcggaagaccggaagagcgtgaagtttgtcgagacccggctcagagacctgcccgacaccccgagacggttcactttttacccctgtgtgctcgccacagaggggttcacgtccggccgccactattgggaagtcgaagttggggacaagacccactgggccgtaggcgtttgcagggactcagttagcagaaaaggcgagctgacgccattacctgaaaccgggtattggagagttcggctgtggaacggcgataaatatgccgctacaactaccccatttacaccccttcacatcaaagttaagcccaagcgggtgggtatctttcttgattatgaagccgggaccttgtcattctacaacgtcaccgatagaagccacatctatactttcactgacactttcactgagaagctgtggccactgttctatcctgggatcagagccggcagaaaaaatgcagcacccctgactattagaccccccaccgactgggagtag

SEQ ID NO: 208853 - DNA, 1557 bp, Artificial Sequence
  derived and/or modified sequence
atggccgaaacttccctactggaagcaggagccagtgcagcttcaacagccgcagcgctcgaaaacctgcaggttgaggcctcatgctctgtctgtcttgaatacctgaaggaaccagtgattatcgaatgcggccacaacttctgcaaggcatgcatcacccgatggtgggaggatctcgagagagactttccatgccccgtgtgccgtaaaacaagtaggtaccgctccctacgcccaaaccgacagcttggtagcatggtggagattgctaaacagctgcaggcggttaaacgtaagattcgagacgagtctttgtgccctcaacatcatgaagccctttctctgttctgttatgaggatcaggaggcagtgtgcctcatttgcgccattagtcacacacacagagcacatacggtcgtgcctctggatgacgccacacaggaatataaggagaagttacagaaatgtctcgaacccttggaacagaaactccaggaaatcacacgctgtaaatcttccgaagagaagaaaccaggtgaactaaagcggttggtagagagcaggaggcaacagatcctgcgagagtttgaggaactgcaccggcgcctggatgaagagcaacaggttcttctttcccggttagaggaggaagaacaggatatcctgcagcgcctccgtgagaatgccgcccatttgggcgataagagaagggatctggctcatctggctgcggaggttgagggcaagtgcttacagtccggatttgagatgttgaaagatgtcaagagtacactcgagaagaatatacctaggaagttcgggggttctctgagcacaatttgtccccgcgaccacaaggccttgctggggctggttaaggagatcaatcgctgcgagaaagtgaaaaccatggaggtgacgtcagtgtctatcgaattagaaaagaatttcagcaattttcccagacaatactttgccttacggaagatactgaagcagctcattgccgatgtgaccctagatcccgagaccgcacaccccaacctggtgctgtcagaggaccgcaagtcagtcaagttcgtcgagaccagactgagggacttaccagatacgccacggagatttactttttatccttgtgtgctcgccaccgaggggttcacaagtgggagacactactgggaggtggaagtaggggataagacacattgggctgtcggcgtctgccgcgactctgtgtccaggaagggagagctgacccccctgcccgagacaggttattggagggtaagattatggaacggtgataaatatgccgcaaccacaacccctttcacgcccctacacatcaaggtgaaacccaagcgtgtcgggattttccttgactacgaagctgggacattatccttctacaatgtgactgatcgcagccatatttacacatttaccgatacatttacggaaaagctgtggccactgttttatccaggcattcgcgcggggcgcaaaaacgccgctcccttaaccattaggccccctactgactgggagtag

SEQ ID NO: 208854 - DNA, 1557 bp, Artificial Sequence
  derived and/or modified sequence
atggccgaaacctcactgctggaggccggagccagcgcggcttcaaccgccgcggccctcgaaaacctccaggtggaagcaagctgttccgtatgtctcgagtacctcaaggagcccgtaatcatagaatgcggtcacaacttttgtaaagcttgtatcacacgctggtgggaggatttagaacgggactttccctgccctgtatgcaggaagacctctcgctaccggtcgctgcgaccgaatcgtcaactcggcagcatggtagaaatagcaaagcagctgcaggcggtcaagcgaaagattagagatgagtctttgtgccctcagcaccatgaagccctcagtctgttttgctatgaggatcaggaggcggtttgtttaatctgtgctattagtcacacccaccgagcccacaccgtggtccctctggacgacgcaactcaggaatacaaagagaagttgcaaaagtgtctggagcccttggaacagaaactgcaggagatcacacgatgcaaatcttcggaagaaaagaagcctggggagctgaaaagactcgtcgagagtaggcgacagcagatcttgagggagttcgaggagctgcaccggcgcctggatgaggaacaacaggtgttgctgagccgcctggaagaagaagaacaggacattctgcagagattgcgggagaacgctgcgcacctgggcgacaagagaagggacctcgctcatctggccgccgaagtcgaaggtaagtgtctccagtcaggttttgaaatgctgaaagacgttaagagcacactcgaaaaaaatataccccgcaagttcggtggaagtcttagcactatttgcccaagggatcataaagcgttgctgggattggtcaaagagattaaccgctgtgaaaaggtgaaaactatggaagtaacaagcgtaagcattgagcttgagaaaaatttctccaactttccccggcagtatttcgctctgaggaagatcctaaagcagttaatcgcagacgtgaccctcgatcctgaaacagctcacccaaacttagtactctcagaagatagaaagtccgtgaagtttgtggagaccaggctgagagacctccccgataccccccgcaggtttacattctacccatgcgtgcttgcaacagaagggttcacctcggggagacattactgggaggttgaagtgggagataagacccactgggctgtcggcgtttgcagggactcagtcagtcgaaaaggggagcttacaccactccctgagaccggatactggcgtgtaaggctgtggaacggcgataagtatgccgctaccaccacccccttcacccctctgcatattaaagttaaaccaaaacgggtcgggatttttttggactacgaagcggggacactgtccttttataatgtgacagatcgcagccatatttatacattcaccgacacctttacagagaaactttggccccttttctaccctggcatccgggccggacgaaagaacgctgcaccattaactatccgcccccctaccgattgggagtag

SEQ ID NO: 208855 - DNA, 1557 bp, Artificial Sequence
  derived and/or modified sequence
atggctgagacaagcctgttggaagccggcgccagcgccgcttccactgctgccgcactcgagaatttgcaggtggaagcttcctgctccgtgtgtttggaatacctgaaggagcctgtgattattgagtgtgggcataatttctgtaaggcttgcataactcgctggtgggaggacttggaaagggactttccatgtcctgtttgccgcaagacttctagatatagaagcctgagaccgaacagacaactcggctccatggtggaaatcgccaagcagctgcaagcagtgaaacgcaaaatcagggacgaatccctgtgtccccagcaccatgaagcgctgtccctcttctgctacgaggatcaggaagccgtctgtctgatatgtgcgataagccacacacatcgcgcacacacagttgttcccctggacgacgcgacccaggaatacaaagagaaactccagaagtgcctcgaacccctggagcagaagctccaagagatcactaggtgcaaaagcagcgaggaaaagaaacccggtgagttgaaaagacttgtagaatcgcgacgtcagcagattctccgcgaatttgaggagttacatcggaggctggatgaggagcagcaggtgctactctctcgactggaagaagaggaacaggacattttacagcggctccgggaaaatgcggcacacctaggggacaagcgccgtgacctcgcccacttggccgccgaggttgagggcaagtgtctgcagtccggctttgagatgctgaaaccagttctgtctgctcgggagaagaatatccctcgaaaatttgggggatcgctgagcacaatatgtcctagagatcacaaggctctcctgggccttgtaaaagaaatcaaccgatgtgagaaggtcaagacgatggaagtgacctcggtgagcatcgaactggaaaaaaacttctcaaattttccccggcagtatttcgccctcagaaagatcctgaaacaattgatcgcagatgttactttagaccctgaaacagcccaccccaacctggttctctccgaggataggaagtctgtgaagtttgtggagactcgactccgcgacttgcccgatacgccccggaggttcaccttctacccttgtgtccttgctacagagggcttcacctcaggccggcactattgggaggtcgaagttggagacaagacccactgggctgtgggtgtatgccgggactccgtgtctcggaaaggggagctgacacccctgccggagacaggatactggcgcgtaaggctgtggaacggcgataagtacgccgctaccactacgccttttactccactgcacattaaggtgaagccaaagcgggtgggtatctttcttgactatgaagcagggaccttatctttctataatgtgacagatcgatctcacatctatactttcaccgacaccttcacagaaaaattatggcccctgttttaccccgggattcgagcgggaaggaaaaatgccgctcccctgactattcgccctccaactgactgggagtag

SEQ ID NO: 208856 - DNA, 1557 bp, Artificial Sequence
  derived and/or modified sequence
atggctgaaaccagcttgttagaggccggggcttccgcagccagcactgccgctgctttggaaaatctgcaggtcgaggctagctgcagcgtctgcctggagtatctcaaagaaccggtgatcatcgagtgcggccacaacttttgtaaggcctgcattacccgctggtgggaagatctggagagagatttcccgtgccctgtctgccgaaaaacatccagataccggagcttgcggccaaatcgccagctgggttctatggttgaaatagccaagcagctgcaggccgttaagcggaaaatcagagatgagtcattgtgtccgcaacaccacgaagccttgtccctgttctgctacgaggatcaggaagcagtgtgcttaatctgcgctatttcgcatacgcacagagcccacaccgtcgtgccactggatgatgcgacccaggagtacaaggagaagctccagaagtgcctggagccactcgagcagaaactgcaggagataacaagatgtaagagcagtgaggaaaaaaaacctggtgagctgaagcggttagtggagagcaggcgtcagcaaatcctgagagagtttgaggagctgcatagacgcctagacgaggagcaacaggtgttactgagccggttagaggaggaagagcaggatattttgcagagactccgagaaaatgctgcacacctcggagacaaaagacgagatcttgcccatctggctgccgaagtagagggaaagtgcttgcaaagcggcttcgaaatgctgaaggatgttaaaagtacactggaaaagaatattccgcgcaaatttggcgggtccttatcaaccatctgtccaagggatcacaaggcactgttgggcctggtcaaggagatcaaccggtgcgaaaaagtgaaaaccatggaggtaacaagtgtgagtatcgaattagaaaaaaactttagcaactttccccgtcagtatttcgcgctcagaaaaatccttaagcagctgattgcagatgtgacactggaccccgaaaccgcacaccctaatctggtccttagtgaagatagaaaaagtgtgaaatttgtggagactcggctgcgtgacttaccggacaccccacgtcgcttcactttctatccttgtgttctcgcaacagaaggcttcacttctggtcggcattactgggaagttgaggtgggcgacaagacccattgggctgtgggtgtctgcagagactctgtgtccaggaaaggtgaactgactcctcttccagaaacaggctattggagagtgcgcttgtggaacggcgataaatacgctgccaccaccaccccctttacccccctgcatatcaaagtgaaaccgaagagagtggggatcttcctcgactacgaggccgggaccctgagcttttacaatgttaccgacagatcacacatttacacatttacggacacattcactgaaaagctctggccattgttctatccaggcattagagcgggcaggaagaacgccgctcctctcaccatccggccaccaactgattgggagtag

SEQ ID NO: 208857 - DNA, 1557 bp, Artificial Sequence
  derived and/or modified sequence
atggctgaaacgtccctcctcgaagctggagctagcgcagcatcaactgctgctgcattggaaaatctacaggttgaagctagctgctctgtgtgtctggaatatctgaaggagcctgtgatcattgagtgcggacacaacttctgtaaggcctgcattacacgctggtgggaggatttagaacgggactttccatgcccagtttgtcgaaagacttcacgctacaggtccctacggccaaaccggcagcttggttctatggttgaaatagcgaagcaactgcaggccgtaaagaggaaaattcgagatgaatcactgtgcccgcaacatcatgaggccctgtccttattttgctacgaagaccaggaggctgtttgtctcatctgtgcaatcagccacacccatagggcgcatacagtagtgccgcttgacgatgctacacaggagtacaaagagaagctgcaaaaatgcttggagcctcttgagcagaaactacaagaaatcaccagatgcaaaagttctgaagaaaaaaaaccgggggaactcaagaggctggtggagagcaggaggcagcagatccttcgggagtttgaggagcttcatcgaagactggatgaagaacagcaagtcttactgtctcgccttgaggaagaggagcaagacatactccagcggcttcgggaaaatgctgcccacctcggtgataagcgcagagacctggcccatctggcagccgaagtcgaaggcaagtgcctccagtctggtttcgagatgctgaaacccgttctctctgcccgggaaaaaaatatccctaggaagtttgggggttcactcagcacaatttgcccacgggatcacaaggccttgctggggttggtgaaggaaataaacagatgcgagaaagtgaagaccatggaggtcacttcagtctcaattgaactagaaaaaaacttctccaacttccctagacaatatttcgccctccgcaaaatcttgaagcagctaatcgcagatgtgactctcgatccagagactgctcaccctaatctcgttctgtctgaggacaggaaaagcgtaaagttcgtggagacacggcttcgcgacctccctgacacgcccaggcgttttacgttttatccttgcgtgctagcaacagaggggttcacctcggggaggcactattgggaagtcgaagtgggcgacaaaacccattgggcagtgggtgtgtgtcgggattctgtgtctcggaagggcgaattaacaccgctgcccgaaacggggtactggagagtcagactgtggaacggcgacaagtacgcagctactaccactcccttcacacctctccacattaaggtaaaacctaagagagtgggtatcttccttgactatgaagctgggacactgtctttctacaatgtgactgatcgaagtcacatctacacctttacggatactttcaccgaaaagttatggccattgttttatcccggcatccgcgccggacggaagaacgccgcccccctgaccattcggccacccacagactgggagtag

SEQ ID NO: 208858 - DNA, 1557 bp, Artificial Sequence
  derived and/or modified sequence
atggcagaaacctctctgctggaggccggtgccagtgccgctagtacagccgctgcactggagaacttgcaggtcgaggctagctgcagtgtgtgccttgagtatctgaaagagcctgtgataatcgaatgcggtcacaacttttgcaaagcctgcatcacgagatggtgggaggaccttgagagagatttcccctgtccagtgtgtaggaagacatcccgttatcgctcactgaggcctaatcgccaactgggctccatggtagagatcgccaagcaattacaggccgtgaagcgaaaaatccgagacgagtccttatgtccccagcaccacgaggctctttccctgttctgctatgaggatcaggaagccgtatgcctcatctgcgcaatctcacatacgcatagagcccacacagtggtacctctggacgatgccacccaggaatacaaggaaaaacttcaaaagtgcctcgagccccttgagcagaaactgcaggaaatcacccgttgcaagagttccgaggagaaaaagcccggagaactgaagaggctggttgagagccgtaggcagcagatcctccgcgagtttgaggagcttcaccgacgtcttgacgaggaacagcaagtcctcttaagccgcctcgaggaagaggaacaggacattcttcagcgcctcagggaaaatgccgcgcacctcggggataaacggcgggaccttgctcatctggccgctgaggtagaaggtaaatgcctccagagcggatttgagatgctgaagcccgttctgtctgccagggagaaaaacatccctcgcaagttcggaggctcactgtcgacaatctgccctagagaccacaaggccctcctgggccttgtgaaagaaattaacagatgcgagaaggttaaaaccatggaggtgacgtctgtgagcatagagctggaaaaaaatttcagcaacttcccccggcaatattttgccttgcgtaaaatcctgaaacaacttatcgcggatgttacactcgaccctgagaccgctcacccaaacttggttttgtccgaggacaggaaatccgttaaatttgttgagacacgtttgagggatctccctgatacgccgcgtcgctttaccttctacccctgcgttcttgcaactgagggcttcacatcggggagacattattgggaggtagaggtgggtgacaagactcactgggcagttggggtatgtcgggatagtgtgtctcgaaaaggcgaactgacccccttaccagagactgggtattggagagtaaggctgtggaatggcgacaagtacgccgcaacgacaaccccctttacacccctgcacatcaaagtgaagccaaaacgggtgggcatttttctcgactacgaggcaggtacactgagcttttacaatgttacggaccgctcacacatttatacctttactgacactttcactgaaaagttgtggccacttttctaccccggcattcgagctggtcggaagaacgcagcgccattgaccatccgaccacccaccgattgggagtag

SEQ ID NO: 208859 - DNA, 1557 bp, Artificial Sequence
  derived and/or modified sequence
atggccgaaacatccctgctggaagcaggcgcatcggctgcaagcacagctgccgctcttgagaacctccaggtcgaggcttcatgcagcgtctgcctggaatatctgaaggaaccagtgattattgagtgcggacacaacttttgtaaagcctgcataacgcgctggtgggaggatctggaaagagacttcccatgccccgtatgtaggaaaacgtctcgttatcggagcctaagacccaatcggcagttagggtctatggtcgaaatcgcaaagcaattgcaagcagtgaagcgaaagataagggacgagtccttatgtcctcagcatcacgaggctcttagcctcttttgttacgaggaccaggaggccgtgtgcctgatctgcgccatcagccacacccatcgagcccacactgtggtcccgctcgatgacgccacacaggaatataaagaaaagctccaaaagtgcctcgaacccctcgaacagaagctgcaggagataacacgctgtaaaagcagcgaagaaaaaaagcccggagaacttaagaggttggtcgagtccagacgccagcagatcctgagggagttcgaggaactacaccgccgcctggatgaggaacagcaggtgctcctctcccgacttgaggaggaagaacaagatatcctgcagcgtctccgcgagaatgccgcacacctcggcgacaagcgcagggatctggcacacttagccgcagaggtcgagggcaaatgtctgcagtctggttttgaaatgctgaaagatgtgaagtccaccttggaaaagaacattccccggaaatttggggggtcactctctacgatctgtcctagggaccacaaagctttgctggggctggtgaaggaaatcaataggtgtgagaaggtgaaaaccatggaggtcacctcagtctcgatagaactggaaaagaattttagtaattttcccagacagtactttgcattaaggaaaattctgaaacaactgattgccgatgtgactctcgatcctgaaacagcccaccccaacctggtgctgtccgaagacagaaaatccgtcaagttcgtcgagacacggctccgggacctccccgacacgccccggcggtttaccttttatccatgcgttctggcgaccgaaggcttcacaagtggccggcactactgggaagtcgaggtaggcgacaaaacccactgggctgtgggagtgtgcagggactctgtttcaagaaagggggagctgacccctctgcccgaaacagggtactggcgtgtgcgcctgtggaacggagacaaatacgccgctacaaccacaccattcacacctcttcatattaaggtgaaaccaaagagagtgggcatttttctggattacgaggccggtactttatccttttacaacgtcacagacaggagtcacatttatacttttaccgacaccttcaccgaaaagttgtggcccctcttctaccctggcatccgtgccggaagaaagaacgctgctccactcaccattcgccctcctaccgattgggagtag

SEQ ID NO: 208860 - DNA, 1557 bp, Artificial Sequence
  derived and/or modified sequence
atggccgaaacctctcttttggaagcaggagccagcgcagcttctactgctgccgccctggagaacttacaagtcgaggcctcctgctcggtctgcttggagtatctgaaggaacctgtgattatcgagtgcggccacaatttttgcaaggcatgcatcactagatggtgggaggacttggagagggactttccgtgtccagtttgtaggaagacatcgcgctatagatctttgcgccccaatcggcagctggggtccatggtcgaaatcgctaagcagttgcaggcggttaagcgcaaaatccgcgatgagagcctttgtccccaacatcacgaggccttgtccctgttttgttatgaggaccaggaggctgtgtgtctcatctgcgctatctctcacacccatcgcgcacacacagtggttccattggatgatgctacgcaagagtacaaggaaaagctgcagaagtgtctagagccgctggagcagaaactccaggagatcacccgttgcaagagctctgaggagaagaaacccggggaactgaagcgcctcgtggaaagccggagacagcagatactgagggagtttgaagagctacatcgtcggttagacgaggaacagcaggtgctgctgagtaggctggaggaggaggaacaagacattctgcaacgtctgagggaaaatgctgcacatctgggagacaagagaagggatctggcccatttggctgcggaagtggaaggcaagtgtctgcagagtggattcgaaatgctcaaacctgtgctctcggcaagggagaaaaatatccctcggaaattcggagggagcttgtctactatatgtcctcgagatcacaaagccctgctcgggcttgttaaggaaataaatcggtgtgaaaaggttaaaacaatggaagtgacatccgttagtatcgagctggaaaaaaacttctctaattttcctcgacaatatttcgccctgcggaagatacttaaacaactgatagcggatgtgaccctggatcctgagactgcacacccaaacctagtgctgtcagaggaccgcaaaagcgtgaaattcgtagagaccagactcagggacctgccagacacaccacggcggtttacattctacccctgcgtgctggccaccgaaggcttcacaagcggacggcactattgggaagtggaggtcggcgataagacccattgggcggtaggcgtgtgcagggatagtgtttcccggaagggggaactgaccccactcccggagaccggctactggcgggttcgtctttggaacggtgacaagtacgccgccacaacgaccccgtttaccccgctgcacatcaaagtaaaacctaagcgggtaggcattttcctggattacgaggcaggcacccttagtttctataatgtcacagacagaagccacatttatacatttacagatacctttaccgagaagctgtggccgctcttttacccaggtatccgggccggacgcaaaaacgctgcccccctgacgatccgcccccccactgattgggagtag

SEQ ID NO: 208861 - DNA, 1557 bp, Artificial Sequence
  derived and/or modified sequence
atggctgagacatcccttttggaggctggtgcctccgccgcttcaactgccgctgcattagaaaacctccaggtcgaggcaagctgtagcgtctgtttagaatacttaaaagagccagtaatcatcgagtgtggccataacttctgtaaggcttgcatcacccgatggtgggaagatcttgagcgcgatttcccctgtccagtctgtcgaaagactagtcgctatagatccctgcgacccaaccggcagttgggctccatggtagagatcgctaaacaactccaggcagttaagagaaagatcagggatgagagtctatgtccccagcaccatgaagcactatcattgttctgctacgaagatcaggaagccgtttgtctgatatgcgcgatttcgcatacacacagggcccataccgtggtccccctcgatgacgctacccaggagtataaagaaaaattgcagaaatgccttgagccactcgagcagaaattgcaggaaatcacccgctgcaagtcatctgaagagaagaagcccggagaactgaaaaggctcgtggaaagtcgccgtcagcagattctgagagagtttgaggagctgcaccgcaggctggatgaggagcagcaagtgctactcagcaggctagaagaagaagagcaggacattctccagagactgagggaaaacgccgcacatctcggagacaagaggcgtgatctagcacacctcgcagcagaggtggaaggaaagtgtctgcagtcagggtttgaaatgctaaaacccgtgttaagtgcccgcgagaagaacatcccaaggaaattcggtggctcgctgtccacgatttgccctcgggatcacaaagcgctcctgggtctggtcaaagagattaaccggtgcgagaaagtgaagacgatggaagttaccagcgtttctatcgagcttgaaaagaacttttccaattttccacgtcagtacttcgctcttaggaaaatcttgaagcagcttatcgccgacgtcactctggatccagaaacagctcatcccaacctcgttctgtcagaagataggaagagtgtgaagtttgtagaaacacgcttacgggatctccccgatacgccgcggaggtttaccttttacccttgcgtgctggctaccgagggcttcacctcagggagacattactgggaggtcgaagttggtgacaagactcactgggccgtgggggtgtgccgggacagtgtaagccgaaagggagagctgacgcccctgccagagaccgggtattggcgggtgaggctgtggaatggcgataaatatgccgccacaactacaccgttcactcccctgcacattaaagtgaagcctaagagagtcggaatcttcctggattacgaggcgggtaccctgtccttctataacgtgaccgacaggagtcacatctacacttttactgacacatttactgagaaactatggcccctgttctatccaggaatcagagccggaagaaagaacgcagccccactgactatacgacctccgactgattgggaatag

SEQ ID NO: 208862 - DNA, 1557 bp, Artificial Sequence
  derived and/or modified sequence
atggccgaaacctcgctcttggaagcaggagcaagcgcagccagcactgcggccgcactcgagaatctgcaggtggaggcttcctgcagcgtgtgtctagaatatttgaaagaacctgttatcatcgaatgtggacacaacttctgcaaagcctgcatcacacgctggtgggaggacttagagcgggactttccttgcccggtctgccgcaaaactagccggtacaggtctttacgccctaataggcagctgggttcaatggtggaaatagccaaacagcttcaggctgttaagcggaaaattcgcgatgagagcttatgtccacaacatcacgaggctttatctttgttttgttatgaggatcaggaagctgtttgcctcatctgcgcaatctcacacactcaccgggcccacaccgttgtgccgctcgacgacgcgactcaagagtataaggaaaaactgcagaaatgtcttgagcccctggaacaaaaacttcaggaaatcacacgctgcaagtcctctgaagagaagaaacccggcgagctgaagagactcgtcgagtcacgacgccagcagatattgagagagttcgaggagctgcatcgccgtctggatgaagaacagcaggtattactctctaggctggaggaggaggaacaggacattctccagcgcttgagagagaatgcagcacacctgggtgacaagagaagagatctggcacatctggcggctgaggttgagggcaagtgtttacagagtgggttcgagatgctaaaggacgttaaatccacactggaaaaaaacatccctcggaagtttggagggtccctgtcaactatctgtcccagggatcacaaggccctgctgggtttggtgaaagaaataaataggtgcgagaaagtcaaaacaatggaagtgacttcggtatcaatcgaactggagaaaaacttctccaactttccacgacagtacttcgctctcaggaaaatactcaagcaactgatagccgatgtgaccttggaccctgagacagcccatccaaacctcgttctgagcgaagataggaaatcggtgaaatttgttgagacaagactcagagacctacctgatacacccagaagatttacattttacccttgcgtactagctaccgaagggttcaccagcgggcggcactactgggaggtcgaagttggagacaagacccattgggcagtcggggtgtgtcgagattctgtatcccggaagggtgagttaacccctctgccagagacaggctattggcgcgtcagactgtggaatggtgataaatatgcagcaacaaccacaccattcacaccattacatatcaaggtgaaaccgaagagggtgggtatcttcctggattacgaggccgggaccctttctttctataacgtgaccgaccggtcccacatatacacgtttaccgacacctttactgagaagctttggcctctattttatcccggaattagagcagggagaaagaatgcagctcctctgaccatccgtccccctacagactgggagtag

SEQ ID NO: 208863 - DNA, 1557 bp, Artificial Sequence
  derived and/or modified sequence
atggctgagacgtcactcttggaggccggggctagcgcggcttctaccgccgcggctctggaaaacctgcaagtggaggcgtcatgttcagtctgcctcgaatatctcaaggagccagttatcattgagtgcggacataacttttgtaaggcttgcatcacccggtggtgggaggatctggaaagggacttcccctgtcccgtttgcagaaagaccagtagatataggtcactgagacccaatcggcaactgggcagcatggtcgaaatcgctaaacagttacaggccgtcaaaaggaaaataagggatgagtctctatgtcctcagcaccacgaggccctcagtctgttctgttatgaggatcaggaggccgtgtgtctgatttgtgcgatctcccacacccacagggcccataccgttgttccgctggacgatgccacgcaagaatacaaagagaagctgcagaaatgtctagagcctctagagcagaagttgcaggagatcacgcggtgcaagtcttccgaagagaagaagcccggggagttaaagcgcctcgtagagagcagacgacagcagattttgcgggaattcgaggagctgcatcggaggctcgatgaggaacagcaggtgcttctcagccgtttggaagaggaagagcaggacatcctgcaaagactcagggagaatgcggcccacctgggggacaaacgtcgggatctggcacatcttgctgcagaagttgagggcaaatgcctgcaatccggcttcgagatgctgaaggacgttaaaagtaccctggagaagaacatcccaaggaagtttgggggtagcttatcaaccatctgcccaagggaccataaggctttactcggacttgtgaaggagataaatcgctgcgagaaggtcaagactatggaggtgacttccgtttccatcgagctcgaaaaaaacttctcgaacttcccgaggcaatattttgccctgcgcaagatattgaaacaactgattgcagatgtgactctggacccagagacagcccaccccaacctggtgctctcagaagatcgcaaaagtgtcaagtttgtggaaacccgtctaagagacctgccggataccccacggcggtttaccttttacccctgcgtccttgcaactgagggtttcaccagtggccgccattattgggaggtggaggtcggcgacaaaacccactgggccgtaggcgtctgtcgagattctgtgtctagaaagggtgagctgacccctctaccagaaactgggtattggagggtgcgactgtggaacggagataagtacgccgctacaacaactcctttcactcctctccacattaaagtgaagcctaaaagggtgggaattttcctggactatgaagcgggcactttatctttctataacgttacggatcgatcccatatctacactttcaccgatactttcacagaaaaattgtggccgctgttttatcctggcatcagagccggccgtaagaatgcagctccgctgacaatccggccaccaaccgattgggaatag

SEQ ID NO: 208864 - DNA, 1557 bp, Artificial Sequence
  derived and/or modified sequence
atggccgagaccagcctgctggaggccggggccagcgctgccagcacagctgctgccctggagaacctgcaggtggaggccagctgcagcgtgtgcctggagtacctgaaggagcctgtgatcattgaatgtggccacaacttctgcaaggcctgcatcacccgctggtgggaggacctggagcgggacttcccctgccctgtgtgcaggaagaccagccgctaccgcagcctgcggcccaaccggcagctgggctccatggtggagatcgccaagcagctgcaggccgtgaagaggaagatcagagatgagagcctgtgcccccagcaccacgaggccctgagcctcttctgctatgaggaccaggaggccgtgtgcctgatctgtgccatcagccacacccaccgggcccacacagtggtgcccctggatgatgccacccaggagtacaaggagaagctgcagaagtgcctggagcccctggagcagaagctgcaggagatcacccgctgcaagagcagcgaggagaagaagccaggagagctgaagaggctggtggagagccggcggcagcagatcctgcgggagtttgaggagctgcaccggcggctggatgaggagcagcaggtgctgctgagccggctggaggaggaggagcaggacatcctgcagaggctgcgggagaatgctgcccacctgggggacaagagaagagacctggcccacctggccgctgaggtggagggcaagtgcctgcagagcggctttgagatgctgaaggatgtgaagagcaccctggagaagaacatccccaggaagtttggaggcagcctgagcaccatctgcccccgggaccacaaggccctgctgggcctggtgaaggagatcaacagatgtgagaaggtgaagaccatggaggtgacctctgtgtccattgagctggagaagaacttcagcaacttcccccggcagtactttgccctgaggaagatcctgaagcagctgattgctgatgtgaccctggaccctgagacagcccaccccaacctggtgctgtctgaggacaggaagtctgtgaagtttgtggagacccggctgcgggacctgcctgacaccccccggcgcttcaccttctacccctgtgtgctggccacagagggcttcaccagcggccgccactactgggaggtggaggtgggggacaagacccactgggccgtgggcgtgtgccgggacagcgtgtccaggaaaggagagctgacccccctgcctgagaccggctactggagggtgcggctgtggaatggagacaagtatgctgccaccaccacccccttcacccccctgcacatcaaggtgaagcccaagagggtgggcatcttcctggactatgaggccggcaccctgtccttctacaacgtgacagacaggagccacatctacaccttcacagacaccttcacagagaagctgtggcccctcttctacccaggcatccgggccggcaggaagaatgctgcccccctgaccatccggcccccaacagactgggagtag

SEQ ID NO: 208865 - DNA, 1557 bp, Artificial Sequence
  derived and/or modified sequence
atggccgagaccagcctgctggaggccggggccagcgctgccagcacagctgctgccctggagaacctgcaggtggaggccagctgcagcgtgtgcctggagtacctgaaggagcctgtgatcattgaatgtggccacaacttctgcaaggcctgcatcacccgctggtgggaggacctggagcgggacttcccctgccctgtgtgcaggaagaccagccgctaccgcagcctgcggcccaaccggcagctgggctccatggtggagatcgccaagcagctgcaggccgtgaagaggaagatcagagatgagagcctgtgcccccagcaccacgaggccctgagcctcttctgctatgaggaccaggaggccgtgtgcctgatctgtgccatcagccacacccaccgggcccacacagtggtgcccctggatgatgccacccaggagtacaaggagaagctgcagaagtgcctggagcccctggagcagaagctgcaggagatcacccgctgcaagagcagcgaggagaagaagccaggagagctgaagaggctggtggagagccggcggcagcagatcctgcgggagtttgaggagctgcaccggcggctggatgaggagcagcaggtgctgctgagccggctggaggaggaggagcaggacatcctgcagaggctgcgggagaatgctgcccacctgggggacaagagaagagacctggcccacctggccgctgaggtggagggcaagtgcctgcagagcggctttgagatgctgaagcctgtgctgagcgcccgggagaagaacatccccaggaagtttggaggcagcctgagcaccatctgcccccgggaccacaaggccctgctgggcctggtgaaggagatcaacagatgtgagaaggtgaagaccatggaggtgacctctgtgtccattgagctggagaagaacttcagcaacttcccccggcagtactttgccctgaggaagatcctgaagcagctgattgctgatgtgaccctggaccctgagacagcccaccccaacctggtgctgtctgaggacaggaagtctgtgaagtttgtggagacccggctgcgggacctgcctgacaccccccggcgcttcaccttctacccctgtgtgctggccacagagggcttcaccagcggccgccactactgggaggtggaggtgggggacaagacccactgggccgtgggcgtgtgccgggacagcgtgtccaggaaaggagagctgacccccctgcctgagaccggctactggagggtgcggctgtggaatggagacaagtatgctgccaccaccacccccttcacccccctgcacatcaaggtgaagcccaagagggtgggcatcttcctggactatgaggccggcaccctgtccttctacaacgtgacagacaggagccacatctacaccttcacagacaccttcacagagaagctgtggcccctcttctacccaggcatccgggccggcaggaagaatgctgcccccctgaccatccggcccccaacagactgggagtag

SEQ ID NO: 208866 - DNA, 1557 bp, Artificial Sequence
  derived and/or modified sequence
atggccgagaccagcctgctggaggccggcgccagcgccgccagcaccgccgccgcactggaaaacctccaggtggaggccagttgtagtgtgtgccttgagtatcttaaggaaccagtgattattgagtgcggtcataacttctgcaaagcctgtatcactagatggtgggaagatctggagcgggacttcccttgtcccgtgtgtcgtaagaccagcagataccgttctcttaggcccaaccgccagctgggcagcatggtcgaaatcgcaaagcaacttcaggcggtgaagaggaagataagagacgaatccctgtgtcctcagcatcatgaagccctgtctctgttttgctacgaggaccaagaggctgtgtgtttaatttgcgctatttcccatacacaccgtgcgcatacagttgtccccctggacgacgctacccaggaatacaaagaaaagctccagaagtgtctggagccactggaacaaaaactgcaggaaattacaagatgcaagtcttctgaagaaaagaagcccggggaactgaagcgactggtagagtctcgtaggcagcaaatcctgagagagttcgaggaacttcacagacgcttagatgaggaacaacaagtcctgctgtcccgtctggaagaagaggagcaagatatccttcagaggctgagagagaacgcagcccacctgggggacaagcggagggacttagctcatctggccgctgaagttgagggtaaatgcctccagtcaggctttgagatgctgaaggacgttaaatcaaccctggaaaagaatatcccccgcaaatttgggggcagtctgagcactatatgtccaagagatcacaaggcccttctcgggcttgtaaaggagatcaatagatgcgaaaaagtgaagactatggaagtaacatccgtgtctatagaactagagaaaaacttctctaacttcccccggcagtactttgccctgagaaagattctcaagcagctgatcgcagacgtcacgctcgatcccgagaccgcgcatcccaatctggtactaagtgaagaccggaaatccgttaagttcgtcgagactagactacgcgacttgcccgacactccaaggcgcttcacattctacccctgcgtcttagcaacggaagggtttacgtctggccggcactattgggaggtggaagtaggcgacaagacacactgggccgtaggggtgtgtcgggattccgttagcaggaaaggggagctcacaccgctccccgaaactggttactggcgagtgcgcctgtggaatggcgacaaatatgctgcaaccacgacaccattcaccccactgcatattaaagtgaaaccaaaacgcgtgggaatctttctcgattatgaggcgggcaccctctctttctacaatgttaccgacagaagccacatatacacttttactgacacgttcacagaaaaactgtggcctctcttctacccagggatccgggcggggcgtaagaatgcagcaccactcaccattagacctcccactgattgggaatag

SEQ ID NO: 208867 - DNA, 1557 bp, Artificial Sequence
  derived and/or modified sequence
atggccgagaccagcctgctggaggccggcgccagcgccgccagcactgccgccgccctcgagaacctacaggtggaggcctcgtgcagtgtgtgtctggagtatctgaaagaaccagtgattattgagtgcggccataatttttgcaaggcatgtattactcgttggtgggaggatttagagcgggacttcccctgtccagtgtgccgcaagacatctcgttatcgcagtctccgccctaaccgtcaactgggctccatggttgagatcgcaaaacaacttcaagcagtaaaaagaaagatccgcgatgaatctttatgtccgcagcatcacgaggctttgtcattgttctgctacgaggatcaggaggccgtgtgcctgatctgcgccatatctcacactcaccgcgcccacacggtagttccactggacgatgcgacccaggaatacaaggaaaagcttcaaaagtgcttggagcctctcgagcagaagctccaggaaattacccgctgcaaatcctccgaggagaaaaagccaggagagcttaagaggctcgtggagtcaagacggcagcagatcctgcgcgagttcgaggagctgcacagaagactggatgaagaacaacaggtcttgctctctcgtttagaggaggaggagcaagatatcctgcagaggttaagagaaaacgcggcgcacctaggtgataagcgaagagatttggcacatctggcagctgaggttgaagggaagtgtcttcagtctggctttgaaatgctcaaagatgtgaaaagcacattggagaaaaacatccctcgaaaatttggaggttccctgagcacaatttgcccaagggaccacaaggcattgcttggcctcgtgaaggaaatcaatcggtgtgaaaaggtcaaaacgatggaagtaacttccgtgtcaatcgaactggaaaagaacttcagtaacttccctcggcagtactttgctcttcgcaagattttgaaacagctgattgccgacgtaacactagatcccgaaaccgctcacccgaatctggttttgtccgaggatcggaagagtgttaagtttgtggaaacccgcctgcgggacctccctgatacccctagacgtttcaccttctacccgtgtgtgctcgccaccgaaggcttcacaagcggacgccattattgggaggtggaggttggagataagacccattgggccgtaggcgtttgcagggactcagtctcacgaaagggggagctcactcccctcccagagactgggtattggagggtgcggttatggaacggagataagtacgccgccactaccactccattcacgcctttacatattaaggtcaagccaaagagggtggggatcttcctggactatgaggcagggacacttagtttttataacgtgaccgaccggtcgcatatctacacttttacagacactttcacagaaaaactctggcctctcttttatcctggcattagagctggccggaagaatgccgccccgctcaccatccggccacctaccgattgggagtag

SEQ ID NO: 208868 - DNA, 1557 bp, Artificial Sequence
  derived and/or modified sequence
atggccgagaccagcctgctggaggccggcgccagcgccgccagcacggccgccgcccttgaaaacctccaagttgaggcttcttgttccgtgtgccttgagtacctgaaggaaccagtgataattgagtgtgggcataacttctgcaaggcctgcataacaaggtggtgggaagacctcgagcgtgattttccttgcccagtttgtcggaaaacttcaaggtatcgctctctgagacctaatcgtcagctaggctcaatggtcgaaattgcgaagcagctgcaggcagtaaagcggaagatccgagatgagtcactgtgcccacagcaccatgaagctcttagtttattctgctatgaggaccaggaggccgtttgtttgatctgtgccatctcccacacccaccgtgcgcacacggttgtcccattagacgatgcgacacaggagtacaaggaaaagctacaaaaatgccttgagcctttggagcaaaagttgcaggaaattacccgatgtaaatctagtgaggagaagaagcccggggagttaaaaagacttgtcgaaagcaggagacagcaaattctgcgggagttcgaggagctgcaccgtcgccttgacgaagagcagcaagtcctgctgtccagactggaagaagaggaacaagatatcctgcaaagactgagggaaaacgctgctcatctgggagataaacgccgagatttagctcacctcgcggcggaagtcgaagggaagtgtctgcagagcggcttcgagatgctcaaagacgtgaaaagcaccttggaaaagaatatccctcggaagttcggaggatcattaagtacaatctgtccgcgggaccataaggcactgctgggtctcgtgaaagagattaataggtgtgagaaggtgaagacaatggaggtgacctccgtatctatagagctggagaaaaacttttctaattttccacgtcaatacttcgctttaaggaaaatcttgaaacagcttatagcagatgtgaccctggaccctgaaacggctcacccaaacctagttctctccgaagatcgaaagtccgtgaagttcgtggaaacccgcctcagggacctacccgacaccccccggcggtttaccttttatccttgcgtcctcgcaacggaggggttcacaagcggcaggcactattgggaagtcgaggtgggagacaaaacgcactgggcagtcggcgtgtgtcgagactccgttagtaggaagggggagctaaccccactgcctgagactggttattggcgggtccgcctctggaacggggataagtacgctgctactaccactcccttcacccctttgcacattaaagtcaagccaaagagggttggcatcttccttgactacgaggctggcacactgtccttttacaacgtgaccgatcgtagccatatctataccttcactgacaccttcactgagaaactgtggccactgttctaccccggcatcagagccggccgtaagaatgcagccccacttacaattaggccacccaccgactgggagtag

SEQ ID NO: 208869 - DNA, 1557 bp, Artificial Sequence
  derived and/or modified sequence
atggccgagaccagcctgctggaggccggcgccagcgccgccagcactgccgctgcactagaaaacctacaggtggaagcttcctgttcagtctgcttagaatacctcaaggagccagtgattatcgaatgcggccacaatttctgtaaggcctgtatcactcgttggtgggaggatttggagagggattttccctgcccggtctgtcggaagaccagtagatatagatcactgcgaccaaatcgccagctcggcagcatggtcgagatcgcaaaacaactgcaggccgtcaagcgcaaaatccgagacgagagcctgtgccctcagcatcacgaagctctgtcattattctgttatgaggatcaagaggcagtgtgtctgatctgcgctatctctcatactcatagagcccatacggtagtccccctggacgacgccacacaggagtataaggaaaaactccagaaatgtctggagccccttgagcaaaagcttcaggagattacacggtgcaagtcatccgaggaaaagaagccgggggaactcaagcgcctggtcgagtcacgtcgtcagcagatactgagggagtttgaggaattacacagaagactcgatgaggagcagcaggtgcttttgtcaaggctggaagaggaggaacaggacatcctccaaaggttacgagagaatgccgcacacctcggcgacaaaagacgcgacctcgctcaccttgctgcggaagtcgagggaaagtgtctgcagagcggatttgagatgctgaaggatgtaaagtctacattggagaaaaacatcccccggaaatttggcgggagtcttagtacgatctgcccccgcgatcacaaagcactgctggggctggtgaaggaaataaatagatgtgagaaagtcaagaccatggaagtgaccagtgtgtctatcgagctggagaagaacttcagcaatttccccaggcagtacttcgccctgagaaagatccttaagcagcttatcgccgacgttacactcgacccagagaccgcacacccgaacctggtgctgtcagaagataggaagtccgtgaaattcgtggagacacgcctcagggaccttcccgacactcccaggcgattcacattttatccctgtgttctcgcaacagaggggttcactagcggcaggcactattgggaggtggaggtgggagataagacgcattgggcagttggtgtttgcagggacagcgtgtcacgtaagggcgaactgacaccgctaccggagactgggtactggagggtcaggctttggaatggagataagtacgccgccacaaccactcccttcacacctttacacatcaaggttaagcctaagagagttggcatttttcttgactatgaagctggaactctctccttctacaacgtaactgatagatcccacatttacacgttcaccgacactttcaccgaaaagctttggccgctgttctaccccgggataagggccgggagaaagaacgccgccccattaacaatcaggccaccaactgactgggagtag

SEQ ID NO: 208870 - DNA, 1557 bp, Artificial Sequence
  derived and/or modified sequence
atggccgagaccagcctgctggaggccggcgccagcgccgccagcactgcggcagctttggagaatttgcaggtggaggcctcctgctccgtgtgtctggagtacctaaaggagcctgtgattattgaatgtgggcataacttttgtaaggcatgtataacgaggtggtgggaggacctggaacgtgatttcccatgtcccgtatgtcggaagacttcccgttaccggtccttaagacctaaccggcagctcggtagcatggtggagattgctaagcagttgcaggctgtcaaacgaaaaatcagagatgagtctttatgcccacagcaccacgaagcactgtcactattctgttacgaggaccaggaagcagtgtgcttaatttgtgctatttcgcacacacacagggctcataccgttgtgcctctcgatgatgctacccaggaatacaaagagaagcttcaaaagtgcctggaacctctggaacagaaactccaagagattactcgatgtaagtcaagtgaggagaagaagcccggtgagctcaaacgtctggtggaaagtcggcgccagcagatcctaagggaattcgaggagttgcacagacgcttagacgaggagcagcaggtgctcttaagcagactcgaggaggaggaacaggacattcttcagagactgcgcgagaatgctgcccatttgggtgataaacgccgggacctcgctcatctcgccgctgaggtggagggcaaatgtttacagtccgggttcgaaatgctgaaggatgtgaagtccaccttggagaaaaacataccgcggaaatttggaggcagtctgagtacgatttgccccagagaccataaggcacttttgggactggtgaaggagattaaccgttgtgaaaaagttaaaacgatggaggtcacttcggtatccattgaactggagaagaactttagtaattttcctcgccaatacttcgccttgcgaaagattctaaagcagcttatagctgacgtgactttagatccagaaaccgcccatccaaatctggtgctctccgaggatagaaagagcgtgaaattcgtagagacaagactgagagatctgcctgatactccacgccgattcactttttatccttgcgtgttagccactgaagggttcaccagcgggcgccattattgggaagtcgaggtgggcgataagactcattgggctgtgggggtgtgtagagattcggtgagtcggaagggagagttaacccctttgcccgagactgggtattggcgcgttaggctctggaacggagacaagtacgcggccaccaccacacctttcacccccctgcacatcaaagtgaagcccaagcgcgtagggatctttctggactacgaagctggcaccttgagtttctataacgtcacagacaggtcacacatttacacattcaccgatacgttcactgaaaaactgtggcctcttttctaccctggcatacgggccggacgcaaaaacgcagctccccttaccatccggcctccgaccgactgggagtag

SEQ ID NO: 208871 - DNA, 1557 bp, Artificial Sequence
  derived and/or modified sequence
atggccgagaccagcctgctggaggccggcgccagcgccgccagcactgcagcagcattagagaatttgcaggtggaggcttcatgcagcgtttgcctggagtacctgaaggaacccgttattattgagtgcggccacaatttttgcaaggcctgcatcacgcgctggtgggaagatctcgagcgggactttccttgccccgtgtgcaggaagacttccaggtatagaagcctcaggccaaacagacagttgggctcaatggtggagatcgctaaacaactgcaggccgtaaaaaggaagatccgcgacgagtccctctgcccccaacaccacgaggccctctctctgttttgctacgaggaccaggaggccgtgtgcctaatctgcgccatcagtcacacccatagagcccataccgtcgtcccccttgatgatgctactcaagaatacaaggagaagctccaaaagtgtctggaacctctggagcagaagttgcaggagattacgcggtgcaagtctagtgaggagaagaagccgggagaactgaagaggcttgtagagagtagaaggcaacagatcctgagggaattcgaagagctgcaccgaaggctcgacgaggaacagcaggtgctcttaagccgtctcgaggaggaggagcaagacatactacaacgtctcagagagaacgcagcgcacctgggtgataagaggagagacctcgcccaccttgctgccgaagtggaaggcaaatgtctgcaaagcggattcgaaatgctgaaagacgttaaatccactcttgagaaaaacattcctcggaagttcggtgggagcctcagcacgatctgtccacgggaccacaaggccctcttgggactagtcaaagagattaatcgttgtgagaaggtgaagaccatggaggttacaagtgtgagcatcgagcttgagaaaaatttcagcaattttccacggcaatatttcgcactccgcaaaatcttgaagcagctaatcgcagatgtcacccttgatcccgagacggcccacccaaatcttgtcttgtcggaggatcgtaaaagtgtaaaatttgttgagacaaggctgcgggatcttccagacacccccaggcggttcactttttacccgtgcgttcttgcgacagagggattcactagcggacgacattattgggaagtcgaggtgggagacaagacccattgggcagtaggggtgtgccgcgattcagtatcacggaagggcgagctcaccccattgcctgagacaggctactggcgggtacgactttggaacggagacaaatatgccgcgaccaccaccccttttactcccctgcatatcaaagtgaagcccaagcgtgtgggaatttttcttgattacgaagcaggcaccctgagcttttataacgtaactgaccggtctcatatttacactttcacggatacttttactgagaaattgtggccactgttctaccccggaattcgagccggacggaagaacgctgcccccctcactatacgaccccccactgactgggaatag

SEQ ID NO: 208872 - DNA, 1557 bp, Artificial Sequence
  derived and/or modified sequence
atggccgagaccagcctgctggaggccggcgccagcgccgccagcaccgccgccgcgctcgaaaacctgcaggtggaagccagctgttccgtgtgtctggagtatttaaaagagcctgttattattgagtgtggacataatttttgcaaggcctgcatcactcgatggtgggaggacctcgaaagggacttcccttgtccagtctgccgaaagaccagccgatatcgcagcctccgcccaaataggcagttaggatccatggtggagatcgcaaaacagctccaggccgttaaacgcaaaatacgggacgaaagtctctgccctcaacaccacgaggcactgagcctgttttgctatgaagaccaggaagcagtgtgtctcatctgtgccattagccatacacaccgcgcccataccgtggtgcccctggatgacgccactcaagagtacaaggagaaacttcaaaagtgtttagagcctctggagcaaaagctgcaggagataacgaggtgtaagagcagtgaggagaagaagccaggagagctcaagcggctggttgaatcgcggcgccagcagatcttgcgagaattcgaggagctgcatcgcaggcttgacgaggagcaacaggtcttactttcccggcttgaagaagaggaacaggacattctgcaacgcctgagagaaaatgctgcccatctgggcgataagaggagagatcttgcccatcttgccgccgaggtagagggcaagtgcttgcagtcagggtttgagatgctcaaagatgttaagtccactttagaaaaaaacattcctagaaagtttggagggagcttatcgaccatttgccctcgcgatcacaaggcgttgctggggttagttaaggagatcaacaggtgtgagaaggtgaagactatggaggtaacaagcgtctctattgaactggaaaagaatttctctaattttccccgccagtattttgcccttaggaagatactaaagcagttgatcgcagatgtaaccttagaccctgagaccgcccatcctaatttggtgctgagcgaagatcgcaaatctgtgaagtttgtggagactaggctgcgggacctgccagacacccctcggcgcttcactttttacccctgtgtgcttgccacagaaggtttcacttctgggagacactactgggaggtcgaggttggcgataaaactcactgggccgtcggggtttgtagagatagcgtcagcaggaaaggagagctcaccccgctacccgagaccgggtactggcgcgtcagactctggaacggtgataaatacgccgcaacaacgaccccctttacaccgctccacatcaaggtgaagccaaagcgcgtggggattttcctcgattacgaagccggaaccctcagtttttataatgtaactgacaggagtcatatatacacgttcacggacaccttcacagagaagctgtggcccctgttttaccctggaattcgcgcagggaggaagaatgccgcgcctttgaccatccgcccccctaccgattgggaatag

SEQ ID NO: 208873 - DNA, 1557 bp, Artificial Sequence
  derived and/or modified sequence
atggccgagaccagcctgctggaggccggcgccagcgccgccagcaccgctgccgccctcgagaacctgcaggtggaggccagctgctcagtgtgcctggagtacctgaaagagcccgtgatcattgagtgcggacataatttttgtaaggcatgtattaccagatggtgggaagacctggagagagattttccttgtccggtgtgtcgcaagacaagcagatatcgaagcttgagacctaataggcagctcgggagcatggtggagatcgctaaacagcttcaagccgtgaaacgcaaaattagggatgagagtctctgcccgcagcatcacgaagctctgagcctcttttgctacgaggaccaggaggcggtgtgtttaatctgcgctatctcacatacacaccgggctcacacagtcgtgccactagatgacgccacgcaggaatacaaggagaaattacagaagtgtttggagccactcgagcagaagctgcaagaaatcactagatgtaagtccagcgaggagaagaaaccaggtgagttgaaaaggttagtggaaagccggagacaacagatcctcagagagttcgaggagctgcacagacgccttgacgaggaacagcaagtccttttgagtcgcttggaggaggaggaacaggacatcctgcagagactgagagagaacgccgcccatcttggcgataaacgccgtgatctcgcacacctagctgcggaagttgagggcaagtgcctgcagtctgggtttgagatgctgaaggatgtcaagtccactctcgagaaaaacattccacgaaaattcggcggctcgctttctaccatctgcccaagggaccataaagccctgcttggtctggtcaaagagatcaaccgctgcgagaaagtaaaaacaatggaagttacaagcgtcagtatagagttagagaagaatttctcaaacttccctaggcagtacttcgctttaagaaagatcctgaaacagttgatcgccgatgtaactctggatccggaaactgcccaccctaacctcgtcctgtcagaggatcggaaatcggtcaagtttgtcgagacccgcctcagggacctgcctgacacacctaggaggttcaccttttacccgtgtgtgctggcgacagagggatttacaagtggccgtcactattgggaggtagaagtcggagataagacacactgggctgtgggtgtttgccgggattccgtgtctcggaagggcgagcttacaccactgcccgagacagggtattggagggtgcgcctgtggaatggggacaagtacgccgcgactaccacccccttcacacctctgcacattaaagtgaagcccaagagagtgggcatcttcttggactatgaggcaggaacgctaagcttctacaatgtgaccgaccggtctcacatttacacgtttactgatacattcactgaaaagctctggcctctgttctacccagggatccgggcgggtaggaagaatgcagccccactcacaatccggccgcctacagactgggagtag

SEQ ID NO: 208874 - DNA, 1557 bp, Artificial Sequence
  derived and/or modified sequence
atggccgagaccagcctgctggaggccggcgccagcgccgccagcacggcggccgctctggaaaacctgcaggtggaagcttcctgcagtgtttgcctggagtatttgaaggagccagtgatcatcgagtgcggccataacttttgcaaggcctgcattactcgttggtgggaagatttggaacgcgactttccttgccctgtgtgtagaaaaactagccgctacagaagtcttaggccgaatcgccagctgggatctatggtagagatagccaaacaactgcaggctgtgaaaaggaagattagggacgagtccctgtgcccccagcatcatgaagccctgtcgctgttctgctatgaggaccaagaagcagtgtgcctgatatgtgctattagccacacacaccgcgctcacacagtggtaccattagacgatgccacacaggagtacaaggagaagttgcagaagtgcttagagcctctcgagcaaaagctgcaggaaatcaccagatgtaagtctagcgaagaaaagaaaccgggcgagcttaaacgattggtcgaaagccggcggcagcaaattcttcgggaatttgaagagctccatcggaggctggatgaagagcaacaggtccttttaagccgcctcgaagaggaggagcaagacatcctccagcgactcagagagaacgctgcacacctgggcgacaaacggcgagatttggcccatttggctgctgaagtggagggtaagtgcttacagtccgggtttgagatgctgaaacccgtgctcagcgcacgagagaagaatatcccccgcaagttcggcggaagcctgtctacaatttgcccccgcgaccacaaggcactgttgggtctggtaaaggaaatcaatcggtgcgagaaggtaaaaacaatggaagtgacttcagtgtccattgagctcgaaaaaaacttttcgaattttccgaggcagtacttcgccctgcggaagatactcaagcaactgatagctgacgttaccttagatccggagaccgcccacccaaatttggttttgagcgaagatcggaagtctgtgaagtttgttgaaacccgactgcgcgacttgcctgatacaccccgacgatttaccttctacccatgcgtactggccactgaaggcttcactagcgggaggcactactgggaggtggaagtgggtgacaagactcattgggccgtgggggtctgccgcgattccgtatcccgcaagggagaactgactccattgcccgagacagggtactggcgagtccggctttggaacggtgacaagtatgctgcaactaccacgccctttacccccctgcacatcaaagtgaaacccaagcgcgttggtatcttcctcgactacgaagcagggaccctctccttttataatgtgaccgataggtcacacatttacaccttcaccgacaccttcacagagaaactctggccgctgttctacccaggaatcagagccgggaggaaaaatgcggcccccctcaccattcgaccaccgacagactgggaatag

SEQ ID NO: 208875 - DNA, 1557 bp, Artificial Sequence
  derived and/or modified sequence
atggccgagaccagcctgctggaggccggcgccagcgccgccagcactgccgccgctctggaaaacctccaagttgaagcatcttgctcagtatgcctcgagtacttaaaagaacccgtgattatcgaatgcggacacaatttctgtaaggcctgtattacccgctggtgggaagatttggagcgagacttcccatgccctgtgtgccgaaagacttccaggtaccgttctctaaggcccaacagacagctcggctccatggtcgagattgccaaacagctgcaagccgtaaagaggaagatccgagatgagtcactgtgcccccaacaccatgaggcattgtcactcttttgttacgaggaccaggaggcagtttgcttgatttgcgctattagccatactcatcgagcccacacagtggtgcccctcgatgatgctacccaggaatataaagagaaactccaaaaatgtctggagcctttggagcaaaaactccaggagattacacgctgcaaatccagtgaggagaagaagcccggcgaactgaaaagactggtggagagtaggcgtcagcagatcctccgtgagttcgaagagttacaccgaaggctggatgaggagcagcaagtgctgctgagccgactcgaggaagaagaacaggacattctccagcgactgcgggagaacgctgcgcacctaggtgataaacgcagagatctggcccacctagccgccgaagttgagggcaaatgtctgcagtccggatttgagatgttgaagccagtgctctcagccagagagaaaaatatcccacgaaaattcggaggttccctgtccactatttgtccgagagatcataaagctctgctcgggctggtcaaagaaataaatcggtgtgagaaagttaagactatggaggtaacctccgtcagcattgaactggagaagaacttcagcaacttccccagacagtattttgctctcaggaaaattctcaaacagttgattgctgacgttaccctcgacccagagaccgctcatcctaatctggtcttaagcgaggatcgaaagtctgtaaagttcgttgagacccgcctcagggatttgcctgatactcccagacggttcactttttacccctgcgtactggccacagaggggttcacgagtggtagacactattgggaggtagaggtgggcgacaagactcactgggcggtcggagtgtgtcgcgactccgtcagtaggaagggcgagctgacgcctctacctgaaacaggctattggagagtgagactgtggaacggcgataaatatgcggccactacaacaccattcacacccttacatataaaggtgaagccaaagagagtcggcatctttctcgactacgaggcaggcacgttgtcattctacaatgttaccgatcgctcacatatttacactttcactgatacattcaccgaaaaactttggcctcttttctacccagggattcgggcggggcgcaagaatgccgctcctttaaccataaggcctcccactgactgggagtag

SEQ ID NO: 208876 - DNA, 1557 bp, Artificial Sequence
  derived and/or modified sequence
atggccgagaccagcctgctggaggccggcgccagcgccgccagcacagcagctgctctggagaatctccaagtcgaagctagttgtagcgtctgcctggaataccttaaagaacctgtgatcattgagtgcggtcacaatttttgtaaggcatgcatcacgcgatggtgggaggatcttgaaagggacttcccctgtcctgtgtgcaggaaaacctcccgatacagatcacttagacccaatcgtcaactcgggtccatggttgaaatcgccaaacagctgcaggcagtaaagcgtaaaatccgggatgagagcctgtgcccacagcaccacgaggcactgtcactcttttgttatgaggaccaggaagctgtatgtctgatctgcgctatcagccacacacaccgagcgcacaccgtggtgccactggacgatgctacccaggaatataaagaaaaacttcagaagtgcctggaaccacttgagcagaagttacaggaaattacgaggtgcaagtctagcgaggagaagaaaccaggggagctcaagcggctcgtggagtcaagaagacaacagattctccgtgagtttgaggagctccataggagactggacgaggaacagcaggtgcttctctcacggcttgaggaagaagagcaggacatcttacaacggcttcgggaaaacgccgcccacctgggggataaacgtcgggatctcgcccacttggccgccgaagtcgaagggaaatgccttcagagtggattcgagatgctgaaagacgtgaagagtaccctggaaaagaatatacctcgcaaattcggcgggagcctctcaactatctgtcctcgcgatcacaaggccttgctgggcctggtgaaagagatcaatcgatgcgaaaaggtcaagacgatggaagtgacttccgtctctattgagttagagaaaaacttttcgaactttcccagacagtatttcgcattgaggaagattctgaaacagctgatcgcagatgttaccctcgacccggagactgcccaccccaatctcgtgctgagcgaagaccggaaatccgtgaaattcgtggagactcgcctgagagatttacccgatacaccccgtcgctttacattctacccctgcgtgctggccaccgagggttttacctctggaagacattattgggaggtcgaggtaggggacaaaacccactgggccgtcggagtctgtcgtgatagcgtcagcaggaagggggagctgacacctctgcccgagacagggtactggcgtgtcagactttggaacggagataagtatgccgctactaccacacctttcaccccgctccacatcaaagtaaaacctaagagagtgggcattttcctggactacgaagctgggacacttagcttctataacgtgaccgaccggtctcatatctatacgtttacagacacatttaccgagaagctctggccccttttctacccaggaatccgagccggaagaaagaacgcggcgcccttgactatccgaccaccaaccgactgggagtag

SEQ ID NO: 208877 - DNA, 1557 bp, Artificial Sequence
  derived and/or modified sequence
atggccgagaccagcctgctggaggccggcgccagcgccgccagcacagccgcggccttggaaaacctgcaggtagaggcgtcctgcagtgtatgcctagagtatcttaaagaacccgtgattatcgaatgcggccacaacttctgtaaggcctgcataacacgctggtgggaagacctcgagagggacttcccctgccctgtctgtaggaaaacaagcaggtaccgatcactgcgccccaaccggcagctgggcagtatggtcgagattgctaagcagctgcaggccgttaaacggaagatcagagatgagtccttgtgtcctcagcaccatgaggcactctcccttttttgctatgaagaccaggaggccgtatgtcttatatgtgccattagccatactcacagagctcacacagtcgtgcccctagatgacgctacacaggagtacaaggagaagttacagaagtgcctggaaccccttgaacagaaactgcaggagattacaaggtgcaaatccagtgaagaaaagaagccgggtgaattgaaacggctggtggaatctagaagacagcagattctgcgggaatttgaagagctgcatcgcagacttgacgaggagcagcaggtgctgctgagcaggctcgaagaggaagagcaggacattctacagaggctgagggagaatgccgcacatctgggagacaaacggcgcgacctcgcccatttggctgctgaggttgaggggaaatgcttgcagagcggatttgagatgctgaaggacgtgaagtccacccttgagaaaaacatacctagaaaatttggcggctcactgagcaccatctgtccacgggaccacaaggcccttctcgggctcgtgaaggaaataaaccgatgcgaaaaggtcaagaccatggaggtcacgagtgtaagcattgagcttgagaagaattttagcaacttccccagacagtactttgccttgcggaaaatactgaaacagctcattgctgacgtgaccctggatccagaaactgcccatccaaatctggtgttgagcgaggatagaaaatctgtcaaattcgtagaaacacggctgagagatctgcccgacacgccgagacgctttactttctacccatgcgtgttggctacagagggttttacctcaggaaggcactactgggaggtggaggtgggcgataagactcattgggctgtgggggtctgcagggatagtgtgtccaggaagggcgagcttacaccactgccggagactggatattggagagttcggctgtggaacggtgataaatatgcagctaccaccacccccttcactccactacatataaaggtgaaacctaagcgggtaggaatattcctcgattatgaggctggtaccctgagcttctacaacgttacagaccggtcccacatctataccttcacagatactttcacggaaaaattgtggcctcttttctaccccggcatcagggctggccggaaaaacgccgccccgctgacaattcggccgcccacagactgggagtag

SEQ ID NO: 208878 - DNA, 1557 bp, Artificial Sequence
  derived and/or modified sequence
atggccgagaccagcctgctggaggccggcgccagcgccgccagcacggccgctgcactggagaacttgcaagtggaagccagttgttctgtttgtttagagtatctgaaagagcccgtaattatcgagtgtggccataacttttgcaaagcctgcatcactcgctggtgggaagatctcgagcgggactttccatgccccgtgtgtaggaaaacaagtcggtaccgaagtctaagacccaatagacagctcggttccatggtcgaaattgctaaacaactacaggctgtgaagcggaagatccgtgacgagagtctttgcccccagcatcacgaggcgttatccttgttctgctatgaggatcaggaggcagtgtgtcttatttgcgctatttcacatactcaccgagcccatactgtggtgcccctggatgacgcaacccaggaatataaggaaaaactccagaagtgtctggagcccctggagcagaagctgcaagagatcacacgctgtaagagctctgaggaaaagaaacccggagagcttaagaggttggtcgaatcccggcggcagcagatattgagggaatttgaggagctgcatcgtcgtttggatgaagaacagcaggtattactgagccgccttgaagaagaggaacaggacatcctccagcgtttgcgcgaaaatgcagctcatctgggggataaacgccgtgacctggcacacctcgcagccgaggttgagggaaaatgtctccaaagcggctttgagatgctcaagccggtacttagcgcaagggaaaaaaatatccccagaaagttcgggggatctttgtccaccatctgtcctcgggaccataaggccctattagggcttgtgaaagagataaatcggtgcgagaaggtgaaaactatggaggtgacatctgtctcaatcgagctggaaaagaatttttcaaacttcccgcggcagtatttcgccctgaggaagattctgaaacagctgatcgccgacgttacactcgacccagaaaccgctcacccgaatcttgttctcagtgaggaccggaagtcagtgaaatttgtggagacacgactgagagatctgccagacacacctcggcggtttacgttttacccttgtgttttggcaaccgaaggattcaccagcgggaggcattattgggaagttgaagtcggtgacaagacacactgggcggtgggcgtgtgtcgcgatagcgtcagccgcaagggcgagctcacacctcttccagagacaggctactggcgtgttaggctttggaacggggataaatatgccgccaccacaactcctttcacccccttgcacatcaaggtgaagcctaagcgcgtgggaatctttctagactacgaagctggcaccctctccttctacaatgtgacagatcggagccatatttacaccttcactgataccttcaccgagaaactgtggcccctgttctaccctggcatcagggccggaaggaaaaatgcagctccactgaccatacgcccacccacagattgggaatag

SEQ ID NO: 208879 - DNA, 1557 bp, Artificial Sequence
  derived and/or modified sequence
atggccgagaccagcctgctggaggccggcgccagcgccgccagcactgccgcggcattggagaatctgcaggtggaagcctcctgctccgtgtgtctggaatacctcaaagagcccgtgattatcgagtgcgggcacaacttctgtaaggcctgcatcacacggtggtgggaagatttagagcgcgatttcccatgccccgtgtgtcggaagacttcacgatatagaagtctgagaccaaatcgtcaattgggctccatggtggaaatagctaagcaactccaggcagtgaagcggaagattcgggatgaaagcctgtgtccacaacaccatgaggctctctctctgttctgttacgaggatcaagaagctgtatgcctaatctgcgctattagccacacccacagagcccatactgtggtcccccttgacgatgcaacccaagagtacaaagagaagctacaaaaatgccttgagcccctggagcaaaagctgcaggaaattacaagatgcaagtccagcgaggagaagaagccaggagagctgaaacgcctggtggagagccgtcggcagcaaatactgcgcgaatttgaagagctgcaccgccgcttagacgaagagcagcaggtgctcctctctcgactggaggaggaagagcaggacattctccagcgtctccgtgaaaatgccgcccatctcggagataaacgccgggacctggcccacttagctgctgaggttgaaggcaagtgtcttcagtcgggatttgaaatgctcaaagatgttaaaagcaccctcgagaaaaacatccccaggaagtttggcgggtctctgagcacgatttgtccacgtgaccacaaagctctactaggactcgttaaagagattaatcgatgtgaaaaggtgaaaacaatggaggtcacttccgtcagcatcgagttggagaaaaatttctccaactttccgcggcagtatttcgcccttcgtaaaatcttgaaacagctgatcgctgatgtcaccctcgacccggaaaccgctcaccctaacctggtactgagcgaggaccgtaaatccgtcaagtttgtagagactcgcttgcgcgatctgccagatactccacgccggtttacattctacccttgtgtattagctactgaaggcttcacctccggtcggcactactgggaggtggaagtcggcgacaagacccactgggccgttggagtctgtcgcgattctgtgagtcgtaagggggagctgactccactgccagaaacaggatactggcgagtccggctatggaacggagacaaatacgcagccaccacaacaccatttacgccgttgcacattaaagtcaagcctaagcgagtggggatattcctggactatgaggcaggcaccctatcattttacaacgttaccgacaggtcacatatctatacattcactgacacttttaccgagaagttgtggcccctattctatccaggaatccgagcggggcgcaaaaatgccgcaccactgactatccggcctccgacggattgggagtag

SEQ ID NO: 208880 - DNA, 1557 bp, Artificial Sequence
  derived and/or modified sequence
atggccgagaccagcctgctggaggccggcgccagcgccgccagcactgctgccgctctggagaatttgcaggttgaagccagctgttccgtctgcctggaatacctgaaggaacccgtcattatagagtgcgggcataacttttgcaaggcttgtattactcgctggtgggaggacctggaaagagattttccctgcccagtctgccggaagactagccgctatcggagcctgaggccaaaccggcaattggggtccatggtggaaatagccaaacagttgcaagctgttaagcggaagatacgcgacgaatctttgtgcccacagcaccatgaggccttatctctgttttgttatgaggatcaagaggccgtttgcctaatctgcgcgatctcgcacacccatcgcgctcatactgtggtgccccttgatgacgctacccaggagtacaaagaaaagttgcaaaaatgtctggagcctcttgaacagaagttacaggaaattacccgatgcaagtcttccgaagaaaaaaaaccgggcgagctgaagaggctagtggagagtagacggcagcagatcctgagggagtttgaagagctgcaccgccgattagacgaagagcagcaagtgctgctctcccgattagaggaagaggaacaggacatactgcagaggctgcgggaaaatgctgcccacttgggagataaacgtcgggacctcgctcatctggccgcagaggtggaaggtaagtgtctccagtctggctttgagatgctgaaacctgtgttgtcggctcgggagaagaacatcccccgaaaattcggaggtagcctaagtacgatttgtccacgcgaccacaaagcacttctgggcttagtgaaggagatcaacaggtgcgaaaaggtgaagactatggaggtgactagcgtctctattgagctggaaaagaacttctctaactttccacgtcagtacttcgcccttagaaaaatattgaagcagctgatcgcagacgtgacattggaccctgaaaccgcacacccaaacctggtgctgtctgaggacagaaaaagcgtgaaattcgtagaaacccgtctgcgtgatttacccgataccccccgacggtttaccttttacccttgtgtgctcgcaactgaagggttcaccagtggacgacactattgggaggttgaagtgggagataagactcactgggccgtgggagtatgtcgggattccgtctcacgcaagggtgagctgacgccactgcccgaaacaggatactggcgggtgcgtctgtggaatggagataagtacgccgctactaccacacccttcacacccttgcatattaaagtgaagccaaagcgtgtaggtatcttccttgactatgaggctggtactctgagcttctacaacgtgaccgacagatcccacatatacacttttaccgataccttcaccgagaagctgtggcccctgttttatcctggaattcgcgccggacgaaagaatgcagctccattgacaatcagacctccaacggattgggagtag

SEQ ID NO: 208881 - DNA, 1557 bp, Artificial Sequence
  derived and/or modified sequence
atggccgagaccagcctgctggaggccggcgccagcgccgccagcacggccgctgctttggagaatctgcaggtcgaggccagctgctccgtgtgcctcgaatacttgaaggagcccgttatcattgaatgtggccacaacttttgcaaagcttgcatcacgagatggtgggaggacctggagagggattttccatgtcctgtgtgccggaaaacgtctcgatacagaagcttgcgacccaacaggcagctgggctccatggtggagattgccaagcagctgcaggcggtaaagcgaaaaattcgcgacgaaagcctgtgccctcagcaccatgaggcgcttagccttttttgctacgaagatcaggaagcagtgtgcctgatctgcgcaatttctcacacacatcgggcccacacggttgtccccctggacgatgcaacccaggaatataaggaaaaactgcagaagtgccttgagcccctcgagcagaagctgcaagaaatcacccgatgcaagagctccgaagaaaaaaagccaggggagcttaaacggctcgttgagagtagaaggcaacagattctccgcgagttcgaagagctccatcgaagattagacgaggagcaacaagttctgttgagtagactggaagaggaggagcaagatatacttcagcggctacgggagaacgccgcccatctgggcgacaagcggagggacctcgcgcatttggcagcagaagtcgagggaaagtgcttgcagtctggttttgagatgttgaagccggtcctgtcagcacgcgagaaaaacattcctagaaaattcggtggctcccttagcacgatttgcccacgcgaccataaggccctgctgggcttggtgaaagaaattaatcgatgtgagaaagtgaaaactatggaagttacatctgtgtcaattgagctcgagaaaaatttttccaattttcctcgacagtattttgctctccgaaaaatcctgaaacagctgatcgctgacgtcacacttgacccagagactgcacacccaaatctggtcctctctgaggaccggaaaagtgttaaatttgtggaaacccgtctgagggatctacctgacacgccccggcggtttaccttctatccctgcgttcttgcaactgaaggttttacgagtgggcgtcattattgggaagtggaggtaggtgacaagacccattgggccgtgggagtttgccgcgacagcgtttcccggaagggggaactgacccctctgcccgaaaccgggtattggcgagttcgcttgtggaacggcgacaaatatgcggcaaccactacccctttcactcccctgcacattaaggtgaaacccaagcgcgtggggattttcttggattacgaggctggcactctgtccttttacaatgtgacagatcgaagtcacatctacacattcactgatactttcactgagaagctgtggccattgttttaccctggaatacgggctggccggaagaacgccgcacctctcaccatcagaccacctaccgactgggaatag

SEQ ID NO: 208882 - DNA, 1557 bp, Artificial Sequence
  derived and/or modified sequence
atggccgagaccagcctgctggaggccggcgccagcgccgccagcactgctgctgccctggaaaatttacaagtggaggcctcatgttctgtctgtttggaatatctgaaggaacccgtaataattgaatgcggacacaacttttgcaaagcctgcataactagatggtgggaggacctcgaacgagattttccatgccccgtctgccggaaaacaagtcgataccgcagcctgcggcctaatcgccagctgggctccatggtcgagatagccaagcagttacaagctgtcaagaggaaaatcagagacgaaagcctgtgcccccagcaccatgaggcgctgtctttattctgctacgaagaccaagaggcggtgtgcctgatctgtgccatctcccacacccacagagcccataccgtcgtacccctggacgacgctactcaggagtacaaggagaaacttcagaagtgccttgagcctctcgaacagaagttgcaagagataacaagatgtaagtcctccgaggaaaagaaacccggagagctgaaaagactagtcgaaagccgtagacagcagatcttgcgcgagtttgaagaattgcacaggagactcgacgaggagcaacaggtccttctctcccggttggaagaggaggaacaggatatcctgcagcggttgcgcgaaaacgcagcccacctgggcgacaaaaggcgcgaccttgcccacctggccgccgaagtggaaggaaagtgtcttcagtcgggattcgagatgttaaaagacgtcaaaagcactctggagaagaacattcccaggaaattcggcggcagtctgtcaaccatctgcccgcgcgatcacaaggccttattagggctggttaaggagatcaacagatgcgaaaaagtgaaaaccatggaggtgacctcagtgtcaatcgaactggagaagaattttagcaattttccacgtcagtatttcgccttacggaaaattttgaagcagcttattgccgacgtgactctggatcctgagacggcccatccaaacttagtgctcagcgaggataggaaatctgtaaagtttgttgagacccggctacgggatttgcccgacacaccgcgtcggttcaccttttatccatgcgtgcttgcgacagagggcttcacatcaggcagacactattgggaggtggaagttggcgacaagacccattgggccgtcggcgtctgtcgtgatagtgtctcccggaagggcgaattgacccctctccccgaaacggggtactggagagtgcgactctggaatggagataagtacgctgccaccacaacgcctttcaccccactccacatcaaggtgaagcccaaaagagtcggcatcttcctcgactatgaggccggaactttgagcttctataatgtcaccgaccgctctcatatctatactttcaccgacacatttaccgaaaagctttggcccctgttctatcctggaattcgcgctggccgaaagaatgctgcacccctgaccattagacctccaacagattgggagtag

SEQ ID NO: 208883 - DNA, 1557 bp, Artificial Sequence
  derived and/or modified sequence
atggccgagaccagcctgctggaggccggcgccagcgccgccagcacagcagcggcgctcgagaatttgcaggtggaggcttcttgcagcgtgtgcctagaatatttaaaggaacctgtgatcatcgagtgcggtcataacttctgtaaggcctgtatcaccaggtggtgggaggatctggaacgggactttccgtgtccagtgtgccgcaagacgagtcgctataggagcttgcgacctaatagacaacttggtagcatggttgagatagccaaacaattgcaagccgtgaagcgtaagatcagagacgagtctttatgcccccagcaccacgaggccctcagcctattctgctacgaggatcaggaagcagtgtgcttgatttgcgccatctcccacacacaccgtgcacacacagtggtgccgcttgatgacgctacccaggaatacaaggagaagttgcaaaaatgcctggagcccctggaacaaaaactgcaagagattacccggtgtaagagcagcgaggagaagaaaccaggagaactgaagagattagttgagagtcggcgccaacaaattctgcgagagttcgaagagttgcaccgcagattggacgaggagcaacaggtgttactgtctcggctggaagaggaggagcaggacatcctgcagcggctgcgggaaaacgcagcccacttgggggacaagagacgcgatctggcacatctggctgcagaagtcgaagggaaatgtctgcaatcaggcttcgaaatgttgaagcccgtgctgtcggccagggagaaaaacattcctcgcaaatttgggggctccctttcaaccatctgccccagggaccacaaggcccttcttggtttggtgaaagagattaataggtgcgaaaaagtcaagactatggaggtgacctccgtttcgattgagttggaaaagaatttttcaaacttccctaggcagtactttgctctacgcaagatcctgaagcagctgatcgccgacgtcaccttggaccctgaaacagcgcatcctaatctcgtgctgagtgaggacaggaaaagcgtcaagttcgtcgagacaaggcttagggacctgcctgacacccctagaaggtttactttttacccatgcgtgttagccaccgaaggcttcaccagtggaaggcactattgggaggtggaagtcggagacaagacacattgggcagttggggtgtgccgcgactccgtctcccgaaaaggcgagctcactcctctgcctgagacaggatactggcgcgttcgcctctggaatggcgataagtatgctgccaccacaacacctttcacccctctccacattaaggttaagcccaagagagtgggtatcttcctggactacgaggccggaacactgtccttttataacgtgaccgatcggtcccacatctatacatttacggacacatttaccgaaaagctctggcccctattttacccaggcattagagcaggtagaaagaatgccgcacctctcactatccggccgccgacagactgggagtag

SEQ ID NO: 208884 - DNA, 1557 bp, Artificial Sequence
  derived and/or modified sequence
atggccgagaccagcctgctggaggccggcgccagcgccgccagcacagcggcagccctggaaaacctgcaggtggaggcgagttgctctgtttgtctggagtatctaaaagaaccagtcattattgaatgtggacacaatttctgcaaagcatgtattacaaggtggtgggaagatcttgaacgcgattttccatgccccgtgtgccgaaagacttcacggtacagaagtctgcggccgaatcggcagctgggctcgatggttgaaatcgccaagcagctgcaagctgtcaagcggaaaatccgggacgaatctctatgtccccagcaccacgaggcgctttcattattctgttacgaggaccaagaagccgtttgcctcatttgtgctatttcccacacccatagggcccatacagtagttcccctggacgatgccacccaggaatataaggaaaaactgcaaaaatgcctggaacccctggagcaaaagctgcaggagattacaaggtgcaaaagttctgaagaaaaaaagccaggcgagctgaagcgactggtagagagcagacgtcagcagatcctgagggaatttgaggagctgcatcggaggctcgatgaggaacagcaggtgctcttgtcaagacttgaggaggaagagcaggatatcctgcagaggctgagagagaacgctgcccatctgggagacaaacgaagagatctggcacatctggccgcagaggtagaagggaagtgcctccagtctggcttcgagatgttaaaacccgtgctgtccgcccgagaaaaaaacatcccccggaaattcggaggaagccttagtactatttgtccgcgcgatcataaggcacttctgggcctggtgaaggaaattaaccgctgcgaaaaggtgaaaaccatggaagtgacgagtgtctcgatagaactagaaaaaaacttctctaacttcccccggcagtatttcgctcttcgaaaaattctgaagcagcttatcgctgatgtgacgctggacccagagactgcccatccaaatctggtcctgagtgaagaccgcaaatcggtaaaattcgttgaaacacgacttagagatcttcccgacactcctagacgctttaccttctacccctgcgttctggcaacagaaggctttacttctgggcggcactattgggaggtggaagtgggcgataagactcattgggccgtgggcgtatgccgcgattccgtctcccggaagggagagctgacacccctacccgagactggatattggcgggtccgattatggaacggcgacaagtatgctgctaccacaaccccgtttacccccttgcacattaaagtcaagccaaagagggtgggtattttcctcgactacgaggcggggactctatcattttacaatgtgacagatcgaagtcatatatatacgtttactgacacattcaccgagaagttgtggccacttttctaccctggaattcgtgccggccgcaaaaatgcagctcccctgaccatccggccaccaaccgattgggagtag

SEQ ID NO: 208885 - DNA, 1557 bp, Artificial Sequence
  derived and/or modified sequence
atggccgagaccagcctgctggaggccggcgccagcgccgccagcaccgcagctgcactggagaatttgcaggtcgaagcttcctgtagtgtatgtctcgaatacttgaaggagcctgtgatcattgaatgtggccacaatttttgtaaggcgtgtattacacggtggtgggaggatttggaaagagacttcccatgccccgtgtgtagaaagacatcaaggtatcgcagtttgcgtccgaatcgccagctgggaagtatggttgagatcgcgaagcagctgcaggcagttaaacggaaaattagggatgagtctttgtgcccacagcaccatgaagcactatcactgttctgttatgaagaccaagaggcggtgtgcttgatttgtgccatatcacacacccacagggcccacacagtggtacccttagatgatgctacgcaagagtataaggaaaaattgcagaagtgtctggagcctctggaacagaagctccaagaaattacaaggtgtaaaagttctgaggagaaaaaacccggtgagctgaaacgcttagtggaatcacgaagacaacaaatcctgcgggaatttgaggagctgcaccgtcgcttggacgaggagcagcaggtgctcttaagcaggctggaggaggaggaacaggatatcctccagaggctgcgagagaacgccgctcacctgggtgataaaaggagggacttagcccaccttgcggccgaggtggagggaaagtgccttcaaagcggcttcgaaatgctgaaggacgtgaagtcaaccctggaaaaaaatatcccacggaagtttggtgggtccttatccaccatctgtcctagagaccacaaggctttacttggcctggtcaaggagatcaaccgatgcgagaaagtgaagacaatggaggtgaccagcgttagcatcgaactcgaaaaaaacttcagcaattttccacgccagtattttgcccttcgaaagatcctcaagcagcttattgctgacgttactctggatcctgaaactgcccacccaaacctcgtcctctccgaagataggaaatctgttaagttcgtggaaacacggctccgggatctacctgatacacctaggcgtttcacattctatccatgcgtcttggccacagaaggtttcacatctggccggcactactgggaagtcgaagtcggtgataaaacccactgggctgtgggcgtctgtcgcgactcagtgagtagaaaaggtgaactgacacctttgcctgagacagggtattggcgagtccggctctggaatggggataagtacgctgctacaacgacgccattcaccccacttcacatcaaggttaaacctaagcgagttggcatttttctggattacgaggctggaaccttatcattctacaacgttacagatagatctcacatctacactttcacggacacattcaccgagaaattgtggccactcttttatcccggcattagagccgggagaaagaacgcggccccactgaccatccgaccacccacagactgggagtag

SEQ ID NO: 208886 - DNA, 1557 bp, Artificial Sequence
  derived and/or modified sequence
atggccgagaccagcctgctggaggccggcgccagcgccgccagcaccgccgcggccttggaaaatctgcaggtggaggcttcatgttcggtgtgcctagagtacctcaaagaacccgtgatcattgaatgtggccacaatttctgcaaagcgtgcatcacacgctggtgggaagatttagagcgagattttccatgtcctgtctgccggaaaaccagtcgttacagaagcctacggccgaaccggcagctcgggtctatggtggaaattgccaagcagctgcaagccgtgaaaaggaagattagagatgaaagcctgtgccctcaacatcatgaagcattgagcttattttgttacgaagatcaagaggcggtgtgccttatctgcgctataagtcacacacaccgggcacacaccgtggtcccacttgacgacgccactcaggaatacaaagagaaactccagaaatgtctagagccgttggagcaaaagctacaggagattacacgctgcaaatcttcagaagagaaaaagccgggggagctcaagcggctggtggagtctcgcaggcagcagattctcagagagtttgaggagctgcaccggaggttggacgaggaacagcaggtgcttctgtcacgattagaagaagaggaacaggacattctgcagcgtctgcgagagaatgccgcccatctcggggacaaacggcgcgatttagcacaccttgctgctgaagtagaagggaagtgtcttcagtctggcttcgagatgctgaaggatgttaagtctaccctggagaagaacattccccgcaaattcgggggttccctctctacaatctgcccacgggaccataaagctctattagggcttgtgaaggagataaatcggtgcgagaaggtgaaaaccatggaggtgactagtgttagcatagaactcgagaagaacttttcgaactttccaagacagtactttgctctgaggaaaatactcaagcaactgattgccgacgttacccttgaccctgagactgctcacccaaacctggtgctgtctgaagaccgcaaatcagtgaagttcgtcgagacacgcctgcgcgatctgcctgatacacctcggaggttcacattttacccttgcgtcctcgcaacggaaggttttacttccggtcggcattactgggaggtggaggtaggtgataagacgcactgggccgtaggcgtgtgtagggacagtgtttccaggaagggcgaactgaccccgctgcctgaaactgggtactggcgcgttaggctttggaatggcgataaatacgcagcaactaccaccccattcacacccctccatataaaagttaagcccaaaagggtcggaattttcttggattatgaggccggtacgttgtccttttataatgtgaccgataggtcccacatttacaccttcacagacaccttcacagagaaactttggccattgttctacccaggaatccgcgccggacgcaaaaacgcagctccactgacaatccgcccacctaccgactgggaatag

SEQ ID NO: 208887 - DNA, 1557 bp, Artificial Sequence
  derived and/or modified sequence
atggctgaaacctccctgttagaggctggcgctagcgctgcttctacagcggctgcactggaaaacctacaggtggaggcctcctgcagtgtttgtttggagtaccttaaggagcctgtgattatcgaatgtgggcacaacttctgcaaggcctgtattacccggtggtgggaggacctcgagagagactttccttgtcctgtctgtagaaaaacctccaggtatagaagccttcgtcctaaccgccaattggggtctatggtcgagatcgctaagcagctacaggcggttaaacggaagattcgtgacgagagtctttgcccacagcatcacgaggccctctcactgttctgttatgaagatcaggaggccgtttgcctcatctgcgccatttcccatacacaccgggcacacacagtagtgccgctagacgatgccacgcaggaatataaagaaaaattgcagaagtgcttggaaccactagaacagaaactgcaggaaatcacgagatgcaagagtagcgaagagaaaaaacctggcgagttgaagcgcctggtcgagtcccgtcgccagcaaatcctccgtgaattcgaggagctccatagaaggttagatgaggagcagcaggtacttcttagtcggctcgaagaggaggagcaagatatactgcagcgcctgcgcgagaacgcagcacacctgggagacaagcggagagacctggcccacctggccgcagaggtagaaggaaaatgcttgcagagcggatttgagatgctaaaagatgtaaagagtaccttggaaaagaatattcccagaaaattcggagggtcgctgtcaacaatctgcccacgggaccataaggccctgctaggactggtgaaggagattaatagatgtgaaaaagtcaaaacaatggaggtcacaagtgtgtccatagaactggagaagaatttcagtaattttcctcgccagtacttcgcgttgagaaagatcttgaaacagttaatagccgatgtcacgctcgaccccgagactgctcatcccaatttggttttaagtgaggatcggaaatccgtgaagttcgtggaaacaagactgcgggatctccccgacactccaagacgtttcacattttatccttgcgtgttggccactgaggggttcacttccggaaggcattactgggaggtggaagttggtgataagacccactgggcagtgggagtgtgtagagattcagtttcacggaagggagagcttacgcccctgccagaaactggctactggcgtgtcaggctctggaacggtgataagtacgcggctacaaccactccatttacacccttgcacatcaaggttaagcccaaaagggtggggatctttctcgactacgaagccggtaccttaagcttctacaacgtaacggatcgttcacacatttacacatttacagatacattcacagaaaaactgtggcctctgttttaccccggaatccgggcaggaaggaaaaacgctgcaccactaaccatcagacccccaacggactgggagtag

SEQ ID NO: 208888 - DNA, 1557 bp, Artificial Sequence
  derived and/or modified sequence
atggctgaaaccagcctattagaggctggggcatccgcagccagcactgcggctgctcttgaaaacctgcaggttgaggctagttgtagcgtgtgcctagaatacctgaaagaacccgtgataatcgagtgtggtcataacttctgtaaagcctgcattacaaggtggtgggaggacctcgaaagagactttccctgtcctgtgtgtagaaaaacatctcggtacaggagtttgcgccctaataggcagttaggaagcatggttgaaattgctaaacagttgcaggcagtgaagcgcaaaatccgggacgagtcactgtgcccacaacaccatgaagccctctctctgttctgttacgaggatcaagaggcggtctgtctaatatgtgccatcagccatacccatcgcgctcatactgtcgtcccccttgatgatgcaacacaggagtacaaagaaaagctccagaagtgtttggaaccgctggagcagaagcttcaggaaataacaaggtgcaaatctagtgaagagaaaaaaccgggtgaactcaagagactagtcgaaagcaggcggcaacagatcttaagggaatttgaggaattacacagacgtctggatgaagaacagcaggtgctgctctctaggctggaggaagaggaacaggacattcttcagaggctgcgcgagaacgctgcacatcttggggacaaaagacgcgatctagcccatctcgctgcagaggtggaagggaaatgcctgcaatctggcttcgagatgttgaaggacgtgaagtcaaccttggagaaaaacatccccaggaaatttggtggttcactctcaaccatctgccccagggaccacaaggccctgctgggcctggtgaaggagataaaccgttgcgaaaaggtgaaaacaatggaagtgacgtccgtgtctattgagctggagaagaatttctctaactttcctcgccaatatttcgctctgcggaaaattctcaagcagttaatcgctgacgtgacccttgacccagaaacagcccaccctaacctcgttctgtctgaggaccggaaatccgtgaagttcgtggaaaccagactcagggatttacccgacaccccccgacgatttactttctatccctgtgtgctcgccaccgagggatttacgtccggacggcattattgggaagttgaggtgggggataagacacattgggcggtgggggtttgtcgggactctgtgtcccggaagggagagcttactccactgcccgagactggatactggcgagtacgcctttggaacggggacaagtacgcagcaaccactactccgtttacccccctgcacataaaggtgaaacctaaacgggtggggatcttcctggattacgaggcagggaccctgagtttttacaatgtgactgataggtcacatatctacacgtttacggacacattcaccgaaaagctatggcctctcttctacccagggatccgcgcagggcgtaaaaatgcagcccctctgacgatccggcctccaactgactgggagtag

SEQ ID NO: 208889 - DNA, 1557 bp, Artificial Sequence
  derived and/or modified sequence
atggccgaaacatctctcctggaagcaggagccagcgcagccagtactgctgctgccctcgagaatctgcaggtcgaagcctcttgtagcgtttgtctggaatacttaaaggaacctgtgattatcgagtgcggtcacaacttttgtaaagcctgtataacccgatggtgggaggacctggagagggacttcccatgcccagtgtgcagaaagacatccaggtataggtctctgagacctaataggcaattgggaagtatggtagagatagccaagcagttgcaggctgtcaagagaaagattcgggatgagtccctatgccctcaacatcacgaggctctgtccctgttctgctatgaagatcaggaggccgtctgtctgatctgtgccatctcacacacacaccgggctcatactgttgttcccttagacgatgccacacaggaatacaaagaaaagctacagaagtgtcttgagcctctggagcaaaagctccaggaaattactaggtgcaagtcctctgaggagaaaaagcccggtgagttaaaaagactggtggaaagcaggcggcaacagatactcagggagttcgaagaactccacaggagactagacgaggaacagcaggtcttgctttcgaggctggaggaggaagagcaggacatactgcagcggctgagagagaacgcagcacacctgggagataaacgcagagatctcgcccatctagctgccgaggtggaaggcaaatgtctgcagtcagggttcgagatgttgaaagatgtaaagtcaactctcgaaaaaaacatacccagaaagtttggcggttccttgagtacgatctgtcccagagaccacaaagctctgctgggacttgtgaaagaaattaaccgatgtgagaaggtgaagacaatggaagtgacttccgtcagcatcgaactcgaaaaaaacttctccaacttccctcggcagtacttcgcactccgcaagattctcaaacaactgattgccgatgtgacactggacccagagaccgctcatcccaacctcgtgctctccgaggaccgcaaatctgtgaagtttgtcgaaaccagacttagagatttacccgatactcctcgtagatttaccttttacccctgcgtcttggctactgagggattcacatcagggcgacactattgggaggtcgaggtgggagacaagacgcactgggcagtgggagtatgcagagatagcgtgagccgtaaaggcgagctaacccctctgcccgagacaggttactggagggtgaggctctggaacggcgataagtacgccgctaccacgacgcccttcacccccctgcatattaaggtgaaaccaaagcgggtcggaatattcttggattatgaggctggtacgctcagtttctacaatgtcaccgatcgctcccatatttacacatttacggacacattcacagaaaaactgtggcctctattttatccagggattcgagccggacgaaagaacgctgcccctctaactatcagaccccctaccgattgggaatag

SEQ ID NO: 208890 - DNA, 1557 bp, Artificial Sequence
  derived and/or modified sequence
atggcagaaacatccctgttggaggccggtgcctccgctgctagtacagcggcagccctggaaaatctgcaagtggaagcatcctgcagtgtctgtctagagtatctcaaggagcccgtaatcatcgagtgtggacacaacttctgcaaggcatgtatcacaagatggtgggaagatctagagcgcgactttccctgtccagtgtgccgcaagaccagtcggtaccgtagccttcgtcccaatcggcagctggggtctatggtcgagatcgccaagcagctccaggctgttaagaggaagattagagatgaaagcctgtgccctcagcatcacgaagccttaagtcttttctgttacgaagaccaggaggctgtttgcttgatttgtgccatctcccacactcaccgcgctcataccgtagtgccactggacgacgccacgcaggaatacaaggagaaattacagaagtgtttggaaccactcgaacagaagttgcaagaaattacccgttgcaagagctccgaagagaagaaacccggagagcttaaacgtctcgtggagagcaggcgccaacagattcttcgggaattcgaggaactccaccgccgtctcgacgaagagcagcaggtgcttttgtcgagactggaagaggaggaacaggacattctccagcgactgagagagaatgcagctcacctgggagacaaaaggagagatctagctcatttggcagccgaagtcgagggcaaatgcctgcaatcaggttttgaaatgctcaaagacgtaaagagtaccctcgaaaaaaatataccaaggaagttcggaggctccctaagcaccatctgcccacgtgaccataaagccctgctcggccttgtgaaagaaatcaacaggtgcgagaaagtcaagaccatggaggttacgagtgttagtatagagctcgagaagaatttctccaatttcccacgccagtacttcgctttgcgcaagattctcaagcaacttatcgctgatgttacgctcgaccccgagaccgcgcaccccaatttggttctgtccgaggacaggaagagcgtgaagttcgtggaaactcgcctacgggatctgcctgacacacctcggaggtttactttttacccatgtgtcttggcaacagagggatttacatccggacggcattattgggaagtggaggtaggggataagacacactgggccgttggtgtgtgtagagacagcgtatctcgcaagggcgaacttacccctttgcctgagacaggatactggagggtgcgcctttggaacggagacaaatacgcagccacaaccacacccttcacaccactgcacatcaaggtaaaacctaagcgggtggggattttcctggactacgaagcgggtaccctgtctttctacaacgtgaccgatagatcccatatttataccttcacagacaccttcactgagaaactatggcccctcttctatcccggaatcagggcgggaagaaagaacgccgcacccctaaccatacgaccacccactgactgggaatag

SEQ ID NO: 208891 - DNA, 1557 bp, Artificial Sequence
  derived and/or modified sequence
atggccgaaacatccctgttggaagcaggggctagcgctgcctccacggccgctgcactggaaaaccttcaagtggaagcaagttgctctgtgtgcttggagtacctgaaggagcctgttattatcgagtgtggccacaatttctgcaaggcctgcatcactcggtggtgggaggacttggagagagactttccgtgtccagtgtgcaggaagaccagtcgttaccgctcactgaggccaaatcgtcagctcggctcgatggtggagatcgctaagcaactgcaagccgttaagagaaaaattagagacgagagcctgtgccctcagcatcacgaagccttgtcactgttctgctacgaggaccaggaggccgtctgcctgatttgcgctatcagccatactcatcgcgcacacaccgtggtccctctggatgatgccactcaggagtacaaagaaaagttacagaagtgcttagagcctcttgagcagaagctgcaagagatcacaagatgtaagagcagcgaggagaagaagccaggcgagttaaagagactggtggagtcaaggcgccagcagatactccgggagttcgaagagcttcaccggagactggatgaggagcaacaggtgctattgagccggctggaagaagaggaacaggacatcctgcagcgtttgcgcgaaaatgccgctcacctgggtgacaagagacgggaccttgcccacctcgctgcggaggtggaagggaagtgcctgcagagtggcttcgaaatgctcaaagatgtcaagagcacattggagaagaatatccccagaaagttcggaggatcactgtctacaatttgccccagagaccacaaagctctgctaggtctggtgaaagaaattaaccggtgtgagaaggttaagactatggaggtgacatccgtttctatcgagctggagaagaacttcagcaattttccaaggcagtactttgcattgcggaaaattcttaaacaactcatcgcggacgttaccctcgaccccgaaacggctcatcccaaccttgtgcttagtgaggatcgaaagtccgtgaagttcgtggaaaccagattgagggacctgccagatacgccgaggagattcactttttacccttgtgttctggcaaccgaaggtttcacatccggaaggcattattgggaggtagaggtgggagataaaacacactgggccgtcggggtgtgccgggatagtgtgagtcggaaaggcgagctgacccccctccctgagacgggctattggcgcgtgcgattatggaatggagacaagtatgcagctaccacaacaccattcacgcccctccacattaaagtgaagccaaaaagggtcgggatctttctggactacgaagctgggaccctgtctttctacaacgttaccgatcgaagccatatatatacctttaccgatacatttactgaaaagttatggccactcttttatccaggaatccgcgcaggacgcaaaaacgccgctccgcttaccattcggcctcctaccgattgggaatag

SEQ ID NO: 208892 - DNA, 1557 bp, Artificial Sequence
  derived and/or modified sequence
atggctgagacatccctgttggaagctggcgcttccgcggcatcgactgccgcagctctcgaaaatctgcaggtagaagcaagttgttctgtctgtttagagtatctaaaggaacctgtcattatcgagtgtgggcataatttttgcaaggcttgtatcacccgctggtgggaggatctagagcgagatttcccttgtcctgtgtgcagaaaaacttctcgctaccgctccctacggcctaatcgtcagttagggtccatggtggaaatcgccaaacagctccaggcagtgaagagaaaaatccgggacgaaagtctttgtccacagcaccatgaggccttgtctctgttctgctacgaggaccaagaagccgtctgcctgatttgcgctataagccacacccacagggctcatacagtggtgccactcgatgacgccacccaggagtacaaggagaaacttcagaagtgcctggaacctctcgaacaaaagctccaggagattacaaggtgtaaatccagtgaagagaagaagcccggtgaacttaagcgactggtggagtcacggaggcaacagatactccgcgagttcgaggaactgcaccgcaggctggatgaggaacagcaagtccttttatcaagacttgaggaggaggagcaggacattttgcagcgccttagagaaaacgccgcacatctcggagacaagcggcgagatctcgcccacctggcggctgaggtggaaggaaagtgtttgcagagcggttttgagatgcttaaggatgtgaaaagtacccttgagaaaaatatcccgagaaaattcggcggaagcctgagcacaatctgccctcgcgaccataaagcattgctgggactggttaaagagattaacagatgcgagaaggttaaaacgatggaggtgacttctgttagtattgaactagagaagaatttctccaactttcctcgccagtactttgctttgaggaagattctcaagcagttgatcgccgacgtgaccctggaccctgagaccgcccaccctaacttagtgcttagcgaagatagaaagtccgttaagttcgtggaaactaggctgcgggatctccccgatacaccaaggcggttcaccttttacccttgcgtgctggcaacagaaggatttacaagcggcaggcactattgggaggtggaagtgggagacaagactcattgggctgttggagtttgcagagattccgtgtcaagaaaaggcgagctcaccccactgcccgaaacaggttactggcgtgtaagactctggaatggtgacaagtacgcagccactactacacctttcacaccattgcacatcaaagtcaaacccaagcgggtgggaattttcttagactatgaagctgggactctctccttctacaatgtaacagataggtcacacatctatacattcacagacaccttcacagagaaactgtggcctctgttttacccaggcatccgcgctggaagaaaaaacgctgcgccactcacaattcggcctcctacggattgggaatag

SEQ ID NO: 208893 - DNA, 1557 bp, Artificial Sequence
  derived and/or modified sequence
atggccgaaacttctctgctggaagctggagcatctgccgcatcaacagcagcggctcttgaaaacctgcaggtcgaagccagctgctccgtctgcctggagtatttgaaagagcctgtgataatcgagtgcgggcacaacttctgtaaagcctgtattacacgatggtgggaggatttggaaagagattttccctgtcctgtctgcaggaagactagcagataccgttccctgcgccctaacaggcagctgggaagtatggtcgagattgcaaaacagttacaagccgtgaagcgaaaaattagggacgagagcttgtgtccccagcaccatgaggctctcagcctgttttgttatgaagatcaggaagccgtgtgtctgatctgtgccatctctcacacccatagggcgcacacagtggtcccattggacgacgccacccaggagtataaggagaaacttcagaagtgcctggagcctctggagcagaagctgcaggagattaccaggtgcaaaagcagcgaggaaaaaaaacccggtgagctcaaacgattggtggagtcgagaaggcagcaaattctgagagaatttgaggaacttcacagacgtctagacgaggaacagcaggtgttgttgtcacgactggaggaggaagagcaggacatacttcagcgtctccgggaaaatgctgcccatttgggggataagcggagggacctggcccacttagcggctgaggtggaggggaagtgtctgcaatccgggttcgaaatgctaaaggacgtcaaatctaccttagagaaaaacattcctcggaagttcgggggaagcctgtcgaccatctgtccccgtgaccacaaggccttgctggggctggttaaggagatcaatagatgtgagaaggtcaaaacgatggaggtgaccagtgtatcaatcgagttagagaaaaatttttccaactttccccgtcagtactttgcccttagaaaaattctcaagcagcttatcgctgatgtgacactagatccagagacggcacaccctaacctggtgctgtcagaggaccggaaatccgttaaattcgtggagacccggctgagagatttacctgacactcccaggaggttcactttttacccatgcgtgctggccaccgagggctttactagtggacgccattactgggaggtcgaagtgggggacaaaactcattgggccgtgggggtgtgccgggattccgtttctcgtaaaggagagctgactccactgccggaaacgggatattggagagtccgattgtggaacggcgataagtacgccgctacaacaactcctttcacaccactgcatataaaagtgaagcccaagcgggttggaatttttctcgattatgaagccggaacgcttagtttttataacgtcacggacaggagtcacatatataccttcacagatacattcacagaaaagctctggcccttgttctaccccggtattcgcgcaggcagaaaaaacgcagcccctctgactatcaggccgccaactgactgggagtag

SEQ ID NO: 208894 - DNA, 1557 bp, Artificial Sequence
  derived and/or modified sequence
atggctgagactagcctgcttgaggctggggcatccgccgctagcaccgccgctgctctggaaaatctacaggtggaagcgagctgttctgtctgtcttgaatacctgaaagagcccgtcataatagagtgcggtcacaatttttgtaaggcatgcattacacggtggtgggaggatctggaacgcgactttccgtgcccagtatgccggaaaacctctagatatcggagtctccggccaaaccgccagttaggaagcatggtggagatcgccaagcagctacaggccgtaaaacgtaaaattcgagacgaaagcctgtgcccccaacaccatgaggcactctctctgttctgttatgaggaccaggaggccgtttgcttaatctgtgctatttcccacactcaccgcgcacacaccgttgtgccactggacgatgctacccaggagtataaggaaaagctccagaaatgcctcgagcccctagaacagaagctacaagagattacccgttgtaaatcttctgaggaaaaaaagcctggcgagttgaaacggcttgtggagtcacggcgtcaacaaatcttacgggaattcgaagaactacaccggaggctagatgaggaacagcaggtactgcttagccgcctggaggaagaggaacaggacatcctgcaacggctcagagaaaacgcagctcatctgggtgacaaacgaagagatttggcccatctggcagcagaagtcgagggaaagtgcctccagtctgggttcgaaatgctgaaagacgtcaaaagcacactggagaagaatatcccgcgaaagttcgggggtagcctctcaacaatctgccccagggaccataaggcccttctggggttagtgaaggagattaataggtgcgaaaaggtcaagaccatggaagtaacaagtgtgtccatcgagctggagaaaaacttttcaaactttccaagacagtatttcgctcttaggaaaatactgaagcaattgatcgcggacgtgaccttggaccctgagacggcccaccccaatctggtgttgtcagaagacagaaaaagcgttaaattcgtagagactcgccttagagacctgcctgatacacctagacggttcaccttctacccatgcgttctcgctactgaaggtttcactagtggacgacattactgggaagtggaagtcggcgacaaaacccactgggcagtcggagtatgcagggactccgtgtcccgcaagggtgaactcactccccttcctgagaccggatactggcgtgtgaggctttggaatggcgataagtacgccgcaactaccacgccctttacccccctccacattaaggttaaacccaaacgggtggggatctttctggattacgaagctggcaccttgtccttctataacgtcaccgaccgatcccacatctacacattcaccgacactttcaccgagaagctgtggccattgttttatccgggaattcgcgctggtagaaaaaacgctgctccactgacgatacggcctcccaccgactgggagtag

SEQ ID NO: 208895 - DNA, 1557 bp, Artificial Sequence
  derived and/or modified sequence
atggcagagacatctctgctagaggccggagctagcgccgcttcgactgcagcagcactcgagaaccttcaggtcgaagcctcctgttctgtgtgtttggaatatctgaaggagccggtgatcatagaatgtggccataacttctgcaaagcgtgtattacccggtggtgggaagacctcgagagagactttccttgtcctgtttgcaggaaaacctctaggtacagaagtctgcggcctaaccgtcaacttggctcaatggttgagatcgcaaaacaactccaagccgtgaaaaggaaaattagggacgaaagtctgtgtcctcagcatcacgaggcactttctctgttctgttatgaagaccaggaggccgtgtgtttgatttgcgcgatctctcacacccatagggctcacaccgtcgtgccactggatgatgccacacaagaatacaaggagaagttacagaagtgtctggaaccactcgagcagaaacttcaggagatcaccaggtgtaagtcttccgaagagaagaagccaggagagctgaagcgtctagtcgaaagccggagacagcaaatcctccgagaattcgaggaactgcatcggaggcttgacgaagagcagcaggtgctgctaagtaggcttgaagaggaggagcaggacattctccagaggctgcgcgaaaatgctgcacacctgggcgacaaaagaagagatcttgcccacttggccgcagaagtcgagggcaagtgccttcagagcggctttgaaatgttaaagccggtgctttcagcgagggagaagaatataccacggaagttcggtggctctttgtcgacaatctgccctcgtgaccataaggctttgcttggactggtgaaggaaatcaacagatgtgaaaaagtaaagacgatggaggttaccagcgtttcaatagagctggagaaaaatttcagcaactttcctcggcagtacttcgcactgagaaaaattctcaagcagctgattgccgatgttaccctcgatccagagaccgctcacccaaatctggtactaagcgaagacagaaaatcagtgaagtttgtggaaactcgcctgcgagacctccctgacactccacgacggttcaccttttacccatgcgtcctggcaaccgagggatttaccagcggccgtcattattgggaggtagaagttggcgataagactcactgggccgtcggcgtttgcagagatagcgtatcgcgcaagggggagcttacccccctgcctgaaactggatattggcgcgtcagactgtggaatggagataagtacgccgcaacaactactccttttacacccctgcacatcaaagtgaaacctaagcgggtgggcatcttcctggactatgaagcaggcactttatcattttacaatgttaccgataggagtcacatttacaccttcacagacacgtttacggagaagctgtggcccctgttttatccaggcatcagggcaggacggaaaaacgcagctccactaacgattcgcccacccacagattgggagtag

SEQ ID NO: 208896 - DNA, 1557 bp, Artificial Sequence
  derived and/or modified sequence
atggccgagacctcactgttggaggctggtgcctcggcggctagcacagctgcagccttggaaaacctgcaggtggaggcttcatgttcagtgtgccttgaatacctcaaggaacctgtaatcatcgagtgcgggcataatttctgcaaagcttgcattactaggtggtgggaggaccttgaacgagattttccctgccccgtgtgccggaaaactagtcgctaccgcagtcttaggcctaaccgccagttggggtctatggtggagattgccaagcagctccaggctgttaagcgaaagattcgggacgaatccctgtgcccacagcatcatgaggcactgtctttgttctgttacgaggaccaagaagccgtgtgcttaatttgcgctatctcgcacacacaccgagcccacacagtggtgccgctggacgacgctacccaggaatataaagaaaagctgcagaaatgccttgagcccttggagcagaaactccaagagatcacgaggtgtaagtcaagcgaggaaaaaaagcccggagaactcaaaaggctcgtcgaatctcgacggcaacagatcctaagagaatttgaagagctccaccgtcgcctggacgaagaacaacaagtgctgctctcccgtctcgaagaggaggagcaggacatcctgcagcggctcagagaaaacgccgcacacctgggcgataagagacgagacctggcacacctggccgctgaggtggaagggaagtgccttcaaagtggattcgaaatgctcaagcctgtcctgagtgctcgggaaaagaacattcccagaaaatttggaggcagcctatctacaatctgccccagggaccataaagccctgttaggacttgttaaagagattaatcgatgcgagaaagttaagaccatggaggtgacgtccgtgtctattgagctcgaaaaaaacttcagtaatttccccaggcaatattttgctctcagaaaaattctgaagcagctgatcgccgacgtgactctcgaccccgaaaccgcccaccctaacctggttctgagcgaggatcgaaaaagtgtgaagtttgttgagacaaggcttagagacctgcctgatactccccgaaggtttacgttctacccctgcgttctcgctaccgaaggatttacaagcggtagacattattgggaggtggaagtgggtgacaagacacactgggctgtgggggtatgcagagactcggtgtcaaggaagggcgaattaactcctttgccagaaacagggtactggcgcgttcgactgtggaatggggacaagtacgcggctactactacaccctttaccccgttacatatcaaagttaagcccaaaagggtgggcatcttcctggactacgaagctgggacactttccttttacaatgtgacagaccgctctcacatttacaccttcacagacacgttcactgaaaaactttggcctcttttttatcctggcattagagcaggacgaaagaacgctgctccactcacaatcagacctcctaccgactgggagtag

SEQ ID NO: 208897 - DNA, 1557 bp, Artificial Sequence
  derived and/or modified sequence
atggcagaaacaagcctactggaagccggtgcatcggctgcaagcactgctgccgcactagaaaaccttcaagtggaggccagttgcagcgtgtgtctggagtacctaaaagaacctgttattatcgagtgcgggcataatttttgcaaagcctgtattacacgctggtgggaagatctggaacgagacttcccatgccctgtgtgcagaaagacctctagatatagatctctccgccctaaccgacagctcgggagcatggtagaaatcgctaagcaactccaagcggtgaaaagaaagatccgcgacgaaagcctatgtcctcagcatcacgaggcattaagcctgttctgttacgaggatcaggaggcagtttgcctgatttgcgccattagccacactcatcgggctcacaccgtcgtgcccctcgacgacgccacccaggagtacaaagagaagcttcagaagtgcctggagcctttagaacagaaactgcaggagatcacacgctgtaagtccagtgaggagaaaaaacctggggagctgaagcgcctggtggaaagccgaaggcagcagatcctgagagagttcgaagagttacatagacggcttgatgaagagcaacaggtgctgttatccagattagaggaggaagaacaggatattttacagcgactcagggaaaacgctgctcatctgggagacaaacggcgagaccttgcgcacctggctgctgaagtggaggggaaatgcctccagtctggctttgaaatgctgaaagacgttaagagtacactggaaaagaatattcccagaaaattcggcggtagccttagtaccatctgccccagagaccacaaagccctgttaggcctcgtgaaagagatcaaccgttgcgagaaggttaagaccatggaagtgacttcggtgtccatcgaactagagaagaatttttctaattttccccgacagtacttcgccttgagaaaaattttgaagcagctgatcgcggatgttacgctggaccccgagacggcccacccaaatttagtgctttctgaagatagaaagagcgtaaagtttgtggagaccagactaagggacttgcccgacactccaaggcgattcacattctatccctgcgtccttgctacggaaggctttacgtctggtaggcactactgggaagtagaggtgggggacaagacccactgggcggtgggcgtttgtagagactcggtaagcaggaagggagaacttacccccctgccggaaacaggatactggcgggtgaggctctggaacggagataaatatgcagccacaaccacaccttttactcccttgcatatcaaggttaaacccaagcgcgtcgggatatttttggactatgaggccggtactctctcattttacaatgtaaccgatagatctcatatctacacttttacggacaccttcacagagaagctctggcccctattctatccaggaattcgtgccggtcgaaagaacgccgctcccctaacaatccggccacctacagactgggagtag

SEQ ID NO: 208898 - DNA, 1557 bp, Artificial Sequence
  derived and/or modified sequence
atggccgaaactagcctcctggaggctggagcatccgcagcctcaacagcagcggcactggagaaccttcaggtagaagctagctgctcagtgtgcctcgaatacttgaaggaacctgttattattgagtgcggccacaacttttgcaaggcatgcattacaagatggtgggaagacctggagagggattttccatgtcctgtttgtcgtaaaacttcacgctaccgtagcctcagacctaataggcagttgggtagcatggtcgaaatagccaagcagctgcaggccgtgaaaagaaaaattcgtgacgagtcactgtgtccacaacaccacgaggctttatcgctgttttgctacgaagaccaggaagccgtctgcctgatctgcgcgatttctcacacgcacagagcccacactgtcgttccactagatgacgcgacgcaggaatataaggaaaagctccagaagtgtctggagccactcgaacagaaactacaggagataactcgctgtaagtcatccgaagaaaaaaaacctggcgagctgaagcggctggtggagagtcgtcgtcagcagatcttacgggaattcgaggagctccatcgacggcttgacgaggagcagcaggttctgctgtcacggttggaggaggaggagcaggacatcctgcagcgcttgcgcgagaacgcagcccatttaggagataaacgaagggatctggcgcacctggcagcagaagtcgaagggaagtgtctccagtctggatttgagatgcttaaagacgtaaagtcaactttagagaaaaacatacctagaaagttcggcggatcactctcaactatttgtccaagagatcacaaggctctgctgggactggtcaaggaaatcaaccgttgcgaaaaggtgaagacaatggaggttactagcgtgtcaatcgaactggaaaagaatttttcgaacttcccaaggcagtacttcgcattacggaagatattgaagcagctgatcgcggacgtgaccttggatcccgagaccgcccaccccaacctggtgctgtccgaggacagaaagtctgtaaaattcgtggaaaccagactaagggacctaccagacacacccagaaggtttaccttttatccctgcgttctggctactgaaggcttcacaagtggacggcactattgggaggtggaggtcggtgacaagacacattgggccgtgggcgtctgccgcgactctgtgtcaaggaagggcgaactcaccccattgcccgagactggttattggagggttagactgtggaatggggacaagtacgctgccactacgacccctttcacccccttgcatatcaaggtgaagcccaagcgagtgggtatttttctcgactacgaggccggtactttgtcattttacaatgttacagaccgcagccacatttacacatttactgacacattcacagagaaactgtggcctctgttctaccccggaatccgggctggcagaaaaaatgccgctccactcacaattcgacctcccaccgattgggagtag

SEQ ID NO: 208899 - DNA, 1557 bp, Artificial Sequence
  derived and/or modified sequence
atggctgaaacctctctgctggaggctggggcaagcgccgcaagtactgccgcagccctggagaatctgcaggtcgaggcgagctgcagcgtgtgtttagaatacctgaaagagcccgtgatcattgagtgcggtcacaacttctgcaaggcttgcattactaggtggtgggaggacctggagcgggatttcccctgcccagtctgcagaaaaacttctagatatcggagcctaagacctaatcgacagcttggcagtatggtggaaatcgctaagcaactgcaggccgtgaaacggaaaataagggatgaaagcttatgcccgcaacaccacgaagcgctgtccttgttttgttatgaggaccaggaagccgtgtgtctgatttgcgctattagccacacccacagagcgcacactgtggtgcctctggacgatgctacccaggagtataaggagaagttgcagaaatgcttggagccgttagagcagaaattacaagagatcacacggtgtaaatcatccgaggagaagaaacctggtgaactgaagcgcctcgtggaaagccgacggcagcagatcctgcgcgagttcgaagaacttcaccgccgattggatgaggagcagcaggtcctgttatcacggttagaagaagaggagcaagacattctccagcggttgcgcgagaacgccgctcacctcggcgataaaagaagggacctggctcacctggcagccgaggtcgagggcaagtgtctgcagagcggcttcgaaatgttgaaaccggtcctctccgccagggagaaaaacatccctagaaaatttggcggtagcctaagcaccatctgtcctagagaccataaagccctgcttgggctggttaaggaaataaatcggtgtgagaaggtcaagacaatggaagtgacctctgtatccatcgagctggagaagaattttagtaacttccccagacagtacttcgcactccgcaaaatcttaaaacagctcattgccgacgtgaccctcgaccctgagacagcccatccgaacctggtgctgtccgaagaccggaaatctgtgaaattcgtggagacacgcttgcgagacctccctgacacacctcggaggttcactttttatccttgcgtgcttgcaacagagggttttacatctggtagacactactgggaagtggaagtcggggacaagacacattgggccgttggcgtgtgcagggacagcgtcagcaggaagggagaactaacacctttgcctgaaaccggatattggagagttaggctgtggaacggcgacaaatatgcggcaacgactacaccttttactcccctgcacatcaaagttaaaccaaagcgggttggcattttccttgattatgaagctggcacgctgtcattctataacgtgacagatcgctctcacatttacacctttactgacacattcaccgagaagctctggcctcttttctatcctggaatcagagcaggcaggaaaaacgcagcccctttgacaattagacctccaactgactgggagtag

SEQ ID NO: 208900 - DNA, 1557 bp, Artificial Sequence
  derived and/or modified sequence
atggcagagactagcctactcgaagctggggcttcggctgccagtacggccgcagctctggagaatctccaggtggaggccagttgttctgtgtgtttagagtacctaaaggaacccgtaatcattgagtgcggccataacttttgcaaggcctgcatcaccaggtggtgggaggacttggaacgcgactttccttgtcctgtgtgccgtaaaacctccagatatcgtagccttcgcccaaaccgtcaactgggatccatggtggaaattgccaagcagctgcaggccgtgaagcgaaagattcgggatgagagtctctgtccacaacaccacgaggccttgagcttgttctgctatgaggaccaggaagccgtgtgtctgatatgcgctatctctcacactcaccgagctcacactgttgtgcctttagatgacgcaactcaggagtataaagagaagttgcagaaatgcctggaacccctagagcagaagctgcaagaaataactaggtgcaagtcaagcgaggaaaagaagcctggcgagttgaaacggctggttgagtcccgaagacagcagattctcagagaattcgaggaactgcataggaggctggacgaggaacagcaggtgctcctgtcccgccttgaagaagaagagcaggacattctgcagcgattgcgcgagaatgctgcccaccttggcgacaaaagaagggatttggcccacctggcagctgaggttgaggggaagtgcctgcagtcaggcttcgaaatgttgaaggatgtgaagtcgaccctggaaaaaaatatcccaagaaaatttgggggatctcttagcactatttgcccaagggaccataaagccctcttgggtctggtaaaagagattaacagatgtgagaaggtgaagacaatggaagtcacttccgtttccatagagctggagaagaatttcagtaacttcccccgacagtactttgccctccgcaagatccttaagcagcttattgctgacgtgaccctggatcctgaaaccgctcatcctaacttagtgctgtcagaggaccggaagtccgtgaaattcgtggagacacgacttcgcgatctccccgataccccgagaagattcactttctatccctgtgtcctagccacagagggctttaccagcggcagacattactgggaggtagaggtcggcgataagacgcattgggcagttggcgtgtgccgagactcagtgtcccgcaaaggcgaattaacccccctgcccgaaacgggctactggagagtgcggctttggaacggcgacaaatacgccgcaaccactacaccattcacccccctgcatatcaaggtcaagccaaagagggtggggattttcttggactacgaggctggtactttatccttttataatgtgactgataggagtcacatttatacgttcaccgacacttttacggagaagctatggcctctcttttacccaggcatcagagctggacgaaaaaatgccgcacccctaaccatcaggccccctacagactgggagtag

SEQ ID NO: 208901 - DNA, 1557 bp, Artificial Sequence
  derived and/or modified sequence
atggcagaaacttcattgctggaggctggcgcttcggccgcttcgaccgccgctgctctcgagaacctccaagtggaggcctcctgttcagtctgcctggaatatcttaaggaaccagtcattatcgagtgtggacataatttttgtaaggcctgtattacgagatggtgggaagatctggaacgagattttccttgcccagtatgccggaagacctcacgctaccgctctctaagacccaatcgccagctggggagtatggtggagatcgcaaagcaactgcaggcagttaagcgcaaaatcagggacgaaagcctctgtcctcaacatcacgaggcattatcattgttctgttatgaggatcaggaggctgtgtgtctgatctgtgctattagccatacccatcgagcccataccgtagtacctttggacgatgctactcaggagtacaaggagaagctccagaagtgtctagagccattagaacagaaactgcaggagattacacggtgcaaaagctctgaagaaaaaaaacctggggaactgaaaaggctggttgagagccggagacagcagatcctccgagaatttgaagaactgcacaggagattggacgaagaacagcaggttctgctgtcccggctcgaagaggaggagcaggacattctgcagaggctgagagagaacgcagctcaccttggtgataaacgacgagatctggctcacttggccgctgaggtggagggcaaatgtctgcagtcaggatttgaaatgctgaagcctgttctatccgctcgcgagaagaatataccgaggaaattcggaggttctctgtctaccatctgtccaagggaccataaagcactcctggggctggtaaaggagataaaccgttgcgaaaaggtgaagactatggaggtgacttctgtcagcattgaactggagaagaacttttccaattttcccaggcaatacttcgcccttcgtaagatcttgaagcagttgatcgcagacgttaccctggaccctgaaactgcacacccaaacctcgtgttgagtgaagatagaaaaagcgtcaaatttgtggaaactcgattgcgggacctccctgatacacccaggagatttaccttctatccttgtgtgctggcaaccgagggttttacctccgggagacactactgggaggtggaggttggtgacaagacacactgggccgttggagtttgccgcgacagcgttagcaggaagggggagcttacgcctttacctgagacaggttactggcgggtgcggttgtggaacggagataagtatgctgccactactacaccattcaccccactccacattaaagttaaacccaaaagggtggggatttttctcgattacgaagctggtacactgtccttctacaacgtcaccgacagatcccatatatatacttttaccgacacctttactgagaagctctggccactgttctatccgggaatcagggccggaaggaaaaatgcggctcctttgactattagacctcctacagattgggagtag

SEQ ID NO: 208902 - DNA, 1557 bp, Artificial Sequence
  derived and/or modified sequence
atggccgaaaccagtctcctggaagccggagcttccgctgcctctactgccgctgctctggagaacttacaggtggaggccagttgcagcgtgtgtctggaatatctgaaagagccagtcataattgaatgcggacataacttttgtaaggcttgcattactagatggtgggaggatctggagagggactttccctgcccggtgtgcaggaaaacctcacggtaccggagtctccgcccaaatcgccagctgggttccatggtagaaatcgcaaaacaattgcaagccgtgaaacgcaagattcgcgacgaatccctgtgtccacagcaccacgaagccctgagcctgttttgttacgaggaccaggaggcagtgtgcctgatctgtgcaatatcccacacccacagagctcataccgtagtgcccctagacgacgccactcaggagtataaagagaaactgcagaagtgcctcgagccccttgagcaaaagcttcaggagattacccgctgcaagtcgtccgaggagaagaaacccggtgagctgaaaaggctcgtggagtcgcggcgacaacaaattttgagagagtttgaggagcttcatcgcagactggacgaagaacagcaggttttactgagcaggctagaggaggaggagcaagatatcctgcaaaggctccgcgagaatgccgcacatttaggagacaagcgacgggatctggcacacctggccgcagaggtcgagggaaagtgtctgcagtctggatttgagatgttgaagccggttctgtccgcacgagagaagaacatacccaggaagttcggcggaagcctaagcaccatttgtccaagagatcacaaggccttgctcgggcttgtgaaggaaatcaaccgttgcgaaaaggtgaagacgatggaagttaccagcgtatccatcgaactcgaaaaaaatttttctaactttccgagacagtatttcgccttgcgcaaaatccttaagcagctgattgccgatgtgacactcgaccctgaaaccgcccacccaaatctggttctgtctgaagataggaaatccgtcaagttcgtcgagacacgcctgagagacctgcctgacactcccaggaggttcaccttttacccctgcgtgctggccaccgaaggttttacttccggccgacattactgggaggtggaggtgggtgataaaacccattgggctgttggggtttgcagagactcagtgagccgtaagggtgagctgacgcccctgccagaaacaggttactggcgggttagattgtggaacggcgataaatacgccgctactacgacaccctttacgcccctgcatatcaaggtcaagcccaaaagggtcggcatcttcctggactacgaagcaggcactctcagtttttacaatgtcaccgatagatctcatatctacaccttcactgatactttcaccgaaaagctctggccactattctatcctgggattcgcgctggcaggaagaacgcagcccctcttactatacgcccacccacagactgggagtag

SEQ ID NO: 208903 - DNA, 1557 bp, Artificial Sequence
  derived and/or modified sequence
atggctgagacctctctgttagaagctggcgcaagtgcagcatccaccgccgctgcgttagagaacctgcaggtggaggcttcttgttccgtgtgtcttgagtacttgaaggagccagtgattatcgaatgtggacacaatttttgcaaggcctgtatcactaggtggtgggaagacctggagagggattttccttgccctgtttgccgaaaaaccagccggtatagaagcttgcgtccaaaccggcagttgggaagtatggtggaaatcgctaaacagctgcaagccgttaagcggaagattcgggacgaatccctgtgccctcaacaccacgaagccctttccttattctgttatgaggatcaggaggccgtctgtttgatatgtgcaatatcacacacacacagagctcacactgttgtgcccttggacgacgccacacaggaatacaaggaaaagctgcagaaatgtctcgagcccttggagcagaaactccaggagatcacaagatgtaagtcttctgaagagaagaaacccggagagcttaaaagactggttgaaagcaggcgccagcagattctcagggaattcgaagagctgcatcgcaggctggacgaggaacagcaggtgttgctttcacgattagaggaggaggaacaggatatactgcaaaggctacgcgagaatgctgctcatctgggcgacaagagacgggatctggcccacctagctgcggaagtggagggcaagtgccttcagtcaggctttgaaatgctgaaagacgtgaagagtacccttgaaaagaacatcccacggaagtttgggggatccctgtcgactatctgcccgagggaccataaagccctgcttggcctggttaaggagattaatagatgcgagaaggtgaagacaatggaggtaacgtccgtgagtattgagctcgagaagaacttctccaactttccacggcaatactttgcacttcgcaagatcttaaagcagctgattgccgacgtcacacttgatcctgaaactgcacaccccaacctagtgctctccgaggataggaaatctgtgaagttcgtggagactcggttgcgcgacctgccagatacaccaaggaggttcacgttctacccatgcgtgctcgccaccgaggggttcacgtccggcaggcactactgggaggtcgaggtgggcgacaagactcactgggccgtgggggtgtgccgtgacagcgtaagcagaaaaggcgaactcacaccacttcccgaaactgggtactggcgcgttcgcttgtggaacggtgacaagtatgccgcaaccacaactccattcacacctctgcacataaaggtgaaacctaaacgtgtgggcatctttctcgattacgaggcaggcacattaagcttctacaatgtgactgacagaagtcacatctacaccttcacagataccttcaccgaaaagttatggccactgttttaccctgggatccgcgctggaagaaagaacgccgctcccctgacgattagaccccctactgattgggagtag

SEQ ID NO: 208904 - DNA, 1557 bp, Artificial Sequence
  derived and/or modified sequence
atggccgaaacatcactcttggaagctggtgccagcgccgcatccaccgccgcagccctcgagaaccttcaagtggaggcctcctgctctgtatgcttagagtatctaaaggaaccagtgataattgagtgtggacataatttttgcaaggcttgcatcacgaggtggtgggaagatctagaaagggattttccctgccccgtgtgccgcaagacctccaggtatcgcagcttacgccctaaccgacagctgggatctatggtggaaatagcaaagcagctacaggctgttaaacgcaagattagggacgaaagtctgtgtcctcagcatcacgaagcgctgtctctcttttgttacgaagaccaagaggcggtctgcttgatctgtgccatatctcacacccatcgagcccacactgtggtgcccctggacgacgcgacgcaagaatataaggaaaaactgcaaaagtgtctggagccccttgaacaaaaacttcaggaaatcaccaggtgcaaatcttccgaagaaaagaagccaggggaactcaagcggttagtggaaagtcgtagacaacagatcctgcgcgaatttgaagaattacaccggagactcgacgaagaacagcaagtcctcctgagcaggttggaggaagaggaacaagacatcctccaaagactccgagagaatgccgcacatttaggagacaagaggagagaccttgctcacctcgcggcagaggtcgagggaaagtgtttgcagtccggatttgagatgctgaaacctgtgctatcagcgagggagaaaaatatcccaagaaagttcggcggttcgttgtctactatttgtccccgagatcataaagcgctcctcggtctcgtcaaggagatcaatagatgcgagaaggtgaaaaccatggaggtgacatctgtatctatcgagctcgagaagaatttcagtaatttccccagacagtattttgctttgagaaagatccttaaacagctgatcgccgatgtcaccttagacccggagacggcccacccgaatctcgtcctcagcgaagatcggaagtctgtgaaattcgtcgaaacccggctcagagatctgccggacacccccaggaggttcaccttttacccatgtgtactcgccaccgagggctttacatctgggagacactattgggaggtggaagtgggagataagacacattgggcagttggcgtttgtcgggatagcgtatcgcgcaagggcgagctaacaccgctgcccgaaactggatactggcgggtccgactatggaacggggataaatatgcagctacaaccactccgttcacccctttgcacatcaaggtcaagcctaagcgggtggggattttcctggattacgaagcaggaacgttgagtttttacaatgtgacagaccggtcgcacatctataccttcacagatacctttaccgagaagttgtggcctctcttttaccctgggataagggcgggtcgcaagaatgcagcaccgctgacaattagaccccctactgactgggaatag

SEQ ID NO: 208905 - DNA, 1557 bp, Artificial Sequence
  derived and/or modified sequence
atggctgagacaagtctattggaggccggagccagtgcagcatccaccgccgcagcactggagaatcttcaggtcgaggctagctgcagcgtgtgcttagagtatctgaaagaacctgttatcatcgagtgtggccataatttttgcaaggcatgcatcactagatggtgggaggatctggaacgcgatttcccttgtcccgtgtgcaggaagacctcaagatatagatctctccgtcccaatcgccaacttggcagtatggtcgagatcgctaagcagctccaggccgtgaaaagaaagatccgcgacgagtcactttgcccacagcaccatgaggctttaagcttgttttgctacgaagatcaggaggccgtgtgcctcatctgcgcaatctcacacacacacagggcacacaccgtcgttccgctggacgatgccacccaggaatataaggaaaaactgcaaaagtgtctggaaccactggagcagaagttacaggagattacccgctgtaagtcctccgaggagaagaaacctggcgagctgaaacgtctggtggagagcagacgtcagcaaattttaagggagtttgaggagctacaccgtcgcctggatgaggagcagcaggtcttgttgtcccgcctcgaagaagaagaacaggacatcctccaaagactgagagagaatgcggcacatctaggcgacaagcggcgtgacctggcgcatctggcagccgaggtagagggtaaatgccttcagagcggttttgagatgttaaaacccgtcctgagtgccagggagaagaacatacccaggaagttcgggggttccctgagcacaatctgccccagagatcacaaggcgctccttgggctggtgaaggagattaacagatgcgagaaggtcaaaaccatggaagttacttccgtgagtatagagctcgagaaaaacttttctaattttccaagacagtattttgccctgcgaaagatcctgaagcagctgatagccgacgtgaccctggaccctgaaaccgctcacccgaatctcgtgttgagcgaggacaggaaatctgtgaagtttgtggagactcgtctcagagacctgcccgacacccctcgtcgcttcactttttatccctgcgtcctcgccactgaaggatttacctccggaagacattattgggaggtggaggtcggagacaagactcactgggccgtgggtgtttgccgagactcagtttcacgcaaaggggagctgacgcctctccccgaaacaggatattggcgggtgcggctgtggaatggtgacaagtacgccgctactacaacgccattcacacctctgcacatcaaggtaaaacccaagcgcgttgggatattccttgattacgaggcagggaccctgagcttctataatgtgacggatcgtagtcacatatacacatttaccgacaccttcaccgagaagctgtggccactcttttatccaggcatcagagcgggacgcaaaaatgctgcccctctgactatccggccaccgacagattgggagtag

SEQ ID NO: 208906 - DNA, 1557 bp, Artificial Sequence
  derived and/or modified sequence
atggctgaaacctccttattggaagccggtgcttctgctgcctccacagccgctgcactcgagaacctgcaggtcgaagccagttgttcagtatgcctggagtatcttaaggaacctgtgatcattgaatgcggccacaacttctgcaaagcatgcattaccagatggtgggaggacctggagcgggatttcccatgccccgtgtgccggaaaaccagccgctaccggagtcttagacctaaccgccagctcgggagcatggtggagatagccaaacagctgcaggcagtgaagcgcaaaattcgagatgagagcctgtgcccccagcatcacgaagcgctcagtcttttctgttacgaagaccaagaagccgtgtgcctgatctgtgcaatttctcacactcaccgggctcacaccgtagtgcccctcgatgacgccacacaggagtacaaggagaaacttcagaagtgccttgaacccctggagcagaagctacaggaaatcactaggtgcaaatccagcgaggagaagaagcctggggagttaaaaagattagtggagagcagaaggcagcagatcctcagggaatttgaggagctgcataggcggcttgacgaagagcagcaggtgctgctgtctcgcctcgaagaagaggagcaggacatactgcagagactcagggaaaacgctgctcaccttggcgacaagcgcagggatctggctcacctagccgctgaggtggagggaaagtgcctgcaatcaggctttgagatgctcaaagacgtcaaatcaacactagagaagaatatccctcgaaagttcggtggatctctgtccacgatatgccctagagaccacaaggcccttttgggtttagttaaggaaatcaataggtgcgaaaaggtgaaaacgatggaggtcacatccgtgtctattgaactggagaagaacttcagcaattttcctcgtcagtactttgccctgaggaaaattctgaagcaactgatagcggacgtcactctggaccctgaaaccgcgcaccccaacctcgtcctcagcgaagatagaaagagcgtgaagtttgtggagacgaggttaagagaccttcctgacacccctagaagattcacgttttatccctgtgtcctcgccacagagggtttcacttctgggagacactattgggaagtcgaggtgggggacaagacccactgggctgtcggggtgtgtagagattctgtgtctagaaagggggagctcacccccttacccgagactggttactggcgggtgcgactgtggaacggggacaagtatgctgcaaccactaccccttttacacccctgcacatcaaagttaagccaaagcgggtgggcattttcttggactacgaggccggaactctttctttctacaatgtgacagaccgcagccacatttacaccttcacggatacgttcacagagaagttgtggccgcttttctatcctgggattcgggcagggagaaaaaacgctgcacccctgacaatccgtccacccaccgactgggagtag

SEQ ID NO: 208907 - DNA, 1557 bp, Artificial Sequence
  derived and/or modified sequence
atggcagaaacaagtcttctcgaggccggagcctccgcagccagcaccgccgcagccctcgaaaacttgcaagtcgaggcatcctgcagcgtatgtctcgagtacctcaaggagcctgtcatcatcgagtgtggccacaacttctgtaaagcatgcatcacgaggtggtgggaggacctcgagcgtgactttccttgccccgtgtgcaggaagacgtcccgctataggagcctgaggccaaatagacagctgggcagtatggtagaaattgcaaaacaactgcaagctgtgaagagaaagattcgggacgagagtttgtgcccacagcatcatgaagctctatcattgttttgctacgaggatcaggaggccgtatgcctcatctgcgcaatcagccatacgcacagagcccacactgtcgtgcccctggacgacgccacacaagagtacaaggagaagcttcagaagtgtctcgagcccctggaacagaagctgcaagaaattacaaggtgtaaaagcagtgaggaaaaaaaaccaggggagctgaaacgactggtagagtcaagacggcaacagatcctccgcgagttcgaggaactgcaccgcagactggatgaggagcagcaggttttgctgtctagacttgaggaagaagaacaggacattctgcaaaggctgagagaaaatgcagcccatctgggcgataaacgcagggatcttgcccatctcgccgctgaagtggagggaaaatgcttacagtcaggcttcgagatgctgaaggacgtcaagtctaccctcgagaaaaatattcccaggaagttcgggggtagcttgtctacaatttgcccacgggaccacaaagctctgctgggcctagtgaaggaaataaatcggtgcgagaaagtgaaaacaatggaggtgacgagcgtatcaatcgagttagagaagaattttagtaacttcccccgacagtattttgctctgaggaagatactgaagcagctgatcgcagacgtgacattagatccagaaacagctcaccccaacctagtgttatccgaggacagaaaaagcgttaagttcgttgaaacccgcctgagagacctgccagatacccccagaaggttcaccttttacccctgtgtgctggcaacagagggatttacttctggaaggcattattgggaggttgaggtgggagacaagacacactgggccgttggagtatgccgagattctgttagcaggaagggcgaactgacacccttaccggagacgggatactggcgggtcagactgtggaacggagacaaatatgctgcaactaccaccccgttcactccattgcatatcaaagtcaagcccaagcgcgtggggattttcctcgactacgaggctgggacacttagcttctacaatgtcacagatcggagtcacatctacaccttcaccgacaccttcacagaaaaactctggccactgttctacccaggaatcagggctggcaggaagaatgccgctcctctaactataaggccgcctaccgattgggagtag

SEQ ID NO: 208908 - DNA, 3338 bp, Artificial Sequence
  derived and/or modified sequence
cccagcttccactgacacgagcctcggcgcggcttccgcttccggcgagtattgtgtgtcgcgccgcggggcgggggcgaggggaggaggaaggagggaggcagcgctccggcggctccgcgccccgcactcccggacccgaagccgggaagattcctttcttgtctgttagaaacgtatgtcaaacgaggatacagtgtctggaactattggttctaagatataagtggaatgagcctggatcaggagaagtatgctgagctagagttgaaggaagcttctctttctaacaagagaaagcagagttaaattatggcagagacaagtctgttagaggctggggcctctgcagcctctacagctgcggctttggagaacttacaggtggaggcgagctgctctgtgtgcctggagtatctgaaggaacctgtcatcattgagtgtgggcacaacttctgcaaagcttgcatcacccgctggtgggaggacctagagagggacttcccttgtcctgtctgtcgaaagacatcccgctaccgcagtctccgacctaatcggcaactaggcagtatggtggaaattgccaagcagctccaggccgtcaagcggaagatccgggatgagagcctctgcccccaacaccatgaggccctcagccttttctgttatgaggaccaggaggctgtatgcttgatatgtgcaatttcccacacccaccgggcccacaccgttgtgccactggacgatgctacacaggagtacaaggaaaaactgcagaagtgtctggagcccctggaacagaagctgcaggagatcactcgctgcaagtcctctgaggagaagaagcctggtgagctcaagagactagtggaaagtcgccgacagcagatcttgagggagtttgaagagcttcataggcggctggatgaagagcagcaggtgttgctttcacgactggaagaagaggaacaggacattctgcagcgactccgagaaaatgctgctcaccttggggacaagcgccgggacctggcccacttggctgccgaggtggagggcaagtgcttacagtcaggcttcgagatgcttaaggatgtcaaaagtaccctggaaaagaatattcctagaaagttcggaggctcactctcaacgatctgtccacgggatcataaggctctccttggattagtaaaagaaatcaacagatgtgaaaaggtgaagaccatggaggtgacttcagtatccatagagctggaaaagaacttcagcaattttccccgacagtactttgccctaaggaaaatccttaaacagctaattgcggatgtgaccctggaccctgagacagctcatcctaacctagtcctgtcagaggatcgtaagagcgtcaagttcgtggagacaagactccgggatctccctgacacaccaaggcgtttcaccttctacccttgcgtcctggctactgagggtttcacctcaggtcgacactactgggaggtggaggtgggcgacaagacccactgggcagtgggtgtatgccgggactccgtgagccgaaagggcgagttgactccactccctgagactggctactggcgggtgcggctatggaatggggacaaatatgcagccaccaccacaccttttacccctttgcacatcaaggtgaaacccaagcgggtaggcatattcctagactatgaggccggcacactgtctttctacaatgtcacagaccgctctcatatctacaccttcactgatacttttactgagaaactttggcccctcttctacccaggcatccgggctggacggaagaatgctgcaccacttaccatcaggcccccaacagattgggagtgacaggttgggatgtgggaatgactggggtgaggcagggtcaagtgctacgggcctccttcccgtgtcctgctggaacgtcttcgtgtccacctgggtccagtcctgaatcatcttggagaaacaccttggtttctaggatggttttgtgtggagggggaggtaggactgggctggatgagagagcacagctgtgacttcctcctaactgtcagggtggggagctggttcccagaggattgtctaccctgaagtccatcaggttttctgttgcacaaggacgggtcaggaaggaaggagaggcttttccagaaacaaaaaatctgtgagggtctgacttgctcaaaccagaggaggaaacagaaacccctgcacatctttttagggggttctttgacccaggatagtcttgcttcttgaggtagatcacaggggtctgtgtacctctgaattcatgagagatgaatgacagatgctctcatgggtctagatattgaggagtttttctgagggcagagattggacatcaacaaggctagaagggtcagggaagtgggctaaaggaacagattcctagagattaatgaagaggagggaggtttctttggtcttctattccaagggtaaggttgcgattatgggtaagattggccagaggtaggaatgtggggagaaggagaggctgaaaagaaagcagaggagaacccaggtccctgcctcagccttcagcagagttggcttattgcctgcctctataccaataagtcagtcaccttgctcctctccagaggcaaagtggaagagatcctgcaagacacatctatcctttcacagtgttcccaagggaacttggaaaggagagtcaggtattagaggaaagagaagggtatttgtatacaaagccctggccttaaagaatgttacttagtagctactcccaaattgtcagccttcttacctggccaaggtgtccaagccagaaaggaaaaaaggttatggagtctttctcaccctaaggacagggtggaagagggtggtatatagggaagggccagataggcaacttcatttggcttgtgtgcatctggcctggaactggtgttaagccaggcttttgcttgtttgttgccatccctcaccctttgccatttcccttttcagagaatgtaaatgattttcatgttaggccaaaataaacaacttatagggtacatatgttgtcataaaaggtaaaagtgatgcatgccaaaccaaactaaaccaatttggattatctgctattcgggtaatcttcacagaaatgactgagagaagaatctgcagtttactgagggcatttcagttcctcctaccacctcaacaggactttgtccagactctcctcctcttacctttgtgccttgactgtggttctttgtggcaagatactttggttggttaaaataatatggaacaaaggatccactgaagtg

SEQ ID NO: 208909 - DNA, 3187 bp, Artificial Sequence
  derived and/or modified sequence
attcctttcttgtctgttagaaacgtatgtcaaacgaggatacagtgtctggaactattggttctaagatataagtggaatgagcctggatcaggagaagtatgctgagctagagttgaaggaagcttctctttctaacaagagaaagcagagttaaattatggcagagacaagtctgttagaggctggggcctctgcagcctctacagctgcggctttggagaacttacaggtggaggcgagctgctctgtgtgcctggagtatctgaaggaacctgtcatcattgagtgtgggcacaacttctgcaaagcttgcatcacccgctggtgggaggacctagagagggacttcccttgtcctgtctgtcgaaagacatcccgctaccgcagtctccgacctaatcggcaactaggcagtatggtggaaattgccaagcagctccaggccgtcaagcggaagatccgggatgagagcctctgcccccaacaccatgaggccctcagccttttctgttatgaggaccaggaggctgtatgcttgatatgtgcaatttcccacacccaccgggctcacaccgttgtgccactggacgatgctacacaggagtacaaggaaaaactgcagaagtgtctggagcccctggaacagaagctgcaggagatcactcgctgcaagtcctctgaggagaagaagcctggtgagctcaagagactagtggaaagtcgccgacagcagatcttgagggagtttgaagagcttcataggcggctggatgaagagcagcaggtgttgctttcacgactggaagaagaggaacaggacattctgcagcgactccgagaaaatgctgctcaccttggggacaagcgccgggacctggcccacttggctgccgaggtggagggcaagtgcttacagtcaggcttcgagatgcttaaggatgtcaaaagtaccctggaaaagaatattcctagaaagttcggaggctcactctcaacgatctgtccacgggatcataaggctctccttggattagtaaaagaaatcaacagatgtgaaaaggtgaagaccatggaggtgacttcagtatccatagagctggaaaagaacttcagcaattttccccgacagtactttgccctaaggaaaatccttaaacagctaattgcggatgtgaccctggaccctgagacagctcatcctaacctagtcctgtcagaggatcgtaagagcgtcaagttcgtggagacaagactccgggatctccctgacacaccaaggcgtttcaccttctacccttgcgtcctggctactgagggtttcacctcaggtcgacactactgggaggtggaggtgggcgacaagacccactgggcagtgggtgtatgccgggactccgtgagccgaaagggcgagttgactccactccctgagactggctactggcgggtgcggctatggaatggggacaaatatgcagccaccaccacaccttttacccctttgcacatcaaggtgaaacccaagcgggtaggcatattcctagactatgaggccggcacactgtctttctacaatgtcacagaccgctctcatatctacaccttcactgatacttttactgagaaactttggcccctcttctacccaggcatccgggctggacggaagaatgctgcaccacttaccatcaggcccccaacagattgggagtgacaggttgggatgtgggaatgactggggtgaggcagggtcaagtgctacgggcctccttcccgtgtcctgctggaacgtcttcgtgtccacctgggtccagtcctgaatcatcttggagaaacaccttggtttctaggatggttttgtgtggagggggaggtaggactgggctggatgagagagcacagctgtgacttcctcctaactgtcagggtggggagctggttcccagaggattgtctaccctgaagtccatcaggttttctgttgcacaaggacgggtcaggaaggaaggagaggcttttccagaaacaaaaaatctgtgagggtctgacttgctcaaaccagaggaggaaacagaaacccctgcacatctttttagggggttctttgacccaggatagtcttgcttcttgaggtagatcacaggggtctgtgtacctctgaattcatgagagatgaatgacagatgctctcatgggtctagatattgaggagtttttctgagggcagagattggacatcaacaaggctagaagggtcagggaagtgggctaaaggaacagattcctagagattaatgaagaggagggaggtttctttggtcttctattccaagggtaaggttgcgattatgggtaagattggccagaggtaggaatgtggggagaaggagaggctgaaaagaaagcagaggagaacccaggtccctgcctcagccttcagcagagttggcttattgcctgcctctataccaataagtcagtcaccttgctcctctccagaggcaaagtggaagagatcctgcaagacacatctatcctttcacagtgttcccaagggaacttggaaaggagagtcaggtattagaggaaagagaagggtatttgtatacaaagccctggccttaaagaatgttacttagtagctactcccaaattgtcagccttcttacctggccaaggtgtccaagccagaaaggaaaaaaggttatggagtctttctcaccctaaggacagggtggaagagggtggtatatagggaagggccagataggcaacttcatttggcttgtgtgcatctggcctggaactggtgttaagccaggcttttgcttgtttgttgccatccctcaccctttgccatttcccttttcagagaatgtaaatgattttcatgttaggccaaaataaacaacttatagggtacatatgttgtcataaaaggtaaaagtgatgcatgccaaaccaaactaaaccaatttggattatctgctattcgggtaatcttcacagaaatgactgagagaagaatctgcagtttactgagggcatttcagttcctcctaccacctcaacaggactttgtccagactctcctcctcttacctttgtgccttgactgtggttctttgtggcaagatactttggttggttaaaataatatggaacaaaggatccactgaagtga

SEQ ID NO: 208910 - DNA, 3187 bp, Artificial Sequence
  derived and/or modified sequence
attcctttcttgtctgttagaaacgtatgtcaaacgaggatacagtgtctggaactattggttctaagatataagtggaatgagcctggatcaggagaagtatgctgagctagagttgaaggaagcttctctttctaacaagagaaagcagagttaaattatggcagagacaagtctgttagaggctggggcctctgcagcctctacagctgcggctttggagaacttacaggtggaggcgagctgctctgtgtgcctggagtatctgaaggaacctgtcatcattgagtgtgggcacaacttctgcaaagcttgcatcacccgctggtgggaggacctagagagggacttcccttgtcctgtctgtcgaaagacatcccgctaccgcagtctccgacctaatcggcaactaggcagtatggtggaaattgccaagcagctccaggccgtcaagcggaagatccgggatgagagcctctgcccccaacaccatgaggccctcagccttttctgttatgaggaccaggaggctgtatgcttgatatgtgcaatttcccacacccaccgggcccacaccgttgtgccactggacgatgctacacaggagtacaaggaaaaactgcagaagtgtctggagcccctggaacagaagctgcaggagatcactcgctgcaagtcctctgaggagaagaagcctggtgagctcaagagactagtggaaagtcgccgacagcagatcttgagggagtttgaagagcttcataggcggctggatgaagagcagcaggtgttgctttcacgactggaagaagaggaacaggacattctgcagcgactccgagaaaatgctgctcaccttggggacaagcgccgggacctggcccacttggctgccgaggtggagggcaagtgcttacagtcaggcttcgagatgcttaaggatgtcaaaagtaccctggaaaagaatattcctagaaagttcggaggctcactctcaacgatctgtccacgggatcataaggctctccttggattagtaaaagaaatcaacagatgtgaaaaggtgaagaccatggaggtgacttcagtatccatagagctggaaaagaacttcagcaattttccccgacagtactttgccctaaggaaaatccttaaacagctaattgcggatgtgaccctggaccctgagacagctcatcctaacctagtcctgtcagaggatcgtaagagcgtcaagttcgtggagacaagactccgggatctccctgacacaccaaggcgtttcaccttctacccttgcgtcctggctactgagggtttcacctcaggtcgacactactgggaggtggaggtgggcgacaagacccactgggcagtgggtgtatgccgggactccgtgagccgaaagggcgagttgactccactccctgagactggctactggcgggtgcggctatggaatggggacaaatatgcagccaccaccacaccttttacccctttgcacatcaaggtgaaacccaagcgggtaggcatattcctagactatgaggccggcacactgtctttctacaatgtcacagaccgctctcatatctacaccttcactgatacttttactgagaaactttggcccctcttctacccaggcatccgggctggacggaagaatgctgcaccacttaccatcaggcccccaacagattgggagtgacaggttgggatgtgggaatgactggggtgaggcagggtcaagtgctacgggcctccttcccgtgtcctgctggaacgtcttcgtgtccacctgggtccagtcctgaatcatcttggagaaacaccttggtttctaggatggttttgtgtggagggggaggtaggactgggctggatgagagagcacagctgtgacttcctcctaactgtcagggtggggagctggttcccagaggattgtctaccctgaagtccatcaggttttctgttgcacaaggacgggtcaggaaggaaggagaggcttttccagaaacaaaaaatctgtgagggtctgacttgctcaaaccagaggaggaaacagaaacccctgcacatctttttagggggttctttgacccaggatagtcttgcttcttgaggtagatcacaggggtctgtgtacctctgaattcatgagagatgaatgacagatgctctcatgggtctagatattgaggagtttttctgagggcagagattggacatcaacaaggctagaagggtcagggaagtgggctaaaggaacagattcctagagattaatgaagaggagggaggtttctttggtcttctattccaagggtaaggttgcgattatgggtaagattggccagaggtaggaatgtggggagaaggagaggctgaaaagaaagcagaggagaacccaggtccctgcctcagccttcagcagagttggcttattgcctgcctctataccaataagtcagtcaccttgctcctctccagaggcaaagtggaagagatcctgcaagacacatctatcctttcacagtgttcccaagggaacttggaaaggagagtcaggtattagaggaaagagaagggtatttgtatacaaagccctggccttaaagaatgttacttagtagctactcccaaattgtcagccttcttacctggccaaggtgtccaagccagaaaggaaaaaaggttatggagtctttctcaccctaaggacagggtggaagagggtggtatatagggaagggccagataggcaacttcatttggcttgtgtgcatctggcctggaactggtgttaagccaggcttttgcttgtttgttgccatccctcaccctttgccatttcccttttcagagaatgtaaatgattttcatgttaggccaaaataaacaacttatagggtacatatgttgtcataaaaggtaaaagtgatgcatgccaaaccaaactaaaccaatttggattatctgctattcgggtaatcttcacagaaatgactgagagaagaatctgcagtttactgagggcatttcagttcctcctaccacctcaacaggactttgtccagactctcctcctcttacctttgtgccttgactgtggttctttgtggcaagatactttggttggttaaaataatatggaacaaaggatccactgaagtga

SEQ ID NO: 208911 - DNA, 3187 bp, Artificial Sequence
  derived and/or modified sequence
attcctttcttgtctgttagaaacgtatgtcaaacgaggatacagtgtctggaactattggttctaagatataagtggaatgagcctggatcaggagaagtatgctgagctagagttgaaggaagcttctctttctaacaagagaaagcagagttaaattatggcagagacaagtctgttagaggctggggcctctgcagcctctacagctgcggctttggagaacttacaggtggaggcgagctgctctgtgtgcctggagtatctgaaggaacctgtcatcattgagtgtgggcacaacttctgcaaagcttgcatcacccgctggtgggaggacctagagagggacttcccttgtcctgtctgtcgaaagacatcccgctaccgcagtctccgacctaatcggcaactaggcagtatggtggaaattgccaagcagctccaggccgtcaagcggaagatccgggatgagagcctctgcccccaacaccatgaggccctcagccttttctgttatgaggaccaggaggctgtatgcttgatatgtgcaatttcccacacccaccgggcccacaccgttgtgccactggacgacgctacacaggagtacaaggaaaaactgcagaagtgtctggagcccctggaacagaagctgcaggagatcactcgctgcaagtcctctgaggagaagaagcctggtgagctcaagagactagtggaaagtcgccgacagcagatcttgagggagtttgaagagcttcataggcggctggatgaagagcagcaggtgttgctttcacgactggaagaagaggaacaggacattctgcagcgactccgagaaaatgctgctcaccttggggacaagcgccgggacctggcccacttggctgccgaggtggagggcaagtgcttacagtcaggcttcgagatgcttaaggatgtcaaaagtaccctggaaaagaatattcctagaaagttcggaggctcactctcaacgatctgtccacgggatcataaggctctccttggattagtaaaagaaatcaacagatgtgaaaaggtgaagaccatggaggtgacttcagtatccatagagctggaaaagaacttcagcaattttccccgacagtactttgccctaaggaaaatccttaaacagctaattgcggatgtgaccctggaccccgagacagctcatcctaacctagtcctgtcagaggatcgtaagagcgtcaagttcgtggagacaagactccgggatctccctgacacaccaaggcgtttcaccttctacccttgcgtcctggctactgagggtttcacctcaggtcgacactactgggaggtggaggtgggcgacaagacccactgggcagtgggtgtatgccgggactccgtgagccgaaagggcgagttgactccactccctgagactggctactggcgggtgcggctatggaatggggacaaatatgcagccaccaccacaccttttacccctttgcacatcaaggtgaaacccaagcgggtaggcatattcctagactatgaggccggcacactgtctttctacaatgtcacagaccgctctcatatctacaccttcactgatacttttactgagaaactttggcccctcttctacccaggcatccgggctggacggaagaatgctgcaccacttaccatcaggcccccaacagattgggagtgacaggttgggatgtgggaatgactggggtgaggcagggtcaagtgctacgggcctccttcccgtgtcctgctggaacgtcttcgtgtccacctgggtccagtcctgaatcatcttggagaaacaccttggtttctaggatggttttgtgtggagggggaggtaggactgggctggatgagagagcacagctgtgacttcctcctaactgtcagggtggggagctggttcccagaggattgtctaccctgaagtccatcaggttttctgttgcacaaggacgggtcaggaaggaaggagaggcttttccagaaacaaaaaatctgtgagggtctgacttgctcaaaccagaggaggaaacagaaacccctgcacatctttttagggggttctttgacccaggatagtcttgcttcttgaggtagatcacaggggtctgtgtacctctgaattcatgagagatgaatgacagatgctctcatgggtctagatattgaggagtttttctgagggcagagattggacatcaacaaggctagaagggtcagggaagtgggctaaaggaacagattcctagagattaatgaagaggagggaggtttctttggtcttctattccaagggtaaggttgcgattatgggtaagattggccagaggtaggaatgtggggagaaggagaggctgaaaagaaagcagaggagaacccaggtccctgcctcagccttcagcagagttggcttattgcctgcctctataccaataagtcagtcaccttgctcctctccagaggcaaagtggaagagatcctgcaagacacatctatcctttcacagtgttcccaagggaacttggaaaggagagtcaggtattagaggaaagagaagggtatttgtatacaaagccctggccttaaagaatgttacttagtagctactcccaaattgtcagccttcttacctggccaaggtgtccaagccagaaaggaaaaaaggttatggagtctttctcaccctaaggacagggtggaagagggtggtatatagggaagggccagataggcaacttcatttggcttgtgtgcatctggcctggaactggtgttaagccaggcttttgcttgtttgttgccatccctcaccctttgccatttcccttttcagagaatgtaaatgattttcatgttaggccaaaataaacaacttatagggtacatatgttgtcataaaaggtaaaagtgatgcatgccaaaccaaactaaaccaatttggattatctgctattcgggtaatcttcacagaaatgactgagagaagaatctgcagtttactgagggcatttcagttcctcctaccacctcaacaggactttgtccagactctcctcctcttacctttgtgccttgactgtggttctttgtggcaagatactttggttggttaaaataatatggaacaaaggatccactgaagtga

SEQ ID NO: 208912 - DNA, 3338 bp, Artificial Sequence
  derived and/or modified sequence
cccagcttccactgacacgagcctcggcgcggcttccgcttccggcgagtattgtgtgtcgcgccgcggggcgggggcgaggggaggaggaaggagggaggcagcgctccggcggctccgcgccccgcactcccggacccgaagccgggaagattcctttcttgtctgttagaaacgtatgtcaaacgaggatacagtgtctggaactattggttctaagatataagtggaatgagcctggatcaggagaagtatgctgagctagagttgaaggaagcttctctttctaacaagagaaagcagagttaaattatggcagagacaagtctgttagaggctggggcctctgcagcctctacagctgcggctttggagaacttacaggtggaggcgagctgctctgtgtgcctggagtatctgaaggaacctgtcatcattgagtgtgggcacaacttctgcaaagcttgcatcacccgctggtgggaggacctagagagggacttcccttgtcctgtctgtcgaaagacatcccgctaccgcagtctccgacctaatcggcaactaggcagtatggtggaaattgccaagcagctccaggccgtcaagcggaagatccgggatgagagcctctgcccccaacaccatgaggccctcagccttttctgttatgaggaccaggaggctgtatgcttgatatgtgcaatttcccacacccaccgggcccacaccgttgtgccactggacgatgctacacaggagtacaaggaaaaactgcagaagtgtctggagcccctggaacagaagctgcaggagatcactcgctgcaagtcctctgaggagaagaagcctggtgagctcaagagactagtggaaagtcgccgacagcagatcttgagggagtttgaagagcttcataggcggctggatgaagagcagcaggtgttgctttcacgactggaagaagaggaacaggacattctgcagcgactccgagaaaatgctgctcaccttggggacaagcgccgggacctggcccacttggctgccgaggtggagggcaagtgcttacagtcaggcttcgagatgcttaagccagttctttctgccagggaaaagaatattcctagaaagttcggaggctcactctcaacgatctgtccacgggatcataaggctctccttggattagtaaaagaaatcaacagatgtgaaaaggtgaagaccatggaggtgacttcagtatccatagagctggaaaagaacttcagcaattttccccgacagtactttgccctaaggaaaatccttaaacagctaattgcggatgtgaccctggaccctgagacagctcatcctaacctagtcctgtcagaggatcgtaagagcgtcaagttcgtggagacaagactccgggatctccctgacacaccaaggcgtttcaccttctacccttgcgtcctggctactgagggtttcacctcaggtcgacactactgggaggtggaggtgggcgacaagacccactgggcagtgggtgtatgccgggactccgtgagccgaaagggcgagttgactccactccctgagactggctactggcgggtgcggctatggaatggggacaaatatgcagccaccaccacaccttttacccctttgcacatcaaggtgaaacccaagcgggtaggcatattcctagactatgaggccggcacactgtctttctacaatgtcacagaccgctctcatatctacaccttcactgatacttttactgagaaactttggcccctcttctacccaggcatccgggctggacggaagaatgctgcaccacttaccatcaggcccccaacagattgggagtgacaggttgggatgtgggaatgactggggtgaggcagggtcaagtgctacgggcctccttcccgtgtcctgctggaacgtcttcgtgtccacctgggtccagtcctgaatcatcttggagaaacaccttggtttctaggatggttttgtgtggagggggaggtaggactgggctggatgagagagcacagctgtgacttcctcctaactgtcagggtggggagctggttcccagaggattgtctaccctgaagtccatcaggttttctgttgcacaaggacgggtcaggaaggaaggagaggcttttccagaaacaaaaaatctgtgagggtctgacttgctcaaaccagaggaggaaacagaaacccctgcacatctttttagggggttctttgacccaggatagtcttgcttcttgaggtagatcacaggggtctgtgtacctctgaattcatgagagatgaatgacagatgctctcatgggtctagatattgaggagtttttctgagggcagagattggacatcaacaaggctagaagggtcagggaagtgggctaaaggaacagattcctagagattaatgaagaggagggaggtttctttggtcttctattccaagggtaaggttgcgattatgggtaagattggccagaggtaggaatgtggggagaaggagaggctgaaaagaaagcagaggagaacccaggtccctgcctcagccttcagcagagttggcttattgcctgcctctataccaataagtcagtcaccttgctcctctccagaggcaaagtggaagagatcctgcaagacacatctatcctttcacagtgttcccaagggaacttggaaaggagagtcaggtattagaggaaagagaagggtatttgtatacaaagccctggccttaaagaatgttacttagtagctactcccaaattgtcagccttcttacctggccaaggtgtccaagccagaaaggaaaaaaggttatggagtctttctcaccctaaggacagggtggaagagggtggtatatagggaagggccagataggcaacttcatttggcttgtgtgcatctggcctggaactggtgttaagccaggcttttgcttgtttgttgccatccctcaccctttgccatttcccttttcagagaatgtaaatgattttcatgttaggccaaaataaacaacttatagggtacatatgttgtcataaaaggtaaaagtgatgcatgccaaaccaaactaaaccaatttggattatctgctattcgggtaatcttcacagaaatgactgagagaagaatctgcagtttactgagggcatttcagttcctcctaccacctcaacaggactttgtccagactctcctcctcttacctttgtgccttgactgtggttctttgtggcaagatactttggttggttaaaataatatggaacaaaggatccactgaagtg

SEQ ID NO: 208913 - DNA, 3338 bp, Artificial Sequence
  derived and/or modified sequence
cccagcttccactgacacgagcctcggcgcggcttccgcttccggcgagtattgtgtgtcgcgccgcggggcgggggcgaggggaggaggaaggagggaggcagcgctccggcggctccgcgccccgcactcccggacccgaagccgggaagattcctttcttgtctgttagaaacgtatgtcaaacgaggatacagtgtctggaactattggttctaagatataagtggaatgagcctggatcaggagaagtatgctgagctagagttgaaggaagcttctctttctaacaagagaaagcagagttaaattatggcagagacaagtctgttagaggctggggcctctgcagcctctacagctgcggctttggagaacttacaggtggaggcgagctgctctgtgtgcctggagtatctgaaggaacctgtcatcattgagtgtgggcacaacttctgcaaagcttgcatcacccgctggtgggaggacctagagagggacttcccttgtcctgtctgtcgaaagacatcccgctaccgcagtctccgacctaatcggcaactaggcagtatggtggaaattgccaagcagctccaggccgtcaagcggaagatccgggatgagagcctctgcccccaacaccatgaggccctcagccttttctgttatgaggaccaggaggctgtatgcttgatatgtgcaatttcccacacccaccgggctcacaccgttgtgccactggacgatgctacacaggagtacaaggaaaaactgcagaagtgtctggagcccctggaacagaagctgcaggagatcactcgctgcaagtcctctgaggagaagaagcctggtgagctcaagagactagtggaaagtcgccgacagcagatcttgagggagtttgaagagcttcataggcggctggatgaagagcagcaggtgttgctttcacgactggaagaagaggaacaggacattctgcagcgactccgagaaaatgctgctcaccttggggacaagcgccgggacctggcccacttggctgccgaggtggagggcaagtgcttacagtcaggcttcgagatgcttaagccagttctttctgccagggaaaagaatattcctagaaagttcggaggctcactctcaacgatctgtccacgggatcataaggctctccttggattagtaaaagaaatcaacagatgtgaaaaggtgaagaccatggaggtgacttcagtatccatagagctggaaaagaacttcagcaattttccccgacagtactttgccctaaggaaaatccttaaacagctaattgcggatgtgaccctggaccctgagacagctcatcctaacctagtcctgtcagaggatcgtaagagcgtcaagttcgtggagacaagactccgggatctccctgacacaccaaggcgtttcaccttctacccttgcgtcctggctactgagggtttcacctcaggtcgacactactgggaggtggaggtgggcgacaagacccactgggcagtgggtgtatgccgggactccgtgagccgaaagggcgagttgactccactccctgagactggctactggcgggtgcggctatggaatggggacaaatatgcagccaccaccacaccttttacccctttgcacatcaaggtgaaacccaagcgggtaggcatattcctagactatgaggccggcacactgtctttctacaatgtcacagaccgctctcatatctacaccttcactgatacttttactgagaaactttggcccctcttctacccaggcatccgggctggacggaagaatgctgcaccacttaccatcaggcccccaacagattgggagtgacaggttgggatgtgggaatgactggggtgaggcagggtcaagtgctacgggcctccttcccgtgtcctgctggaacgtcttcgtgtccacctgggtccagtcctgaatcatcttggagaaacaccttggtttctaggatggttttgtgtggagggggaggtaggactgggctggatgagagagcacagctgtgacttcctcctaactgtcagggtggggagctggttcccagaggattgtctaccctgaagtccatcaggttttctgttgcacaaggacgggtcaggaaggaaggagaggcttttccagaaacaaaaaatctgtgagggtctgacttgctcaaaccagaggaggaaacagaaacccctgcacatctttttagggggttctttgacccaggatagtcttgcttcttgaggtagatcacaggggtctgtgtacctctgaattcatgagagatgaatgacagatgctctcatgggtctagatattgaggagtttttctgagggcagagattggacatcaacaaggctagaagggtcagggaagtgggctaaaggaacagattcctagagattaatgaagaggagggaggtttctttggtcttctattccaagggtaaggttgcgattatgggtaagattggccagaggtaggaatgtggggagaaggagaggctgaaaagaaagcagaggagaacccaggtccctgcctcagccttcagcagagttggcttattgcctgcctctataccaataagtcagtcaccttgctcctctccagaggcaaagtggaagagatcctgcaagacacatctatcctttcacagtgttcccaagggaacttggaaaggagagtcaggtattagaggaaagagaagggtatttgtatacaaagccctggccttaaagaatgttacttagtagctactcccaaattgtcagccttcttacctggccaaggtgtccaagccagaaaggaaaaaaggttatggagtctttctcaccctaaggacagggtggaagagggtggtatatagggaagggccagataggcaacttcatttggcttgtgtgcatctggcctggaactggtgttaagccaggcttttgcttgtttgttgccatccctcaccctttgccatttcccttttcagagaatgtaaatgattttcatgttaggccaaaataaacaacttatagggtacatatgttgtcataaaaggtaaaagtgatgcatgccaaaccaaactaaaccaatttggattatctgctattcgggtaatcttcacagaaatgactgagagaagaatctgcagtttactgagggcatttcagttcctcctaccacctcaacaggactttgtccagactctcctcctcttacctttgtgccttgactgtggttctttgtggcaagatactttggttggttaaaataatatggaacaaaggatccactgaagtg

SEQ ID NO: 208914 - DNA, 3338 bp, Artificial Sequence
  derived and/or modified sequence
cccagcttccactgacacgagcctcggcgcggcttccgcttccggcgagtattgtgtgtcgcgccgcggggcgggggcgaggggaggaggaaggagggaggcagcgctccggcggctccgcgccccgcactcccggacccgaagccgggaagattcctttcttgtctgttagaaacgtatgtcaaacgaggatacagtgtctggaactattggttctaagatataagtggaatgagcctggatcaggagaagtatgctgagctagagttgaaggaagcttctctttctaacaagagaaagcagagttaaattatggcagagacaagtctgttagaggctggggcctctgcagcctctacagctgcggctttggagaacttacaggtggaggcgagctgctctgtgtgcctggagtatctgaaggaacctgtcatcattgagtgtgggcacaacttctgcaaagcttgcatcacccgctggtgggaggacctagagagggacttcccttgtcctgtctgtcgaaagacatcccgctaccgcagtctccgacctaatcggcaactaggcagtatggtggaaattgccaagcagctccaggccgtcaagcggaagatccgggatgagagcctctgcccccaacaccatgaggccctcagccttttctgttatgaggaccaggaggctgtatgcttgatatgtgcaatttcccacacccaccgggctcacaccgttgtgccactggacgatgctacacaggagtacaaggaaaaactgcagaagtgtctggagcccctggaacagaagctgcaggagatcactcgctgcaagtcctctgaggagaagaagcctggtgagctcaagagactagtggaaagtcgccgacagcagatcttgagggagtttgaagagcttcataggcggctggatgaagagcagcaggtgttgctttcacgactggaagaagaggaacaggacattctgcagcgactccgagaaaatgctgctcaccttggggacaagcgccgggacctggcccacttggctgccgaggtggagggcaagtgcttacagtcaggcttcgagatgcttaaggatgtcaaaagtaccctggaaaagaatattcctagaaagttcggaggctcactctcaacgatctgtccacgggatcataaggctctccttggattagtaaaagaaatcaacagatgtgaaaaggtgaagaccatggaggtgacttcagtatccatagagctggaaaagaacttcagcaattttccccgacagtactttgccctaaggaaaatccttaaacagctaattgcggatgtgaccctggaccctgagacagctcatcctaacctagtcctgtcagaggatcgtaagagcgtcaagttcgtggagacaagactccgggatctccctgacacaccaaggcgtttcaccttctacccttgcgtcctggctactgagggtttcacctcaggtcgacactactgggaggtggaggtgggcgacaagacccactgggcagtgggtgtatgccgggactccgtgagccgaaagggcgagttgactccactccctgagactggctactggcgggtgcggctatggaatggggacaaatatgcagccaccaccacaccttttacccctttgcacatcaaggtgaaacccaagcgggtaggcatattcctagactatgaggccggcacactgtctttctacaatgtcacagaccgctctcatatctacaccttcactgatacttttactgagaaactttggcccctcttctacccaggcatccgggctggacggaagaatgctgcaccacttaccatcaggcccccaacagattgggagtgacaggttgggatgtgggaatgactggggtgaggcagggtcaagtgctacgggcctccttcccgtgtcctgctggaacgtcttcgtgtccacctgggtccagtcctgaatcatcttggagaaacaccttggtttctaggatggttttgtgtggagggggaggtaggactgggctggatgagagagcacagctgtgacttcctcctaactgtcagggtggggagctggttcccagaggattgtctaccctgaagtccatcaggttttctgttgcacaaggacgggtcaggaaggaaggagaggcttttccagaaacaaaaaatctgtgagggtctgacttgctcaaaccagaggaggaaacagaaacccctgcacatctttttagggggttctttgacccaggatagtcttgcttcttgaggtagatcacaggggtctgtgtacctctgaattcatgagagatgaatgacagatgctctcatgggtctagatattgaggagtttttctgagggcagagattggacatcaacaaggctagaagggtcagggaagtgggctaaaggaacagattcctagagattaatgaagaggagggaggtttctttggtcttctattccaagggtaaggttgcgattatgggtaagattggccagaggtaggaatgtggggagaaggagaggctgaaaagaaagcagaggagaacccaggtccctgcctcagccttcagcagagttggcttattgcctgcctctataccaataagtcagtcaccttgctcctctccagaggcaaagtggaagagatcctgcaagacacatctatcctttcacagtgttcccaagggaacttggaaaggagagtcaggtattagaggaaagagaagggtatttgtatacaaagccctggccttaaagaatgttacttagtagctactcccaaattgtcagccttcttacctggccaaggtgtccaagccagaaaggaaaaaaggttatggagtctttctcaccctaaggacagggtggaagagggtggtatatagggaagggccagataggcaacttcatttggcttgtgtgcatctggcctggaactggtgttaagccaggcttttgcttgtttgttgccatccctcaccctttgccatttcccttttcagagaatgtaaatgattttcatgttaggccaaaataaacaacttatagggtacatatgttgtcataaaaggtaaaagtgatgcatgccaaaccaaactaaaccaatttggattatctgctattcgggtaatcttcacagaaatgactgagagaagaatctgcagtttactgagggcatttcagttcctcctaccacctcaacaggactttgtccagactctcctcctcttacctttgtgccttgactgtggttctttgtggcaagatactttggttggttaaaataatatggaacaaaggatccactgaagtg

SEQ ID NO: 208915 - DNA, 3338 bp, Artificial Sequence
  derived and/or modified sequence
cccagcttccactgacacgagcctcggcgcggcttccgcttccggcgagtattgtgtgtcgcgccgcggggcgggggcgaggggaggaggaaggagggaggcagcgctccggcggctccgcgccccgcactcccggacccgaagccgggaagattcctttcttgtctgttagaaacgtatgtcaaacgaggatacagtgtctggaactattggttctaagatataagtggaatgagcctggatcaggagaagtatgctgagctagagttgaaggaagcttctctttctaacaagagaaagcagagttaaattatggcagagacaagtctgttagaggctggggcctctgcagcctctacagctgcggctttggagaacttacaggtggaggcgagctgctctgtgtgcctggagtatctgaaggaacctgtcatcattgagtgtgggcacaacttctgcaaagcttgcatcacccgctggtgggaggacctagagagggacttcccttgtcctgtctgtcgaaagacatcccgctaccgcagtctccgacctaatcggcaactaggcagtatggtggaaattgccaagcagctccaggccgtcaagcggaagatccgggatgagagcctctgcccccaacaccatgaggccctcagccttttctgttatgaggaccaggaggctgtatgcttgatatgtgcaatttcccacacccaccgggcccacaccgttgtgccactggacgacgctacacaggagtacaaggaaaaactgcagaagtgtctggagcccctggaacagaagctgcaggagatcactcgctgcaagtcctctgaggagaagaagcctggtgagctcaagagactagtggaaagtcgccgacagcagatcttgagggagtttgaagagcttcataggcggctggatgaagagcagcaggtgttgctttcacgactggaagaagaggaacaggacattctgcagcgactccgagaaaatgctgctcaccttggggacaagcgccgggacctggcccacttggctgccgaggtggagggcaagtgcttacagtcaggcttcgagatgcttaagccagttctttctgccagggaaaagaatattcctagaaagttcggaggctcactctcaacgatctgtccacgggatcataaggctctccttggattagtaaaagaaatcaacagatgtgaaaaggtgaagaccatggaggtgacttcagtatccatagagctggaaaagaacttcagcaattttccccgacagtactttgccctaaggaaaatccttaaacagctaattgcggatgtgaccctggaccccgagacagctcatcctaacctagtcctgtcagaggatcgtaagagcgtcaagttcgtggagacaagactccgggatctccctgacacaccaaggcgtttcaccttctacccttgcgtcctggctactgagggtttcacctcaggtcgacactactgggaggtggaggtgggcgacaagacccactgggcagtgggtgtatgccgggactccgtgagccgaaagggcgagttgactccactccctgagactggctactggcgggtgcggctatggaatggggacaaatatgcagccaccaccacaccttttacccctttgcacatcaaggtgaaacccaagcgggtaggcatattcctagactatgaggccggcacactgtctttctacaatgtcacagaccgctctcatatctacaccttcactgatacttttactgagaaactttggcccctcttctacccaggcatccgggctggacggaagaatgctgcaccacttaccatcaggcccccaacagattgggagtgacaggttgggatgtgggaatgactggggtgaggcagggtcaagtgctacgggcctccttcccgtgtcctgctggaacgtcttcgtgtccacctgggtccagtcctgaatcatcttggagaaacaccttggtttctaggatggttttgtgtggagggggaggtaggactgggctggatgagagagcacagctgtgacttcctcctaactgtcagggtggggagctggttcccagaggattgtctaccctgaagtccatcaggttttctgttgcacaaggacgggtcaggaaggaaggagaggcttttccagaaacaaaaaatctgtgagggtctgacttgctcaaaccagaggaggaaacagaaacccctgcacatctttttagggggttctttgacccaggatagtcttgcttcttgaggtagatcacaggggtctgtgtacctctgaattcatgagagatgaatgacagatgctctcatgggtctagatattgaggagtttttctgagggcagagattggacatcaacaaggctagaagggtcagggaagtgggctaaaggaacagattcctagagattaatgaagaggagggaggtttctttggtcttctattccaagggtaaggttgcgattatgggtaagattggccagaggtaggaatgtggggagaaggagaggctgaaaagaaagcagaggagaacccaggtccctgcctcagccttcagcagagttggcttattgcctgcctctataccaataagtcagtcaccttgctcctctccagaggcaaagtggaagagatcctgcaagacacatctatcctttcacagtgttcccaagggaacttggaaaggagagtcaggtattagaggaaagagaagggtatttgtatacaaagccctggccttaaagaatgttacttagtagctactcccaaattgtcagccttcttacctggccaaggtgtccaagccagaaaggaaaaaaggttatggagtctttctcaccctaaggacagggtggaagagggtggtatatagggaagggccagataggcaacttcatttggcttgtgtgcatctggcctggaactggtgttaagccaggcttttgcttgtttgttgccatccctcaccctttgccatttcccttttcagagaatgtaaatgattttcatgttaggccaaaataaacaacttatagggtacatatgttgtcataaaaggtaaaagtgatgcatgccaaaccaaactaaaccaatttggattatctgctattcgggtaatcttcacagaaatgactgagagaagaatctgcagtttactgagggcatttcagttcctcctaccacctcaacaggactttgtccagactctcctcctcttacctttgtgccttgactgtggttctttgtggcaagatactttggttggttaaaataatatggaacaaaggatccactgaagtg

SEQ ID NO: 208916 - DNA, 3338 bp, Artificial Sequence
  derived and/or modified sequence
cccagcttccactgacacgagcctcggcgcggcttccgcttccggcgagtattgtgtgtcgcgccgcggggcgggggcgaggggaggaggaaggagggaggcagcgctccggcggctccgcgccccgcactcccggacccgaagccgggaagattcctttcttgtctgttagaaacgtatgtcaaacgaggatacagtgtctggaactattggttctaagatataagtggaatgagcctggatcaggagaagtatgctgagctagagttgaaggaagcttctctttctaacaagagaaagcagagttaaattatggcagagacaagtctgttagaggctggggcctctgcagcctctacagctgcggctttggagaacttacaggtggaggcgagctgctctgtgtgcctggagtatctgaaggaacctgtcatcattgagtgtgggcacaacttctgcaaagcttgcatcacccgctggtgggaggacctagagagggacttcccttgtcctgtctgtcgaaagacatcccgctaccgcagtctccgacctaatcggcaactaggcagtatggtggaaattgccaagcagctccaggccgtcaagcggaagatccgggatgagagcctctgcccccaacaccatgaggccctcagccttttctgttatgaggaccaggaggctgtatgcttgatatgtgcaatttcccacacccaccgggcccacaccgttgtgccactggacgacgctacacaggagtacaaggaaaaactgcagaagtgtctggagcccctggaacagaagctgcaggagatcactcgctgcaagtcctctgaggagaagaagcctggtgagctcaagagactagtggaaagtcgccgacagcagatcttgagggagtttgaagagcttcataggcggctggatgaagagcagcaggtgttgctttcacgactggaagaagaggaacaggacattctgcagcgactccgagaaaatgctgctcaccttggggacaagcgccgggacctggcccacttggctgccgaggtggagggcaagtgcttacagtcaggcttcgagatgcttaaggatgtcaaaagtaccctggaaaagaatattcctagaaagttcggaggctcactctcaacgatctgtccacgggatcataaggctctccttggattagtaaaagaaatcaacagatgtgaaaaggtgaagaccatggaggtgacttcagtatccatagagctggaaaagaacttcagcaattttccccgacagtactttgccctaaggaaaatccttaaacagctaattgcggatgtgaccctggaccccgagacagctcatcctaacctagtcctgtcagaggatcgtaagagcgtcaagttcgtggagacaagactccgggatctccctgacacaccaaggcgtttcaccttctacccttgcgtcctggctactgagggtttcacctcaggtcgacactactgggaggtggaggtgggcgacaagacccactgggcagtgggtgtatgccgggactccgtgagccgaaagggcgagttgactccactccctgagactggctactggcgggtgcggctatggaatggggacaaatatgcagccaccaccacaccttttacccctttgcacatcaaggtgaaacccaagcgggtaggcatattcctagactatgaggccggcacactgtctttctacaatgtcacagaccgctctcatatctacaccttcactgatacttttactgagaaactttggcccctcttctacccaggcatccgggctggacggaagaatgctgcaccacttaccatcaggcccccaacagattgggagtgacaggttgggatgtgggaatgactggggtgaggcagggtcaagtgctacgggcctccttcccgtgtcctgctggaacgtcttcgtgtccacctgggtccagtcctgaatcatcttggagaaacaccttggtttctaggatggttttgtgtggagggggaggtaggactgggctggatgagagagcacagctgtgacttcctcctaactgtcagggtggggagctggttcccagaggattgtctaccctgaagtccatcaggttttctgttgcacaaggacgggtcaggaaggaaggagaggcttttccagaaacaaaaaatctgtgagggtctgacttgctcaaaccagaggaggaaacagaaacccctgcacatctttttagggggttctttgacccaggatagtcttgcttcttgaggtagatcacaggggtctgtgtacctctgaattcatgagagatgaatgacagatgctctcatgggtctagatattgaggagtttttctgagggcagagattggacatcaacaaggctagaagggtcagggaagtgggctaaaggaacagattcctagagattaatgaagaggagggaggtttctttggtcttctattccaagggtaaggttgcgattatgggtaagattggccagaggtaggaatgtggggagaaggagaggctgaaaagaaagcagaggagaacccaggtccctgcctcagccttcagcagagttggcttattgcctgcctctataccaataagtcagtcaccttgctcctctccagaggcaaagtggaagagatcctgcaagacacatctatcctttcacagtgttcccaagggaacttggaaaggagagtcaggtattagaggaaagagaagggtatttgtatacaaagccctggccttaaagaatgttacttagtagctactcccaaattgtcagccttcttacctggccaaggtgtccaagccagaaaggaaaaaaggttatggagtctttctcaccctaaggacagggtggaagagggtggtatatagggaagggccagataggcaacttcatttggcttgtgtgcatctggcctggaactggtgttaagccaggcttttgcttgtttgttgccatccctcaccctttgccatttcccttttcagagaatgtaaatgattttcatgttaggccaaaataaacaacttatagggtacatatgttgtcataaaaggtaaaagtgatgcatgccaaaccaaactaaaccaatttggattatctgctattcgggtaatcttcacagaaatgactgagagaagaatctgcagtttactgagggcatttcagttcctcctaccacctcaacaggactttgtccagactctcctcctcttacctttgtgccttgactgtggttctttgtggcaagatactttggttggttaaaataatatggaacaaaggatccactgaagtg

SEQ ID NO: 208917 - protein, 290 aa, Artificial Sequence
  derived and/or modified sequence
MVLLHVKRGDESQFLLQAPGSTELEELTVQVARVYNGRLKVQRLCSEMEELAEHGIFLPPNMQGLTDDQIEELKLKDEWGEKCVPSGGAVFKKDDIGRRNGQAPNEKMKQVLKKTIEEAKAIISKKQVEAGVCVTMEMVKDALDQLRGAVMIVYPMGLPPYDPIRMEFENKEDLSGTQAGLNVIKEAEAQLWWAAKELRRTKKLSDYVGKNEKTKIIAKIQQRGQGAPAREPIISSEEQKQLMLYYHRRQEELKRLEENDDDAYLNSPWADNTALKRHFHGVKDIKWRPR

SEQ ID NO: 208918 - protein, 189 aa, Artificial Sequence
  derived and/or modified sequence
MVLLHVKRGDESQFLLQAPGSTELEELTVQVARVYNGRLKVQRLCSAPNEKMKQVLKKTIEEAKAIISKKQVEAGVCVTMEMVKDALDQLRGAVMIVYPMGLPPYDPIRMEFENKEDLSGTQAGLNVIKEAEAQLWWAAKELRRTKKLSDYVGKNEKTKIIAKIQQVSTFCFNVSVVFVISLQTDKNVQ

SEQ ID NO: 208919 - protein, 245 aa, Artificial Sequence
  derived and/or modified sequence
MVLLHVKRGDESQFLLQAPGSTELEELTVQVARVYNGRLKVQRLCSEMEELAEHGIFLPPNMQGLTDDQIEELKLKDEWGEKCVPSGGAVFKKDDIGRRNGQAPNEKMKQVLKKTIEEAKAIISKKQVEAGVCVTMEMVKDALDQLRGAVMIVYPMGLPPYDPIRMEFENKEDLSGTQAGLNVIKEAEAQLWWAAKELRRTKKLSDYVGKNEKTKIIAKIQQVSTFCFNVSVVFVISLQTDKNVQ

SEQ ID NO: 208920 - DNA, 570 bp, Artificial Sequence
  derived and/or modified sequence
atggtgctgctgcacgtgaagagaggcgacgagagccagttcctgctgcaggcccccggcagcaccgagctggaggagctgaccgtgcaggtggccagagtgtacaacggcagactgaaggtgcagagactgtgcagcgcccccaacgagaagatgaagcaggtgctgaagaagaccatcgaggaggccaaggccatcatcagcaagaagcaggtggaggccggcgtgtgcgtgaccatggagatggtgaaggacgccctggaccagctgagaggcgccgtgatgatcgtgtaccccatgggcctgcccccctacgaccccatcagaatggagttcgagaacaaggaggacctgagcggcacccaggccggcctgaacgtgatcaaggaggccgaggcccagctgtggtgggccgccaaggagctgagaagaaccaagaagctgagcgactacgtgggcaagaacgagaagaccaagatcatcgccaagatccagcaggtgagcaccttctgcttcaacgtgagcgtggtgttcgtgatcagcctgcagaccgacaagaacgtgcagtag

SEQ ID NO: 208921 - DNA, 738 bp, Artificial Sequence
  derived and/or modified sequence
atggtgctgctgcacgtgaagagaggcgacgagagccagttcctgctgcaggcccccggcagcaccgagctggaggagctgaccgtgcaggtggccagagtgtacaacggcagactgaaggtgcagagactgtgcagcgagatggaggagctggccgagcacggcatcttcctgccccccaacatgcagggcctgaccgacgaccagatcgaggagctgaagctgaaggacgagtggggcgagaagtgcgtgcccagcggcggcgccgtgttcaagaaggacgacatcggcagaagaaacggccaggcccccaacgagaagatgaagcaggtgctgaagaagaccatcgaggaggccaaggccatcatcagcaagaagcaggtggaggccggcgtgtgcgtgaccatggagatggtgaaggacgccctggaccagctgagaggcgccgtgatgatcgtgtaccccatgggcctgcccccctacgaccccatcagaatggagttcgagaacaaggaggacctgagcggcacccaggccggcctgaacgtgatcaaggaggccgaggcccagctgtggtgggccgccaaggagctgagaagaaccaagaagctgagcgactacgtgggcaagaacgagaagaccaagatcatcgccaagatccagcaggtgagcaccttctgcttcaacgtgagcgtggtgttcgtgatcagcctgcagaccgacaagaacgtgcagtag

SEQ ID NO: 208922 - DNA, 873 bp, Artificial Sequence
  derived and/or modified sequence
atggttttgttacacgtgaaaagaggggatgagagccagttcctgctccaggctccagggtcgacagagctcgaagagcttacggtgcaggtggccagggtctataatggccggctcaaagttcagagactgtgttcggagatggaagagcttgctgagcacgggatctttttgcctccaaacatgcagggcctcactgatgatcaaatcgaggaactgaaactcaaagatgaatggggcgaaaagtgtgtgccttcgggaggggcagtcttcaaaaaggacgacatcggccgaaggaatgggcaggccccaaatgaaaaaatgaaacaggttttgaaaaaaactattgaagaagccaaggcaataatcagtaagaagcaagtcgaagccggtgtgtgtgtcacaatggagatggtaaaggacgcactagaccaattgagaggagcagttatgatcgtatatccaatgggactcccaccgtacgaccccattcggatggaatttgaaaataaggaggatctttcagggacacaggcgggactcaacgtcattaaggaagccgaggcacagctgtggtgggccgctaaggagcttagaaggacaaagaaactctccgattacgtcggaaagaatgagaagacaaaaattattgccaaaatccagcagaggggccaaggcgcaccagctcgagagccaattatctcatctgaggagcagaagcagcttatgctgtactaccacaggagacaagaggagctgaaacgactggaggaaaatgacgatgacgcatatctgaactccccctgggcagacaataccgccttgaagcgacacttccatggtgtgaaagatataaagtggcgaccgcgctag

SEQ ID NO: 208923 - DNA, 570 bp, Artificial Sequence
  derived and/or modified sequence
atggtgttgctgcacgtaaaacgcggagacgagtcacagtttttgctgcaggccccaggttccacagaactggaggaactcacggtccaggtcgccagggtttacaacggccgactaaaagttcagcggctctgctcggcccccaacgagaagatgaaacaagtcctcaagaagactatcgaagaagctaaggcaataatctctaagaagcaggtggaggcaggcgtctgcgtcacaatggagatggtgaaggatgctctggatcagctcaggggggcagtgatgatcgtgtatcccatgggtctccccccatatgatccaatccggatggagtttgaaaacaaagaggatctgtccgggacccaagccggactcaatgtaatcaaggaagccgaggcccagctgtggtgggccgctaaggagctccggcgaacgaagaaactgagtgactatgtcggcaaaaacgagaaaaccaaaataatagccaaaatccagcaggtgtcaacattttgttttaacgtgagcgtggtgttcgtgatcagccttcagaccgataaaaacgttcaatag

SEQ ID NO: 208924 - DNA, 738 bp, Artificial Sequence
  derived and/or modified sequence
atggttctgctgcacgtcaagcgcggcgatgaaagccaattcttacttcaggctcctggaagcaccgagttggaggagctgacagtgcaagtagccagggtctataatggccgactaaaagttcagcgactgtgtagcgagatggaggaactcgccgaacatggcatttttctcccgcctaatatgcagggtctgaccgatgaccaaatcgaagaacttaaactgaaggacgagtggggtgagaagtgtgtacctagcggtggggcggtcttcaagaaagatgacatagggagaagaaatgggcaggcaccaaatgaaaagatgaaacaagtcttgaaaaaaactatcgaggaagccaaggcgatcatctccaagaagcaggtcgaggcgggagtctgcgtgactatggagatggttaaggatgctttggaccagctgcgcggcgctgtgatgattgtttaccccatgggactaccgccctacgatcctatcagaatggaattcgagaacaaggaggacctcagcggaacacaagccggccttaacgtgataaaagaagccgaagcacaactgtggtgggcagccaaagagctcagacggacgaagaaactttcagactacgtgggcaagaatgaaaagaccaagattattgccaaaatccagcaggtgagcaccttctgttttaatgtctctgtggtctttgtgatctcccttcagaccgacaagaacgtacagtag

SEQ ID NO: 208925 - DNA, 873 bp, Artificial Sequence
  derived and/or modified sequence
atggtgctgctgcacgtgaagagaggagatgagagccagttcctgctgcaggcccctggcagcacagagctggaggagctgactgtgcaggtggcccgggtgtacaacggccgcctgaaggtgcagaggctgtgcagcgagatggaggagctggccgagcacggcatcttcctgccccccaacatgcagggcctgacagatgaccagatcgaggagctgaagctgaaggatgagtggggcgagaagtgtgtgcccagcggcggcgctgtgttcaagaaggatgacatcggcagaagaaatggccaggccccaaatgagaagatgaagcaggtgctgaagaagaccatcgaggaggccaaggccatcatcagcaagaagcaggtggaggccggcgtgtgtgtgaccatggagatggtgaaggatgccctggaccagctgcggggagctgtgatgattgtgtaccccatgggcctgcccccctatgaccccatccgcatggagtttgagaacaaggaggacctgagcggcacccaggccggcctgaatgtcatcaaggaggccgaggcccagctgtggtgggccgccaaggagctgcggaggaccaagaagctgagtgactatgtgggcaagaatgagaagaccaagatcatcgccaagatccagcagaggggccagggcgccccagcccgggagcccatcatcagcagcgaggagcagaagcagctgatgctgtactaccaccggcggcaggaggagctgaagaggctggaggagaatgatgatgatgcctacctgaacagcccctgggccgacaacacagccctgaagaggcacttccacggcgtgaaggacatcaagtggaggcccaggtag

SEQ ID NO: 208926 - DNA, 570 bp, Artificial Sequence
  derived and/or modified sequence
atggtgctgctgcacgtgaagagaggagatgagagccagttcctgctgcaggcccctggcagcacagagctggaggagctgactgtgcaggtggcccgggtgtacaacggccgcctgaaggtgcagaggctgtgcagcgccccaaatgagaagatgaagcaggtgctgaagaagaccatcgaggaggccaaggccatcatcagcaagaagcaggtggaggccggcgtgtgtgtgaccatggagatggtgaaggatgccctggaccagctgcggggagctgtgatgattgtgtaccccatgggcctgcccccctatgaccccatccgcatggagtttgagaacaaggaggacctgagcggcacccaggccggcctgaatgtcatcaaggaggccgaggcccagctgtggtgggccgccaaggagctgcggaggaccaagaagctgagtgactatgtgggcaagaatgagaagaccaagatcatcgccaagatccagcaggtgtccaccttctgcttcaacgtgtctgtggtgtttgtgatcagcctgcagacagacaagaatgtgcagtag

SEQ ID NO: 208927 - DNA, 738 bp, Artificial Sequence
  derived and/or modified sequence
atggtgctgctgcacgtgaagagaggagatgagagccagttcctgctgcaggcccctggcagcacagagctggaggagctgactgtgcaggtggcccgggtgtacaacggccgcctgaaggtgcagaggctgtgcagcgagatggaggagctggccgagcacggcatcttcctgccccccaacatgcagggcctgacagatgaccagatcgaggagctgaagctgaaggatgagtggggcgagaagtgtgtgcccagcggcggcgctgtgttcaagaaggatgacatcggcagaagaaatggccaggccccaaatgagaagatgaagcaggtgctgaagaagaccatcgaggaggccaaggccatcatcagcaagaagcaggtggaggccggcgtgtgtgtgaccatggagatggtgaaggatgccctggaccagctgcggggagctgtgatgattgtgtaccccatgggcctgcccccctatgaccccatccgcatggagtttgagaacaaggaggacctgagcggcacccaggccggcctgaatgtcatcaaggaggccgaggcccagctgtggtgggccgccaaggagctgcggaggaccaagaagctgagtgactatgtgggcaagaatgagaagaccaagatcatcgccaagatccagcaggtgtccaccttctgcttcaacgtgtctgtggtgtttgtgatcagcctgcagacagacaagaatgtgcagtag

SEQ ID NO: 208928 - DNA, 873 bp, Artificial Sequence
  derived and/or modified sequence
atggtgctgctgcacgtgaagcggggcgacgagagccagttcctgctgcaggcccctggctctacggagttggaggaactgaccgtacaggttgcaagagtgtataatgggagattgaaggttcagagactgtgcagcgagatggaggagctggcagaacacggaatatttctgcccccaaacatgcagggtctgacagacgatcagatcgaggagctgaagctcaaggacgagtggggtgagaaatgtgtcccctccggtggcgcagtgtttaaaaaagacgacattggtcgcagaaacggccaggcccctaacgagaagatgaaacaggtcctgaagaaaacaatcgaagaggctaaggcaataattagcaaaaagcaggtggaggctggggtttgcgtcactatggagatggtgaaagatgcgctagatcagctgagaggtgccgtaatgatcgtctatccaatgggactgccaccctacgaccctatccgcatggaattcgagaacaaggaggacctgagcggtacgcaggctggtttgaatgttattaaggaggctgaagcccagctttggtgggctgccaaggaattgaggaggaccaagaagctatctgattacgtgggaaaaaacgaaaagaccaagatcattgccaagattcaacaaagaggacagggagctcccgctagggaaccgattatatcttctgaggaacagaaacaactaatgctttactatcatagacgacaagaggaacttaagagactagaagagaatgacgacgatgcgtacctgaattcgccttgggccgataataccgccctgaagagacatttccacggggtcaaggacattaagtggcgcccgcgttag

SEQ ID NO: 208929 - DNA, 570 bp, Artificial Sequence
  derived and/or modified sequence
atggtgctgctgcacgtgaagcggggcgacgagagccagttcctgcttcaggctcccggaagcacagagctggaagaactcactgtgcaggtggcacgcgtttacaatggtcggcttaaagtccagaggttgtgtagtgcaccaaacgagaagatgaagcaggtgctcaagaagaccatcgaagaagctaaggccattatttcgaaaaaacaagtggaggccggggtgtgcgttactatggagatggtcaaggatgccctggatcagctgcgaggcgccgtcatgatcgtgtaccccatggggctgccgccctatgatccaatcaggatggagtttgagaataaggaagatctgtccggcacacaggcggggctgaacgttattaaagaggctgaagcccagctctggtgggccgcaaaggagctcaggcgcaccaagaaactatccgactatgtcggtaaaaacgaaaaaacaaaaatcatagcaaagatccagcaggtgtcaaccttttgcttcaatgtgtccgtggtgtttgtgatctcgcttcagacagacaaaaacgtccagtag

SEQ ID NO: 208930 - DNA, 738 bp, Artificial Sequence
  derived and/or modified sequence
atggtgctgctgcacgtgaagcggggcgacgagagccagttcctgctccaagcccctgggtccacggagctcgaagaactaaccgtacaggtagctagggtgtataatgggcgcctgaaagtacagcgtctttgctcagaaatggaagagctggccgaacacgggatctttctgccgcctaatatgcagggtcttacagatgaccagattgaagagctgaaactcaaagacgaatggggcgagaagtgtgtccccagcgggggagctgtgtttaaaaaggatgacattggacgtagaaatggccaggcacctaatgagaagatgaagcaggtgttgaagaagaccattgaagaggcgaaggcaataatctctaaaaaacaagtggaggcgggtgtttgcgtgactatggagatggtgaaggatgctcttgaccaacttagaggtgccgtaatgattgtctacccaatgggactgccaccatatgatcctatccgcatggaattcgaaaataaggaggatctgtcgggaacacaagcgggactgaacgtgataaaagaggctgaagcgcagttgtggtgggcagcaaaggagttgcggcgcacaaagaaactcagcgactacgtgggtaaaaatgaaaagactaagatcatcgcaaaaattcaacaagtatccacattctgcttcaacgtgagcgtggtgttcgtgatttccctgcaaaccgataagaatgtccagtag

SEQ ID NO: 208931 - DNA, 873 bp, Artificial Sequence
  derived and/or modified sequence
atggtactcctgcacgtcaagcgtggagacgagagccaatttctgttgcaagcccctgggtctacagaactagaggaactgacagtgcaggtggcaagagtctacaacggacggctcaaggttcaacgactgtgttccgaaatggaggaactagccgagcacggcatcttcctgccaccaaacatgcaggggctgaccgacgaccagatcgaagaacttaaactcaaagacgagtggggagagaaatgtgtgccatcgggcggtgcagtgtttaaaaaagacgacataggcaggcgcaacggacaagcacctaatgaaaaaatgaagcaggtgctgaaaaaaactatcgaagaggccaaagcgatcatatccaaaaagcaggttgaagccggtgtatgcgttactatggaaatggttaaggatgctctggatcagctcaggggcgctgtcatgatcgtgtaccccatgggcctgccaccatatgacccaattcggatggaatttgaaaataaagaagatctgtcgggtacccaggccggacttaatgtgatcaaggaggccgaggcccagctgtggtgggcagctaaagaactgcgcagaaccaagaagctatccgattacgtgggcaaaaacgaaaaaaccaagattatcgcaaagatccagcagaggggtcagggggctcctgcaagagaacctattatttcgagtgaagaacaaaaacaactcatgctgtattatcataggcgacaggaggaactaaagaggttagaggaaaatgatgatgatgcctatttgaatagcccttgggccgacaatacggccctgaagcgacactttcacggtgttaaagacatcaagtggagacctcggtag

SEQ ID NO: 208932 - DNA, 570 bp, Artificial Sequence
  derived and/or modified sequence
atggtgctgttgcatgttaaaaggggcgacgagtctcagttcctccttcaggcaccgggaagcaccgaacttgaagagttgaccgtccaggtcgcccgagtgtacaacggcaggttgaaagtccagcggctatgtagcgcccctaatgagaagatgaagcaggttctgaaaaaaaccatcgaggaagcaaaagccattatatccaagaaacaagtggaggccggagtgtgcgtgactatggagatggtgaaggatgcactggaccagctgaggggtgccgtcatgatcgtgtatccaatgggcctgcccccatatgatccgattagaatggagttcgaaaacaaggaggacctgagtgggacacaggctggattgaatgtaattaaggaagcagaggcccagttgtggtgggcagctaaggagcttaggcggacaaaaaaattgtccgattacgtgggtaaaaatgagaagacaaagattattgctaagatacaacaggtaagcacattctgttttaacgttagcgttgttttcgtgatatcactgcagactgacaagaacgtgcaatag

SEQ ID NO: 208933 - DNA, 738 bp, Artificial Sequence
  derived and/or modified sequence
atggttctcttgcatgtaaaaaggggagacgagtctcagttcctgctgcaggccccaggcagcactgagctcgaagaactgaccgtgcaggtggcacgcgtttacaatgggaggctcaaggtgcaacgtctgtgcagtgagatggaagagctggcagagcatggcatttttctgccacccaatatgcagggcctcaccgacgatcagattgaagagcttaagctcaaggatgaatggggagagaaatgcgtaccgagcggtggcgcagttttcaaaaaggatgacataggcagacgaaacggccaagcaccaaatgaaaagatgaaacaagtgctgaaaaaaacaatcgaggaggcaaaggcaataatttctaaaaaacaggtagaggctggtgtgtgcgttacaatggaaatggttaaggacgccctcgatcagcttcgaggcgcagtgatgattgtatacccaatgggactgccgccttatgatcctattaggatggagttcgaaaacaaagaggacctgagtgggactcaagccggattgaatgttatcaaagaagcagaagcccaattgtggtgggccgcaaaagagctgcgcagaacgaagaagctttcagactacgtgggtaagaacgagaaaacgaagataatcgccaaaatacagcaggtgtcaacattttgcttcaacgtgtctgtagtgttcgtgatcagtctgcagaccgacaagaacgtgcaatag

SEQ ID NO: 208934 - DNA, 1556 bp, Artificial Sequence
  derived and/or modified sequence
agaatcagctgtcctctcagactgtgtgggtggtttccccggccgcagctccgtacgggcttggattgctgggcctcggtgcaccccagcctcccccactcgggttctgagcttgagctggcggctctttaactctgcttcactgttgctcttggcaacatccacttccgggagcgagtgccgtttcccccgctcaccgcgggctagggagcgtgggattccggactgtgagcggctgttagtgcgtcgcagctgctggcgatccggcgaccctcggccggcaggacccgcgggccacgcagccggggccttctcaacgcctcagtacctcggcgggaccgccatggttctgctgcacgtgaagcggggcgacgagagccagttcctgctgcaggcgcctgggagtaccgagctggaggagctcacggtgcaggtggcccgggtctataatgggcggctcaaggtgcagcgcctctgctcagctccaaatgagaagatgaagcaagtgttaaagaagactatagaagaagccaaagcaataatatctaagaaacaagtggaagccggtgtctgtgttaccatggagatggtgaaagatgccttggaccagcttcgaggcgcggtgatgattgtttaccccatggggttgccaccgtatgatcccatccgcatggagtttgaaaataaggaagacttgtcgggaacacaggcagggctcaacgtcattaaagaggcagaggcgcagctgtggtgggcagccaaggagctgagaagaacgaagaagctttcagactacgtggggaagaatgaaaaaaccaaaattatcgccaagattcagcaagtaagtactttttgctttaatgtgtcagtagtttttgttatttcccttcaaactgataaaaatgtacagtgaatccgaaagatttaaactactggtacaaatattttaatcttattggctcgggtttaaactaaaaatatcctcttcctgcacaccaacaaaaactggaagaaaatatggattgagtaccaatatctagagtttgttttaatatgtgggggagaggaaatatactatgttaatttcaagcgtaaaaatagggctgcaagtaaacagatatgttccttgaaatgtaaaatttcgcccgtcactgatttcaggctttttcaaactgctgatgctgtgtacaggagggggaggaggaaaggttcgagacctttgaaggacatcgtgtagcgctgtaacctgaggggccgccttggttttgtgggtgctcctacgtcactaggctgtgattttggggaaatggggccctccaccttatgtagatccagagtccgtggctctgagcatcctccctttcccactggacctgcctgcagtgtctgccttgggaatggtcaagacagagatggtatcgtgcagcctctggtctccacacagtgagagtccagggctcagggctgctcaagaccaaggcttcccttgatgcttcacttcgggtgatcagacatgggggacctgtttatctttagtagccggcaaaggcaatcgt

SEQ ID NO: 208935 - DNA, 2319 bp, Artificial Sequence
  derived and/or modified sequence
agaatcagctgtcctctcagactgtgtgggtggtttccccggccgcagctccgtacgggcttggattgctgggcctcggtgcaccccagcctcccccactcgggttctgagcttgagctggcggctctttaactctgcttcactgttgctcttggcaacatccacttccgggagcgagtgccgtttcccccgctcaccgcgggctagggagcgtgggattccggactgtgagcggctgttagtgcgtcgcagctgctggcgatccggcgaccctcggccggcagtacctcggcgggaccgccatggttctgctgcacgtgaagcggggcgacgagagccagttcctgctgcaggcgcctgggagtaccgagctggaggagctcacggtgcaggtggcccgggtctataatgggcggctcaaggtgcagcgcctctgctcagaaatggaagaattagccgaacatggcatatttctccctcctaatatgcaaggactgaccgatgatcagattgaagaattgaaattgaaggatgaatggggtgaaaaatgcgtacccagcggaggtgcagtgtttaaaaaggatgatattggacgaaggaatgggcaagctccaaatgagaagatgaagcaagtgttaaagaagactatagaagaagccaaagcaataatatctaagaaacaagtggaagccggtgtctgtgttaccatggagatggtgaaagatgccttggaccagcttcgaggcgcggtgatgattgtttaccccatggggttgccaccgtatgatcccatccgcatggagtttgaaaataaggaagacttgtcgggaacacaggcagggctcaacgtcattaaagaggcagaggcgcagctgtggtgggcagccaaggagctgagaagaacgaagaagctttcagactacgtggggaagaatgaaaaaaccaaaattatcgccaagattcagcaagtaagtactttttgctttaatgtgtcagtagtttttgttatttcccttcaaactgataaaaatgtacagtgaatccgaaagatttaaactactggtacaaatattttaatcttattggctcgggtttaaactaaaaatatcctcttcctgcacaccaacaaaaactggaagaaaatatggattgagtaccaatatctagagtttgttttaatatgtgggggagaggaaatatactatgttaatttcaagcgtaaaaatagggctgcaagtaaacagatatgttccttgaaatgtaaaatttcgcccgtcactgatttcaggctttttcaaactgctgatgctgtgtacaggagggggaggaggaaaggttcgagacctttgaaggacatcgtgtagcgctgtaacctgaggggccgccttggttttgtgggtgctcctacgtcactaggctgtgattttggggaaatggggccctccaccttatgtagatccagagtccgtggctctgagcatcctccctttcccactggacctgcctgcagtgtctgccttgggaatggtcaagacagagatggtatcgtgcagcctctggtctccacacagtgagagtccagggctcagggctgctcaagaccaaggcttcccttgatgcttcacttcgggtgatcagacatgggggacctgtttatctttagtagccggcaaaggcaatcgtaaaacatttgttgtaacttcaggattgtcactctaagaacaccttaatccacaatttgctctgctctcctctttgcagaggggacagggagctccagcccgagagcctattattagcagtgaggagcagaagcagctgatgctgtactatcacagaagacaagaggagctcaaggtagcaggggacagatgggctttctgcagtgctggcgcccacacatagcctgtgtgccttacctggggctgctggggagcagtgagctctgcagaatgccggggaggggtctttctagagcttctgtctgcaggtctgtcggggtcctgccaggtgtcccctggtgttagacatggcagtatcctgctcctagagggcagggagagggggaggtcagtcatggactctttcttcagtctctttatgtgcaaaacactttcctgaaatgcctgcctgaataaaacatacttatttccagagattggaagaaaatgatgatgatgcctatttaaactcaccatgggcggataacactgctttgaaaagacattttcatggagtgaaagacataaagtggagaccaagatgaagttcaccagctgatgacacttccaaagagattagctcacctttctcctaggc

SEQ ID NO: 208936 - DNA, 1692 bp, Artificial Sequence
  derived and/or modified sequence
tggagactgaaagcggcggaagggacgctggaatgtggagcggttgtggggcggcagctgcggaactgcgcgattgtggttcccgccgtatttcccgttccccatctagtaactcccatctcagcccacgtatctccctgagtggaaatctcgggccccagaccagtcgattgggaggtccgccctccccttcagcgacttggtctgtgttttggcagttgccgcgacaacagtcacttccgggaaggggctctgcgaatctccttccgtcggtccgctcagaatcagctgtcctctcagactgtgtgggtggtttccccggccgcagctccgtacgggcttggattgctgggcctcggtgcaccccagcctcccccactcgggttctgagcttgagctggcggctctttaactctgcttcactgttgctcttggcaacatccacttccgggagcgagtgccgtttcccccgctcaccgcgggctagggagcgtgggattccggactgtgagcggctgttagtgcgtcgcagctgctggcgatccggcgaccctcggccggcaggacccgcgggccacgcagccggggccttctcaacgcctcagtacctcggcgggaccgccatggttctgctgcacgtgaagcggggcgacgagagccagttcctgctgcaggcgcctgggagtaccgagctggaggagctcacggtgcaggtggcccgggtctataatgggcggctcaaggtgcagcgcctctgctcagaaatggaagaattagccgaacatggcatatttctccctcctaatatgcaaggactgaccgatgatcagattgaagaattgaaattgaaggatgaatggggtgaaaaatgcgtacccagcggaggtgcagtgtttaaaaaggatgatattggacgaaggaatgggcaagctccaaatgagaagatgaagcaagtgttaaagaagactatagaagaagccaaagcaataatatctaagaaacaagtggaagccggtgtctgtgttaccatggagatggtgaaagatgccttggaccagcttcgaggcgcggtgatgattgtttaccccatggggttgccaccgtatgatcccatccgcatggagtttgaaaataaggaagacttgtcgggaacacaggcagggctcaacgtcattaaagaggcagaggcgcagctgtggtgggcagccaaggagctgagaagaacgaagaagctttcagactacgtggggaagaatgaaaaaaccaaaattatcgccaagattcagcaaaggggacagggagctccagcccgagagcctattattagcagtgaggagcagaagcagctgatgctgtactatcacagaagacaagaggagctcaagagattggaagaaaatgatgatgatgcctatttaaactcaccatgggcggataacactgctttgaaaagacattttcatggagtgaaagacataaagtggagaccaagatgaagttcaccagctgatgacacttccaaagagattagctcacctttctcctaggcaattataatttaaaaaaaaaaaaaaggccacttactgccctctgtaaaagatgttaacatttctagttttcttttagtgtgaatttttaaaatagcagttattcaaggttttagaacttaataaatacctagtcagaagaaaa

SEQ ID NO: 208937 - DNA, 873 bp, Artificial Sequence
  derived and/or modified sequence
atggtgctgctgcacgtgaagagaggcgacgagagccagttcctgctgcaggcccccggcagcaccgagctggaggagctgaccgtgcaggtggccagagtgtacaacggcagactgaaggtgcagagactgtgcagcgagatggaggagctggccgagcacggcatcttcctgccccccaacatgcagggcctgaccgacgaccagatcgaggagctgaagctgaaggacgagtggggcgagaagtgcgtgcccagcggcggcgccgtgttcaagaaggacgacatcggcagaagaaacggccaggcccccaacgagaagatgaagcaggtgctgaagaagaccatcgaggaggccaaggccatcatcagcaagaagcaggtggaggccggcgtgtgcgtgaccatggagatggtgaaggacgccctggaccagctgagaggcgccgtgatgatcgtgtaccccatgggcctgcccccctacgaccccatcagaatggagttcgagaacaaggaggacctgagcggcacccaggccggcctgaacgtgatcaaggaggccgaggcccagctgtggtgggccgccaaggagctgagaagaaccaagaagctgagcgactacgtgggcaagaacgagaagaccaagatcatcgccaagatccagcagagaggccagggcgcccccgccagagagcccatcatcagcagcgaggagcagaagcagctgatgctgtactaccacagaagacaggaggagctgaagagactggaggagaacgacgacgacgcctacctgaacagcccctgggccgacaacaccgccctgaagagacacttccacggcgtgaaggacatcaagtggagacccagatag

SEQ ID NO: 208938 - protein, 420 aa, Artificial Sequence
  derived and/or modified sequence
MFSPGQEEHCAPNKEPVKYGELVVLGYNGALPNGDRGRRKSRFALYKRPKANGVKPSTVHVISTPQASKAISCKGQHSISYTLSRNQTVVVEYTHDKDTDMFQVGRSTESPIDFVVTDTISGSQNTDEAQITQSTISRFACRIVCDRNEPYTARIFAAGFDSSKNIFLGEKAAKWKNPDGHMDGLTTNGVLVMHPRGGFTEESQPGVWREISVCGDVYTLRETRSAQQRGKLVESETNVLQDGSLIDLCGATLLWRTADGLFHTPTQKHIEALRQEINAARPQCPVGLNTLAFPSINRKEVVEEKQPWAYLSCGHVHGYHNWGHRSDTEANERECPMCRTVGPYVPLWLGCEAGFYVDAGPPTHAFTPCGHVCSEKSAKYWSQIPLPHGTHAFHAACPFCATQLVGEQNCIKLIFQGPID

SEQ ID NO: 208939 - DNA, 1263 bp, Artificial Sequence
  derived and/or modified sequence
atgttttcacccggccaagaggagcactgtgcccctaataaagaacccgttaagtatggagaactggtcgtgctcgggtataacggtgctctgcccaacggagataggggcagacgaaagtctcggttcgcactgtataaacgacccaaggctaacggagtcaagccttccacagtacacgtcatcagcacaccgcaggcatccaaggcaataagctgtaaggggcagcatagcattagttacactctgagccggaatcaaaccgtggtagtcgaatacactcatgacaaggatactgacatgttccaggtaggacgatcgaccgagtcacccattgactttgtcgtgactgacacaatatctggcagccagaataccgatgaggcacagatcacccagagcacaatcagccgatttgcatgccgaattgtctgcgataggaatgagccttacacggctcgcatcttcgctgccggctttgacagcagtaagaatatctttctcggagagaaggccgctaagtggaagaacccagacggccacatggatggactgaccaccaacggcgtgctggtgatgcatcctcggggaggcttcacagaggaatcgcagcctggcgtgtggagggagatttccgtgtgcggcgatgtgtatactttgagggagacaagatccgcccagcagaggggaaaattagtggaatcagagaccaatgtattacaggatgggtctttgattgacctgtgcggggctaccctgctctggcgcaccgcagatgggctgttccacacaccgacccaaaagcatatcgaggccctgagacaggagatcaacgcggcaaggccccagtgcccggtaggactgaatacgctggcatttccctccatcaaccgaaaagaagtggtggaggagaagcagccttgggcctatctaagttgtgggcacgttcacggctaccataattggggccacagatcagacaccgaagccaacgaaagggagtgcccaatgtgtcgcactgtgggaccttacgtgcccctgtggctgggatgcgaggccggtttctacgtcgatgccggaccacccacccatgcgtttactccgtgcggtcacgtctgcagcgagaagagcgcaaagtactggagccagatacctttacctcatggcacccacgccttccatgcagcctgccccttctgcgcaactcaactggtgggagaacagaactgcatcaaactcattttccagggtcccattgactag

SEQ ID NO: 208940 - DNA, 1263 bp, Artificial Sequence
  derived and/or modified sequence
atgttcagccctggccaggaggagcactgtgcccccaacaaggagcctgtgaagtatggagagctggtggtgctgggctacaacggggccctgcccaatggagaccggggccgcaggaagagcagatttgccctgtacaagaggcccaaggccaacggggtgaagcccagcacagtgcacgtgatcagcaccccccaggccagcaaggccatcagctgcaagggccagcacagcatctcctacaccctgagcaggaaccagacagtggtggtggagtacacccatgacaaggacacagacatgttccaggtgggccgcagcacagagagccccatcgactttgtggtgacagacaccatcagcggcagccagaacacagatgaggcccagatcacccagagcaccatcagcagatttgcctgcagaattgtgtgtgacagaaatgagccctacacagcccgcatctttgctgctggctttgacagcagcaagaacatcttcctgggggagaaggccgccaagtggaagaacccagatggccacatggatggcctgaccaccaacggggtgctggtgatgcacccccggggcggcttcacagaggagagccagcccggggtgtggagggagatctctgtgtgtggagatgtgtacaccctgcgggagaccaggtctgcccagcagaggggcaagctggtggagagcgagaccaacgtgctgcaggacggcagcctgattgacctgtgtggggccaccctgctgtggaggacagcagatggcctcttccacacccccacccagaagcacatcgaggccctgcggcaggagatcaatgctgcccggccccagtgccctgtgggcctgaacaccctggccttccccagcatcaacaggaaggaggtggtggaggagaagcagccctgggcctacctgagctgtggccacgtgcacggctaccacaactggggccacagaagtgacacagaggccaatgaaagagagtgccccatgtgcaggacagtgggcccctacgtgcccctgtggctgggctgtgaggccggcttctacgtggatgctggcccccccacccacgccttcaccccctgtggccacgtgtgcagcgagaagagcgccaagtactggagccagatccccctgccccacggcacccacgccttccacgccgcctgccccttctgtgccacccagctggtgggggagcagaactgcatcaagctgatcttccagggccccattgattag

SEQ ID NO: 208941 - DNA, 1263 bp, Artificial Sequence
  derived and/or modified sequence
atgttcagccccggccaggaggagcactgcgcccccaacaaggagccagtcaaatacggtgaactcgtggtgctgggctataatggtgcccttcccaacggggaccgagggcgccgaaaatctcggttcgcgctttacaaacggccaaaggccaacggagtcaaacccagtaccgtgcacgttatatctactccccaagcctcgaaagctatctcctgcaaaggccaacactcgatcagctacaccctgtccaggaaccagacagtcgtcgtcgaatatactcacgataaggatactgacatgtttcaagtcggcaggtccaccgagtcaccgattgattttgtcgtgactgacacaatcagcggatcacagaatacggatgaagcacagattacccagtctaccatatcgagatttgcctgtagaatcgtctgtgaccgaaatgaaccatacaccgcaaggatcttcgcggctgggttcgacagtagtaaaaacattttcctaggcgaaaaggccgctaaatggaaaaatcccgacggccatatggatggactgactacaaacggcgtactcgtgatgcatcctcgcggaggctttaccgaggagagtcaacccggcgtgtggcgggaaatctccgtgtgcggcgacgtatataccttaagggagacacgctccgctcagcagcgcgggaaactggtggaatccgaaactaacgtcctgcaggatgggagccttatagatctctgtggagcaacactgctctggaggaccgcagatggactgttccatacaccgacccagaaacacatcgaggcactgcggcaggagattaatgccgctagaccccagtgccctgtgggtctgaacactctcgcttttcccagcattaaccgcaaggaggtggttgaggagaaacagccttgggcctacctctcttgcggacatgtgcacggctatcacaactgggggcacaggtccgatacggaagcaaacgagcgcgagtgccccatgtgccgaactgtcggaccttatgtaccgctgtggctcggctgcgaggcagggttctacgttgacgctggtcctcctacccacgcttttactccatgtggacacgtgtgctccgagaagtctgctaagtactggtcccagatcccactcccacacggcacccatgccttccacgctgcttgtcccttctgtgcgacccagctcgtgggcgagcaaaattgcattaagcttatctttcaaggaccaattgactag

SEQ ID NO: 208942 - DNA, 1263 bp, Artificial Sequence
  derived and/or modified sequence
atgttctcacccggtcaagaagaacactgtgccccaaataaagaaccggtgaaatatggagaactggttgttctaggctacaacggtgcccttcctaacggcgaccgagggcgtcgcaagtccagatttgccctctataagagacctaaggctaacggagtgaagccgagcactgtgcacgtcatctccacgccccaagcttcaaaagccatatcgtgtaagggtcaacattccatttcatatactctgagcaggaaccagaccgttgtggtcgagtatacacatgataaagatactgacatgtttcaagttgggaggtctaccgagagtcctatcgattttgtggtgaccgacaccattagtgggagccagaatacagacgaagcccagatcacccaaagtacgatcagtaggttcgcttgccggatcgtgtgcgaccggaatgagccctatacagccagaatttttgcagccggatttgactctagcaagaatattttcctgggcgaaaaggctgccaagtggaagaacccagacgggcacatggacggactgactacaaatggtgtgctggtcatgcacccgcgaggaggtttcaccgaggagtctcagcccggtgtttggcgggagatctccgtgtgtggtgacgtgtacacactgagagagactcgctccgctcagcagcggggaaagctggtggagtctgagaccaacgtcctacaggatggcagtttgattgatctgtgcggggcaaccctgttgtggagaactgcagacgggttgtttcataccccgactcagaaacatattgaggccttacggcaggagatcaacgcagctaggccacagtgcccggttggcttaaatacactcgccttccctagtattaaccggaaagaggtggtggaggagaagcagccatgggcatacctttcttgtggccatgttcacggctaccacaattgggggcaccgcagtgataccgaagctaatgagcgagagtgtcccatgtgccgaacagtgggcccatacgtgcctctatggctggggtgtgaggccggattttatgtggatgcagggccaccgacccatgcctttacaccttgtggtcatgtgtgtagtgaaaaaagtgccaagtattggtctcaaataccccttccgcacggcacccatgcttttcacgcagcgtgcccattttgtgcaacccaactggtgggcgagcagaattgtatcaagctgatttttcagggcccaattgactag

SEQ ID NO: 208943 - DNA, 5909 bp, Artificial Sequence
  derived and/or modified sequence
ggcgctcagcgcaggcaggtccccctgctgccgggtcccatttgttgccggctctgactcggggcggccgcggcgcgcggagctccggggagtcaggcggagcagccgcgcagccacgacggagcagcagcgggactggccgccccgcgcccccttcgccgccgtgcccttccccggcgcgctcaccccgttctcgggatgggattgtagcggcggcgcggactcggcggggatcgcggcggaggcggcggcgtcggcggcggcgtcggcggccgagcggggctccatgttttcccctggccaggaggaacactgcgcccccaataaggagccagtgaaatacggggagctggtggtgctcgggtacaatggtgctttacccaatggagatagaggacggaggaaaagtagatttgccctctacaagcggcccaaggcaaatggtgtcaaacccagcaccgtccatgtgatatccacgccccaggcatccaaggctatcagctgcaaaggtcaacacagtatatcctacactttgtcaaggaatcagactgtggtggtggagtacacacatgataaggatacggatatgtttcaggtgggcagatcaacagaaagccctatcgacttcgttgtcacagacacgatttctggcagccagaacacggacgaagcccagatcacacagagcaccatatccaggttcgcctgcaggatcgtgtgcgacaggaatgaaccttacacagcacggatattcgccgccggatttgactcttccaaaaacatatttcttggagaaaaggcagcaaagtggaaaaaccccgacggccacatggatgggctcactactaatggcgtcctggtgatgcatccacgagggggcttcaccgaggagtcccagcccggggtctggcgcgagatctctgtctgtggagatgtgtacaccttgcgagaaaccaggtcggcccagcaacgaggaaagctggtggaaagtgagaccaacgtcctgcaggacggctccctcattgacctgtgtggggccactctcctctggagaacagcagatgggctttttcatactccaactcagaagcacatagaagccctccggcaggagattaacgccgcccggcctcagtgtcctgtggggctcaacaccctggccttccccagcatcaacaggaaagaggtggtggaggagaagcagccctgggcatatctcagttgtggccacgtgcacgggtaccacaactggggccatcggagtgacacggaggccaacgagagggagtgtcccatgtgcaggactgtgggcccctatgtgcctctctggcttggctgtgaggcaggattttatgtagacgcaggaccgccaactcatgctttcactccctgtggacacgtgtgctcggagaagtctgcaaaatactggtctcagatcccgttgcctcatggaactcatgcatttcacgctgcttgccctttctgtgctacacagctggttggggagcaaaactgcatcaaattaattttccaaggtccaattgactgacgcccttgacagccatctacgactttattaacaggttactgtgaagattttgccactaactctagattttacctttttgtaatgctgtttatcagaggagggtgacaggggctggaaataaagagaggggacatggtgatgaaacatggcaggagtgtaacagataccagtggtgtgttgcatgctcaaaacagcagcgtcgtcattgaagtctgcttgattaaaccataatatctttgtaataattggatttaaaatgctatgcttctatttttaaccttgggtttttaaccaagtttttttttttttgtaatcttggacaagactttaaatcatattttacagatgtagaagaaatttattcaaaagtgtgggctcatgaagttcacttcagtgcagtgtggtgtaggtgttacgcgaagggcgcacagtgtctagaaatacttgatcgtggctcaaacctgaccagacagcagaggggcggctctgtacagtgtgactggtggacagatggccttaggcacaggtggttttgaaatctggggctttttctgatttatttttctgacttgttgggggagagaatattcataacttgtgggctttttttttttttaacttcagtggaatttactttagatattcattcatcaaatacatgggacttcacaaacaattttccataactttttagcctgtcttttgttatttctgcctaatatgatttgccccgatactcatcttgcacggccagaactgtttggttgattaaaatacatcagctcttaaaaactcattaactgagggtaattacagtagtagacatggtctgggtactatactaccatgtttatttgctgactgaattaagatttaagaatgattaaaaataagcttttactttttaaaaccacttgaggtttcataaagcttggggtttttttttttcctttgttaagaaagccaaccaatcacaatgatatagtcattgttgtgcactcccttttcaccatctgtcaccttcccttgcagcttaaggagcccagtaagttttgaaaatgtttgcgaatcaaactaaatttaagtgggatgattagatatacacaacaccaagtggtacatctgcagagataattcaaaattcctgcttttgagagagcaaatgagtgttgctgaggaataattaaatgagaatttcataggagctccaccattcctgttactttcatttcattttgattaataattcttggatgcttggcatcgatcgtatcactgctcctagaaggtaaagatcctttaggacatgagactggtagaagctggctgagataaaataagtatttatttaaactaatgttctcttaatttgaccattgcagatttgggtgacttttttttaacctttgtacatatacgtaatttatatgattctaatgtactatatccatacttgaattggttttttcgtattttgcctactggcaaatattttgcctattttcagtcgttctaacctatttgaatacgcttttccttaaagtgatacgataatattactcttgattgctgctgcttaatttgatgtaatatgtttaaagttcagcctctcagttttaatatagctttatttttcagtggagatcattgtttaggatgagacatttttggttttggttttgtttgggtaaattttaaatggtgtgaaaatcgatgacaacagtcctcttacagatagcttgctgtattctgtatagcttactctacctgcagacagaaaatgaaagaaaaaaatggacttgcctagaataatatattgaatgccttttgatttagccagagtctctgatgattagctttcactgatagagtatgtcttttcagcctgtaattctttgggccccaaagaatgacaaaggaggcactcgttctcttttcttgctgtatgcctagaaagtggttgaaggattcttgatgccctaaaaccatcttgtaagctaaatggtcttgcatccagaaaggccagattttacctaccaagaaaaaaagatatttttccagagagttaggtatatcataattttccatttcaagtcctgtttataagtctagtcattctgcaacgtgacatatcccccaaaatgaagttaccttccaagttggacacgtcccgtagttgggcatatgtctaactaaaagtttctgacttttagtaaattcagcttaaatataagttgaaatttgggaaataatttccaagctcttggaaggggtaacagtgaaccgccctccatgggctccacatcttttcctttggcttccaaagtcaggtcccgcccaccctgcctaaggaactgcagagaggtggcaaatcagcaaaaaggacaccaggctcttcttggccacttgtaggaagatccctttacaattttgactaaggagattttttttttcacagttgagttagtttgtgaaaataaagaactctgtagctcaccaaggtggagaaacgcaattcagaaaagtaatttctccaaggtcacttctttttttatgtcttgccatcactttaaaggactagccccactcccccatgtgtatacacaaggaaattgcagaccaattagttgtcttggcctgactctaatgccttttgcaagtagctttccagaagtaaaagtcccagtgatgtattcccatagaaatatttttcagttgtttatgtcgtttactacaaaaaaaaagattcagagtggatggagtacaactctgagtatttttctagtccggaattttttattaataatcggtgctgccgggtcatgcatgctgcaactctcaacatttcccttatttggttcagcttttagcaaaaagggctacagttcaccctgcagagtattaaggtttctggatttttttctcccaactgtggcccaaaagaattaaaatctgttaatataaatagagaacatatttatcattcctcgatagttaattatagactttggtacctttgtgcctcagggaagccacgtgatataactggttatagaatttcagggttagggtttaaagaaaggagaaagccattggaaaaatgatgggctccattaaggagactaatgaatctggatgcagaaatatgtcagaaactggcataaacatgattgtagtagaatttattttccagtaccaatagggaaattattttaagttattacatttactgtattgggaaacttgaggagaactctttagttcataaagcttcaatgtcttttttttttttttcatggaaaaactcaaacctctgttatttgggagctcagtattgtgtggacacttacgagagttttctgcttaattgaagtgtaatataggttgtagaattgttacctgcagttctatggttttgtttcacttcttttcttttttaaagccattctgttctttggatgtgcttgaaagggtgtgtgattacaccattgttaatgctgggtaaaaactatcttcttgcagccttgcctcataacagtggaatttctgatagacaaaccacaggactttgattttaagccaaatccatctccatccctttactgtcaatcttctgtcccagtagtttagcctttgtggcttaggttatgatgcgcctccttctgtgcgaccaatgagacgacttcagcatctttttaaaataatctaagcatcattgaagcagtaacacaaaaaaaaggttcagtattttctttttagtataacttacatcctttcaaataagtctttgccctcatgaagaatccctagaggaagataaggaaaataagtattttccagttttgcttgacagtttctaaacaaacaaaaataaactcaatgaaaggaaagatgtttctttttagctgagatgacagattgcttctctgtattaaatagtctagaagttaaggggatggtcacatttaccatgtattgtgttattagcagttaaattttatgaatatgtttgtaaaattgttgttttatatttcatgtcaaattgaaaagtttatttcttcactattgtacctgtggaaatacaagccattttacaggaaaaaatcttcaaaaactattaaatggatatcagcctgtttgtgagccattgtcttcagattctgtggttgtcactgagttcattaggacatttagtaggttgatacgagtagaactgatttttttcacttctctaacttccaagttaatctccagctgttgagtttattaattgttttatattctgcacaatacatatttaaaccttgattctgaaaatcccctacattttttaattaaagaaatttccttggtgcctata

SEQ ID NO: 208944 - DNA, 1263 bp, Artificial Sequence
  derived and/or modified sequence
atgttcagccccggccaggaggagcactgcgcccccaacaaggagcccgtgaagtacggcgagctggtggtgctgggctacaacggcgccctgcccaacggcgacagaggcagaagaaagagcagattcgccctgtacaagagacccaaggccaacggcgtgaagcccagcaccgtgcacgtgatcagcaccccccaggccagcaaggccatcagctgcaagggccagcacagcatcagctacaccctgagcagaaaccagaccgtggtggtggagtacacccacgacaaggacaccgacatgttccaggtgggcagaagcaccgagagccccatcgacttcgtggtgaccgacaccatcagcggcagccagaacaccgacgaggcccagatcacccagagcaccatcagcagattcgcctgcagaatcgtgtgcgacagaaacgagccctacaccgccagaatcttcgccgccggcttcgacagcagcaagaacatcttcctgggcgagaaggccgccaagtggaagaaccccgacggccacatggacggcctgaccaccaacggcgtgctggtgatgcaccccagaggcggcttcaccgaggagagccagcccggcgtgtggagagagatcagcgtgtgcggcgacgtgtacaccctgagagagaccagaagcgcccagcagagaggcaagctggtggagagcgagaccaacgtgctgcaggacggcagcctgatcgacctgtgcggcgccaccctgctgtggagaaccgccgacggcctgttccacacccccacccagaagcacatcgaggccctgagacaggagatcaacgccgccagaccccagtgccccgtgggcctgaacaccctggccttccccagcatcaacagaaaggaggtggtggaggagaagcagccctgggcctacctgagctgcggccacgtgcacggctaccacaactggggccacagaagcgacaccgaggccaacgagagagagtgccccatgtgcagaaccgtgggcccctacgtgcccctgtggctgggctgcgaggccggcttctacgtggacgccggcccccccacccacgccttcaccccctgcggccacgtgtgcagcgagaagagcgccaagtactggagccagatccccctgccccacggcacccacgccttccacgccgcctgccccttctgcgccacccagctggtgggcgagcagaactgcatcaagctgatcttccagggccccatcgactag

SEQ ID NO: 208945 - protein, 151 aa, Artificial Sequence
  derived and/or modified sequence
MERPEPELIRQSWRAVSRSPLEHGTVLFARLFALEPDLLPLFQYNCRQFSSPEDCLSSPEFLDHIRKVMLVIDAAVTNVEDLSSLEEYLASLGRKHRAVGVKLSSFSTVGESLLYMLEKCLGPAFTPATRAAWSQLYGAVVQAMSRGWDGE

SEQ ID NO: 208946 - DNA, 456 bp, Artificial Sequence
  derived and/or modified sequence
atggaacgtcccgaaccggagcttatccggcagtcatggcgtgcagtgtctcgctcaccactggagcatggaacggtgctgtttgcaagactcttcgctttagaacctgatctgctcccacttttccagtataattgcaggcagtttagcagccccgaggactgtctcagctccccggagtttctggaccacataaggaaggtgatgctggtaattgacgctgcagtgaccaatgttgaggacctttctagcttggaggaatatttggcctctttggggcggaagcaccgcgctgtgggggtgaagctgagttccttttcaaccgtgggcgaatcactgctgtatatgctagaaaagtgcttagggcccgctttcactcccgccacccgtgcagcatggagtcagctctatggagccgtggtgcaggccatgtcccgcggctgggatggagagtag

SEQ ID NO: 208947 - DNA, 456 bp, Artificial Sequence
  derived and/or modified sequence
atggagaggcctgagcctgagctgatccggcagagctggagggctgtgagccgcagccccctggagcacggcaccgtgctgtttgcccggctgtttgccctggagccagacctgctgcccctcttccagtacaactgccggcagttcagcagccctgaggactgcctgagcagccctgagttcctggaccacatcaggaaggtgatgctggtgattgatgctgctgtgaccaacgtggaggacctgagcagcctggaggagtacctggccagcctgggcaggaagcacagagctgtgggcgtgaagctgagcagcttcagcacagtgggggagagcctgctgtacatgctggagaagtgcctgggccctgccttcaccccagccaccagggctgcctggagccagctgtatggagctgtggtgcaggccatgagccggggctgggatggagagtag

SEQ ID NO: 208948 - DNA, 456 bp, Artificial Sequence
  derived and/or modified sequence
atggagcggcccgagcccgagctgatccggcagagctggcgggccgttagccgttctcctctggaacatggcacggtgctgttcgctcgcctgtttgcgcttgagccggacctgttgcctctgttccagtataattgcagacagttttccagcccagaggactgcctctcttcacctgagtttttggaccatatacgcaaggtaatgttggttatagatgccgctgtgaccaacgtggaagatttgtcatcattagaagagtatcttgctagcctggggaggaaacatcgggctgtgggggtgaaactgtcttccttcagcacagtgggtgaatctttgttgtacatgctggaaaaatgcctggggcccgcctttactcctgccactcgtgccgcctggtcacaactgtatggcgctgttgtgcaagcaatgtccagaggctgggatggagagtag

SEQ ID NO: 208949 - DNA, 1884 bp, Artificial Sequence
  derived and/or modified sequence
ttcccaggccaccatagcggctggcggagggagcgcgcgccttgctggcctggagggggcgggggccgtggcggctttaaagcgcccagcccaggcgtcgcggggtggggcggctctggcggctgcggggcgcagggcgcagcggccaagcggggtccccggaagcacagctggggtgtctccacctacgactggccgcgcgccttttctctcccgcgccagggaaggagcggctgcggcccccgccgggcggaggcacggggggcgtacgaggggcggaggggaccgcgtcgcggaggagatggcgcggcacgtgcggtgacggcacccgagccctgagggtcccagccccgcgctccgcgtccccgggacagcatggagcgcccggagcccgagctgatccggcagagctggcgggcagtgagccgcagcccgctggagcacggcaccgtcctgtttgccaggctgtttgccctggagcctgacctgctgcccctcttccagtacaactgccgccagttctccagcccagaggactgtctctcctcgcctgagttcctggaccacatcaggaaggtgatgctcgtgattgatgctgcagtgaccaatgtggaagacctgtcctcactggaggagtaccttgccagcctgggcaggaagcaccgggcagtgggtgtgaagctcagctccttctcgacagtgggtgagtctctgctctacatgctggagaagtgtctgggccctgccttcacaccagccacacgggctgcctggagccaactctacggggccgtagtgcaggccatgagtcgaggctgggatggcgagtaagaggcgaccccgcccggcagcccccatccatctgtgtctgtctgttggcctgtatctgttgtagcccaggctccccaagcttccctgcatcttggtccttgtccccttggccacactggagaggtgatggggcagggctgggtctcagtatcctagagtccagctgcagaaggagtggcttttcctccaggaaggggcttctgggtgtcccctcatccccagtagcctctttcttgcgtttctttttaccttttttggcactccctctgaccccgcgatgagtgttttggtggcagaggtgggatgagctggaaaggtatggaggtgggagaggatggggctcttctgtctgtcctgcttcttcaggtgagtgcaggccaaggcgggggtgagatggctgagcttccagcgccttctgtcctgcctgcccagtcccttcactgctttcctgccccaagatggcttgcttttcacaaataaagagaaagagcagctttagccttcttggtggaatcccaggcagtgggagcagaatcagaactgccagggaagggaagggggacctgggtctcaatgggtctcatttgagtctcgcgggctgtgcagatgccctgacagagtcggtttcctttggcggcattccctttccctcattcagcacttctgctgggaactccctgactattccgctgctgcaggaacccagctagctggccaggtggggaggggctggggaccggccaggaaggaggggtgacttcatcccagagagacccgagttcccccagcccttcatcaccaacccgctcctgcaggagtgagtcttacctcccctggccctcctttctggctcagcctgcagcgactgtgaggccacagctcctcagattcactgcccgctgtgtgccagtactcaggcagctggagagaagagaaggcagcagcagaggcccccgccctcaccccagccatctgcacttgtaccatttgctctgtgctgactgtggtcctataaattcatgagaaataaactggttctgtgtgcctctctga

SEQ ID NO: 208950 - DNA, 456 bp, Artificial Sequence
  derived and/or modified sequence
atggaacgccctgaacccgagcttatcagacagagctggcgggcagtgtcccgttcacctttggagcacggaaccgtcctcttcgcccgtcttttcgccttggagcccgacttgcttcccttattccagtacaactgtcgtcaattcagttctcccgaagattgcttgagcagccctgaattcctcgaccatatccgcaaggtcatgttggtgattgacgctgccgtgaccaacgtggaggacctgtctagtctcgaggaatacctggcttctctcggcaggaagcatagggccgtcggcgtgaagctctcatccttttctacagtgggcgagtccctgctctacatgctggaaaaatgcctaggcccagcctttacaccagccacacgggcagcttggtctcagctctacggcgcagtagtgcaagcaatgtctagagggtgggacggggagtag

SEQ ID NO: 208951 - DNA, 456 bp, Artificial Sequence
  derived and/or modified sequence
atggagagacccgagcccgagctgatcagacagagctggagagccgtgagcagaagccccctggagcacggcaccgtgctgttcgccagactgttcgccctggagcccgacctgctgcccctgttccagtacaactgcagacagttcagcagccccgaggactgcctgagcagccccgagttcctggaccacatcagaaaggtgatgctggtgatcgacgccgccgtgaccaacgtggaggacctgagcagcctggaggagtacctggccagcctgggcagaaagcacagagccgtgggcgtgaagctgagcagcttcagcaccgtgggcgagagcctgctgtacatgctggagaagtgcctgggccccgccttcacccccgccaccagagccgcctggagccagctgtacggcgccgtggtgcaggccatgagcagaggctgggacggcgagtag

SEQ ID NO: 208952 - protein, 350 aa, Artificial Sequence
  derived and/or modified sequence
MAAAGPAAGPTGPEPMPSYAQLVQRGWGSALAAARGCTDCGWGLARRGLAEHAHLAPPELLLLALGALGWTALRSAATARLFRPLAKRCCLQPRDAAKMPESAWKFLFYLGSWSYSAYLLFGTDYPFFHDPPSVFYDWTPGMAVPRDIAAAYLLQGSFYGHSIYATLYMDTWRKDSVVMLLHHVVTLILIVSSYAFRYHNVGILVLFLHDISDVQLEFTKLNIYFKSRGGSYHRLHALAADLGCLSFGFSWFWFRLYWFPLKVLYATSHCSLRTVPDIPFYFFFNALLLLLTLMNLYWFLYIVAFAAKVLTGQVHELKDLREYDTAEAQSLKPSKAEKPLRNGLVKDKRF

SEQ ID NO: 208953 - protein, 337 aa, Artificial Sequence
  derived and/or modified sequence
MAAAGPAAGPTGPEPMPSYAQLVQRGWGSALAAARGCTDCGWGLARRGLAEHAHLAPPELLLLALGALGWTALRSAATARLFRPLAKRCCLQPRDAAKMPESAWKFLFYLGSWSYSAYLLFGTDYPFFHDPPSVFYDWTPGMAVPRDIAAAYLLQGSFYGHSIYATLYMDTWRKDSVVMLLHHVVTLILIVSSYAFRYHNVGILVLFLHDISDVQLEFTKLNIYFKSRGGSYHRLHALAADLGCLSFGFSWFWFRLYWFPLKVLYATSHCSLRTVPDIPFYFFFNALLLLLTLMNLYWFLYIVAFAAKVLTGQVHELKDLREYDTAEAQSLKPSKAE

SEQ ID NO: 208954 - protein, 239 aa, Artificial Sequence
  derived and/or modified sequence
MPESAWKFLFYLGSWSYSAYLLFGTDYPFFHDPPSVFYDWTPGMAVPRDIAAAYLLQGSFYGHSIYATLYMDTWRKDSVVMLLHHVVTLILIVSSYAFRYHNVGILVLFLHDISDVQLEFTKLNIYFKSRGGSYHRLHALAADLGCLSFGFSWFWFRLYWFPLKVLYATSHCSLRTVPDIPFYFFFNALLLLLTLMNLYWFLYIVAFAAKVLTGQVHELKDLREYDTAEAQSLKPSKAE

SEQ ID NO: 208955 - DNA, 1053 bp, Artificial Sequence
  derived and/or modified sequence
atggccgccgccggccccgccgccggccccaccggccccgagcccatgcccagctacgcccagctggtgcagagaggctggggcagcgccctggccgccgccagaggctgcaccgactgcggctggggcctggccagaagaggcctggccgagcacgcccacctggccccccccgagctgctgctgctggccctgggcgccctgggctggaccgccctgagaagcgccgccaccgccagactgttcagacccctggccaagagatgctgcctgcagcccagagacgccgccaagatgcccgagagcgcctggaagttcctgttctacctgggcagctggagctacagcgcctacctgctgttcggcaccgactaccccttcttccacgacccccccagcgtgttctacgactggacccccggcatggccgtgcccagagacatcgccgccgcctacctgctgcagggcagcttctacggccacagcatctacgccaccctgtacatggacacctggagaaaggacagcgtggtgatgctgctgcaccacgtggtgaccctgatcctgatcgtgagcagctacgccttcagataccacaacgtgggcatcctggtgctgttcctgcacgacatcagcgacgtgcagctggagttcaccaagctgaacatctacttcaagagcagaggcggcagctaccacagactgcacgccctggccgccgacctgggctgcctgagcttcggcttcagctggttctggttcagactgtactggttccccctgaaggtgctgtacgccaccagccactgcagcctgagaaccgtgcccgacatccccttctacttcttcttcaacgccctgctgctgctgctgaccctgatgaacctgtactggttcctgtacatcgtggccttcgccgccaaggtgctgaccggccaggtgcacgagctgaaggacctgagagagtacgacaccgccgaggcccagagcctgaagcccagcaaggccgagaagcccctgagaaacggcctggtgaaggacaagagattctag

SEQ ID NO: 208956 - DNA, 1053 bp, Artificial Sequence
  derived and/or modified sequence
atggccgccgcgggtcctgctgcaggtccaacaggcccggagccaatgccatcctacgcccaacttgtgcagagaggctggggttcagcactggccgccgcaaggggctgcaccgactgcgggtgggggctagctcgcaggggactcgctgaacacgcccacctagctccaccagaattacttctcctggctctgggggccctgggctggaccgccttaaggtccgcggccaccgcacggttatttcgccctctcgccaagcgctgttgccttcagcctagagatgcggccaagatgcccgagtcagcttggaagtttctgttttatctcggatcttggtcttatagtgcatacctgttgtttggtacagactatccgttcttccatgaccccccaagcgtgttttatgactggacccctgggatggccgtcccaagagatattgcagccgcttacctgcttcagggcagcttctacggccattctatctatgctactctgtatatggacacctggcgcaaggactccgtggtcatgctgctgcatcacgtggtgaccctcattttaattgtgagctcatatgccttccgctatcacaacgtgggcattctagtgctgttcctgcatgacatcagcgacgtgcagctcgaattcaccaagctgaacatatactttaaatcacggggagggagttaccatcggctgcatgccctggctgccgaccttggctgcctgtcctttggttttagctggttctggtttaggctgtactggttcccccttaaagtgttgtatgccacaagccactgtagcttgaggacagtgcccgacataccattctacttcttttttaatgcactgctgctcttgctgaccctcatgaacttgtactggtttctatacattgttgccttcgccgcgaaagtcctcacaggccaagtgcatgagttaaaggatctaagggagtacgacaccgctgaggctcaaagtctcaagccatccaaggctgagaaacccctaagaaatggtctggtgaaagacaaaaggttctag

SEQ ID NO: 208957 - DNA, 1053 bp, Artificial Sequence
  derived and/or modified sequence
atggctgctgctggccctgctgctggccccactggacctgagcccatgcccagctatgcccagctggtgcagaggggctggggcagcgccctggccgccgcccggggctgcacagactgtggctggggcctggcccggcggggcctggccgagcacgcccacctggcccctcctgagctgctgctgctggccctgggcgccctgggctggacagccctgcggtctgctgccacagcccggctcttccggcccctggccaagcgctgctgcctgcagcccagagatgctgccaagatgcctgagagcgcctggaagttcctgttctacctgggctcctggagctacagcgcctacctgctgtttggaacagactaccccttcttccatgaccccccatctgtgttctatgactggaccccaggcatggctgtgccccgggacattgctgctgcctacctgctgcagggcagcttctacggccacagcatctatgccaccctgtacatggacacctggaggaaggacagcgtggtgatgctgctgcaccacgtggtgaccctcatcctgattgtgtcctcctatgccttccgctaccacaacgtgggcatcctggtgctcttcctgcatgacatcagtgatgtgcagctggagttcaccaagctgaacatctacttcaagagcagaggaggcagctaccaccggctgcacgccctggccgctgacctgggctgcctgagctttggcttctcctggttctggttccggctgtactggttccccctgaaggtgctgtatgccaccagccactgcagcctgaggacagtgcctgacatccccttctacttcttcttcaatgccctgctgctgctgctgaccctgatgaacctgtactggttcctgtacatcgtggcctttgctgccaaggtgctgaccggccaggtgcatgagctgaaggacctgcgggagtatgacacagctgaggcccagagcctgaagcccagcaaggccgagaagcccctgagaaatggcctggtgaaggacaagcgcttctag

SEQ ID NO: 208958 - DNA, 1053 bp, Artificial Sequence
  derived and/or modified sequence
atggccgccgccggccccgccgccggccccaccggccccgagcccatgccctcctacgcccaactggtgcagagaggctggggtagcgcccttgctgccgcccgcggttgtacagactgtggctggggtctggccagacggggcctggccgaacacgcccatcttgcgcccccggagctcctgctgctggctctgggcgccctgggctggacagctcttcggtcagctgccactgctagactgttccggcctcttgctaagaggtgttgcctgcagcctcgggacgccgccaagatgcctgaatctgcctggaagtttctgttctatcttggcagctggtcctactctgcgtatctgctgtttggaaccgattatcctttttttcatgatccaccgagtgtattctatgactggacaccaggtatggcagtgcctagagatatcgccgctgcctatctgttacaaggttccttttacggacacagcatttatgcaaccctgtacatggatacttggagaaaagactccgtagtcatgctgctacaccacgttgtgaccctcattttaatcgtcagttcttacgcattcaggtatcacaacgtgggaattcttgtgctgttcttgcatgacatctccgatgtgcaactggaatttaccaagctgaatatttattttaaatctcgaggcggctcttaccacagattgcacgctttggcggccgacctgggatgcctctctttcggatttagctggttttggttcaggctctattggttccctctgaaagtgctgtacgctacgagccattgttcactccgtaccgtccctgatatacccttctactttttcttcaacgctttgctactgctcttaactctcatgaacctgtattggttcctctatatcgtggccttcgccgcaaaggtgttgaccggccaggttcacgaactgaaggatctgcgggagtacgataccgccgaagcccagtccctgaaaccatccaaggccgaaaaacctctgaggaatggtttggttaaggataagaggttttag

SEQ ID NO: 208959 - DNA, 1053 bp, Artificial Sequence
  derived and/or modified sequence
atggccgctgcgggtccagcagctggcccaaccggtccagagcctatgccctcctatgcccagttagtgcaacgcggatggggctccgccttagccgctgccagggggtgtaccgattgtggctggggtctggctaggcggggactcgcggagcatgctcacttagccccacccgagctgctcctcctcgctctcggcgcactgggttggacagctctgcgcagcgccgcaactgctaggttgttccggccactcgctaagcgctgttgcctgcagccccgtgatgccgcaaaaatgccggagtccgcgtggaagttccttttctatctgggatcttggtcttattcagcctacctcctgttcggaactgattatccattttttcacgacccaccttctgtgttctatgactggacacctggaatggcagtccccagagacatagctgccgcatacctgttgcaaggctcattttacggacacagcatctacgcaaccttgtacatggatacatggagaaaagattcagtggtgatgctgctgcatcatgtggtcacactgatactgattgtgtccagttatgcctttagataccacaatgtcggaatcctagtgctattcctccatgatatctctgacgtacagttagaatttacaaagttaaacatttacttcaagagcagaggcggtagttatcaccgcctgcatgccctggctgcagacctgggctgtctatcatttgggttcagctggttctggtttaggctgtactggttccccctgaaggtgctctatgcaacatcccactgttctcttcggaccgttccagatatacccttctactttttttttaatgcactgctgctgctgctgacgctgatgaatttatactggtttctgtacatcgtcgcctttgccgcaaaggtcctgacaggtcaagttcacgagctgaaagacttaagggagtatgatacggccgaagcccagtccctcaagccttcaaaggccgagaaacctctcaggaacggattggtcaaggacaaacgattctag

SEQ ID NO: 208960 - protein, 189 aa, Artificial Sequence
  derived and/or modified sequence
MALSFSLLMAVLVLSYKSICSLGCDLPQTHSLGNRRALILLAQMGRISPFSCLKDRHDFGLPQEEFDGNQFQKTQAISVLHEMIQQTFNLFSTEDSSAAWEQSLLEKFSTELYQQLNNLEACVIQEVGMEETPLMNEDSILAVRKYFQRITLYLTEKKYSPCAWEVVRAEIMRSLSFSTNLQKILRRKD

SEQ ID NO: 208961 - DNA, 570 bp, Artificial Sequence
  derived and/or modified sequence
atggccctgagcttcagcctgctgatggccgtgctggtgctgagctacaagagcatctgcagcctgggctgcgacctgccccagacccacagcctgggcaacagaagagccctgatcctgctggcccagatgggcagaatcagccccttcagctgcctgaaggacagacacgacttcggcctgccccaggaggagttcgacggcaaccagttccagaagacccaggccatcagcgtgctgcacgagatgatccagcagaccttcaacctgttcagcaccgaggacagcagcgccgcctgggagcagagcctgctggagaagttcagcaccgagctgtaccagcagctgaacaacctggaggcctgcgtgatccaggaggtgggcatggaggagacccccctgatgaacgaggacagcatcctggccgtgagaaagtacttccagagaatcaccctgtacctgaccgagaagaagtacagcccctgcgcctgggaggtggtgagagccgagatcatgagaagcctgagcttcagcaccaacctgcagaagatcctgagaagaaaggactag

SEQ ID NO: 208962 - DNA, 570 bp, Artificial Sequence
  derived and/or modified sequence
atggcattgtctttctccttgctcatggctgtgcttgttctaagttacaagtccatctgttccctgggttgtgatctgcctcaaacccactctctcggcaatcgccgagcattaatcttgctggctcagatgggtagaatcagtcctttttcctgcctcaaggatagacatgatttcgggcttcctcaggaggagttcgacggaaaccagtttcaaaagacccaggctatcagcgtcctgcatgagatgatccagcaaaccttcaaccttttctccacagaggacagcagcgcagcctgggagcagtcactgctagaaaagttttctaccgagctctaccagcagctgaacaacctggaagcatgtgtcatccaggaggtaggaatggaggagacccctctgatgaacgaggattccattctggccgttaggaaatactttcagaggattacactctacctgacagagaaaaaatattctccatgcgcatgggaggtagtcagagcagagattatgcgcagcctcagtttctctaccaatctgcaaaagatcctgagacgtaaggattag

SEQ ID NO: 208963 - DNA, 570 bp, Artificial Sequence
  derived and/or modified sequence
atggccctgtccttcagcctgctgatggctgtgctggtgctgagctacaagagcatctgcagcctgggctgtgacctgccccagacccacagcctgggcaacagaagagccctgatcctgctggcccagatgggccgcatcagccccttcagctgcctgaaggacagacatgactttggcctgccccaggaggagtttgatggcaaccagttccagaagacccaggccatctctgtgctgcacgagatgatccagcagaccttcaacctcttcagcacagaggacagcagcgctgcctgggagcagagcctgctggagaagttcagcacagagctgtaccagcagctgaacaacctggaggcctgcgtcatccaggaggtgggcatggaggagacccccctgatgaatgaagattccatcctggccgtgaggaagtacttccagaggatcaccctgtacctgacagagaagaagtacagcccctgtgcctgggaggtggtgcgggcagagatcatgaggagcctgtccttcagcaccaacctgcagaagatcctgcggaggaaggactag

SEQ ID NO: 208964 - DNA, 570 bp, Artificial Sequence
  derived and/or modified sequence
atggccctgagcttcagcctgctgatggccgtgctggtgctgagctataagtcaatctgctctcttggatgcgacctcccgcagacccactccctggggaatcgacgagcccttatcctcctcgctcagatggggaggatcagccccttttcgtgcctcaaggatcggcacgacttcgggttgccccaggaggaatttgatggaaaccaatttcagaaaacccaggcaattagcgtgctccatgaaatgatccagcagacttttaatctcttctctacggaagactccagcgccgcttgggagcagagtcttttagagaaattttcaactgaactgtatcagcagctcaataacctggaagcgtgtgtgatccaggaagtggggatggaagagacaccactgatgaacgaggatagcattttagccgtccgtaaatactttcagcgcataactttgtatttgaccgagaaaaaatattctccatgcgcatgggaagtggttagagccgagattatgcgctccctaagcttttcgacgaatttacaaaagatccttagaaggaaggactag

SEQ ID NO: 208965 - DNA, 570 bp, Artificial Sequence
  derived and/or modified sequence
atggcactgtccttcagtttattaatggctgtgctggtgctgtcttacaagtctatttgctccctcggatgcgatcttccccagactcactcactaggaaaccggagagctctcatcctactcgcacagatgggtcggataagccctttctcatgcctcaaagatagacacgactttggactgccacaagaagagttcgatggcaaccagtttcaaaaaacccaggctatttccgtgctgcacgagatgatccagcagacctttaatctgttctctaccgaagacagttcagccgcatgggagcagtcactcttagagaaattctcgactgagctctaccagcagctgaacaatctggaagcttgtgttatccaggaggtgggtatggaagaaacacccctcatgaacgaagattctatcctggcggtgaggaaatacttccaaaggatcaccttgtacctcaccgagaagaaatactccccatgcgcgtgggaggtggttcgggcagagattatgaggtcactgagtttcagtacgaaccttcagaagatactaagaaggaaagactag

SEQ ID NO: 208966 - DNA, 980 bp, Artificial Sequence
  derived and/or modified sequence
gttcaaggttacccatctcaagtagcctagcaacatttgcaacatcccaatggccctgtccttttctttactgatggccgtgctggtgctcagctacaaatccatctgttctctaggctgtgatctgcctcagacccacagcctgggtaataggagggccttgatactcctggcacaaatgggaagaatctctcctttctcctgcctgaaggacagacatgactttggacttccccaggaggagtttgatggcaaccagttccagaagactcaagccatctctgtcctccatgagatgatccagcagaccttcaatctcttcagcacagaggactcatctgctgcttgggaacagagcctcctagaaaaattttccactgaactttaccagcaactgaataacctggaagcatgtgtgatacaggaggttgggatggaagagactcccctgatgaatgaggactccatcctggctgtgaggaaatacttccaaagaatcactctttatctaacagagaagaaatacagcccttgtgcctgggaggttgtcagagcagaaatcatgagatctctctctttttcaacaaacttgcaaaaaatattaaggaggaaggattgaaaactggttcaacatggcaatgatcctgattgactaatacattatctcacactttcatgagttcctccatttcaaagactcacttctataaccaccacgagttgaatcaaaattttcaaatgttttcagcagtgtaaagaagcgtcgtgtatacctgtgcaggcactagtactttacagatgaccatgctgatgtctctgttcatctatttatttaaatatttatttaattatttttaagatttaaattatttttttatgtaatatcatgtgtacctttacattgtggtgaatgtaacaatatatgttcttcatatttagccaatatattaatttcctttttcattaaatttttactatac

SEQ ID NO: 208967 - DNA, 570 bp, Artificial Sequence
  derived and/or modified sequence
atggccctaagtttttccctgctcatggctgtcctcgtgctctcatacaaatcgatatgctcgttgggatgcgacctgccacagacacattcacttggaaacagacgggcccttatcttactcgctcagatgggcagaatcagtccattctcctgcctaaaggatcgccacgacttcgggcttccccaggaagagttcgacggcaaccagtttcagaaaacccaggctatctcagtcctccatgaaatgattcagcaaacctttaatttattttccaccgaagattcttcagcagcatgggagcagtctctcctagagaagttttctacagagctatatcagcaactcaataacctcgaggcgtgtgttatacaggaggtcggcatggaagagacacctctcatgaacgaagatagtatcctagccgtgagaaaatatttccagcgaataaccctgtatctcaccgaaaagaagtacagcccttgtgcttgggaggtggtgcgggctgaaatcatgagaagcctgagtttctcaacaaacttacagaagatcttgaggcgcaaggactag

SEQ ID NO: 208968 - DNA, 570 bp, Artificial Sequence
  derived and/or modified sequence
atggccctaagtttttccctgctcatggctgtcctcgtgctctcatacaaatcgatatgctcgttgggatgcgacctgccacagacacattcacttggaaacagacgggcccttatcttactcgctcagatgggcagaatcagtccattctcctgcctaaaggatcgccacgacttcgggcttccccaggaagagttcgacggcaaccagtttcagaaaacccaggctatctcagtcctccatgaaatgattcagcaaacctttaatttattttccaccgaagattcttcagcagcatgggagcaatctctactagagaaattctctaccgaattataccagcagttgaataacctagaagcctgtgtcatacaagaggtcggaatggaagaaacccccctgatgaacgaagacagtatcttggcagtgagaaagtacttccagcgcattactctgtatctaactgaaaaaaagtatagtccgtgcgcttgggaggtggtgagagccgagattatgcgatcactgagcttctctacaaatctgcagaagattttaaggaggaaagattag

SEQ ID NO: 208969 - RNA, 570 nt, Artificial Sequence
  derived and/or modified sequence
auggcccuaaguuuuucccugcucauggcuguccucgugcucucauacaaaucgauaugcucguugggaugcgaccugccacagacacauucacuuggaaacagacgggcccuuaucuuacucgcucagaugggcagaaucaguccauucuccugccuaaaggaucgccacgacuucgggcuuccccaggaagaguucgacggcaaccaguuucagaaaacccaggcuaucucaguccuccaugaaaugauucagcaaaccuuuaauuuauuuuccaccgaagauucuucagcagcaugggagcagucucuccuagagaaguuuucuacagagcuauaucagcaacucaauaaccucgaggcguguguuauacaggaggucggcauggaagagacaccucucaugaacgaagauaguauccuagccgugagaaaauauuuccagcgaauaacccuguaucucaccgaaaagaaguacagcccuugugcuugggagguggugcgggcugaaaucaugagaagccugaguuucucaacaaacuuacagaagaucuugaggcgcaaggacuag

SEQ ID NO: 208970 - RNA, 570 nt, Artificial Sequence
  derived and/or modified sequence
auggcccuaaguuuuucccugcucauggcuguccucgugcucucauacaaaucgauaugcucguugggaugcgaccugccacagacacauucacuuggaaacagacgggcccuuaucuuacucgcucagaugggcagaaucaguccauucuccugccuaaaggaucgccacgacuucgggcuuccccaggaagaguucgacggcaaccaguuucagaaaacccaggcuaucucaguccuccaugaaaugauucagcaaaccuuuaauuuauuuuccaccgaagauucuucagcagcaugggagcaaucucuacuagagaaauucucuaccgaauuauaccagcaguugaauaaccuagaagccugugucauacaagaggucggaauggaagaaaccccccugaugaacgaagacaguaucuuggcagugagaaaguacuuccagcgcauuacucuguaucuaacugaaaaaaaguauaguccgugcgcuugggagguggugagagccgagauuaugcgaucacugagcuucucuacaaaucugcagaagauuuuaaggaggaaagauuag

SEQ ID NO: 208971 - protein, 135 aa, Artificial Sequence
  derived and/or modified sequence
MSPHLTALLGLVLCLAQTIHTQEGALPRPSISAEPGTVISPGSHVTFMCRGPVGVQTFRLEREDRAKYKDSYNVFRLGPSESEARFHIDSVSEGNAGLYRCLYYKPPGWSEHSDFLELLVKGTVPGTEASGFDAP

SEQ ID NO: 208972 - DNA, 408 bp, Artificial Sequence
  derived and/or modified sequence
atgagtccccatctgaccgccttactgggccttgtcctgtgcctggctcagaccatccacacccaagagggcgctttgcccaggccgtccatttctgcagaacccggaacggtgatcagcccgggtagccatgtgacttttatgtgtcgcggtccagtgggtgtgcagacgttccgcctggagagagaggaccgggcaaagtacaaggactcgtacaatgtcttcagacttggccctagcgagtcagaagctcgctttcatatagacagcgtgagcgaagggaacgctgggctctatcgctgtctctactacaaacctccaggctggtcagagcattccgatttcctagaactgctggtcaaaggaaccgtgcccggaaccgaagcctccggcttcgacgccccatag

SEQ ID NO: 208973 - DNA, 408 bp, Artificial Sequence
  derived and/or modified sequence
atgtctccacaccttactgcactcctgggccttgtgctctgtctcgcccaaacaatacatacacaagagggggccttacctcgtccgtctatatcagctgagccaggaacagtgatcagtccaggaagccacgtgaccttcatgtgcaggggccctgtgggggtccagacatttcgactggaacgagaagaccgggcgaaatacaaggatagctacaatgtgtttcggttgggtccaagcgagagcgaagcacgttttcacattgactccgtcagcgaaggcaacgccggcctctacagatgtctttattataagcctccaggctggtctgaacatagcgattttctggaattgctcgtgaaggggaccgttccaggtacagaagcatctggctttgatgctccctag

SEQ ID NO: 208974 - DNA, 408 bp, Artificial Sequence
  derived and/or modified sequence
atgagccctcacttgactgccttattgggactcgtgctatgccttgcccagaccatccacactcaagaaggcgcactgccgcggcccagtatctctgccgagccgggaacagttatttccccaggaagccacgtcactttcatgtgtagaggaccggtgggagtccagacatttcggcttgagcgtgaggaccgggcgaaatacaaagattcttacaatgttttcaggctcggaccttccgaaagcgaggcaagattccacatcgattctgtttctgaagggaacgcggggctgtacagatgcctctattataaaccaccaggctggtccgagcatagcgatttccttgaactgctggtcaaaggcactgtccccggcacagaagctagtggatttgatgcgccatag

SEQ ID NO: 208975 - DNA, 408 bp, Artificial Sequence
  derived and/or modified sequence
atgagcccccacctgaccgccctgctgggcctggtgctgtgcctggcccagaccatccacacccaggagggcgccctgcccagacccagcatcagcgccgagcccggcaccgtgatcagccccggcagccacgtgaccttcatgtgcagaggccccgtgggcgtgcagaccttcagactggagagagaggacagagccaagtacaaggacagctacaacgtgttcagactgggccccagcgagagcgaggccagattccacatcgacagcgtgagcgagggcaacgccggcctgtacagatgcctgtactacaagccccccggctggagcgagcacagcgacttcctggagctgctggtgaagggcaccgtgcccggcaccgaggccagcggcttcgacgccccctag

SEQ ID NO: 208976 - DNA, 408 bp, Artificial Sequence
  derived and/or modified sequence
atgtccccacatctgactgcactgctgggtttggttctgtgcctggcccagaccatccacacccaagaaggagcactcccacgccctagcattagtgcagagcccggtactgtgatatcacccgggagtcacgtgacctttatgtgtcgggggcccgtgggcgtgcagacattccgactcgagagggaagacagagccaaatataaagactcatataatgtgttcaggcttggtccctctgaaagcgaagcccgctttcacatcgattctgtctctgaggggaatgcagggttgtatcgttgtctgtattacaagcctcctggatggagtgagcactcggacttcctggagctcttagtcaagggcacagtgccagggaccgaggccagcggattcgacgctccctag

SEQ ID NO: 208977 - DNA, 408 bp, Artificial Sequence
  derived and/or modified sequence
atgagcccccacctgacagccctgctgggcctggtgctgtgcctggcccagaccatccacacccaggagggcgccctgccccggcccagcatctctgctgagcccggcaccgtcatcagccctggcagccacgtgaccttcatgtgccggggccctgtgggcgtgcagaccttccggctggagagagaagatcgggccaagtacaaggacagctacaacgtgttccggctgggccccagcgagagcgaggcccgcttccacatcgacagcgtgtctgagggcaatgccggcctgtaccgctgcctgtactacaagcccccaggctggagcgagcacagcgacttcctggagctgctggtgaagggcaccgtgcctggaacagaggccagcggctttgatgccccctag

SEQ ID NO: 208978 - DNA, 408 bp, Artificial Sequence
  derived and/or modified sequence
atgagcccccacctgaccgccctgctgggcctggtgctgtgcctggcgcagaccatacacacccaggaaggagcactcccaagacctagcatttccgccgaacctggaaccgtcatctcccctggttcacacgtgacttttatgtgtcgcggacccgtcggtgtccagactttccgactcgagagggaagatcgggccaaatataaggactcttacaatgtgtttcgccttgggccttctgagagtgaggccagattccacatcgatagcgtgtctgaagggaatgcagggctgtaccgttgtctgtactataaacctcccggatggtcagaacattcggatttcctggagctgctggtgaagggaacggtgcccggcaccgaagcaagcggattcgatgcgccatag

SEQ ID NO: 208979 - RNA, 408 nt, Artificial Sequence
  derived and/or modified sequence
augucuccacaccuuacugcacuccugggccuugugcucugucucgcccaaacaauacauacacaagagggggccuuaccucguccgucuauaucagcugagccaggaacagugaucaguccaggaagccacgugaccuucaugugcaggggcccuguggggguccagacauuucgacuggaacgagaagaccgggcgaaauacaaggauagcuacaauguguuucgguuggguccaagcgagagcgaagcacguuuucacauugacuccgucagcgaaggcaacgccggccucuacagaugucuuuauuauaagccuccaggcuggucugaacauagcgauuuucuggaauugcucgugaaggggaccguuccagguacagaagcaucuggcuuugaugcucccuag

SEQ ID NO: 208980 - RNA, 408 nt, Artificial Sequence
  derived and/or modified sequence
augagcccucacuugacugccuuauugggacucgugcuaugccuugcccagaccauccacacucaagaaggcgcacugccgcggcccaguaucucugccgagccgggaacaguuauuuccccaggaagccacgucacuuucauguguagaggaccggugggaguccagacauuucggcuugagcgugaggaccgggcgaaauacaaagauucuuacaauguuuucaggcucggaccuuccgaaagcgaggcaagauuccacaucgauucuguuucugaagggaacgcggggcuguacagaugccucuauuauaaaccaccaggcugguccgagcauagcgauuuccuugaacugcuggucaaaggcacuguccccggcacagaagcuaguggauuugaugcgccauag

SEQ ID NO: 208981 - protein, 901 aa, Artificial Sequence
  derived and/or modified sequence
MSTMRLLTLALLFSCSVARAACDPKIVNIGAVLSTRKHEQMFREAVNQANKRHGSWKIQLNATSVTHKPNAIQMALSVCEDLISSQVYAILVSHPPTPNDHFTPTPVSYTAGFYRIPVLGLTTRMSIYSDKSIHLSFLRTVPPYSHQSSVWFEMMRVYSWNHIILLVSDDHEGRAAQKRLETLLEERESKAEKVLQFDPGTKNVTALLMEAKELEARVIILSASEDDAATVYRAAAMLNMTGSGYVWLVGEREISGNALRYAPDGILGLQLINGKNESAHISDAVGVVAQAVHELLEKENITDPPRGCVGNTNIWKTGPLFKRVLMSSKYADGVTGRVEFNEDGDRKFANYSIMNLQNRKLVQVGIYNGTHVIPNDRKIIWPGGETEKPRGYQMSTRLKIVTIHQEPFVYVKPTLSDGTCKEEFTVNGDPVKKVICTGPNDTSPGSPRHTVPQCCYGFCIDLLIKLARTMNFTYEVHLVADGKFGTQERVNNSNKKEWNGMMGELLSGQADMIVAPLTINNERAQYIEFSKPFKYQGLTILVKKEIPRSTLDSFMQPFQSTLWLLVGLSVHVVAVMLYLLDRFSPFGRFKVNSEEEEEDALTLSSAMWFSWGVLLNSGIGEGAPRSFSARILGMVWAGFAMIIVASYTANLAAFLVLDRPEERITGINDPRLRNPSDKFIYATVKQSSVDIYFRRQVELSTMYRHMEKHNYESAAEAIQAVRDNKLHAFIWDSAVLEFEASQKCDLVTTGELFFRSGFGIGMRKDSPWKQNVSLSILKSHENGFMEDLDKTWVRYQECDSRSNAPATLTFENMAGVFMLVAGGIVAGIFLIFIEIAYKRHKDARRKQMQLAFAAVNVWRKNLQSTGGGRGALQNQKDTVLPRRAIEREEGQLQLCSRHRES

SEQ ID NO: 208982 - DNA, 2706 bp, Artificial Sequence
  derived and/or modified sequence
atgtcgactatgcggcttcttaccctggctctccttttctcgtgtagcgtggcccgagccgcttgcgaccccaaaatcgtgaacattggagcagttttgtccactcggaaacacgagcaaatgttcagggaggccgttaatcaagctaataagagacacgggagctggaagatccaacttaatgcaacaagcgtcactcataaacccaacgcgattcaaatggccctgagtgtctgtgaggacctgatctccagccaggtttacgccattcttgtgtctcatccccctacccccaacgatcacttcactccaacacctgtcagttatacagccgggttctatcgaatccccgtcctcggcctcacaacgagaatgagcatatacagcgataaaagcattcacctgagcttcctgcggacagttcccccttacagccaccagtcttccgtttggtttgaaatgatgagagtgtattcctggaatcatatcatactgttggttagcgacgaccacgaagggcgggcagcgcagaagagactcgagactcttctggaagagagggagtctaaagcggagaaagtgctacagtttgatcccggcacaaaaaacgtgaccgcccttttgatggaagcaaaggaactggaggctagagtgatcattctgtcggccagtgaggatgacgcagccacagtgtacagggcagcagctatgctgaatatgactggaagtggctacgtctggcttgtgggcgagcgggagatttcaggcaacgctctccgctatgcccctgatggtatcttgggtctccaactgattaatggaaagaatgagtccgctcacatatcagacgcagtgggtgtggtcgctcaggcggtgcatgaattgctagagaaagaaaacataactgatcctcctcgtggatgcgtggggaatactaatatttggaaaactggccctctgttcaagcgagtcctgatgtcatccaaatacgccgatggagtaaccggtcgggtggagttcaatgaggacggagataggaaatttgccaattacagtattatgaacttgcagaataggaaactcgtgcaggtgggcatttacaatggtacccacgtgattcccaatgacagaaagataatttggcctggaggcgagaccgaaaagccgagaggttatcagatgtcaacccgcctcaaaatcgtgaccattcatcaagaaccgttcgtgtatgtaaaaccaacgctgtccgatggcacatgtaaggaggaatttactgtgaatggggaccccgtcaagaaggtcatatgcacaggccctaatgacacctcccccgggtcaccaagacacaccgttcctcagtgctgttacggattttgtattgacctgcttattaagctggcccggactatgaactttacgtacgaagttcatttggtagcagacggtaagttcggaacccaggagcgagtgaacaattcaaataagaaggaatggaatggcatgatgggggaactgttgtccgggcaagcagacatgattgtagcgcccctcaccataaacaatgagagagcacaatatatcgaattttcaaaaccatttaagtaccaggggcttactattttggtgaaaaaagagattccgagaagcaccctggactctttcatgcagccgttccagtcgactctgtggctgctcgtcggactcagcgtccacgtggtggccgttatgctctacttgttagaccgcttctctcctttcggtcgctttaaggtgaacagtgaggaggaggaggaagacgctctaaccctgagcagtgcgatgtggttctcttggggtgtccttctgaattccgggattggtgaaggagcccctcggtctttctccgctcggatcctgggtatggtgtgggccgggtttgccatgattatagtagcatcctataccgccaatctcgccgcctttttagtcttagatcgaccggaagaaagaatcacaggaattaacgacccacgcctgagaaatcccagtgacaagtttatttacgctacagtgaagcagagctcagtggacatttactttagacgccaggtggagctttcaacaatgtaccgacatatggagaagcacaattatgaatcagccgcggaagccatccaggctgttagggataataagctgcatgcctttatctgggactccgccgtgctggaattcgaggcatcccagaaatgtgatttggtcaccacaggcgaattattcttcaggagtggattcggtatcgggatgagaaaagactccccatggaagcagaatgtgtcactaagcatcctaaaaagccatgagaatgggttcatggaagacctggacaaaacttgggtaagataccaagaatgcgattcacggtcaaatgcccctgcaacactgactttcgaaaatatggcaggcgtgtttatgctagttgctggcggaattgtggccgggatcttcctgatcttcatcgaaattgcatacaagcgccacaaggatgccagacgtaagcagatgcagctggctttcgcagctgtgaacgtctggagaaagaatttgcagagcaccggaggtggccgaggagctctgcagaatcagaaggacacagtattgccaaggcgtgcaatcgagcgcgaggagggtcagcttcagctgtgcagtcgccaccgcgaatcatag

SEQ ID NO: 208983 - DNA, 3940 bp, Artificial Sequence
  derived and/or modified sequence
gagcccatgagcaccatgcgcctgctgacgctcgccctgctgttctcctgctccgtcgcccgtgccgcgtgcgaccccaagatcgtcaacattggcgcggtgctgagcacgcggaagcacgagcagatgttccgcgaggccgtgaaccaggccaacaagcggcacggctcctggaagattcagctcaatgccacctccgtcacgcacaagcccaacgccatccagatggctctgtcggtgtgcgaggacctcatctccagccaggtctacgccatcctagttagccatccacctacccccaacgaccacttcactcccacccctgtctcctacacagccggcttctaccgcatacccgtgctggggctgaccacccgcatgtccatctactcggacaagagcatccacctgagcttcctgcgcaccgtgccgccctactcccaccagtccagcgtgtggtttgagatgatgcgtgtctacagctggaaccacatcatcctgctggtcagcgacgaccacgagggccgggcggctcagaaacgcctggagacgctgctggaggagcgtgagtccaaggcagagaaggtgctgcagtttgacccagggaccaagaacgtgacggccctgctgatggaggcgaaagagctggaggcccgggtcatcatcctttctgccagcgaggacgatgctgccactgtataccgcgcagccgcgatgctgaacatgacgggctccgggtacgtgtggctggtcggcgagcgcgagatctcggggaacgccctgcgctacgccccagacggcatcctcgggctgcagctcatcaacggcaagaacgagtcggcccacatcagcgacgccgtgggcgtggtggcccaggccgtgcacgagctcctcgagaaggagaacatcaccgacccgccgcggggctgcgtgggcaacaccaacatctggaagaccgggccgctcttcaagagagtgctgatgtcttccaagtatgcggatggggtgactggtcgcgtggagttcaatgaggatggggaccggaagttcgccaactacagcatcatgaacctgcagaaccgcaagctggtgcaagtgggcatctacaatggcacccacgtcatccctaatgacaggaagatcatctggccaggcggagagacagagaagcctcgagggtaccagatgtccaccagactgaagattgtgacgatccaccaggagcccttcgtgtacgtcaagcccacgctgagtgatgggacatgcaaggaggagttcacagtcaacggcgacccagtcaagaaggtgatctgcaccgggcccaacgacacgtcgccgggcagcccccgccacacggtgcctcagtgttgctacggcttttgcatcgacctgctcatcaagctggcacggaccatgaacttcacctacgaggtgcacctggtggcagatggcaagttcggcacacaggagcgggtgaacaacagcaacaagaaggagtggaatgggatgatgggcgagctgctcagcgggcaggcagacatgatcgtggcgccgctaaccataaacaacgagcgcgcgcagtacatcgagttttccaagcccttcaagtaccagggcctgactattctggtcaagaaggagattccccggagcacgctggactcgttcatgcagccgttccagagcacactgtggctgctggtggggctgtcggtgcacgtggtggccgtgatgctgtacctgctggaccgcttcagccccttcggccggttcaaggtgaacagcgaggaggaggaggaggacgcactgaccctgtcctcggccatgtggttctcctggggcgtcctgctcaactccggcatcggggaaggcgcccccagaagcttctcagcgcgcatcctgggcatggtgtgggccggctttgccatgatcatcgtggcctcctacaccgccaacctggcggccttcctggtgctggaccggccggaggagcgcatcacgggcatcaacgaccctcggctgaggaacccctcggacaagtttatctacgccacggtgaagcagagctccgtggatatctacttccggcgccaggtggagctgagcaccatgtaccggcatatggagaagcacaactacgagagtgcggcggaggccatccaggccgtgagagacaacaagctgcatgccttcatctgggactcggcggtgctggagttcgaggcctcgcagaagtgcgacctggtgacgactggagagctgtttttccgctcgggcttcggcataggcatgcgcaaagacagcccctggaagcagaacgtctccctgtccatcctcaagtcccacgagaatggcttcatggaagacctggacaagacgtgggttcggtatcaggaatgtgactcgcgcagcaacgcccctgcgacccttacttttgagaacatggccggggtcttcatgctggtagctgggggcatcgtggccgggatcttcctgattttcatcgagattgcctacaagcggcacaaggatgctcgccggaagcagatgcagctggcctttgccgccgttaacgtgtggcggaagaacctgcagagcaccgggggtggacgcggcgctttgcaaaaccaaaaagacacagtgctgccgcgacgcgctattgagagggaggagggccagctgcagctgtgttcccgtcatagggagagctgagactccccgcccgccctcctctgccccctcccccgcagacagacagacagacggacgggacagcggcccggcccacgcagagccccggagcaccacggggtcgggggaggagcacccccagcctcccccaggctgcgcctgcccgcccgccggttggccggctggccggtccaccccgtcccggccccgcgcgtgcccccagcgtggggctaacgggcgccttgtctgtgtatttctattttgcagcagtaccatcccactgatatcacgggcccgctcaacctctcagatccctcggtcagcaccgtggtgtgaggcccccggaggcgcccacctgcccagttagcccggccaaggacactgatgggtcctgctgctcgggaaggcctgagggaagcccacccgccccagagactgcccaccctgggcctcccgtccgtccgcccgcccaccccgctgcctggcgggcagcccctgctggaccaaggtgcggaccggagcggctgaggacggggcagagctgagtcggctgggcagggccgcagggcgctccggcagaggcagggccctggggtctctgagcagtggggagcgggggctaactggccccaggcggaggggcttggagcagagacggcagccccatccttcccgcagcaccagcctgagccacagtggggcccatggccccagctggctgggtcgcccctcctcgggcgcctgcgctcctctgcagcctgagctccaccctcccctcttcttgcggcaccgcccacccacaccccgtctgccccttgaccccacacgccggggctggccctgccctcccccacggccgtccctgacttcccagctggcagcgcctcccgccgcctcgggccgcctcctccagactcgagagggctgagcccctcctctcctcgtccggcctgcagcccagaacgggcctccccgggggtccccggacgctggctcgggactgtcttcaaccctgccctgcaccttgggcacgggagagcgccacccgcccgcccccgccctcgctccgggtgcgtgaccggcccgccaccttgtacagaaccagcactcccagggcccgagcgcgtgccttccccgtgcggcccgtgcgcagccgcgctctgcccctccgtccccagggtgcaggcgcgcaccgcccaacccccacctcccggtgtatgcagtggtgatgcctaaaggaatgtcacgc

SEQ ID NO: 208984 - DNA, 2706 bp, Artificial Sequence
  derived and/or modified sequence
atgagcaccatgaggctgctgaccctggccctgctcttcagctgcagcgtggcccgggccgcctgtgaccccaagatcgtgaacattggagctgtgctgagcaccaggaagcatgagcagatgttccgggaggccgtgaaccaggccaacaagagacatggctcctggaagatccagctgaatgccacctctgtgacccacaagcccaatgccatccagatggccctgtctgtgtgtgaggacctgatcagcagccaggtgtatgccatcctggtgagccacccccccaccccaaatgaccacttcacccccacccctgtgtcctacacagctggcttctaccgcatccctgtgctgggcctgaccaccaggatgagcatctacagcgacaagagcatccacctgtccttcctgaggacagtgcccccctacagccaccagagctctgtgtggtttgagatgatgagggtgtacagctggaaccacatcatcctgctggtgtctgatgaccacgagggccgggccgcccagaagaggctggagaccctgctggaggagcgggagagcaaggccgagaaggtgctgcagtttgatcctggcaccaagaatgtgacagccctgctgatggaggccaaggagctggaggcccgggtcatcatcctgagcgcctctgaagatgatgctgccaccgtgtacagagctgctgccatgctgaacatgactggaagtggctacgtgtggctggtgggggagcgggagatctctggaaatgccctgcgctatgccccagatggcatcctgggcctgcagctgatcaatggcaagaatgaaagtgcccacatcagtgatgctgtgggcgtggtggcccaggccgtgcatgagctgctggagaaggagaacatcacagaccccccccggggctgtgtgggcaacaccaacatctggaagacaggccccctcttcaagagggtgctgatgagcagcaaatatgcagatggagtgacaggccgggtggagttcaatgaagatggagacaggaagtttgccaactacagcatcatgaacctgcagaacaggaagctggtgcaggtgggcatctacaacggcacccacgtgatccccaatgacaggaagatcatctggccaggaggagaaacagagaagccccggggctaccagatgagcacccggctgaagatcgtgaccatccaccaggagccctttgtgtatgtgaagcccaccctgagtgatggcacctgcaaggaggagttcaccgtgaatggagaccctgtgaagaaggtgatctgcaccggccccaatgacaccagccctggcagccccaggcacacagtgccccagtgctgctacggcttctgcatcgacctgctgatcaagctggcccggaccatgaacttcacctatgaggtgcacctggtggctgatggcaagtttggcacccaggagcgggtgaacaacagcaacaagaaggagtggaatggcatgatgggagagctgctgagcggccaggccgacatgattgtggcccccctgaccatcaacaatgaaagagcccagtacatcgagttcagcaagcccttcaagtaccagggcctgaccatcctggtgaagaaggagatccccaggagcaccctggacagcttcatgcagcccttccagagcaccctgtggctgctggtgggcctgtctgtgcacgtggtggccgtgatgctgtacctgctggaccgcttcagccccttcggccgcttcaaggtgaacagcgaggaggaggaggaggatgccctgaccctgagcagcgccatgtggttctcctggggcgtgctgctgaacagcggcattggagagggcgcccccaggagcttcagcgcccgcatcctgggcatggtgtgggccggctttgccatgatcatcgtggccagctacacagccaacctggccgccttcctggtgctggacaggcctgaggagcgcatcaccggcatcaatgacccccggctgaggaaccccagcgacaagttcatctatgccaccgtgaagcagagctctgtggacatctacttccggcggcaggtggagctgagcaccatgtaccgccacatggagaagcacaactatgaatctgctgctgaggccatccaggccgtgcgggacaacaagctgcacgccttcatctgggacagcgctgtgctggagtttgaggccagccagaagtgtgacctggtgaccactggagagctgttcttccgcagcggcttcggcatcggcatgaggaaggacagcccctggaagcagaatgtgtccctgagcatcctgaagagccatgaaaatggcttcatggaggacctggacaagacctgggtgcgctaccaggagtgtgacagccgcagcaatgccccagccaccctgacctttgagaacatggccggggtcttcatgctggtggccggcggcatcgtggccggcatcttcctgatcttcattgaaattgcctacaagaggcacaaggatgcccggaggaagcagatgcagctggcctttgctgctgtgaatgtgtggaggaagaacctgcagagcactggaggcggccgcggggccctgcagaaccagaaggacacagtgctgccccggcgggccatcgagcgggaggagggccagctgcagctgtgcagccgccaccgggagagctag

SEQ ID NO: 208985 - DNA, 2706 bp, Artificial Sequence
  derived and/or modified sequence
atgagcaccatgcggctgctgaccctggccctgctgttcagctgctctgttgcaagggccgcgtgtgatccaaagatagttaacattggtgccgtgttgtccactaggaaacacgagcaaatgttccgagaagcagtgaatcaggccaataagaggcacgggtcctggaagatccaactgaacgcaactagcgtgacgcacaagccaaacgcaattcagatggcactgagcgtgtgtgaagatctcatcagtagtcaggtctacgcaatcctcgttagtcatcctcctactcctaacgaccacttcacacccacaccagttagctataccgctggcttttacaggatccctgtactgggactcactacaaggatgtcaatttactccgacaagagtatccacctcagctttctgcggacagtgcccccatattcacatcaatcgagcgtatggttcgaaatgatgagagtttattcttggaaccacattatcctgctcgttagtgacgatcacgagggtcgggccgcgcagaaaaggcttgagaccctgcttgaagagagggagtcaaaagccgaaaaggtcctccagttcgaccccggaactaaaaatgtcaccgcactcctcatggaagccaaagagctcgaggcaagggttattatcctctccgctagcgaagacgatgccgccaccgtgtaccgagctgcggcaatgctgaatatgacagggtctgggtatgtgtggctggtcggagagcgggagatttccggaaatgcacttaggtacgccccggacggtattctcgggcttcagctgataaatgggaaaaacgagtccgcccacatttcagacgctgtcggtgtagttgcccaggcggttcacgagctcctggaaaaggagaacatcaccgaccctccccggggctgcgttggaaatacaaatatctggaagacagggcctctattcaaaagagtcttaatgtcctccaagtatgcagatggggtcacaggacgggttgagtttaacgaagatggagacaggaaattcgctaactactctattatgaacctgcaaaatcgtaagctggtgcaggtgggtatctacaacggtactcacgttattccaaacgataggaagattatttggccaggaggcgaaaccgagaaaccgagaggttatcagatgtctaccaggctgaaaatagtcacaattcatcaggaaccatttgtctacgtcaagcccaccctgtctgacggaacatgcaaggaagaatttacagtgaacggcgaccctgtcaaaaaggtgatatgtactggacctaacgacacatcaccaggtagccccaggcataccgtgccacagtgttgttacgggttctgtatcgacctgctgattaaactggcaaggaccatgaattttacttatgaggttcaccttgtggccgacggaaaattcggcacgcaagagcgcgtgaacaacagcaataagaaagagtggaacggcatgatgggagaactgctgtctggccaggcagacatgatcgtggccccactgaccatcaataatgagagggcccagtacatcgagttttcaaagccttttaagtaccagggactcactatcctggtcaaaaaggagatcccacggtccaccctcgattcctttatgcaaccctttcaatccacgttgtggctgctcgttggattgtccgtgcatgttgtagccgtaatgctgtacctattggaccggtttagtcccttcggtagattcaaggtgaattcagaagaagaggaagaggatgctctgacgcttagtagcgccatgtggttctcctggggggtcctgttgaattcgggtatcggtgaaggcgcccctcggagcttctccgctcggatactaggaatggtgtgggccgggtttgccatgatcattgtggcctcctacaccgcaaacttggcagccttcctcgtgctggataggcccgaggaacgcatcactggtatcaatgacccacgactgagaaacccctcagataagttcatatacgccacggttaagcagtctagcgtggacatttattttcggaggcaagtcgagcttagcacaatgtatagacatatggagaaacacaactacgagtcagctgctgaggcgatccaggcagtccgagataataagttgcacgcttttatatgggattcggccgtgctagagttcgaagcatctcagaaatgcgatctcgtcacgaccggtgaactattttttagatctggctttggcattggcatgaggaaggactcaccctggaaacaaaatgtgagtctgtcgatccttaaatcccacgaaaacgggttcatggaagacctggacaagacatgggtgcgctatcaggaatgtgactcccgcagtaatgctccagccacgttaacatttgagaacatggctggcgtgttcatgctcgtagccggtggcattgttgccggcatatttctcatcttcattgagattgcatataaaaggcataaagatgctcgcagaaaacaaatgcaactggcctttgctgccgttaacgtgtggaggaagaacctccagtccaccggcggtgggagaggggccctgcaaaaccagaaagacacggtgctcccacgccgtgctatcgagcgagaagagggtcaactgcaactttgctcccggcacagggaaagttag

SEQ ID NO: 208986 - DNA, 2706 bp, Artificial Sequence
  derived and/or modified sequence
atgtctacaatgcggctgttgaccctggcacttctattttcatgcagcgttgcgagagctgcctgcgatcccaagattgtgaatatcggagctgtgctatctactaggaaacacgaacaaatgtttcgagaggcggtgaatcaggcgaacaaacgacacggatcctggaaaattcagttgaatgcaacgtccgtgacacataagcccaatgcgatccagatggctctgtctgtctgcgaagatctcataagtagtcaagtctatgcaattctggtgagccatccccctactcccaatgatcatttcactccaacacccgtgtcctacaccgcagggttttacagaatacctgttctcggactgaccacgcggatgtctatctattctgataaaagcatccacctgtcctttctccgaacagtcccgccatatagccatcaatctagcgtctggttcgagatgatgagggtgtactcttggaaccatatcatcctgcttgtttccgatgatcacgaagggcgagctgcccagaagcgtttagaaaccctgttagaggagcgcgagagcaaggctgaaaaggtcctccagttcgatcccggtactaagaatgtaaccgccctgctgatggaggccaaggaactggaggcccgagtgatcatattaagcgcgtctgaggatgacgcagccacagtgtaccgcgcagcggcaatgctgaatatgacagggagcggttacgtttggctggtgggagagcgcgaaattagtggaaacgccctccgctacgcccctgacggcatcctgggcctccagctaatcaatggcaagaatgaatccgctcacatcagcgacgctgtgggagtggtagcccaggcggtccacgagctactagagaaggagaatatcacagatccgcctaggggatgcgtcggtaatacaaatatttggaagactggcccactattcaaacgtgtcctgatgtcttccaagtatgctgacggagtgacaggccgagtggagttcaatgaggatggggacaggaagtttgccaactatagcattatgaacctccagaaccggaaattggtccaggtgggaatctacaatggtacacatgtaatccccaatgacagaaaaataatctggcccggtggcgaaactgagaagccacgcggataccagatgagtacacggttgaagattgtgacaatacatcaggaacctttcgtctatgtgaaaccaaccctttccgacggtacttgtaaggaggagtttacggtaaacggcgacccagtgaagaaagtgatctgtacaggacccaacgacactagtcccggtagtccacgtcacaccgtcccgcagtgctgttacggtttctgtatcgatctcctaattaagctggcacggacaatgaactttacctacgaggttcatctcgtggccgacggcaagtttgggactcaggaacgtgtcaataatagcaataagaaggagtggaacggcatgatgggggaactgctaagcggacaagctgatatgatagtggctcccctgaccatcaacaatgaaagggcacagtacattgaatttagcaaacccttcaaataccaaggactgactatcttggttaaaaaggaaatcccgaggagcacgctggactcttttatgcagcctttccagtccacactgtggctgctggtgggcctttccgttcatgtggtggcagtgatgctgtacctgctcgatcggttttccccttttgggcgattcaaagttaatagcgaggaggaagaggaggacgcacttaccctctcctccgcaatgtggttctcatggggcgtcctgctcaattcaggcataggagaaggggctccccgatctttttccgctcggatccttggaatggtgtgggccggattcgcgatgattattgtagcttcctacacagctaacttggccgcattcttggtgttagatcgaccagaagagaggattacaggaataaatgatcctaggctgaggaacccaagcgacaagtttatctacgctacagtgaaacagtcatccgtagatatttatttccggagacaggtggagttgtcaaccatgtatcgacatatggaaaagcacaactatgagtccgctgccgaggccattcaggcagtgagagacaacaagctacacgcctttatctgggattccgcggtcctggagttcgaagcaagccaaaaatgtgatctcgttaccaccggagagctgttctttcgctctggttttggcatagggatgaggaaggattccccttggaagcaaaacgtctccctaagtatcttaaagagccacgagaatgggtttatggaagatctggataagacatgggttaggtatcaggagtgcgattcacggtccaatgctcccgcaacattaacttttgagaatatggctggcgtgttcatgctcgtggcaggtggaatcgtggccggtatctttctgatcttcatagaaatagcttacaagcgccacaaagacgcgagaagaaagcagatgcaacttgcgttcgcagcagtgaacgtctggcggaaaaatctgcaaagtacagggggaggaaggggcgctttgcagaaccagaaagatacggtgttgcctcgccgagccatagagagagaggagggccagctccagctatgcagccggcatagggagtcttag

SEQ ID NO: 208987 - DNA, 2706 bp, Artificial Sequence
  derived and/or modified sequence
atgagcaccatgagactgctgaccctggccctgctgttcagctgcagcgtggccagagccgcctgcgaccccaagatcgtgaacatcggcgccgtgctgagcaccagaaagcacgagcagatgttcagagaggccgtgaaccaggccaacaagagacacggcagctggaagatccagctgaacgccaccagcgtgacccacaagcccaacgccatccagatggccctgagcgtgtgcgaggacctgatcagcagccaggtgtacgccatcctggtgagccacccccccacccccaacgaccacttcacccccacccccgtgagctacaccgccggcttctacagaatccccgtgctgggcctgaccaccagaatgagcatctacagcgacaagagcatccacctgagcttcctgagaaccgtgcccccctacagccaccagagcagcgtgtggttcgagatgatgagagtgtacagctggaaccacatcatcctgctggtgagcgacgaccacgagggcagagccgcccagaagagactggagaccctgctggaggagagagagagcaaggccgagaaggtgctgcagttcgaccccggcaccaagaacgtgaccgccctgctgatggaggccaaggagctggaggccagagtgatcatcctgagcgccagcgaggacgacgccgccaccgtgtacagagccgccgccatgctgaacatgaccggcagcggctacgtgtggctggtgggcgagagagagatcagcggcaacgccctgagatacgcccccgacggcatcctgggcctgcagctgatcaacggcaagaacgagagcgcccacatcagcgacgccgtgggcgtggtggcccaggccgtgcacgagctgctggagaaggagaacatcaccgacccccccagaggctgcgtgggcaacaccaacatctggaagaccggccccctgttcaagagagtgctgatgagcagcaagtacgccgacggcgtgaccggcagagtggagttcaacgaggacggcgacagaaagttcgccaactacagcatcatgaacctgcagaacagaaagctggtgcaggtgggcatctacaacggcacccacgtgatccccaacgacagaaagatcatctggcccggcggcgagaccgagaagcccagaggctaccagatgagcaccagactgaagatcgtgaccatccaccaggagcccttcgtgtacgtgaagcccaccctgagcgacggcacctgcaaggaggagttcaccgtgaacggcgaccccgtgaagaaggtgatctgcaccggccccaacgacaccagccccggcagccccagacacaccgtgccccagtgctgctacggcttctgcatcgacctgctgatcaagctggccagaaccatgaacttcacctacgaggtgcacctggtggccgacggcaagttcggcacccaggagagagtgaacaacagcaacaagaaggagtggaacggcatgatgggcgagctgctgagcggccaggccgacatgatcgtggcccccctgaccatcaacaacgagagagcccagtacatcgagttcagcaagcccttcaagtaccagggcctgaccatcctggtgaagaaggagatccccagaagcaccctggacagcttcatgcagcccttccagagcaccctgtggctgctggtgggcctgagcgtgcacgtggtggccgtgatgctgtacctgctggacagattcagccccttcggcagattcaaggtgaacagcgaggaggaggaggaggacgccctgaccctgagcagcgccatgtggttcagctggggcgtgctgctgaacagcggcatcggcgagggcgcccccagaagcttcagcgccagaatcctgggcatggtgtgggccggcttcgccatgatcatcgtggccagctacaccgccaacctggccgccttcctggtgctggacagacccgaggagagaatcaccggcatcaacgaccccagactgagaaaccccagcgacaagttcatctacgccaccgtgaagcagagcagcgtggacatctacttcagaagacaggtggagctgagcaccatgtacagacacatggagaagcacaactacgagagcgccgccgaggccatccaggccgtgagagacaacaagctgcacgccttcatctgggacagcgccgtgctggagttcgaggccagccagaagtgcgacctggtgaccaccggcgagctgttcttcagaagcggcttcggcatcggcatgagaaaggacagcccctggaagcagaacgtgagcctgagcatcctgaagagccacgagaacggcttcatggaggacctggacaagacctgggtgagataccaggagtgcgacagcagaagcaacgcccccgccaccctgaccttcgagaacatggccggcgtgttcatgctggtggccggcggcatcgtggccggcatcttcctgatcttcatcgagatcgcctacaagagacacaaggacgccagaagaaagcagatgcagctggccttcgccgccgtgaacgtgtggagaaagaacctgcagagcaccggcggcggcagaggcgccctgcagaaccagaaggacaccgtgctgcccagaagagccatcgagagagaggagggccagctgcagctgtgcagcagacacagagagagctag

SEQ ID NO: 208988 - protein, 254 aa, Artificial Sequence
  derived and/or modified sequence
MQRPGEPGAARFGPPEGCADHRPHRYRSFMIEEILTEPPGPKGAAPAAAAAAAGELLKFGVQALLAARPFHSHLAVLKAEQAAVFKFPLAPLGCSGLSSALLAAGPGLPGAAGAPHLPLELQLRGKLEAAGPGEPGTKAKKGRRSRTVFTELQLMGLEKRFEKQKYLSTPDRIDLAESLGLSQLQVKTWYQNRRMKWKKIVLQGGGLESPTKPKGRPKKNSIPTSEQLTEQERAKDAEKPAEVPGEPSDRSRED

SEQ ID NO: 208989 - protein, 100 aa, Artificial Sequence
  derived and/or modified sequence
MGLEKRFEKQKYLSTPDRIDLAESLGLSQLQVKTWYQNRRMKWKKIVLQGGGLESPTKPKGRPKKNSIPTSEQLTEQERAKDAEKPAEVPGEPSDRSRED

SEQ ID NO: 208990 - DNA, 1498 bp, Artificial Sequence
  derived and/or modified sequence
gcgcgccccgcccgcgccctgcgcctccgcccggccggccggcgggggagggggcatgagccggcgcccgcgcgccgccccgagctgcgggccggcctagagccccgcgcgggccccgcgccggagccaagccgtcgccgccgccgccgccaaaccgcgggcgcagcagtgggcgccgcgatgcagcggccgggggagccgggcgccgcgcgcttcggcccgcccgagggctgcgcggaccaccggccgcaccgctatcgcagcttcatgattgaggagatcctcacggagccacccgggcccaagggcgccgcgcccgcagccgccgctgccgcggcgggcgagctgctgaagttcggcgtgcaggcgctgctggcggcgcggcccttccacagccacctggccgtgctgaaggccgagcaggcggcggtgttcaagttcccactggcgccgctgggctgttcagggctgagctctgcgttgctggcggcagggcccgggctgcccggcgccgcgggtgcgccacacctgccgctcgagttgcagctccgcgggaagctggaggcggcaggccctggggagccaggcaccaaagccaagaaggggcgtcggagccgcactgtgttcaccgagctgcagctgatgggcctggagaaacgcttcgagaagcagaagtacctttccacgccggacagaatagatcttgctgagtccctgggcctgagccagttgcaggtgaagacgtggtaccagaatcggaggatgaagtggaagaaaatagtgctgcagggcggcggcctggagtctcccaccaagcccaaggggcggcccaagaagaactcaattccaacgagcgagcagcttactgagcaggagcgcgccaaggatgcagagaaaccggcggaggtgccgggcgagcccagcgacaggagccgcgaggactgagggcggtatacggtgcggggcctgggatgcccgcgccacccgcagccccctcactcggcggaaacccgcgagccggcccttccgcgtccaagaagtttacttcctaagcctttttattatgatcttgaatgcggacaattggggccaaacgaggaaggacacagacccaaaagccagacccaggtcccagcgcgcttctgggctctaacctgggagactcgcatccagcccggcggaagctacagtctctaccctgagctccgtggcgcagagcgctccacgcgtattcacgccccgctcctcgcctgcacccccaccccgtctggggcctgccctcccggccggggagcctccaggcacacacccgcttctggacgtcggggacccagcggttgggctcaggccacaacggcctgagattgccccggggcaacccgtcggctcggcctggaggccgggtccccgatgtcgctggggcccctaccccctcttgcgaagacggtgactttttttccaataaaatattttatgacacaaaaaaaaaaaaaaaaaa

SEQ ID NO: 208991 - DNA, 765 bp, Artificial Sequence
  derived and/or modified sequence
atgcagcgccccggcgagcccggagctgccagatttggtccacccgagggatgcgctgaccacaggccacataggtacagaagcttcatgatcgaagaaattcttacagaacctccgggtcccaaaggcgccgctccggccgcagccgcggccgccgccggggagctgctgaagttcggcgtccaggccctgctcgctgcgcggccttttcactctcacctggctgttttgaaggccgagcaggcagcggtgtttaaattcccattggcacctctgggttgttctggcctatcgtccgctttgttggctgcgggacccggtctgcctggggccgcgggtgctccacacctccccttggagctgcagcttagagggaaacttgaggcagccggcccaggcgagccgggtacaaaggcaaaaaagggtcgtcgctccaggacagtgttcactgaattacagctgatgggcctggaaaaacgtttcgaaaaacagaagtacctatcaaccccagaccgcatcgacctagccgagagcttaggactgagccaattgcaggtgaagacatggtaccagaatcggcgcatgaaatggaagaagatcgtcctgcagggaggaggactcgagtcaccaaccaagcccaaagggcggccaaagaagaattctatccctacaagcgagcagctcacggaacaggagagagctaaggatgctgaaaagcctgcagaggtacccggggagcctagtgaccgctctagagaagattag

SEQ ID NO: 208992 - DNA, 303 bp, Artificial Sequence
  derived and/or modified sequence
atggggctggagaagcgttttgaaaagcaaaagtacttaagtaccccagaccggatagacctggcagaatccctgggattatcacagctccaggtcaagacatggtaccagaaccggcgaatgaagtggaaaaagatcgtacttcagggaggagggctcgaatcccccaccaaaccaaagggccgccccaaaaagaacagcatccccactagtgagcagctgaccgagcaggaacgagcgaaggacgcagagaaacccgcagaagtcccaggtgagccctcagaccgctctcgggaggattag

SEQ ID NO: 208993 - DNA, 765 bp, Artificial Sequence
  derived and/or modified sequence
atgcagaggcctggagagcctggagctgcccgcttcggccccccagagggctgtgccgaccaccggccccaccgctaccgctccttcatgattgaggagatcctgacagagcccccaggccccaagggggccgccccagctgctgctgctgctgctgctggggagctgctgaagtttggagtgcaggccctgctggccgcccggcccttccacagccacctggccgtgctgaaggccgagcaggccgctgtgttcaagttccccctggcccccctgggctgcagcggcctgagcagcgccctgctggccgccggccctggcctgcctggagctgctggggccccccacctgcccctggagctgcagctgcggggcaagctggaggccgccggccctggagagcccggcaccaaggccaagaagggcagaagaagcaggacagtgttcacagagctgcagctgatgggcctggagaagagatttgagaagcagaagtacctgagcaccccagacagaattgacctggccgagagcctgggcctgagccagctgcaggtgaagacctggtaccagaacagaaggatgaagtggaagaagatcgtgctgcagggcggcggcctggagagccccaccaagcccaagggccggcccaagaagaacagcatccccaccagcgagcagctgacagagcaggagcgggccaaggatgctgagaagccagctgaggtgcctggagagcccagcgacaggagcagagaagattag

SEQ ID NO: 208994 - DNA, 303 bp, Artificial Sequence
  derived and/or modified sequence
atgggcctggagaagagatttgagaagcagaagtacctgagcaccccagacagaattgacctggccgagagcctgggcctgagccagctgcaggtgaagacctggtaccagaacagaaggatgaagtggaagaagatcgtgctgcagggcggcggcctggagagccccaccaagcccaagggccggcccaagaagaacagcatccccaccagcgagcagctgacagagcaggagcgggccaaggatgctgagaagccagctgaggtgcctggagagcccagcgacaggagcagagaagattag

SEQ ID NO: 208995 - DNA, 765 bp, Artificial Sequence
  derived and/or modified sequence
atgcagcggcccggcgagcccggcgccgcccggttcggcccccccgaggggtgtgctgaccaccgccctcataggtaccgatcctttatgatcgaagaaatactgaccgagccacctgggcccaagggggccgctccagctgctgctgccgctgcagcaggagaattgctgaagtttggagtgcaggccctgctcgctgctcggcctttccatagccacctcgcagtactcaaagctgagcaagctgctgtatttaagttccccttagctccactcggctgctccgggctttcgtcggcgctacttgccgccgggccaggactgccaggggcagcgggggctccacacctgccactagaactccaacttcggggaaaactggaggccgccggccctggcgaaccggggaccaaagctaaaaaaggcagaaggtcgcggacagtcttcacagaattgcagctgatgggtcttgagaagagatttgaaaagcagaagtatctgtccaccccagatagaatcgacctggcagagagcttgggtctctcccagctccaggtcaagacgtggtatcagaacagacggatgaagtggaagaagattgtgctgcagggcggaggattagaaagcccaaccaagcccaaaggccgccctaaaaagaacagcatccccaccagcgaacagctgaccgagcaggaacgagcaaaggatgccgagaagcctgccgaagtgcccggagaaccgagtgacagaagccgcgaagattag

SEQ ID NO: 208996 - DNA, 303 bp, Artificial Sequence
  derived and/or modified sequence
atgggcctggagaagcggttcgagaagcagaagtacctgagcacccctgatagaatcgacttggcagaatcgttgggactctcacaactgcaggtgaaaacttggtaccagaaccgccgtatgaagtggaagaagattgtcctgcagggcgggggcttagagtctcctacaaagccgaaaggccgacccaagaaaaatagtataccaactagtgagcagctgacagaacaggagagggctaaggacgctgaaaaacctgcagaggtgcccggagagccgtctgatagatcccgagaggactag

SEQ ID NO: 208997 - DNA, 765 bp, Artificial Sequence
  derived and/or modified sequence
atgcagagacccggagaacccggtgccgctcggtttggaccgcctgaaggctgtgctgatcatagaccgcacaggtacaggtcgtttatgatagaggagattctaacagaaccgccaggaccgaaaggtgcagcccctgctgcagcagctgcggctgcgggagaactgcttaaattcggggtccaggctcttctcgctgcgaggccttttcacagtcatctggctgtgttgaaagccgagcaggcagccgtgttcaagttcccacttgccccattgggctgctctggactaagctccgcgcttctggctgcaggcccagggttgccaggagctgccggtgcaccacatcttcccctagagctccagctgcggggtaagctcgaagccgcaggacccggtgagcccggtaccaaggccaaaaaggggaggcgctcacgcaccgtctttaccgagctgcagctgatgggattggaaaagagattcgaaaagcagaaatacctgtccacaccagacagaatagacttggccgagtctctgggtttgagtcagcttcaggtgaaaacttggtaccaaaatcgaagaatgaaatggaagaagattgtactgcaaggcggaggcctggagtcaccaacaaagcctaaggggagacctaagaaaaattccatccccacgtcagaacagctgaccgaacaggagcgggcaaaggatgcagaaaagcccgctgaggtccccggtgagccatctgaccgcagccgggaagattag

SEQ ID NO: 208998 - DNA, 303 bp, Artificial Sequence
  derived and/or modified sequence
atggggcttgagaagaggtttgagaaacagaaatatctctctactcctgataggattgacctggccgagtccctgggcctgtcccaactgcaagtgaaaacttggtaccagaatcgtcggatgaagtggaaaaaaatcgtgttgcagggtggagggctggagagcccgaccaagccaaaaggacggccaaagaagaattccattcccacatctgaacagctgaccgagcaggagcgggctaaagatgctgagaaacccgcagaagttcctggagagccgtccgatcggagtagagaggactag

SEQ ID NO: 208999 - DNA, 1809 bp, Artificial Sequence
  derived and/or modified sequence
cggcgtggggagggggcgcagtcccgggttcgaccggccgagccccgcgcgccccgcccgcgccctgcgcctccgcccggccggccggcgggggagggggcatgagccggcgcccgcgcgccgccccgagctgcgggccggcctagagccccgcgcgggccccgcgccggagccaagccgtcgccgccgccgccgccaaaccgcgggcgcagcagtgggcgccgcgatgcagcggccgggggagccgggcgccgcgcgcttcggcccgcccgagggctgcgcggaccaccggccgcaccgctatcgcagcttcatgattgaggagatcctcacggagccacccgggcccaagggcgccgcgcccgcagccgccgctgccgcggcgggcgagctgctgaagttcggcgtgcaggcgctgctggcggcgcggcccttccacagccacctggccgtgctgaaggccgagcaggcggcggtgttcaagttcccactggcgccgctgggctgttcagggctgagctctgcgttgctggcggcagggcccgggctgcccggcgccgcgggtgcgccacacctgccgctcgagttgcagctccgcgggaagctggaggcggcaggccctggggagccaggcaccaaagccaagaaggggcgtcggagccgcactgtgttcaccgagctgcagctgatgggcctggagaaacgcttcgagaagcagaagtacctttccacgccggacagaatagatcttgctgagtccctgggcctgagccagttgcaggtgaagacgtggtaccagaatcggaggatgaagtggaagaaaatagtgctgcagggcggcggcctggagtctcccaccaagcccaaggggcggcccaagaagaactcaattccaacgagcgagcagcttactgagcaggagcgcgccaaggatgcagagaaaccggcggaggtgccgggcgagcccagcgacaggagccgcgaggactgagggcggtatacggtgcggggcctgggatgcccgcgccacccgcagccccctcactcggcggaaacccgcgagccggcccttccgcgtccaagaagtttacttcctaagcctttttattatgatcttgaatgcggacaattggggccaaacgaggaaggacacagacccaaaagccagacccaggtcccagcgcgcttctgggctctaacctgggagactcgcatccagcccggcggaagctacagtctctaccctgagctccgtggcgcagagcgctccacgcgtattcacgccccgctcctcgcctgcacccccaccccgtctggggcctgccctcccggccggggagcctccaggcacacacccgcttctggacgtcggggacccagcggttgggctcaggccacaacggcctgagattgccccggggcaacccgtcggctcggcctggaggccgggtccccgatgtcgctggggcccctaccccctcttgcgaagacggtgactttttttccaataaaatattttatgacacaatcgggctcggtggagcagcttctgaatccgcagggggtgagggtgggggtgggggtgggctcggcaagataagcggaacgcgggcagttgcttcttaaacttcctttcctccggctctgtcgaaggcagctgtgctcttcaccatcaagcccgggctaggcacggcgggcggctcggtggctgcaggatcctaggaatcgcttccactctgggcgtgaggggccagtctgaactccacctcctctcccttgccagccagagagtcgctggcaggagcggtc

SEQ ID NO: 209000 - DNA, 1323 bp, Artificial Sequence
  derived and/or modified sequence
gcctggggaactccaggacagaacacggacagggtcgaggagatactccctcccaaatctggggaacggcaacgttgaggagggtctccatctgcgccaccggcgccgaccggcagggcgtggaggttttgcgctgggaggcactggccaagcgcgagcacccccgcggcacgtggtgcggcagtccctggggcagaggagcgcggccgtagctcacccgggtcctcattctctttcttcgcagccgtgctgaaggccgagcaggcggcggtgttcaagttcccactggcgccgctgggctgttcagggctgagctctgcgttgctggcggcagggcccgggctgcccggcgccgcgggtgcgccacacctgccgctcgagttgcagctccgcgggaagctggaggcggcaggccctggggagccaggcaccaaagccaagaaggggcgtcggagccgcactgtgttcaccgagctgcagctgatgggcctggagaaacgcttcgagaagcagaagtacctttccacgccggacagaatagatcttgctgagtccctgggcctgagccagttgcaggtgaagacgtggtaccagaatcggaggatgaagtggaagaaaatagtgctgcagggcggcggcctggagtctcccaccaagcccaaggggcggcccaagaagaactcaattccaacgagcgagcagcttactgagcaggagcgcgccaaggatgcagagaaaccggcggaggtgccgggcgagcccagcgacaggagccgcgaggactgagggcggtatacggtgcggggcctgggatgcccgcgccacccgcagccccctcactcggcggaaacccgcgagccggcccttccgcgtccaagaagtttacttcctaagcctttttattatgatcttgaatgcggacaattggggccaaacgaggaaggacacagacccaaaagccagacccaggtcccagcgcgcttctgggctctaacctgggagactcgcatccagcccggcggaagctacagtctctaccctgagctccgtggcgcagagcgctccacgcgtattcacgccccgctcctcgcctgcacccccaccccgtctggggcctgccctcccggccggggagcctccaggcacacacccgcttctggacgtcggggacccagcggttgggctcaggccacaacggcctgagattgccccggggcaacccgtcggctcggcctggaggccgggtccccgatgtcgctggggcccctaccccctcttgcgaagacggtgactttttttccaataaaatattttatgacacaa

SEQ ID NO: 209001 - DNA, 765 bp, Artificial Sequence
  derived and/or modified sequence
atgcagagacccggcgagcccggcgccgccagattcggcccccccgagggctgcgccgaccacagaccccacagatacagaagcttcatgatcgaggagatcctgaccgagccccccggccccaagggcgccgcccccgccgccgccgccgccgccgccggcgagctgctgaagttcggcgtgcaggccctgctggccgccagacccttccacagccacctggccgtgctgaaggccgagcaggccgccgtgttcaagttccccctggcccccctgggctgcagcggcctgagcagcgccctgctggccgccggccccggcctgcccggcgccgccggcgccccccacctgcccctggagctgcagctgagaggcaagctggaggccgccggccccggcgagcccggcaccaaggccaagaagggcagaagaagcagaaccgtgttcaccgagctgcagctgatgggcctggagaagagattcgagaagcagaagtacctgagcacccccgacagaatcgacctggccgagagcctgggcctgagccagctgcaggtgaagacctggtaccagaacagaagaatgaagtggaagaagatcgtgctgcagggcggcggcctggagagccccaccaagcccaagggcagacccaagaagaacagcatccccaccagcgagcagctgaccgagcaggagagagccaaggacgccgagaagcccgccgaggtgcccggcgagcccagcgacagaagcagagaggactag

SEQ ID NO: 209002 - DNA, 303 bp, Artificial Sequence
  derived and/or modified sequence
atgggcctggagaagagattcgagaagcagaagtacctgagcacccccgacagaatcgacctggccgagagcctgggcctgagccagctgcaggtgaagacctggtaccagaacagaagaatgaagtggaagaagatcgtgctgcagggcggcggcctggagagccccaccaagcccaagggcagacccaagaagaacagcatccccaccagcgagcagctgaccgagcaggagagagccaaggacgccgagaagcccgccgaggtgcccggcgagcccagcgacagaagcagagaggactag

SEQ ID NO: 209003 - protein, 1227 aa, Artificial Sequence
  derived and/or modified sequence
MVDPVGFAEAWKAQFPDSEPPRMELRSVGDIEQELERCKASIRRLEQEVNQERFRMIYLQTLLAKEKKSYDRQRWGFRRAAQAPDGASEPRASASRPQPAPADGADPPPAEEPEARPDGEGSPGKARPGTARRPGAAASGERDDRGPPASVAALRSNFERIRKGHGQPGADAEKPFYVNVEFHHERGLVKVNDKEVSDRISSLGSQAMQMERKKSQHGAGSSVGDASRPPYRGRSSESSCGVDGDYEDAELNPRFLKDNLIDANGGSRPPWPPLEYQPYQSIYVGGMMEGEGKGPLLRSQSTSEQEKRLTWPRRSYSPRSFEDCGGGYTPDCSSNENLTSSEEDFSSGQSSRVSPSPTTYRMFRDKSRSPSQNSQQSFDSSSPPTPQCHKRHRHCPVVVSEATIVGVRKTGQIWPNDGEGAFHGDADGSFGTPPGYGCAADRAEEQRRHQDGLPYIDDSPSSSPHLSSKGRGSRDALVSGALESTKASELDLEKGLEMRKWVLSGILASEETYLSHLEALLLPMKPLKAAATTSQPVLTSQQIETIFFKVPELYEIHKEFYDGLFPRVQQWSHQQRVGDLFQKLASQLGVYRAFVDNYGVAMEMAEKCCQANAQFAEISENLRARSNKDAKDPTTKNSLETLLYKPVDRVTRSTLVLHDLLKHTPASHPDHPLLQDALRISQNFLSSINEEITPRRQSMTVKKGEHRQLLKDSFMVELVEGARKLRHVFLFTDLLLCTKLKKQSGGKTQQYDCKWYIPLTDLSFQMVDELEAVPNIPLVPDEELDALKIKISQIKNDIQREKRANKGSKATERLKKKLSEQESLLLLMSPSMAFRVHSRNGKSYTFLISSDYERAEWRENIREQQKKCFRSFSLTSVELQMLTNSCVKLQTVHSIPLTINKEDDESPGLYGFLNVIVHSATGFKQSSNLYCTLEVDSFGYFVNKAKTRVYRDTAEPNWNELDPQALQDRDWQRTVIAMNGIEVKLSVKFNSREFSLKRMPSRKQTGVFGVKIAVVTKRERSKVPYIVRQCVEEIERRGMEEVGIYRVSGVATDIQALKAAFDVNNKDVSVMMSEMDVNAIAGTLKLYFRELPEPLFTDEFYPNFAEGIALSDPVAKESCMLNLLLSLPEANLLTFLFLLDHLKRVAEKEAVNKMSLHNLATVFGPTLLRPSEKESKLPANPSQPITMTDSWSLEVMSQVQVLLYFLQLEAIPAPDSKRQSILFSTEV

SEQ ID NO: 209004 - DNA, 1398 bp, Artificial Sequence
  derived and/or modified sequence
atggtggaccccgtcgggttcgccgaagcctggaaggcacagttccccgacagcgagcctccacggatggagctgcgaagcgtaggagacatcgaacaagaactagaaaggtgtaaggcttctatccgccggttggagcaggaggtgaatcaggaacggtttcgcatgatttacttacagacactgttggccaaagaaaaaaagagctatgaccggcagcgctggggcttccgtcgggccgcccaggccccagatggagcgagcgagcccagagctagcgcatccaggcctcagcccgcacctgcagatggcgccgacccccccccagccgaagaacccgaggcccgaccggatggtgaaggatctcccgggaaagcccggccaggtacagctcggaggcccggcgcggccgcatccggcgagagggatgacagaggtccgcctgccagtgtcgccgccttgagaagcaatttcgagaggatacgcaaggggcacggtcagcccggggctgacgccgagaagcctttctacgttaacgtggagtttcatcatgaaagaggacttgtgaaagtgaatgataaggaggtgagtgatagaattagctccttggggagtcaggccatgcaaatggagcgaaagaagtcccagcacggagcaggtagcagcgtaggggacgcctccagaccaccataccggggaaggtcttctgagtcatcatgtggagtcgacggagattacgaagacgccgagctgaatcctagatttctcaaggataacttgatcgatgccaacgggggctcccgtcctccttggccgccactcgaatatcagccataccagtcaatttatgttggaggcatgatggagggcgaagggaaaggtccgcttcttagaagccagtctacctccgagcaggagaagcggctgacctggcccaggcggagctactctccaaggtccttcgaggattgtgggggcggctacactcctgattgcagcagcaacgagaacctgactagctccgaagaggactttagtagcgggcaaagttcccgtgtatcacctagtccgacaacttaccgaatgttccgagataagagcaggtcaccctcacagaacagccagcaaagctttgactcatcctccccccctactcctcaatgccacaagcgccatcgccactgtccagtcgtcgtgagcgaagcgacaatagttggagtcaggaagactgggcagatctggcctaatgacggggagggtgcttttcatggagagcaccccggcgctgccgaagaggtatttcaaaagctcttgcccgatatcagaggggcagctgacgccgatcagcttgtctgtgagacccctgattgccctcagcatagcgctgatcaccagtag

SEQ ID NO: 209005 - DNA, 1377 bp, Artificial Sequence
  derived and/or modified sequence
atggttgacccggtcggctttgcggaagcttggaaggcacagtttcctgattccgagccgccacggatggagctaagatctgttggtgacatcgagcaggaactggaacggtgcaaagcttccatccgaagactggagcaggaggtcaatcaggagagattcaggatgatttacttgcaaacactgttggccaaggaaaaaaaatcgtatgatcgccagcgttgggggttcaggagggccgctcaggccccggatggcgcctccgaacctcgcgcctccgcctctcgcccccagcctgcgcctgctgacggtgctgaccctcccccggctgaagagcccgaagcccggcccgatggcgagggaagtcccggcaaggctcgtcccggaacagctcgaaggcctggggcagcagcgtctggcgagcgagatgaccgggggccccccgcatccgtggcggccctcaggtccaatttcgagagaattagaaagggacacggacaaccgggggccgatgctgagaaaccattttacgtgaacgttgagtttcaccatgaacgagggctcgttaaagtgaacgataaggaggtgtctgacaggatctcatcactcggcagccaggctatgcagatggaaaggaaaaagagccaacacggagcaggcagctccgtcggtgatgccagcaggccaccatacaggggccgtagttctgaaagtagctgcggtgtagacggagattacgaagacgctgagttgaatcctagattcttgaaggacaatctgatcgacgcaaacggaggctccaggccgccttggcccccactggagtaccaaccctatcaatccatttatgtgggtggaatgatggaaggagagggtaagggaccacttttacggagccagagcactagtgagcaggaaaaaagactcacatggcccaggcggtcctactcgcctaggtccttcgaagactgtggcgggggatatactcctgactgcagttcgaacgagaacctgactagcagtgaagaggacttttcttccggccaatctagcagagtttcaccctccccgactacataccgcatgttccgggacaaatcccgaagccccagtcaaaattcgcagcagagctttgactcctcgtctccccctactccgcagtgccacaaaagacacagacattgtcccgtagtggtgtcagaggccaccattgtgggagttcgaaagacagggcagatctggcctaacgacggtgaaggagccttccacggcgacgccgatggctctttcggaacaccaccaggctatggatgtctctgtctgccagcctggccctccggttgtacagcagcgactgctagggttacacggagctag

SEQ ID NO: 209006 - DNA, 3684 bp, Artificial Sequence
  derived and/or modified sequence
atggtggatccagtcggttttgctgaagcttggaaggcacagtttcccgacagcgaaccacctcgcatggagctgagaagcgtgggagatatagagcaagagttagagcgctgtaaagcatcaattaggaggcttgagcaagaagttaaccaagaacgatttcgcatgatctatttgcaaactctgctcgctaaggagaagaagagctatgaccgacagaggtggggttttcggcgggctgcccaggcccccgatggcgcctcagagccacgtgcttcagccagccgtccacagccggccccggccgacggagccgaccctcctcctgcagaggagcctgaagccaggcctgacggtgaagggagccctggcaaagcaagaccgggcactgccaggcgacccggggctgccgcatccggggaacgtgatgaccgcgggcctcccgcatcagtggccgccctccgctcaaatttcgagagaattcgcaaaggacacgggcagccaggcgctgatgcggagaaacccttctacgtcaatgtcgagtttcatcatgaaaggggtctcgtaaaagtaaatgataaagaggtctcagacagaatcagcagcctgggaagtcaggccatgcagatggaaagaaaaaagagtcagcacggcgccggttcttccgtcggagacgcaagtcggccaccgtacaggggcagaagtagcgaaagtagctgtggggtagacggagactacgaggatgccgaattaaacccgagatttctaaaggacaatctgattgacgccaacggcggttcaagacccccgtggccgcccttggagtatcaaccttaccagtctatttacgtgggtgggatgatggagggggaaggaaaggggcccctgttgcggtctcagagcacctccgaacaagagaagcggctgacttggcctagaaggtcttactcaccccgaagcttcgaggactgtggcgggggttatactcctgactgtagcagcaacgaaaatttgacatcctctgaggaagacttctcctccggtcaatcttcccgggtgagcccgtctccaacgacctatcgcatgtttagggataagagcagaagtccctcccaaaatagccaacaaagtttcgacagctcctccccgcctaccccccaatgccacaagaggcataggcattgccctgtagtggtttcagaggcaaccattgtgggggtgagaaaaaccggacagatttggcctaacgacggtgagggagcgttccacggcgatgcagatggcagcttcggcacgccccccggctacgggtgtgctgctgatagggccgaagagcagcgtaggcaccaggacggcctcccctacatcgatgatagtcccagtagttcccctcatctgagtagcaaaggaaggggcagccgcgatgccttggtgagtggagctcttgaaagtacaaaagcgagcgagctagacctcgaaaagggactcgagatgcggaaatgggtgctctcagggatcttggcttctgaagagacgtatctctcacacttggaagctctactgctccctatgaaaccgttaaaagccgccgcaactacctcgcagcctgtgctaacaagccagcagattgaaacgatattcttcaaggtgcccgaattgtacgagatccataaggaattctacgacggtctcttcccccgggtgcagcaatggtcccatcagcagcgggtaggagatttattccagaaactagcgagtcaactgggggtctacagagcgttcgtggacaactatggcgttgcgatggagatggcggaaaagtgctgccaggcaaatgcacagtttgccgagatctccgaaaatttgagagcacgctccaacaaagacgccaaggatcccactaccaagaatagcttggagactctgctttacaagcccgtcgaccgagtgactcggtcaaccctggtgcttcacgatctgctcaagcacacaccagcctcacatcctgaccacccacttctccaggatgcgcttcggatttcgcagaactttcttagctcgatcaacgaggagatcactccccggcgtcagtccatgactgtcaaaaagggcgagcacagacaactgctcaaggattctttcatggtcgagctcgtcgaaggagcccgcaaacttagacacgtcttcctcttcaccgatctcctgctttgtacaaaattaaagaagcagtccggggggaagacacagcagtatgattgtaagtggtacatccctcttacggatttgtcatttcaaatggttgacgagttggaagcagtaccaaacatccctctggtgcccgatgaagaacttgacgctctgaagataaaaattagccaaatcaaaaacgacattcagagagagaaaagagccaacaaagggtcaaaggcaacagaaaggctcaaaaagaagctgagcgaacaagaatctttattgcttttgatgtccccaagcatggcgttcagagtgcacagccgaaatggaaagtcttacaccttcctcatctcctccgattatgagagggctgaatggagagagaacattagagaacagcagaagaaatgtttccggtctttttctttaactagcgtggagttacagatgctgacaaatagttgcgttaaactgcagaccgtccacagcattccccttacaatcaacaaggaggacgatgagagtccagggttgtatggattcctaaatgtgattgtgcatagtgcaactggcttcaaacagtctagcaacttgtactgtactttggaggtggatagtttcggctatttcgtaaacaaggccaagactcgggtgtatagggatacggccgagcccaattggaacgagctggaccctcaggccctacaggacagagattggcagcgcactgtgatcgccatgaatggcatcgaggtgaagctgagcgtcaagtttaactcaagagagttcagcctcaagagaatgccttccaggaaacaaaccggagtctttggagtcaaaatcgccgtggtcacaaaacgcgagcggagcaaggtgccatacatcgtcagacagtgtgtggaagagattgaacgccgtgggatggaggaggtcgggatttacagggtgagcggagtcgcgacagatatccaggccttgaaggcggcattcgacgtcaacaataaggacgtatcggtcatgatgagcgagatggatgtgaatgccatagccggcactctcaagttgtacttcagggaactacccgagccactgttcaccgacgaattttacccgaattttgcagaaggtattgcactgagtgatccagtcgccaaagagagctgcatgcttaatctgttactctctctgcctgaagctaacctgctcaccttccttttccttcttgatcacctgaaaagagtggcagaaaaggaggctgtcaacaagatgtccttacataacctggcgactgtgttcggtccgacgctgctacgccctagcgagaaagagtcaaaattgccagcaaatccctctcagcccatcacaatgacagattcttggagtctagaagtgatgtctcaagtgcaggtcctcctgtacttcctacagctcgaggctataccagcaccagactctaaaagacagtctattctcttttctactgaggtgtag

SEQ ID NO: 209007 - DNA, 1404 bp, Artificial Sequence
  derived and/or modified sequence
atggttgatcccgtggggtttgccgaagcctggaaagctcagtttcccgacagtgagccgcccagaatggaactcaggagcgtaggagacatagaacaagagttggagaggtgcaaggcctccatccgccgacttgagcaggaggttaaccaggagaggtttcgcatgatttacctgcagacactgctggccaaagagaagaagagttatgaccgccagaggtggggctttcgccgggctgcacaagcacctgacggcgccagtgagcctcgcgcatccgcaagccgaccacagcccgccccggcagacggggcagaccctccacctgcggaagagccagaggcccgacctgatggcgaaggctccccagggaaggcacgtccaggcactgccaggaggccaggggctgctgcatctggcgagcgtgacgatagggggccacccgcttccgtcgccgccctgagaagtaattttgaacgtatccgcaaagggcatggccagccaggcgcagacgcagagaagccattctacgttaatgttgagttccaccacgagcgagggcttgtgaaagttaacgacaaggaggtatctgaccggatcagcagcctgggcagccaagcaatgcaaatggaaaggaaaaaaagtcaacatggagcagggagttcagtcggtgacgccagccgtcctccatataggggcagatcttcagagtcctcttgcggggtcgatggggattatgaggatgcagagctgaacccccggtttctgaaggataatctgatcgatgccaacggcggatctagacccccttggcctcccttagagtaccagccctatcagtctatttatgtcggagggatgatggaaggggaaggaaaaggacccctgctcaggagccagtctacctccgaacaggaaaaaaggctgacttggccgcggaggagctacagcccgagatcctttgaggattgcgggggcggatacacaccagactgttcttcgaacgaaaatcttacgagtagcgaggaggacttttcctcagggcagtccagcagggtgtccccttctccaactacctataggatgttccgggacaaatcccggagccctagtcaaaactcgcagcagagtttcgactccagcagccctccaaccccccagtgtcacaagcggcacaggcattgcccagtcgtcgtctcggaggctactatcgtgggggttaggaaaacagggcagatttggcccaatgatggggaaggcgccttccacggcgatgcagtgctaaagaccgaggtccctcatcagggtgtcaggcgggcccgcctctcactggaagcactgggagaagacccttcctttctcttccctgccagcgatggcccgagacattctagcacttggtag

SEQ ID NO: 209008 - DNA, 1365 bp, Artificial Sequence
  derived and/or modified sequence
atggtcgacccagttggttttgccgaagcttggaaggctcaatttccagacagcgagcccccacgaatggaactccggtccgtcggggatattgagcaagagctggagaggtgcaaagcctcaataagaaggctggaacaggaggtgaatcaagaacggtttcggatgatttacttgcagactctacttgctaaggagaaaaagagctatgacaggcagcgctggggcttccgtcgcgccgctcaggccccagacggcgcctctgagccaagggcctctgcaagtcggccacagccggcccccgccgatggggccgacccaccaccagccgaggagccagaagcacgccccgacggggaggggagtcctggaaaggctcggccaggcacggcgcgtcgccccggcgctgccgccagtggcgaacgagacgatcgaggaccccccgcatctgttgccgccttaaggtcaaatttcgagcgtatccggaaaggccacggccagcctggcgctgatgccgagaagccattctacgtgaatgttgaatttcaccatgagaggggccttgtgaaagtcaatgacaaggaagtctccgaccgaatcagttcactgggttcgcaagctatgcagatggagagaaagaagagtcagcatggcgctggctcttctgtgggagacgcatcccggccaccctatcgcggaagatcatctgaaagctcctgtggtgtggatggggactacgaagacgcagagctaaacccaagatttctcaaagacaatctgatcgatgcgaatggaggcagccggcccccctggcctcccttggagtatcaaccttatcaatctatttacgtaggcgggatgatggagggcgaagggaaggggcccctcttgcgttcccagtcaacatccgagcaggaaaagagattgacctggcccaggaggagttactcacctcggtcttttgaggactgcggcggagggtataccccagattgcagctctaatgagaaccttacatcttcagaagaagacttttcaagcgggcagtctagccgcgtgtccccctcaccaaccacatatcggatgttcagagacaagagcaggagtccaagtcagaattcccagcagtcctttgactcttcatccccaccaactcctcaatgtcataaaaggcatcgacattgccctgtcgtggtgtcagaggctactatcgtgggtgtgcgcaaaacgggccagatatggccgaatgacggtgaaggcgctttccatggtgacgctgacggctctttcggaactccaccgggatacggatgtgctgcagggcggcccccgcacttgacagaactgccagtgcagcatcagtag

SEQ ID NO: 209009 - DNA, 1398 bp, Artificial Sequence
  derived and/or modified sequence
atggtggaccctgtgggctttgctgaggcctggaaggcccagttcccagacagcgagccccccaggatggagctgcggtctgtgggggacatcgagcaggagctggagcgctgcaaggccagcatccggcggctggagcaggaggtgaaccaggagcgcttcaggatgatctacctgcagaccctgctggccaaggagaagaagagctatgaccggcagcgctggggcttccggcgggccgcccaggccccagatggagccagcgagccccgggccagcgccagccggccccagcctgccccagcagatggagctgaccccccacctgctgaggagcctgaggcccggccagatggagagggcagccctgggaaggcccggcccggcacagcccggcggcctggagctgctgccagcggggagagagatgaccggggccccccagcctctgtggccgccctgcggagcaactttgagcgcatcagaaaaggacatggccagcccggggctgatgctgagaagcccttctacgtgaatgtggagttccaccacgagcggggcctggtgaaggtgaatgacaaggaggtgtctgaccgcatcagcagcctgggcagccaggccatgcagatggagaggaagaagagccagcacggggccggcagctctgtgggagatgccagcaggcctccctaccggggccgcagcagcgagagcagctgtggggtggatggagactatgaagatgctgagctgaacccccgcttcctgaaggacaacctgattgatgccaacggcggcagcaggcctccctggccacccctggagtaccagccctaccagagcatctacgtgggcggcatgatggagggggagggcaagggccccctgctgcggagccagagcaccagcgagcaggagaagaggctgacctggcccaggaggagctacagccccaggagctttgaggactgtggcggcggctacaccccagactgcagcagcaatgaaaacctgaccagcagcgaggaggacttcagcagcggccagagcagccgggtgagccccagccccaccacctacaggatgttccgggacaagagccgcagccccagccagaacagccagcagagctttgacagcagcagcccccccaccccccagtgccacaagaggcaccgccactgccctgtggtggtgtctgaggccaccatcgtgggcgtgaggaagacaggccagatctggcccaatgatggagagggcgccttccatggagagcaccctggagctgctgaggaggtgttccagaagctgctgcctgacatcagaggagctgctgatgctgaccagctggtgtgtgagaccccagactgcccccagcacagcgctgaccaccagtag

SEQ ID NO: 209010 - DNA, 1377 bp, Artificial Sequence
  derived and/or modified sequence
atggtggaccctgtgggctttgctgaggcctggaaggcccagttcccagacagcgagccccccaggatggagctgcggtctgtgggggacatcgagcaggagctggagcgctgcaaggccagcatccggcggctggagcaggaggtgaaccaggagcgcttcaggatgatctacctgcagaccctgctggccaaggagaagaagagctatgaccggcagcgctggggcttccggcgggccgcccaggccccagatggagccagcgagccccgggccagcgccagccggccccagcctgccccagcagatggagctgaccccccacctgctgaggagcctgaggcccggccagatggagagggcagccctgggaaggcccggcccggcacagcccggcggcctggagctgctgccagcggggagagagatgaccggggccccccagcctctgtggccgccctgcggagcaactttgagcgcatcagaaaaggacatggccagcccggggctgatgctgagaagcccttctacgtgaatgtggagttccaccacgagcggggcctggtgaaggtgaatgacaaggaggtgtctgaccgcatcagcagcctgggcagccaggccatgcagatggagaggaagaagagccagcacggggccggcagctctgtgggagatgccagcaggcctccctaccggggccgcagcagcgagagcagctgtggggtggatggagactatgaagatgctgagctgaacccccgcttcctgaaggacaacctgattgatgccaacggcggcagcaggcctccctggccacccctggagtaccagccctaccagagcatctacgtgggcggcatgatggagggggagggcaagggccccctgctgcggagccagagcaccagcgagcaggagaagaggctgacctggcccaggaggagctacagccccaggagctttgaggactgtggcggcggctacaccccagactgcagcagcaatgaaaacctgaccagcagcgaggaggacttcagcagcggccagagcagccgggtgagccccagccccaccacctacaggatgttccgggacaagagccgcagccccagccagaacagccagcagagctttgacagcagcagcccccccaccccccagtgccacaagaggcaccgccactgccctgtggtggtgtctgaggccaccatcgtgggcgtgaggaagacaggccagatctggcccaatgatggagagggcgccttccatggagatgctgatggcagctttggcaccccacctggctacggctgcctgtgcctgcctgcctggcccagcggctgcacagctgccacagcccgggtgaccaggagctag

SEQ ID NO: 209011 - DNA, 3684 bp, Artificial Sequence
  derived and/or modified sequence
atggtggaccctgtgggctttgctgaggcctggaaggcccagttcccagacagcgagccccccaggatggagctgcggtctgtgggggacatcgagcaggagctggagcgctgcaaggccagcatccggcggctggagcaggaggtgaaccaggagcgcttcaggatgatctacctgcagaccctgctggccaaggagaagaagagctatgaccggcagcgctggggcttccggcgggccgcccaggccccagatggagccagcgagccccgggccagcgccagccggccccagcctgccccagcagatggagctgaccccccacctgctgaggagcctgaggcccggccagatggagagggcagccctgggaaggcccggcccggcacagcccggcggcctggagctgctgccagcggggagagagatgaccggggccccccagcctctgtggccgccctgcggagcaactttgagcgcatcagaaaaggacatggccagcccggggctgatgctgagaagcccttctacgtgaatgtggagttccaccacgagcggggcctggtgaaggtgaatgacaaggaggtgtctgaccgcatcagcagcctgggcagccaggccatgcagatggagaggaagaagagccagcacggggccggcagctctgtgggagatgccagcaggcctccctaccggggccgcagcagcgagagcagctgtggggtggatggagactatgaagatgctgagctgaacccccgcttcctgaaggacaacctgattgatgccaacggcggcagcaggcctccctggccacccctggagtaccagccctaccagagcatctacgtgggcggcatgatggagggggagggcaagggccccctgctgcggagccagagcaccagcgagcaggagaagaggctgacctggcccaggaggagctacagccccaggagctttgaggactgtggcggcggctacaccccagactgcagcagcaatgaaaacctgaccagcagcgaggaggacttcagcagcggccagagcagccgggtgagccccagccccaccacctacaggatgttccgggacaagagccgcagccccagccagaacagccagcagagctttgacagcagcagcccccccaccccccagtgccacaagaggcaccgccactgccctgtggtggtgtctgaggccaccatcgtgggcgtgaggaagacaggccagatctggcccaatgatggagagggcgccttccatggagatgctgatggcagctttggcaccccacctggctacggctgtgccgctgacagagctgaggagcagaggaggcaccaggacggcctgccctacattgatgacagccccagcagcagcccccacctgagcagcaagggccggggcagcagagatgccctggtgtctggggccctggagagcaccaaggccagcgagctggacctggagaagggcctggagatgaggaagtgggtgctgagcggcatcctggccagcgaggagacctacctgagccacctggaggccctgctgctgcccatgaagcccctgaaggccgccgccaccaccagccagcctgtgctgaccagccagcagatcgagaccatcttcttcaaggtgcctgagctgtatgagatccacaaggagttctatgatggcctcttcccccgggtgcagcagtggagccaccagcagagggtgggggacctcttccagaagctggccagccagctgggcgtgtaccgggcctttgtggacaactacggcgtggccatggagatggccgagaagtgctgccaggccaatgcccagtttgctgagatcagcgagaacctgcgggcccggagcaacaaggatgccaaggaccccaccaccaagaacagcctggagaccctgctgtacaagcctgtggacagagtgaccaggagcaccctggtgctgcatgacctgctgaagcacaccccagccagccacccagaccaccccctgctgcaggatgccctgcgcatcagccagaacttcctgagcagcatcaatgaggagatcaccccccggcggcagagcatgacagtgaagaagggggagcaccggcagctgctgaaggacagcttcatggtggagctggtggagggcgccaggaagctgcggcacgtgttcctgttcacagacctgctgctgtgcaccaagctgaagaagcagagcggcggcaagacccagcagtatgactgcaagtggtacatccccctgacagacctgtccttccagatggtggatgagctggaggccgtgcccaacatccccctggtgcctgatgaggagctggatgccctgaagatcaagatcagccagatcaagaatgacatccagcgggagaagagggccaacaagggcagcaaggccacagagcggctgaagaagaagctgtctgagcaggagagcctgctgctgctgatgagccccagcatggccttccgggtgcacagcagaaatggcaagagctacaccttcctgatcagcagtgactatgaaagagctgagtggagggagaacatccgggagcagcagaagaagtgcttccgctccttcagcctgacctctgtggagctgcagatgctgaccaacagctgtgtgaagctgcagacagtgcacagcatccccctgaccatcaacaaggaggatgatgagagccctggcctgtatggcttcctgaatgtcatcgtgcacagcgccaccggcttcaagcagagcagcaacctgtactgcaccctggaggtggacagctttggctactttgtgaacaaggccaagaccagggtgtacagagacacagctgagcccaactggaatgagctggacccccaggccctgcaggaccgggactggcagaggacagtcatcgccatgaatggaattgaggtgaagctgtctgtgaagttcaacagccgggagttcagcctgaagaggatgcccagcaggaagcagacaggagtgtttggagtgaagattgctgtggtgaccaagcgggagaggagcaaggtgccctacatcgtgcggcagtgtgtggaggagattgaaagaagaggcatggaggaggtgggcatctacagagtgtctggagtggccacagacatccaggccctgaaggccgcctttgatgtgaacaacaaggatgtgtctgtgatgatgtctgagatggatgtgaatgccatcgccggcaccctgaagctgtacttccgggagctgcctgagcccctcttcacagatgagttctaccccaactttgctgagggcatcgccctgagtgaccctgtggccaaggagagctgcatgctgaacctgctgctgagcctgcctgaggccaacctgctgaccttcctgttcctgctggaccacctgaagagggtggccgagaaggaggccgtgaacaagatgagcctgcacaacctggccaccgtgtttggccccaccctgctgcggcccagcgagaaggagagcaagctgcctgccaaccccagccagcccatcaccatgacagacagctggagcctggaggtgatgagccaggtgcaggtgctgctgtacttcctgcagctggaggccatcccagccccagacagcaagaggcagagcatcctcttcagcacagaggtgtag

SEQ ID NO: 209012 - DNA, 1404 bp, Artificial Sequence
  derived and/or modified sequence
atggtggaccctgtgggctttgctgaggcctggaaggcccagttcccagacagcgagccccccaggatggagctgcggtctgtgggggacatcgagcaggagctggagcgctgcaaggccagcatccggcggctggagcaggaggtgaaccaggagcgcttcaggatgatctacctgcagaccctgctggccaaggagaagaagagctatgaccggcagcgctggggcttccggcgggccgcccaggccccagatggagccagcgagccccgggccagcgccagccggccccagcctgccccagcagatggagctgaccccccacctgctgaggagcctgaggcccggccagatggagagggcagccctgggaaggcccggcccggcacagcccggcggcctggagctgctgccagcggggagagagatgaccggggccccccagcctctgtggccgccctgcggagcaactttgagcgcatcagaaaaggacatggccagcccggggctgatgctgagaagcccttctacgtgaatgtggagttccaccacgagcggggcctggtgaaggtgaatgacaaggaggtgtctgaccgcatcagcagcctgggcagccaggccatgcagatggagaggaagaagagccagcacggggccggcagctctgtgggagatgccagcaggcctccctaccggggccgcagcagcgagagcagctgtggggtggatggagactatgaagatgctgagctgaacccccgcttcctgaaggacaacctgattgatgccaacggcggcagcaggcctccctggccacccctggagtaccagccctaccagagcatctacgtgggcggcatgatggagggggagggcaagggccccctgctgcggagccagagcaccagcgagcaggagaagaggctgacctggcccaggaggagctacagccccaggagctttgaggactgtggcggcggctacaccccagactgcagcagcaatgaaaacctgaccagcagcgaggaggacttcagcagcggccagagcagccgggtgagccccagccccaccacctacaggatgttccgggacaagagccgcagccccagccagaacagccagcagagctttgacagcagcagcccccccaccccccagtgccacaagaggcaccgccactgccctgtggtggtgtctgaggccaccatcgtgggcgtgaggaagacaggccagatctggcccaatgatggagagggcgccttccatggagatgctgtgctgaagacagaggtgccccaccagggcgtgcggcgggcccggctgagcctggaggccctgggggaggaccccagcttcctgtttcctgccagtgatggccccaggcacagcagcacctggtag

SEQ ID NO: 209013 - DNA, 1365 bp, Artificial Sequence
  derived and/or modified sequence
atggtggaccctgtgggctttgctgaggcctggaaggcccagttcccagacagcgagccccccaggatggagctgcggtctgtgggggacatcgagcaggagctggagcgctgcaaggccagcatccggcggctggagcaggaggtgaaccaggagcgcttcaggatgatctacctgcagaccctgctggccaaggagaagaagagctatgaccggcagcgctggggcttccggcgggccgcccaggccccagatggagccagcgagccccgggccagcgccagccggccccagcctgccccagcagatggagctgaccccccacctgctgaggagcctgaggcccggccagatggagagggcagccctgggaaggcccggcccggcacagcccggcggcctggagctgctgccagcggggagagagatgaccggggccccccagcctctgtggccgccctgcggagcaactttgagcgcatcagaaaaggacatggccagcccggggctgatgctgagaagcccttctacgtgaatgtggagttccaccacgagcggggcctggtgaaggtgaatgacaaggaggtgtctgaccgcatcagcagcctgggcagccaggccatgcagatggagaggaagaagagccagcacggggccggcagctctgtgggagatgccagcaggcctccctaccggggccgcagcagcgagagcagctgtggggtggatggagactatgaagatgctgagctgaacccccgcttcctgaaggacaacctgattgatgccaacggcggcagcaggcctccctggccacccctggagtaccagccctaccagagcatctacgtgggcggcatgatggagggggagggcaagggccccctgctgcggagccagagcaccagcgagcaggagaagaggctgacctggcccaggaggagctacagccccaggagctttgaggactgtggcggcggctacaccccagactgcagcagcaatgaaaacctgaccagcagcgaggaggacttcagcagcggccagagcagccgggtgagccccagccccaccacctacaggatgttccgggacaagagccgcagccccagccagaacagccagcagagctttgacagcagcagcccccccaccccccagtgccacaagaggcaccgccactgccctgtggtggtgtctgaggccaccatcgtgggcgtgaggaagacaggccagatctggcccaatgatggagagggcgccttccatggagatgctgatggcagctttggcaccccacctggctacggctgtgccgccggccggcccccccacctgacagagctgcctgtgcagcaccagtag

SEQ ID NO: 209014 - DNA, 1398 bp, Artificial Sequence
  derived and/or modified sequence
atggtggaccccgtgggcttcgccgaggcctggaaggcccagttccctgattctgaacctccaagaatggagctgcgaagcgtcggtgatatcgaacaggaactggagcgttgtaaagccagcattcgacggcttgaacaagaagtcaatcaagaacgatttcgaatgatttacctccagactctgttggcaaaagaaaagaagagctacgataggcagaggtggggattcaggagggctgcacaggctcccgacggagcctctgagccccgcgccagcgcctctcgcccacaacctgccccggccgacggggccgatcctccccccgccgaagaacccgaggcacgcccagacggagaggggtctcccggaaaggcacggccgggaactgcgcggagacccggggccgccgcaagtggcgagcgggacgacagaggaccccccgcctccgtggccgccctgcgctctaactttgaacgcatacgaaaggggcacggtcagcctggcgcagacgcagagaagcccttctatgtgaatgtggaattccaccatgagcgtgggcttgtaaaggtgaatgacaaagaggtgagcgatagaatttcgagtctgggtagccaggcaatgcagatggaaagaaaaaaaagccagcatggtgcagggtcttcagtgggagacgcaagtaggcccccatatcggggaaggtctagcgaatcttcatgtggagtggacggtgactatgaggacgctgaactcaatccccgctttctcaaggataatctaatagacgccaacggcggatctcgtccgccgtggccacccctggagtatcagccttaccaatctatctacgtcggtggaatgatggagggggagggaaaaggtcctctcttgaggagtcagtctacctccgagcaagagaaacggctgacatggccccgtcgtagctactcccccaggtcatttgaggactgtgggggcggttacacacctgactgttcatccaatgagaacctgacttcttctgaggaagatttctcctccggtcagtcctcgagggtgtcaccaagtcctaccacgtacaggatgtttcgggataaaagccgaagccccagccagaactcccagcagagctttgacagttcttctcctccaactccccaatgccacaagcggcatcgccactgccccgtcgttgtctctgaagctacgattgttggcgtgcggaagacaggacagatctggcccaacgacggggaaggcgcattccatggagagcatcctggggcagcagaagaggtttttcagaagctcctgccagacatcaggggcgccgccgacgccgaccaacttgtctgcgaaacacccgactgccctcagcacagtgcagaccatcaatag

SEQ ID NO: 209015 - DNA, 1377 bp, Artificial Sequence
  derived and/or modified sequence
atggtggaccccgtgggcttcgccgaggcctggaaggcccagttcccagacagcgagccacccaggatggagcttagatctgtgggtgatatcgaacaggagttggaacgctgcaaagctagtatccggaggcttgaacaagaggtgaaccaggaaaggttcaggatgatttacctgcagaccttgctggcgaaggagaaaaaaagctacgaccgtcagaggtggggctttagacgggcagcccaggcccccgacggcgcttctgaaccaagagcctctgcctcaaggccacagcctgcccccgccgacggcgcagacccaccccccgccgaggaacccgaggctcgcccagacggagaggggtctcctggaaaagctaggcccggcacagccagacgcccaggcgcagctgcatctggcgagagggacgatcggggcccacccgcctcagtggccgccctccgatccaacttcgaaaggattcgcaaagggcacggccagcctggggcagacgcggagaagcccttctatgtcaacgttgagttccatcatgagcgcggactggtaaaggtcaacgacaaagaggtttctgaccgaatctctagcctcggatctcaggctatgcaaatggagaggaaaaagagccaacatggtgctggcagctctgtaggggatgcctcccgccccccataccggggcagaagcagtgagagcagttgtggtgtcgatggcgattacgaagatgctgaacttaacccccgattcttgaaggacaatctgatcgatgccaacggtggaagccgccccccatggcctcctctcgagtatcagccttaccagagtatctacgttgggggcatgatggaaggagagggaaaagggcccctgctgaggagtcaaagtacaagtgagcaagagaagcgcttgacctggccaaggaggagctattctccaagaagtttcgaggactgcgggggaggatatacacctgactgcagttctaacgaaaacctcacatcttcagaagaggacttttcttccgggcagtcctcaagagttagcccttcccctaccacatatcgcatgttcagagacaaatcccggtcccccagtcagaattctcagcagagttttgactcctcttcaccgcccactccgcagtgccacaaacggcatcggcactgtcccgtggtggttagtgaggcaactatcgtgggcgtacggaaaaccggtcagatatggcctaacgatggggagggcgcctttcacggagacgcagacggatcatttggtacccctcctggctacggttgtctctgtcttcctgcctggccatctggctgtaccgctgctactgccagggtcaccaggtcttag

SEQ ID NO: 209016 - DNA, 3684 bp, Artificial Sequence
  derived and/or modified sequence
atggtggaccccgtgggcttcgccgaggcctggaaggcccagttcccagattccgagccacctaggatggagctgaggtccgtgggtgacatcgaacaggagctggaacggtgcaaggcgtccattcggcgcctggaacaggaggtgaaccaggaaagattccgaatgatatatttacagacactgctggccaaagagaagaagagctacgaccgccaacggtggggcttcagaagagcggcgcaagcccctgacggcgccagcgaaccgagggccagtgcgagcagaccccaacccgccccggccgacggagccgatccaccccctgcggaggagcctgaggctcgcccagacggggaaggctcccccggaaaggctaggcctgggaccgcccgacggcccggcgccgccgcctctggggaacgggatgataggggacctccagctagcgtggctgcgctgaggagcaatttcgagaggattcggaagggtcacgggcagcctggggctgacgcagaaaagccgttttatgttaacgttgagttccaccacgagagagggttggttaaggtaaatgacaaggaggtgagcgacaggatatctagcctcggcagtcaagctatgcagatggagcgcaagaaaagtcagcacggcgccggctcttctgtgggcgatgcctcgaggcccccatacagggggcggagttcggagtcatcgtgcggggtagacggagactatgaggatgccgaacttaatcctagattccttaaagacaatcttatcgacgctaacggaggttctagacccccctggccccccttagagtatcagccttatcagtccatatatgtcggtggtatgatggaaggagagggtaaaggtcctctcctgcggagccagtctacatccgaacaggaaaagcgcttgacttggcctcgtcgcagttatagcccacgcagcttcgaggattgtggggggggttatacaccagactgtagctccaacgaaaatctgactagctctgaggaggacttctcgtccgggcagtcttcaagggtgtcaccaagccccaccacctatcgcatgtttcgagacaagagccgcagtccaagccagaacagccagcaaagctttgactcatcctcccctcccacaccacagtgtcacaagcgtcaccggcactgccccgtcgtagtgtcagaggcaacaatcgtgggagtgcgcaaaaccggccagatctggccgaatgacggggagggcgctttccacggagatgctgatggatcctttggcacgccgcctggctacggctgcgctgccgatcgtgccgaggaacagaggagacaccaggatggcctgccttacatcgacgactcccccagcagttcaccacacctgtcatcaaaaggacgggggtccagggacgcactggtcagcggtgccctggagagcacgaaagcaagcgaactggacctcgagaaggggttagaaatgagaaagtgggtgctttccggtattctggcatcggaagagacctatcttagccatttggaggccctattgttgcctatgaagcctttgaaggccgctgccacgacatcgcagcctgtcctaacatcccaacaaatcgagactatctttttcaaggtacctgaattatacgagattcacaaagaattctatgatggcctgttcccacgcgtacagcaatggtctcatcagcagagggttggagacctcttccagaaactggcctctcagctgggcgtatacagagccttcgtcgataactacggagtggcaatggaaatggcggaaaagtgttgccaagcaaatgcccagttcgcggaaatttctgaaaatctgcgggctcgaagtaataaagacgctaaagatccaacaacgaaaaatagcttggagactctactgtataagccagttgacagagtcacgcgaagcacccttgttctccacgacctgctgaaacacacccctgcctctcacccagaccaccctctcctacaggatgctttaagaattagtcaaaattttctgagttctatcaacgaagagattaccccacggagacagtcgatgactgtgaagaagggagagcatagacagctcttaaaggattctttcatggtagaattggtggagggagccaggaagttgaggcatgtctttctctttacggatcttctgctatgcaccaagctgaaaaaacagtctgggggaaagacgcaacaatacgattgcaaatggtacattcccctaaccgacctcagcttccagatggtcgatgagcttgaagcggtcccaaatatccctcttgttccggacgaagagctggatgccctcaagatcaaaatttcccagatcaagaacgacatccagagggagaaacgagccaacaaggggtccaaggctacagaaaggcttaaaaagaagctatcagaacaggaatctctcctgctgctgatgtctccatcaatggctttcagagtccatagcagaaatggcaaatcttacactttcctcatcagctctgattatgaacgggcagagtggcgggaaaatattcgtgaacagcagaaaaagtgtttcaggagcttcagtttgaccagcgttgaactgcaaatgctcacgaactcttgcgtgaaacttcaaactgttcacagcatccctttgaccattaacaaagaagatgacgagtcgcccggtttgtatggtttccttaatgttattgttcacagcgccaccggttttaaacagagctctaatctatactgcaccctggaggtggacagttttggttactttgtcaataaggccaagacccgggtgtaccgggacacggccgaacctaactggaacgagctcgatccccaggccctccaggaccgcgactggcagagaacggtgatcgctatgaacgggattgaggtgaagttgagtgtgaaattcaactcgcgggaatttagtctgaaacgcatgccatcacggaagcaaaccggcgtgttcggagtgaaaattgcagtggtcaccaagcgagagcgctctaaagttccctacatagtgcggcagtgtgtcgaagagatagagagaagagggatggaagaagtgggtatttatagagtgtcgggagtggctaccgacatccaggctttaaaagcagctttcgacgtaaataacaaggacgtgtccgtgatgatgtccgagatggatgtgaatgccatcgctggcactttaaagttgtactttcgggaattgcctgagccgctgttcactgatgagttttacccgaattttgccgagggcatagctttgtccgacccagtagcaaaggaatcgtgcatgctaaatttacttctgagtttgcctgaggccaacttactgacgtttcttttcctcctcgaccatctgaaacgggttgcagagaaagaagccgtaaacaaaatgtccctacacaatctggccaccgtgttcgggcccaccctgctgcgcccttctgagaaagagtctaagctgcctgcgaaccctagccagcccatcacaatgacggattcctggtctctcgaagtaatgagccaggttcaggtgttactgtatttcctgcagcttgaagccattccagctccagacagtaagcgacaatctatacttttttcgaccgaagtttag

SEQ ID NO: 209017 - DNA, 1404 bp, Artificial Sequence
  derived and/or modified sequence
atggtggaccccgtgggcttcgccgaggcctggaaggcccagttcccagattcggaaccccccaggatggaacttagaagtgtgggcgatatcgaacaggagctggagcgctgcaaagcaagcatccgtcgccttgagcaggaggtaaatcaggagcggttccgaatgatatacctgcagactctgctcgccaaggaaaagaagtcatacgatcgacaacgctggggcttccgtagggctgcccaagcaccagatggtgcctcagagccccgcgcctccgcaagccggccgcagccggcccctgccgatggagcagacccacctccagccgaggagccagaggctagaccagacggggaagggtcgcccggcaaggcacgtcccggcacggcacgacggcctggcgctgccgcttctggagagcgggacgatcgcggcccacccgcctcggtggccgccctgcgctcaaactttgagcgaattagaaaaggccatggccagcccggcgccgacgccgagaaacctttctacgtcaacgtcgaattccaccacgaacggggcctggttaaagtgaacgacaaggaagtgtctgaccggattagctcactgggttctcaggctatgcaaatggagcggaagaaaagccaacacggcgccggtagttctgtgggggatgcttctcgcccgccgtatagggggcggtctagcgaatcgagttgcggcgtggacggtgattacgaggacgcagagctgaaccctaggtttctaaaagataatcttatcgacgcaaacggcggctcaagacccccctggccccccttagagtaccaaccgtaccagtccatctatgttggtggcatgatggaaggggaaggaaaggggccacttttgaggagtcaatcaacttcggaacaagagaaaaggctcacctggccacggagaagctacagcccacgttcgtttgaggattgcggcggtggatacactcctgactgcagctctaacgagaatttaactagttcagaggaggatttctcaagcggccagagctctcgcgtctcaccctccccaaccacgtatcggatgtttcgggacaaaagccggagcccgagtcagaattctcagcagtcttttgactcatcgagccctcctacccctcaatgccacaagcggcatcggcactgtccagtcgtggtctccgaggcaacaattgtaggtgtgaggaagacgggtcagatttggccaaacgacggcgagggcgcctttcacggggatgcagtgctaaaaacagaggtgccacatcaaggtgtgcggcgtgctagactttccttagaggcattaggagaggatccgtcattcctgttcccagcctctgatggaccaaggcatagctccacctggtag

SEQ ID NO: 209018 - DNA, 1365 bp, Artificial Sequence
  derived and/or modified sequence
atggtggaccccgtgggcttcgccgaggcctggaaggcccagttcccggatagcgaacccccacgtatggagctgagaagcgtgggggacatcgagcaggagttagaaaggtgcaaggcctcaatccggcgacttgagcaggaagttaaccaggagcggtttcgcatgatctacctccagaccctcctggccaaagaaaaaaaatcatatgaccgccaacgttggggtttccggagagcagctcaggcacccgatggagccagtgagcctcgcgcgtcagcaagtagacctcagcctgctcctgcagatggcgcagatcctcctccggccgaggaacccgaagcccgccccgatggcgaaggtagtcctggcaaagccagacccgggacagcacgacggcctggcgcagccgcctctggcgagcgagatgatcgcggccctcctgcgagcgtcgccgccttacgctctaattttgaacgaatccggaagggccatgggcagcctggggctgacgccgaaaaacccttttatgttaatgtcgaatttcaccacgagagaggtctcgttaaagtcaacgacaaagaggtgtctgatcgaatttcctctcttgggagtcaggctatgcagatggaaagaaaaaagtcccaacatggcgctggctcttccgtgggggatgctagccgtcccccttacagaggtcggtcatccgagtcctcttgcggagtggacggcgattatgaagatgctgaactgaatcctagatttcttaaggataatttgatagacgcaaatggcggatcaaggccgccctggcctccgctcgaatatcaaccatatcagagcatctatgtgggagggatgatggaaggagaggggaaggggccgctgttgaggagtcagtccacctctgagcaggagaaaaggttaacctggccaaggaggagttatagcccgagatcatttgaagattgcgggggaggctacacaccggactgcagtagcaacgagaatttgacctcatctgaagaagacttctcatccggccagagttcccgcgtgtctccttcgccaaccacctacaggatgttcagagataaaagccgctccccttctcagaacagccagcagagcttcgattctagctcaccaccgactccacagtgtcataagcgccaccggcactgccctgttgtggtgtctgaggctaccattgttggcgtacgtaagaccgggcagatttggccaaacgacggagagggagcattccacggcgatgcagacggttccttcgggactccaccaggctacgggtgtgcagccgggagacccccgcacctgacggagctgcctgttcaacaccagtag

SEQ ID NO: 209019 - DNA, 1398 bp, Artificial Sequence
  derived and/or modified sequence
atggtggaccccgtaggattcgcagaggcctggaaagctcaattcccggattcagagcctcctcgcatggaattgcgctccgtgggcgacatcgagcaagaattagaacggtgtaaagcttcgatcagaaggctcgagcaggaggtcaaccaagagcgatttcggatgatctacctgcagacattactcgctaaggagaaaaaaagttacgaccggcagcggtggggcttccggagggcagctcaggccccagacggggcaagcgaaccacgcgcttcagcgagccgccctcagccggctcctgccgatggggcagatccaccacctgcagaagaacccgaggctcgcccagatggcgaagggtcccccggaaaggccagaccaggcaccgccaggcgacccggagctgccgcatccggcgagcgcgacgacaggggaccaccggcatccgtggctgctttacgcagcaatttcgagcggataaggaagggccacggacaacctggggcagacgccgagaaaccattctatgtgaatgtcgaatttcaccatgagcgaggtctcgtaaaagtcaacgataaagaggtaagtgatcgcatttcatcgctggggagccaagccatgcagatggagcggaagaagagtcaacacggagcgggaagctcggtcggagatgccagccgcccaccataccgtggacgtagctccgagagcagctgcggggtggatggcgattacgaggatgccgagctgaaccctagattcctgaaggataacctgattgacgctaatggtggtagtcgcccaccctggccgcctctggaataccagccttatcagagtatttacgtcgggggaatgatggaaggggaagggaagggacctttgcttagatcacagagcacatccgagcaggaaaagaggctcacatggccacggaggtcttattcgcctcgctcctttgaagactgtggcggtgggtatacccccgactgtagtagtaatgaaaacctcacttcctccgaggaagacttttcctctgggcagtcttctcgcgtatcgccttcacccaccacttaccgtatgtttcgcgataagtccagaagcccaagccagaattctcaacaatcttttgattcatctagccctccaacccctcagtgtcacaaaagacaccgacactgccccgtcgtcgtgtctgaggcaaccatcgtcggtgtaagaaagactggacaaatttggcctaatgacggagaaggagccttccatggcgagcatccaggagccgctgaggaagtgttccagaagttgctcccggatatccgcggagcagcggacgcggatcagctggtttgcgagacacccgattgtccacagcacagtgcagatcaccaatag

SEQ ID NO: 209020 - DNA, 1377 bp, Artificial Sequence
  derived and/or modified sequence
atggtggaccctgtcggtttcgctgaggcttggaaagctcagtttcccgacagcgaaccccctcgtatggagctgcgaagcgtcggcgacatagagcaggaactcgaaagatgtaaagcttccattcgcagactggagcaggaagtgaaccaggagcgctttcgtatgatttatctccaaaccctactcgcaaaggagaagaagtcctatgatcggcaaaggtggggtttccggcgagccgctcaggcaccagacggggcttcagaacccagagccagcgcttcccgtccgcagcctgctccagccgatggcgctgatcccccacctgccgaggaacccgaagccaggcctgacggggaggggagtcctgggaaggcccgtccaggtactgccaggaggccaggagccgctgccagtggggaaagggacgaccggggtccacccgctagcgtcgctgccctccggtcaaatttcgaaaggatcaggaaaggtcacggacagcccggagccgatgctgaaaaaccattctacgtgaatgtcgagttccaccatgagagaggcctggtgaaagttaacgacaaagaagttagcgaccgaattagttcactcggcagccaggccatgcagatggaacgtaaaaaaagccagcatggggctggatcgagtgtgggggatgcatctcgaccaccataccgtgggagaagtagcgaaagcagttgtggggtcgacggcgattacgaggacgcagagctcaaccccagattcctgaaagacaatcttattgacgccaacggcggaagcagacccccatggcctccactggagtatcagccgtatcaatctatttacgtggggggtatgatggagggagaaggcaaagggcctctcctgaggtcccagagcacatcagagcaggagaagcgactgacgtggccacgtcgctcttactctccacgcagcttcgaagactgcggcggaggctacactccggactgttctagtaacgagaatctgaccagttccgaggaagatttcagctccgggcagtcctcccgggtgtcaccgagtcccacaacctatagaatgtttcgtgacaagtcaaggagtccttcgcaaaattctcaacagtcatttgactcaagtagcccacctacccctcagtgccacaagcgccataggcattgtcctgtcgtggtttctgaggccaccattgttggagttagaaaaacaggccagatctggccaaacgacggcgagggggcttttcatggggatgccgatggctcctttgggaccccacctggctacggatgcctgtgcctcccggcatggccaagcggatgtacagccgcaactgccagagtgacccgatcatag

SEQ ID NO: 209021 - DNA, 3684 bp, Artificial Sequence
  derived and/or modified sequence
atggtggatcccgtgggattcgctgaggcctggaaagcccaatttccggattctgagcctcccaggatggaactgcggtccgtgggagatattgagcaggaactcgaacgttgtaaggccagtattaggcggctcgagcaagaggtgaaccaagaacgctttagaatgatttatttacagaccctgttggcaaaggaaaagaaatcatatgataggcaacgttggggattccggagagccgcacaggctccagatggtgcgtctgagcccagggccagcgcgagtagaccgcagccagcgccagctgatggtgctgaccctccaccagctgaggaacctgaggcccgacccgacggagaagggtcccctggaaaggcaaggcctggcaccgccaggcgaccgggagccgcagcatcaggcgagcgagacgatcggggtccacctgcatctgtcgcggcattgaggtcgaactttgagcggatccggaagggacacggacagccgggagctgacgctgagaaaccattttacgtcaatgttgagtttcatcatgaaagaggtctggtgaaggtcaatgataaggaagtcagcgacagaattagctcactgggaagccaggccatgcagatggagcggaaaaagtctcagcatggtgccggatcttctgtaggagacgcaagtcgacccccttacaggggccgttctagcgaatcatcttgcggtgtggatggtgattacgaggacgctgaactcaatccaagatttctgaaggataatctgatcgacgctaatgggggatcacgccctccttggccaccattagaataccagccctatcagagcatttacgtgggcggtatgatggagggagagggcaagggacctctcctacggagccagagcacatcagaacaggagaagagattaacatggcccaggaggtcgtactctccacgtagtttcgaagactgcggcggaggttatacaccggattgttcaagcaacgaaaatctcacatcttccgaagaagatttctcctcagggcagtcctcccgggtttccccgtcgcctaccacgtatagaatgtttcgagacaaatcacggtcgccctcgcagaactcgcagcaaagtttcgacagcagttctcctcccacgccccagtgccataagcgccacagacattgtcctgtggtggtctctgaggccacaatcgttggagtacgcaaaacaggacaaatttggcccaatgacggggagggcgcattccacggtgatgcggatggctctttcggaacccccccaggttacggctgcgcggcagaccgagcagaagaacagcgaaggcaccaggatggcctgccctatattgatgatagtcctagtagttccccgcatctgtcttccaaggggaggggttctcgtgatgccttggtgtccggggctttggagtcgactaaggcttccgaactggacttggagaaaggtttggagatgaggaagtgggtgttgagcgggatcctggcaagcgaggaaacatatctctcccacctagaggccttactgcttccaatgaaacctctgaaggctgccgcaacaaccagccagccagtgctcacatcccagcagattgagaccattttctttaaagtacccgaactgtatgaaatccataaggagttttatgatggactcttcccgagggttcaacagtggtcccaccaacagagagtcggggatctgtttcaaaagctcgcttcccagctgggcgtctacagggccttcgtggacaactatggcgtagccatggagatggcagagaaatgctgtcaggcaaatgcccagttcgctgaaatatctgaaaaccttcgcgcacgcagcaacaaagacgctaaggacccaactactaaaaacagcctcgagaccctgttatacaagcctgtagatcgggtgacccgcagcaccttggtgctgcacgatctactgaaacatacccccgcttcacacccagatcatcctctacttcaggacgcccttagaatttcccagaacttcctgtcttccatcaatgaggagattacccccagacgtcagtccatgacagtaaaaaaaggcgaacatagacagctgctgaaggattcttttatggttgagctcgtggagggagcacgtaagctaaggcacgtgtttctgttcaccgacctgctcttgtgtaccaagttgaaaaaacagagcggcggaaagacacagcaatatgattgcaaatggtacatacccctgaccgacctgagctttcagatggtggacgagctggaggctgtgcccaacatccccctggttccagatgaagagctggatgccctgaaaatcaagatctctcagatcaagaacgatatacagcgggaaaaaagagcaaataagggcagcaaggcgaccgagcggctgaagaaaaagctgtccgagcaggaaagtcttcttcttctgatgtcaccatccatggcatttcgtgtgcattcgcggaacgggaaaagctatacgtttcttatctcatcagattacgagagggccgaatggagggaaaatattagagagcagcagaagaaatgtttccgatcattcagtctcacatcagtggaactgcagatgctgactaactcttgcgtgaaactacaaactgtgcacagcataccacttactattaacaaggaagatgacgagagcccgggactatacggatttcttaacgtcatagttcacagcgccacaggcttcaaacagtcctccaatctctattgtaccctagaggtggatagtttcggttactttgtaaataaggctaagaccagagtttatagagatacagcagaaccgaactggaacgaactcgatccacaggctctgcaagacagggactggcagagaactgtgatcgctatgaacggcatagaagttaagctgtccgtgaagttcaattcccgcgagttcagtctcaaacgaatgccctctcggaagcagactggcgtgtttggcgttaaaatcgccgtcgtgactaagcgcgaacggtctaaagtcccctacatagtgcgacagtgcgtggaagagatcgaacgaagggggatggaagaggtaggcatctacagagtgtctggcgtggccaccgatatccaggctttgaaggccgcatttgatgtgaataataaagatgtgtcggtgatgatgtctgagatggacgtaaacgcaattgccggtactctcaagctgtattttcgcgaactcccagagccactgttcaccgacgagttctaccctaattttgcggaggggattgccctgtctgatcccgtcgccaaggaatcctgcatgttaaacctgctgctctctttgccggaggcaaacctcctgacgtttctgtttttactcgaccacttgaagagagtggcagagaaagaggcggtgaacaagatgagccttcataacttagcgacagtatttggcccaactctgttgcggccaagcgagaaagaatctaagctgcctgctaacccttcccaacctataacaatgaccgactcttggagccttgaggtcatgtctcaggtgcaggtactgctatacttcctgcagctggaagccatccccgcaccagactcgaagcggcagtctatacttttttctacagaggtgtag

SEQ ID NO: 209022 - DNA, 1404 bp, Artificial Sequence
  derived and/or modified sequence
atggtggaccctgtagggtttgccgaggcctggaaggcccagtttcctgatagtgagcctcccaggatggagttaaggtcagtaggcgacattgaacaggagctcgagcggtgtaaggcttctattcgacgtttagaacaggaagtcaaccaagaacgcttcagaatgatatatttgcagacactcctggcgaaagagaaaaagtcctacgaccggcagagatgggggttcagaagggccgctcaggcacctgatggcgcttcagagccaagggcaagcgcttctaggccacagcctgccccagcagacggagccgatccaccacctgccgaggaaccagaggctaggcccgacggcgagggctcccccggaaaggcgagacctggaaccgcacggaggcccggagcggctgcttctggcgagcgtgacgatagagggcctcccgcaagcgtggccgctctacgttctaactttgagaggatacggaaaggacacggacagccaggagcagatgccgaaaagcctttctatgtgaacgtggagttccatcacgagcggggattggtcaaggtcaacgacaaagaagttagtgacagaatctcctcattagggagccaggccatgcaaatggagagaaaaaaaagccaacacggcgcaggatctagcgtgggagatgcaagtcgtccaccataccggggacggtccagtgagtcgagctgcggcgtcgacggagattacgaggatgcagagttgaacccaaggttcctgaaggataatctaattgatgccaacgggggttcccgccctccatggccacctctggagtatcagccataccagagtatctatgtgggtggaatgatggagggcgagggaaaaggaccccttctccggagtcagtctacatccgagcaggagaagcgtctgacatggccgagaaggagttattctccgaggagcttcgaagattgtgggggaggttacacaccagattgctcatctaatgaaaatctgacaagttctgaggaggatttttcatccgggcagagcagtagagtgtccccctccccgaccacgtacagaatgttccgggacaagtcccggagcccatcacagaactcccagcagtctttcgactctagcagcccgccaacacctcaatgtcacaaaagacatcgccattgtccagtagtggttagcgaagcaaccatcgttggcgttagaaagactggccaaatttggccaaatgacggtgagggcgctttccatggggacgccgttcttaaaacagaggtgcctcatcagggtgttagaagagctcggctgtctttagaggccttgggggaagatccgagctttttgtttcccgcttccgatggcccacgccatagttctacctggtag

SEQ ID NO: 209023 - DNA, 1365 bp, Artificial Sequence
  derived and/or modified sequence
atggtggatcccgttggcttcgcagaggcatggaaggcccaattccccgattctgaaccacctcggatggagctgcggtcagtcggagatatcgagcaggaactggaacgatgtaaggcctcaatcaggcgcctcgagcaggaggtgaaccaggagcggttccgtatgatatacttgcaaactcttctggcgaaagagaaaaaaagctacgatcgccagcgatggggctttaggagagctgcacaggctccagacggcgctagcgaacctcgtgcaagcgcctcccggccacaaccagccccagcagacggggcagatccacctcctgctgaagagccagaagcacgaccagacggggaaggatcccctggtaaggcacgccctgggactgctcgcagaccgggagcagccgcttcaggcgaacgggatgataggggccctcctgcctccgtagctgccctcaggagtaattttgagcgcatcaggaaggggcacggacagcccggagcagatgctgagaagcctttctatgtgaacgtggagtttcatcacgagcgtggattggtgaaggtgaacgataaggaagtatctgaccggatctcttcactgggcagtcaggccatgcaaatggagcggaagaagagccagcatggggctggctcgtccgtaggggatgcatcaaggcccccttataggggccgatcttctgaaagcagttgtggtgttgatggcgattatgaggacgccgagctgaacccgagatttctgaaggacaatttaatagatgccaacggtggctcaaggccgccttggcctccgctcgaataccagccatatcagagtatctacgttggtgggatgatggaaggggagggcaaaggtcctctgctgagatcacagtccacaagcgagcaggaaaaaaggctgacttggccgagaaggtcttattctcctagatcctttgaggactgcggagggggatataccccagactgcagttctaacgaaaacctgacctcctccgaggaggatttctccagcggccagagctcccgcgtctcaccttcccctactacctatagaatgtttcgcgacaaatctaggtccccaagccagaactcccagcagtcattcgattcctccagccctccgacccctcagtgtcataagcgtcatagacactgcccggtcgtagtgtcagaggctactattgttggagtgaggaaaacagggcagatctggcccaatgacggggagggggctttccatggagacgccgacggttccttcggaactccccctgggtacgggtgtgcagctggccgaccccctcatcttactgagctcccagtccaacaccagtag

SEQ ID NO: 209024 - DNA, 1398 bp, Artificial Sequence
  derived and/or modified sequence
atggtggacccggtgggcttcgcggaggcgtggaaggcgcagttcccggactcagagcccccgcgcatggagctgcgctcagtgggcgacatcgagcaggagctggagcgctgcaaggcctccattcggcgcctggagcaggaggtgaaccaggagcgcttccgcatgatctacctgcagacgttgctggccaaggaaaagaagagctatgaccggcagcgatggggcttccggcgcgcggcgcaggcccccgacggcgcctccgagccccgagcgtccgcgtcgcgcccgcagccagcgcccgccgacggagccgacccgccgcccgccgaggagcccgaggcccggcccgacggcgagggttctccgggtaaggccaggcccgggaccgcccgcaggcccggggcagccgcgtcgggggaacgggacgaccggggaccccccgccagcgtggcggcgctcaggtccaacttcgagcggatccgcaagggccatggccagcccggggcggacgccgagaagcccttctacgtgaacgtcgagtttcaccacgagcgcggcctggtgaaggtcaacgacaaagaggtgtcggaccgcatcagctccctgggcagccaggccatgcagatggagcgcaaaaagtcccagcacggcgcgggctcgagcgtgggggatgcatccaggcccccttaccggggacgctcctcggagagcagctgcggcgtcgacggcgactacgaggacgccgagttgaacccccgcttcctgaaggacaacctgatcgacgccaatggcggtagcaggcccccttggccgcccctggagtaccagccctaccagagcatctacgtcgggggcatgatggaaggggagggcaagggcccgctcctgcgcagccagagcacctctgagcaggagaagcgccttacctggccccgcaggtcctactccccccggagttttgaggattgcggaggcggctataccccggactgcagctccaatgagaacctcacctccagcgaggaggacttctcctctggccagtccagccgcgtgtccccaagccccaccacctaccgcatgttccgggacaaaagccgctctccctcgcagaactcgcaacagtccttcgacagcagcagtccccccacgccgcagtgccataagcggcaccggcactgcccggttgtcgtgtccgaggccaccatcgtgggcgtccgcaagaccgggcagatctggcccaacgatggcgagggcgccttccatggagaacatccgggagcagcagaagaagtgtttcagaagcttctccctgacatccgtggagctgcagatgctgaccaactcgtgtgtgaaactccagactgtccacagcattccgctgaccatcaataa

SEQ ID NO: 209025 - DNA, 1377 bp, Artificial Sequence
  derived and/or modified sequence
atggtggacccggtgggcttcgcggaggcgtggaaggcgcagttcccggactcagagcccccgcgcatggagctgcgctcagtgggcgacatcgagcaggagctggagcgctgcaaggcctccattcggcgcctggagcaggaggtgaaccaggagcgcttccgcatgatctacctgcagacgttgctggccaaggaaaagaagagctatgaccggcagcgatggggcttccggcgcgcggcgcaggcccccgacggcgcctccgagccccgagcgtccgcgtcgcgcccgcagccagcgcccgccgacggagccgacccgccgcccgccgaggagcccgaggcccggcccgacggcgagggttctccgggtaaggccaggcccgggaccgcccgcaggcccggggcagccgcgtcgggggaacgggacgaccggggaccccccgccagcgtggcggcgctcaggtccaacttcgagcggatccgcaagggccatggccagcccggggcggacgccgagaagcccttctacgtgaacgtcgagtttcaccacgagcgcggcctggtgaaggtcaacgacaaagaggtgtcggaccgcatcagctccctgggcagccaggccatgcagatggagcgcaaaaagtcccagcacggcgcgggctcgagcgtgggggatgcatccaggcccccttaccggggacgctcctcggagagcagctgcggcgtcgacggcgactacgaggacgccgagttgaacccccgcttcctgaaggacaacctgatcgacgccaatggcggtagcaggcccccttggccgcccctggagtaccagccctaccagagcatctacgtcgggggcatgatggaaggggagggcaagggcccgctcctgcgcagccagagcacctctgagcaggagaagcgccttacctggccccgcaggtcctactccccccggagttttgaggattgcggaggcggctataccccggactgcagctccaatgagaacctcacctccagcgaggaggacttctcctctggccagtccagccgcgtgtccccaagccccaccacctaccgcatgttccgggacaaaagccgctctccctcgcagaactcgcaacagtccttcgacagcagcagtccccccacgccgcagtgccataagcggcaccggcactgcccggttgtcgtgtccgaggccaccatcgtgggcgtccgcaagaccgggcagatctggcccaacgatggcgagggcgccttccatggagacgcagatggctcgttcggaacaccacctggatacggctgcttatgtctcccagcatggccttcagggtgcacagccgcaacggcaagagttacacgttcctga

SEQ ID NO: 209026 - DNA, 4708 bp, Artificial Sequence
  derived and/or modified sequence
ggggggagggtggcggctcgatgggggagccgcctccagggggcccccccgccctgtgcccacggcgcggcccctttaagaggcccgcctggctccgtcatccgcgccgcggccacctccccccggccctccccttcctgcggcgcagagtgcgggccgggcgggagtgcggcgagagccggctggctgagcttagcgtccgaggaggcggcggcggcggcggcggcacggcggcggcggggctgtggggcggtgcggaagcgagaggcgaggagcgcgcgggccgtggccagagtctggcggcggcctggcggagcggagagcagcgcccgcgcctcgccgtgcggaggagccccgcacacaatagcggcgcgcgcagcccgcgcccttccccccggcgcgccccgccccgcgcgccgagcgccccgctccgcctcacctgccaccagggagtgggcgggcattgttcgccgccgccgccgccgcgcgggccatgggggccgcccggcgcccggggccgggctggcgaggcgccgcgccgccgctgagacgggccccgcgcgcagcccggcggcgcaggtaaggccggccgcgccatggtggacccggtgggcttcgcggaggcgtggaaggcgcagttcccggactcagagcccccgcgcatggagctgcgctcagtgggcgacatcgagcaggagctggagcgctgcaaggcctccattcggcgcctggagcaggaggtgaaccaggagcgcttccgcatgatctacctgcagacgttgctggccaaggaaaagaagagctatgaccggcagcgatggggcttccggcgcgcggcgcaggcccccgacggcgcctccgagccccgagcgtccgcgtcgcgcccgcagccagcgcccgccgacggagccgacccgccgcccgccgaggagcccgaggcccggcccgacggcgagggttctccgggtaaggccaggcccgggaccgcccgcaggcccggggcagccgcgtcgggggaacgggacgaccggggaccccccgccagcgtggcggcgctcaggtccaacttcgagcggatccgcaagggccatggccagcccggggcggacgccgagaagcccttctacgtgaacgtcgagtttcaccacgagcgcggcctggtgaaggtcaacgacaaagaggtgtcggaccgcatcagctccctgggcagccaggccatgcagatggagcgcaaaaagtcccagcacggcgcgggctcgagcgtgggggatgcatccaggcccccttaccggggacgctcctcggagagcagctgcggcgtcgacggcgactacgaggacgccgagttgaacccccgcttcctgaaggacaacctgatcgacgccaatggcggtagcaggcccccttggccgcccctggagtaccagccctaccagagcatctacgtcgggggcatgatggaaggggagggcaagggcccgctcctgcgcagccagagcacctctgagcaggagaagcgccttacctggccccgcaggtcctactccccccggagttttgaggattgcggaggcggctataccccggactgcagctccaatgagaacctcacctccagcgaggaggacttctcctctggccagtccagccgcgtgtccccaagccccaccacctaccgcatgttccgggacaaaagccgctctccctcgcagaactcgcaacagtccttcgacagcagcagtccccccacgccgcagtgccataagcggcaccggcactgcccggttgtcgtgtccgaggccaccatcgtgggcgtccgcaagaccgggcagatctggcccaacgatggcgagggcgccttccatggagacgcagatggctcgttcggaacaccacctggatacggctgcgctgcagaccgggcagaggagcagcgccggcaccaagatgggctgccctacattgatgactcgccctcctcatcgccccacctcagcagcaagggcaggggcagccgggatgcgctggtctcgggagccctggagtccactaaagcgagtgagctggacttggaaaagggcttggagatgagaaaatgggtcctgtcgggaatcctggctagcgaggagacttacctgagccacctggaggcactgctgctgcccatgaagcctttgaaagccgctgccaccacctctcagccggtgctgacgagtcagcagatcgagaccatcttcttcaaagtgcctgagctctacgagatccacaaggagttctatgatgggctcttcccccgcgtgcagcagtggagccaccagcagcgggtgggcgacctcttccagaagctggccagccagctgggtgtgtaccgggccttcgtggacaactacggagttgccatggaaatggctgagaagtgctgtcaggccaatgctcagtttgcagaaatctccgagaacctgagagccagaagcaacaaagatgccaaggatccaacgaccaagaactctctggaaactctgctctacaagcctgtggaccgtgtgacgaggagcacgctggtcctccatgacttgctgaagcacactcctgccagccaccctgaccaccccttgctgcaggacgccctccgcatctcacagaacttcctgtccagcatcaatgaggagatcacaccccgacggcagtccatgacggtgaagaagggagagcaccggcagctgctgaaggacagcttcatggtggagctggtggagggggcccgcaagctgcgccacgtcttcctgttcaccgacctgcttctctgcaccaagctcaagaagcagagcggaggcaaaacgcagcagtatgactgcaaatggtacattccgctcacggatctcagcttccagatggtggatgaactggaggcagtgcccaacatccccctggtgcccgatgaggagctggacgctttgaagatcaagatctcccagatcaagaatgacatccagagagagaagagggcgaacaagggcagcaaggctacggagaggctgaagaagaagctgtcggagcaggagtcactgctgctgcttatgtctcccagcatggccttcagggtgcacagccgcaacggcaagagttacacgttcctgatctcctctgactatgagcgtgcagagtggagggagaacatccgggagcagcagaagaagtgtttcagaagcttctccctgacatccgtggagctgcagatgctgaccaactcgtgtgtgaaactccagactgtccacagcattccgctgaccatcaataaggaagatgatgagtctccggggctctatgggtttctgaatgtcatcgtccactcagccactggatttaagcagagttcaaatctgtactgcaccctggaggtggattcctttgggtattttgtgaataaagcaaagacgcgcgtctacagggacacagctgagccaaactggaacgagctggacccgcaggccctgcaggacagagactggcagcgcaccgtcatcgccatgaatgggatcgaagtaaagctctcggtcaagttcaacagcagggagttcagcttgaagaggatgccgtcccgaaaacagacaggggtcttcggagtcaagattgctgtggtcaccaagagagagaggtccaaggtgccctacatcgtgcgccagtgcgtggaggagatcgagcgccgaggcatggaggaggtgggcatctaccgcgtgtccggtgtggccacggacatccaggcactgaaggcagccttcgacgtcaataacaaggacgtgtcggtgatgatgagcgagatggacgtgaacgccatcgcaggcacgctgaagctgtacttccgtgagctgcccgagcccctcttcactgacgagttctaccccaacttcgcagagggcatcgctctttcagacccggttgcaaaggagagctgcatgctcaacctgctgctgtccctgccggaggccaacctgctcaccttccttttccttctggaccacctgaaaagggtggcagagaaggaggcagtcaataagatgtccctgcacaacctcgccacggtctttggccccacgctgctccggccctccgagaaggagagcaagctccctgccaaccccagccagcctatcaccatgactgacagctggtccttggaggtcatgtcccaggtccaggtgctgctgtacttcctgcagctggaggccatccctgccccggacagcaagagacagagcatcctgttctccaccgaagtctaaaggtcccagtccatctcctggaggcggacagatggcctggaaacctctggctaatcgggccatccgtagagcgggaaccttcctgaggtgtccttgggccacccccaagtgttgggccatctgccaagagacagcgacccaaagccgaaggacaggtggcctggaaagatcccgcccaggtctgggagccccaggctggcctcagactgtggttttttatgtggccacctgagggcgccccaagccagttcatctcggagtccaggcctggccctgggagacagggtgaagggagtggtttttatgaacttaacttagagtctaaaagatttctactggatcacttgtcaagatgcgccctctctggggagaagggaacgtgactggattccctcactgttgtatcttgaataaacgctgctgcttca

SEQ ID NO: 209027 - DNA, 2000 bp, Artificial Sequence
  derived and/or modified sequence
ggggggagggtggcggctcgatgggggagccgcctccagggggcccccccgccctgtgcccacggcgcggcccctttaagaggcccgcctggctccgtcatccgcgccgcggccacctccccccggccctccccttcctgcggcgcagagtgcgggccgggcgggagtgcggcgagagccggctggctgagcttagcgtccgaggaggcggcggcggcggcggcggcacggcggcggcggggctgtggggcggtgcggaagcgagaggcgaggagcgcgcgggccgtggccagagtctggcggcggcctggcggagcggagagcagcgcccgcgcctcgccgtgcggaggagccccgcacacaatagcggcgcgcgcagcccgcgcccttccccccggcgcgccccgccccgcgcgccgagcgccccgctccgcctcacctgccaccagggagtgggcgggcattgttcgccgccgccgccgccgcgcgggccatgggggccgcccggcgcccggggccgggctggcgaggcgccgcgccgccgctgagacgggccccgcgcgcagcccggcggcgcaggtaaggccggccgcgccatggtggacccggtgggcttcgcggaggcgtggaaggcgcagttcccggactcagagcccccgcgcatggagctgcgctcagtgggcgacatcgagcaggagctggagcgctgcaaggcctccattcggcgcctggagcaggaggtgaaccaggagcgcttccgcatgatctacctgcagacgttgctggccaaggaaaagaagagctatgaccggcagcgatggggcttccggcgcgcggcgcaggcccccgacggcgcctccgagccccgagcgtccgcgtcgcgcccgcagccagcgcccgccgacggagccgacccgccgcccgccgaggagcccgaggcccggcccgacggcgagggttctccgggtaaggccaggcccgggaccgcccgcaggcccggggcagccgcgtcgggggaacgggacgaccggggaccccccgccagcgtggcggcgctcaggtccaacttcgagcggatccgcaagggccatggccagcccggggcggacgccgagaagcccttctacgtgaacgtcgagtttcaccacgagcgcggcctggtgaaggtcaacgacaaagaggtgtcggaccgcatcagctccctgggcagccaggccatgcagatggagcgcaaaaagtcccagcacggcgcgggctcgagcgtgggggatgcatccaggcccccttaccggggacgctcctcggagagcagctgcggcgtcgacggcgactacgaggacgccgagttgaacccccgcttcctgaaggacaacctgatcgacgccaatggcggtagcaggcccccttggccgcccctggagtaccagccctaccagagcatctacgtcgggggcatgatggaaggggagggcaagggcccgctcctgcgcagccagagcacctctgagcaggagaagcgccttacctggccccgcaggtcctactccccccggagttttgaggattgcggaggcggctataccccggactgcagctccaatgagaacctcacctccagcgaggaggacttctcctctggccagtccagccgcgtgtccccaagccccaccacctaccgcatgttccgggacaaaagccgctctccctcgcagaactcgcaacagtccttcgacagcagcagtccccccacgccgcagtgccataagcggcaccggcactgcccggttgtcgtgtccgaggccaccatcgtgggcgtccgcaagaccgggcagatctggcccaacgatggcgagggcgccttccatggagacgcagttctgaagactgaagtcccacatcaaggtgtccgcagggccaggctgtctctggaggctctaggggaggatccttcctttctgttcccagcatctgatggcccacggcattcctcgacctggtga

SEQ ID NO: 209028 - DNA, 1365 bp, Artificial Sequence
  derived and/or modified sequence
atggtggacccggtgggcttcgcggaggcgtggaaggcgcagttcccggactcagagcccccgcgcatggagctgcgctcagtgggcgacatcgagcaggagctggagcgctgcaaggcctccattcggcgcctggagcaggaggtgaaccaggagcgcttccgcatgatctacctgcagacgttgctggccaaggaaaagaagagctatgaccggcagcgatggggcttccggcgcgcggcgcaggcccccgacggcgcctccgagccccgagcgtccgcgtcgcgcccgcagccagcgcccgccgacggagccgacccgccgcccgccgaggagcccgaggcccggcccgacggcgagggttctccgggtaaggccaggcccgggaccgcccgcaggcccggggcagccgcgtcgggggaacgggacgaccggggaccccccgccagcgtggcggcgctcaggtccaacttcgagcggatccgcaagggccatggccagcccggggcggacgccgagaagcccttctacgtgaacgtcgagtttcaccacgagcgcggcctggtgaaggtcaacgacaaagaggtgtcggaccgcatcagctccctgggcagccaggccatgcagatggagcgcaaaaagtcccagcacggcgcgggctcgagcgtgggggatgcatccaggcccccttaccggggacgctcctcggagagcagctgcggcgtcgacggcgactacgaggacgccgagttgaacccccgcttcctgaaggacaacctgatcgacgccaatggcggtagcaggcccccttggccgcccctggagtaccagccctaccagagcatctacgtcgggggcatgatggaaggggagggcaagggcccgctcctgcgcagccagagcacctctgagcaggagaagcgccttacctggccccgcaggtcctactccccccggagttttgaggattgcggaggcggctataccccggactgcagctccaatgagaacctcacctccagcgaggaggacttctcctctggccagtccagccgcgtgtccccaagccccaccacctaccgcatgttccgggacaaaagccgctctccctcgcagaactcgcaacagtccttcgacagcagcagtccccccacgccgcagtgccataagcggcaccggcactgcccggttgtcgtgtccgaggccaccatcgtgggcgtccgcaagaccgggcagatctggcccaacgatggcgagggcgccttccatggagacgcagatggctcgttcggaacaccacctggatacggctgcgctgcaggacgccctccgcatctcacagaacttcctgtccagcatcaatga

SEQ ID NO: 209029 - DNA, 1398 bp, Artificial Sequence
  derived and/or modified sequence
atggtggaccccgtgggcttcgccgaggcctggaaggcccagttccccgacagcgagccccccagaatggagctgagaagcgtgggcgacatcgagcaggagctggagagatgcaaggccagcatcagaagactggagcaggaggtgaaccaggagagattcagaatgatctacctgcagaccctgctggccaaggagaagaagagctacgacagacagagatggggcttcagaagagccgcccaggcccccgacggcgccagcgagcccagagccagcgccagcagaccccagcccgcccccgccgacggcgccgaccccccccccgccgaggagcccgaggccagacccgacggcgagggcagccccggcaaggccagacccggcaccgccagaagacccggcgccgccgccagcggcgagagagacgacagaggcccccccgccagcgtggccgccctgagaagcaacttcgagagaatcagaaagggccacggccagcccggcgccgacgccgagaagcccttctacgtgaacgtggagttccaccacgagagaggcctggtgaaggtgaacgacaaggaggtgagcgacagaatcagcagcctgggcagccaggccatgcagatggagagaaagaagagccagcacggcgccggcagcagcgtgggcgacgccagcagacccccctacagaggcagaagcagcgagagcagctgcggcgtggacggcgactacgaggacgccgagctgaaccccagattcctgaaggacaacctgatcgacgccaacggcggcagcagacccccctggccccccctggagtaccagccctaccagagcatctacgtgggcggcatgatggagggcgagggcaagggccccctgctgagaagccagagcaccagcgagcaggagaagagactgacctggcccagaagaagctacagccccagaagcttcgaggactgcggcggcggctacacccccgactgcagcagcaacgagaacctgaccagcagcgaggaggacttcagcagcggccagagcagcagagtgagccccagccccaccacctacagaatgttcagagacaagagcagaagccccagccagaacagccagcagagcttcgacagcagcagcccccccaccccccagtgccacaagagacacagacactgccccgtggtggtgagcgaggccaccatcgtgggcgtgagaaagaccggccagatctggcccaacgacggcgagggcgccttccacggcgagcaccccggcgccgccgaggaggtgttccagaagctgctgcccgacatcagaggcgccgccgacgccgaccagctggtgtgcgagacccccgactgcccccagcacagcgccgaccaccagtag

SEQ ID NO: 209030 - DNA, 1377 bp, Artificial Sequence
  derived and/or modified sequence
atggtggaccccgtgggcttcgccgaggcctggaaggcccagttccccgacagcgagccccccagaatggagctgagaagcgtgggcgacatcgagcaggagctggagagatgcaaggccagcatcagaagactggagcaggaggtgaaccaggagagattcagaatgatctacctgcagaccctgctggccaaggagaagaagagctacgacagacagagatggggcttcagaagagccgcccaggcccccgacggcgccagcgagcccagagccagcgccagcagaccccagcccgcccccgccgacggcgccgaccccccccccgccgaggagcccgaggccagacccgacggcgagggcagccccggcaaggccagacccggcaccgccagaagacccggcgccgccgccagcggcgagagagacgacagaggcccccccgccagcgtggccgccctgagaagcaacttcgagagaatcagaaagggccacggccagcccggcgccgacgccgagaagcccttctacgtgaacgtggagttccaccacgagagaggcctggtgaaggtgaacgacaaggaggtgagcgacagaatcagcagcctgggcagccaggccatgcagatggagagaaagaagagccagcacggcgccggcagcagcgtgggcgacgccagcagacccccctacagaggcagaagcagcgagagcagctgcggcgtggacggcgactacgaggacgccgagctgaaccccagattcctgaaggacaacctgatcgacgccaacggcggcagcagacccccctggccccccctggagtaccagccctaccagagcatctacgtgggcggcatgatggagggcgagggcaagggccccctgctgagaagccagagcaccagcgagcaggagaagagactgacctggcccagaagaagctacagccccagaagcttcgaggactgcggcggcggctacacccccgactgcagcagcaacgagaacctgaccagcagcgaggaggacttcagcagcggccagagcagcagagtgagccccagccccaccacctacagaatgttcagagacaagagcagaagccccagccagaacagccagcagagcttcgacagcagcagcccccccaccccccagtgccacaagagacacagacactgccccgtggtggtgagcgaggccaccatcgtgggcgtgagaaagaccggccagatctggcccaacgacggcgagggcgccttccacggcgacgccgacggcagcttcggcaccccccccggctacggctgcctgtgcctgcccgcctggcccagcggctgcaccgccgccaccgccagagtgaccagaagctag

SEQ ID NO: 209031 - DNA, 3684 bp, Artificial Sequence
  derived and/or modified sequence
atggtggaccccgtgggcttcgccgaggcctggaaggcccagttccccgacagcgagccccccagaatggagctgagaagcgtgggcgacatcgagcaggagctggagagatgcaaggccagcatcagaagactggagcaggaggtgaaccaggagagattcagaatgatctacctgcagaccctgctggccaaggagaagaagagctacgacagacagagatggggcttcagaagagccgcccaggcccccgacggcgccagcgagcccagagccagcgccagcagaccccagcccgcccccgccgacggcgccgaccccccccccgccgaggagcccgaggccagacccgacggcgagggcagccccggcaaggccagacccggcaccgccagaagacccggcgccgccgccagcggcgagagagacgacagaggcccccccgccagcgtggccgccctgagaagcaacttcgagagaatcagaaagggccacggccagcccggcgccgacgccgagaagcccttctacgtgaacgtggagttccaccacgagagaggcctggtgaaggtgaacgacaaggaggtgagcgacagaatcagcagcctgggcagccaggccatgcagatggagagaaagaagagccagcacggcgccggcagcagcgtgggcgacgccagcagacccccctacagaggcagaagcagcgagagcagctgcggcgtggacggcgactacgaggacgccgagctgaaccccagattcctgaaggacaacctgatcgacgccaacggcggcagcagacccccctggccccccctggagtaccagccctaccagagcatctacgtgggcggcatgatggagggcgagggcaagggccccctgctgagaagccagagcaccagcgagcaggagaagagactgacctggcccagaagaagctacagccccagaagcttcgaggactgcggcggcggctacacccccgactgcagcagcaacgagaacctgaccagcagcgaggaggacttcagcagcggccagagcagcagagtgagccccagccccaccacctacagaatgttcagagacaagagcagaagccccagccagaacagccagcagagcttcgacagcagcagcccccccaccccccagtgccacaagagacacagacactgccccgtggtggtgagcgaggccaccatcgtgggcgtgagaaagaccggccagatctggcccaacgacggcgagggcgccttccacggcgacgccgacggcagcttcggcaccccccccggctacggctgcgccgccgacagagccgaggagcagagaagacaccaggacggcctgccctacatcgacgacagccccagcagcagcccccacctgagcagcaagggcagaggcagcagagacgccctggtgagcggcgccctggagagcaccaaggccagcgagctggacctggagaagggcctggagatgagaaagtgggtgctgagcggcatcctggccagcgaggagacctacctgagccacctggaggccctgctgctgcccatgaagcccctgaaggccgccgccaccaccagccagcccgtgctgaccagccagcagatcgagaccatcttcttcaaggtgcccgagctgtacgagatccacaaggagttctacgacggcctgttccccagagtgcagcagtggagccaccagcagagagtgggcgacctgttccagaagctggccagccagctgggcgtgtacagagccttcgtggacaactacggcgtggccatggagatggccgagaagtgctgccaggccaacgcccagttcgccgagatcagcgagaacctgagagccagaagcaacaaggacgccaaggaccccaccaccaagaacagcctggagaccctgctgtacaagcccgtggacagagtgaccagaagcaccctggtgctgcacgacctgctgaagcacacccccgccagccaccccgaccaccccctgctgcaggacgccctgagaatcagccagaacttcctgagcagcatcaacgaggagatcacccccagaagacagagcatgaccgtgaagaagggcgagcacagacagctgctgaaggacagcttcatggtggagctggtggagggcgccagaaagctgagacacgtgttcctgttcaccgacctgctgctgtgcaccaagctgaagaagcagagcggcggcaagacccagcagtacgactgcaagtggtacatccccctgaccgacctgagcttccagatggtggacgagctggaggccgtgcccaacatccccctggtgcccgacgaggagctggacgccctgaagatcaagatcagccagatcaagaacgacatccagagagagaagagagccaacaagggcagcaaggccaccgagagactgaagaagaagctgagcgagcaggagagcctgctgctgctgatgagccccagcatggccttcagagtgcacagcagaaacggcaagagctacaccttcctgatcagcagcgactacgagagagccgagtggagagagaacatcagagagcagcagaagaagtgcttcagaagcttcagcctgaccagcgtggagctgcagatgctgaccaacagctgcgtgaagctgcagaccgtgcacagcatccccctgaccatcaacaaggaggacgacgagagccccggcctgtacggcttcctgaacgtgatcgtgcacagcgccaccggcttcaagcagagcagcaacctgtactgcaccctggaggtggacagcttcggctacttcgtgaacaaggccaagaccagagtgtacagagacaccgccgagcccaactggaacgagctggacccccaggccctgcaggacagagactggcagagaaccgtgatcgccatgaacggcatcgaggtgaagctgagcgtgaagttcaacagcagagagttcagcctgaagagaatgcccagcagaaagcagaccggcgtgttcggcgtgaagatcgccgtggtgaccaagagagagagaagcaaggtgccctacatcgtgagacagtgcgtggaggagatcgagagaagaggcatggaggaggtgggcatctacagagtgagcggcgtggccaccgacatccaggccctgaaggccgccttcgacgtgaacaacaaggacgtgagcgtgatgatgagcgagatggacgtgaacgccatcgccggcaccctgaagctgtacttcagagagctgcccgagcccctgttcaccgacgagttctaccccaacttcgccgagggcatcgccctgagcgaccccgtggccaaggagagctgcatgctgaacctgctgctgagcctgcccgaggccaacctgctgaccttcctgttcctgctggaccacctgaagagagtggccgagaaggaggccgtgaacaagatgagcctgcacaacctggccaccgtgttcggccccaccctgctgagacccagcgagaaggagagcaagctgcccgccaaccccagccagcccatcaccatgaccgacagctggagcctggaggtgatgagccaggtgcaggtgctgctgtacttcctgcagctggaggccatccccgcccccgacagcaagagacagagcatcctgttcagcaccgaggtgtag

SEQ ID NO: 209032 - DNA, 1404 bp, Artificial Sequence
  derived and/or modified sequence
atggtggaccccgtgggcttcgccgaggcctggaaggcccagttccccgacagcgagccccccagaatggagctgagaagcgtgggcgacatcgagcaggagctggagagatgcaaggccagcatcagaagactggagcaggaggtgaaccaggagagattcagaatgatctacctgcagaccctgctggccaaggagaagaagagctacgacagacagagatggggcttcagaagagccgcccaggcccccgacggcgccagcgagcccagagccagcgccagcagaccccagcccgcccccgccgacggcgccgaccccccccccgccgaggagcccgaggccagacccgacggcgagggcagccccggcaaggccagacccggcaccgccagaagacccggcgccgccgccagcggcgagagagacgacagaggcccccccgccagcgtggccgccctgagaagcaacttcgagagaatcagaaagggccacggccagcccggcgccgacgccgagaagcccttctacgtgaacgtggagttccaccacgagagaggcctggtgaaggtgaacgacaaggaggtgagcgacagaatcagcagcctgggcagccaggccatgcagatggagagaaagaagagccagcacggcgccggcagcagcgtgggcgacgccagcagacccccctacagaggcagaagcagcgagagcagctgcggcgtggacggcgactacgaggacgccgagctgaaccccagattcctgaaggacaacctgatcgacgccaacggcggcagcagacccccctggccccccctggagtaccagccctaccagagcatctacgtgggcggcatgatggagggcgagggcaagggccccctgctgagaagccagagcaccagcgagcaggagaagagactgacctggcccagaagaagctacagccccagaagcttcgaggactgcggcggcggctacacccccgactgcagcagcaacgagaacctgaccagcagcgaggaggacttcagcagcggccagagcagcagagtgagccccagccccaccacctacagaatgttcagagacaagagcagaagccccagccagaacagccagcagagcttcgacagcagcagcccccccaccccccagtgccacaagagacacagacactgccccgtggtggtgagcgaggccaccatcgtgggcgtgagaaagaccggccagatctggcccaacgacggcgagggcgccttccacggcgacgccgtgctgaagaccgaggtgccccaccagggcgtgagaagagccagactgagcctggaggccctgggcgaggaccccagcttcctgttccccgccagcgacggccccagacacagcagcacctggtag

SEQ ID NO: 209033 - DNA, 1365 bp, Artificial Sequence
  derived and/or modified sequence
atggtggaccccgtgggcttcgccgaggcctggaaggcccagttccccgacagcgagccccccagaatggagctgagaagcgtgggcgacatcgagcaggagctggagagatgcaaggccagcatcagaagactggagcaggaggtgaaccaggagagattcagaatgatctacctgcagaccctgctggccaaggagaagaagagctacgacagacagagatggggcttcagaagagccgcccaggcccccgacggcgccagcgagcccagagccagcgccagcagaccccagcccgcccccgccgacggcgccgaccccccccccgccgaggagcccgaggccagacccgacggcgagggcagccccggcaaggccagacccggcaccgccagaagacccggcgccgccgccagcggcgagagagacgacagaggcccccccgccagcgtggccgccctgagaagcaacttcgagagaatcagaaagggccacggccagcccggcgccgacgccgagaagcccttctacgtgaacgtggagttccaccacgagagaggcctggtgaaggtgaacgacaaggaggtgagcgacagaatcagcagcctgggcagccaggccatgcagatggagagaaagaagagccagcacggcgccggcagcagcgtgggcgacgccagcagacccccctacagaggcagaagcagcgagagcagctgcggcgtggacggcgactacgaggacgccgagctgaaccccagattcctgaaggacaacctgatcgacgccaacggcggcagcagacccccctggccccccctggagtaccagccctaccagagcatctacgtgggcggcatgatggagggcgagggcaagggccccctgctgagaagccagagcaccagcgagcaggagaagagactgacctggcccagaagaagctacagccccagaagcttcgaggactgcggcggcggctacacccccgactgcagcagcaacgagaacctgaccagcagcgaggaggacttcagcagcggccagagcagcagagtgagccccagccccaccacctacagaatgttcagagacaagagcagaagccccagccagaacagccagcagagcttcgacagcagcagcccccccaccccccagtgccacaagagacacagacactgccccgtggtggtgagcgaggccaccatcgtgggcgtgagaaagaccggccagatctggcccaacgacggcgagggcgccttccacggcgacgccgacggcagcttcggcaccccccccggctacggctgcgccgccggcagacccccccacctgaccgagctgcccgtgcagcaccagtag

SEQ ID NO: 209034 - protein, 104 aa, Artificial Sequence
  derived and/or modified sequence
MIRFILIQNRAGKTRLAKWYMQFDDDEKQKLIEEVHAVVTVRDAKHTNFVEVLNEYFHNVCELDLVFNFYKVYTVVDEMFLAGEIRETSQTKVLKQLLMLQSLE

SEQ ID NO: 209035 - DNA, 315 bp, Artificial Sequence
  derived and/or modified sequence
atgatccgctttatcctcatccagaaccgggcaggcaagacgcgcctggccaagtggtacatgcagtttgatgatgatgagaaacagaagctgatcgaggaggtgcatgccgtggtcaccgtccgagacgccaaacacaccaactttgtggaggtcttaaacgaatatttccacaatgtctgtgaactggacctggtgttcaacttctacaaggtttacacggtcgtggacgagatgttcctggctggcgaaatccgagagaccagccagacgaaggtgctgaaacagctgctgatgctacagtccctggagtga

SEQ ID NO: 209036 - DNA, 315 bp, Artificial Sequence
  derived and/or modified sequence
atgattcgcttcattctgattcagaaccgtgccggcaagactaggctggctaaatggtacatgcagtttgacgatgacgagaaacagaagctgatcgaagaggtacatgcggttgtcaccgtcagagacgcaaagcacaccaacttcgttgaagtgctgaacgaatattttcataatgtctgtgaactggatttggttttcaatttctacaaggtatacacggtggttgacgagatgtttctggctggggaaataagggagacaagtcagactaaggttctgaaacagctccttatgttacagagcctggagtag

SEQ ID NO: 209037 - DNA, 315 bp, Artificial Sequence
  derived and/or modified sequence
atgatcaggttcattctgattcagaatcgcgcagggaagactcgtttggcaaaatggtacatgcaattcgacgatgatgagaagcagaaacttattgaggaggtgcatgcagtcgtgactgtaagggacgccaagcacactaattttgtggaggtgctaaatgagtactttcacaatgtgtgtgagctggatctcgtgttcaacttttacaaagtgtacacagtggtggatgagatgtttctggccggtgagattagagagacctcgcagacaaaggttctgaaacaattgcttatgctgcagagcttagagtag

SEQ ID NO: 209038 - DNA, 776 bp, Artificial Sequence
  derived and/or modified sequence
atcttcacccaggctggcccctttggtgaaactacaactcccaggggtctgtgcgcgagaaggcaggcgggtttttctaccggaagtccgctctagctctgggccctacaactgcaccctgagccggagctgcccagtcgccgcgggaccggggccgctggggtctggacgggggtcgccatgatccgctttatcctcatccagaaccgggcaggcaagacgcgcctggccaagtggtacatgcagtttgatgatgatgagaaacagaagctgatcgaggaggtgcatgccgtggtcaccgtccgagacgccaaacacaccaactttgtggaggtcttaaacgaatatttccacaatgtctgtgaactggacctggtgttcaacttctacaaggtttacacggtcgtggacgagatgttcctggctggcgaaatccgagagaccagccagacgaaggtgctgaaacagctgctgatgctacagtccctggagtgagggcaggcgagccccaccccggccccggcccctcctggactcgcctgctcgcttccccttcccaggcccgtggccaacccagcagtccttccctcagctgcctaggaggaagggacccagctgggtctgggccacaagggaggagactgcaccccactgcctctgggccctggctgtgggcagaggccaccgtgtgtgtcccgagtaaccgtgccgttgtcgtgtgatgccataagcgtctgtgcgtggagtccccaataaacctgtggtcctgcctggcc

SEQ ID NO: 209039 - DNA, 315 bp, Artificial Sequence
  derived and/or modified sequence
atgatccgcttcatcctgatccagaacagagctgggaagacccggctggccaagtggtacatgcagtttgatgatgatgagaagcagaagctgattgaggaggtgcatgctgtggtgacagtgagagatgccaagcacaccaactttgtggaggtgctgaatgagtacttccacaacgtgtgtgagctggacctggtgttcaacttctacaaggtgtacacagtggtggatgagatgttcctggccggggagatccgggagaccagccagaccaaggtgctgaagcagctgctgatgctgcagagcctggagtag

SEQ ID NO: 209040 - DNA, 315 bp, Artificial Sequence
  derived and/or modified sequence
atgatccggttcatcctgatccagaaccgggccggcaagacccggttggccaagtggtatatgcaatttgatgacgacgagaaacagaaactaattgaggaggtacatgccgtcgtgactgtgagagatgcaaagcacacgaacttcgtggaggtgctgaacgagtacttccacaatgtatgcgaactggacctggtttttaatttctataaagtgtacaccgtggtggacgaaatgtttctggcaggagagataagagagaccagtcagacaaaagtcttgaagcagctgctgatgttgcagagcctcgaatag

SEQ ID NO: 209041 - DNA, 315 bp, Artificial Sequence
  derived and/or modified sequence
atgatccggttcatcctgatccagaaccgggccggcaagacccggcttgccaagtggtatatgcagtttgacgacgatgagaagcagaagctgatcgaggaggttcatgccgtggtgaccgttcgcgacgctaagcacaccaactttgtggaggtattaaacgagtatttccacaatgtctgtgagctcgatctggtctttaacttctataaagtatatacggtggtcgatgagatgtttctcgccggggaaataagggaaacctcacagacaaaggtgctgaaacaacttctgatgctgcagtccctcgagtag

SEQ ID NO: 209042 - DNA, 315 bp, Artificial Sequence
  derived and/or modified sequence
atgatccggttcatccttatacagaatcgtgcaggtaaaacacggcttgcaaagtggtacatgcagttcgacgacgatgaaaagcagaaactgatcgaggaagtgcatgcagtggtgacagttcgcgacgccaagcacaccaacttcgtagaggtgttaaatgagtactttcacaacgtgtgcgaactggacctggtgttcaatttttataaagtgtacacagtagtggacgagatgttcctagctggagaaattcgggagacctcacagacaaaggtgttaaagcagcttctcatgctacagtccctcgagtag

SEQ ID NO: 209043 - DNA, 315 bp, Artificial Sequence
  derived and/or modified sequence
atgattcggtttattctaatccaaaatagagccggaaaaaccagattggcaaaatggtacatgcagtttgacgatgacgagaagcagaagctgatagaggaagtgcatgccgtagtgaccgtgcgagatgccaaacacaccaacttcgttgaggtgttgaacgagtacttccataatgtttgtgagctggacctggttttcaacttctacaaggtgtacacggtggtggacgaaatgtttctcgccggagagattcgcgagacaagtcagaccaaggtactcaagcagctgcttatgctccagagtttagaatag

SEQ ID NO: 209044 - DNA, 315 bp, Artificial Sequence
  derived and/or modified sequence
atgatcagattcatcctgatccagaacagagccggcaagaccagactggccaagtggtacatgcagttcgacgacgacgagaagcagaagctgatcgaggaggtgcacgccgtggtgaccgtgagagacgccaagcacaccaacttcgtggaggtgctgaacgagtacttccacaacgtgtgcgagctggacctggtgttcaacttctacaaggtgtacaccgtggtggacgagatgttcctggccggcgagatcagagagaccagccagaccaaggtgctgaagcagctgctgatgctgcagagcctggagtag

SEQ ID NO: 209045 - protein, 566 aa, Artificial Sequence
  derived and/or modified sequence
MDPPAGAARRLLCPALLLLLLLLPPPLLPPPPPPANARLAAAADPPGGPLGHGAERILAVPVRTDAQGRLVSHVVSAATSRAGVRARRAAPVRTPSFPGGNEEEPGSHLFYNVTVFGRDLHLRLRPNARLVAPGATMEWQGEKGTTRVEPLLGSCLYVGDVAGLAEASSVALSNCDGLAGLIRMEEEEFFIEPLEKGLAAQEAEQGRVHVVYRRPPTSPPLGGPQALDTGASLDSLDSLSRALGVLEEHANSSRRRARRHAADDDYNIEVLLGVDDSVVQFHGKEHVQKYLLTLMNIVNEIYHDESLGAHINVVLVRIILLSYGKSMSLIEIGNPSQSLENVCRWAYLQQKPDTGHDEYHDHAIFLTRQDFGPSGMQGYAPVTGMCHPVRSCTLNHEDGFSSAFVVAHETGHVLGMEHDGQGNRCGDEVRLGSIMAPLVQAAFHRFHWSRCSQQELSRYLHSYDCLLDDPFAHDWPALPQLPGLHYSMNEQCRFDFGLGYMMCTAFRTFDPCKQLWCSHPDNPYFCKTKKGPPLDGTMCAPGKFRPGAVAHACYPSTLGGQGRWIA

SEQ ID NO: 209046 - DNA, 2044 bp, Artificial Sequence
  derived and/or modified sequence
agctgcgggcggctccagctgcccccagatgtgggctgggcggctcgcggggaactttcgcgccggctgcgagtgcggggccccggctgcagtccggctgccatggatccgccggcgggagccgctcgccgcctgctctgccccgcgctgctgctgctgctgctgctgctgccgccgccgctcctgccgccgccgccgccgcccgcgaacgccaggctcgccgccgccgccgaccccccaggcgggcccctggggcacggagcggagcgcatcctggcggtgcccgtgcgcactgacgcccagggccgcttggtgtcccacgtggtgtcggcagctacgtccagagcaggggtacgagcccgcagggccgccccggtccggaccccgagcttccccggaggcaacgaggaggagcctggcagtcacctcttctacaatgtcacggtctttggccgagacctgcacctgcggctgcggcccaacgcccgcctcgtggcgcccggggccactatggagtggcagggcgagaagggcaccacccgcgtggagcccctgctcgggagctgtctctacgtcggagacgtggccggcctagccgaagcctcctctgtggcgctcagcaactgcgatgggctggctggtctgatccggatggaggaggaggagttcttcatcgaacccttggagaaggggctggcggcgcaggaggctgagcaaggccgtgtgcatgtggtgtatcgccggccacccacgtcccctcctctcggggggccacaggccctggacacaggggcctccctggacagcctggacagcctcagccgcgccctgggcgtcctagaggagcacgccaacagctcgaggcggagggcacgcaggcatgctgcggacgatgactacaacatcgaggtcctgctgggcgtggatgactctgtggtgcagttccacgggaaggagcacgtacagaagtacctgctgacactcatgaacattgtcaatgaaatctaccatgacgagtccttgggtgcccacatcaacgtggtcctggtgcggatcatcctcctgagctatggaaagtccatgagcctcatcgagatcgggaacccctctcagagcctggagaatgtctgccgctgggcctacctccagcagaagccagacacgggccacgatgaataccacgatcacgccatcttcctcacacggcaggactttgggccttccggcatgcaaggctatgctcctgtcaccggcatgtgccatccggtccgcagctgcaccctgaaccatgaggacggcttctcctcagcgtttgtggtggcccatgagactggccacgtgctgggcatggagcacgacgggcagggcaaccgctgtggcgacgaggtgcggctgggcagcatcatggcgcccctggtgcaggccgccttccaccgcttccactggtcccgctgcagccagcaggagctgagccgctacctgcactcctatgactgcctgctggatgaccccttcgcccacgactggccggcgctgccccagctcccgggactgcactactccatgaacgagcaatgccgctttgacttcggcctgggctacatgatgtgcacggcgttccggacctttgacccctgcaagcagctgtggtgcagccatcctgacaacccctacttttgcaagaccaagaaggggccccccttggacgggactatgtgtgcacctggcaagttcaggccgggcgcggtggctcatgcctgttatcccagcactttgggaggccaaggtaggtggatcgcctgaggtcagaagttcaagacaagtctggttaacatggcaaaatcccgtctctactaaaaatacaaaaattagctgggcgcggtggtgggtgcctgtaatcccagctactccggaggctgaggcatgaaaatcgtttgagcccaggaggcggaggttgcggtgagccaagatcgcgtcgctgctctccagtctggatcacacagcaagaccctgtctcaaaaaataaaaataaaagtgaagtgca

SEQ ID NO: 209047 - DNA, 1701 bp, Artificial Sequence
  derived and/or modified sequence
atggacccacccgccggcgccgcccgtagattgctctgccctgctctgctcctgcttttgctgctgctgccccctccactgttaccacctcctcctccccctgcaaacgccaggctggccgccgcggccgacccaccaggcggcccgctaggtcatggcgcggaacgaattctagcggtcccagttagaacggacgcccagggccgtctcgtctcacacgtggtgagtgcggccacttcaagggcgggggtgagagccaggagagctgccccggttcggactccctcctttccaggcggaaacgaagaggaaccgggatcccacctcttctacaatgttacggttttcggcagggatctgcatttacggttgaggcccaatgcgcgcctggtcgctcccggagctacaatggagtggcagggggagaaagggaccactagggtggaaccactcctcggcagctgcttgtatgtaggagatgttgctggactcgccgaagccagctccgttgcgctctcaaactgtgacggcttagcaggcctgattcggatggaggaggaagagttcttcatagagcctctcgaaaagggtctcgctgcccaggaagcggagcagggaagggtgcacgttgtgtatagacgaccccccacaagccctccattagggggaccacaagccctggacacaggggccagcctagacagcctggattccctgtcccgagcattgggtgtcctcgaagagcacgccaactccagtcggcgacgcgcgaggcgccacgctgcagacgatgactataacatagaggtactgctgggggtggacgattctgtcgtacagtttcacggtaaggagcacgtgcaaaagtatctcctgactctgatgaacatcgtgaatgagatctaccacgacgagtcactgggtgcacacatcaatgtggtgctggtgcgaatcatccttctgtcatacgggaaaagtatgtcattaattgagattgggaacccttcccagagtctggagaatgtgtgtcggtgggcctaccttcagcagaagcccgatactggccacgacgagtaccatgatcacgccattttcctaacgcgacaggattttggacccagcggaatgcagggatacgcccctgtgaccggaatgtgccaccccgtgcgctcatgtactttaaaccacgaagatggcttctcatccgccttcgtggtcgcacatgaaactggccatgtgctggggatggaacacgatggacagggcaatcggtgcggcgatgaggtgcgccttggcagcatcatggctccactggtccaggcagcgtttcatcgcttccattggagtcggtgctcccaacaggaactgtccaggtatctgcacagttacgattgcttactagacgatcctttcgcccacgattggcccgccctaccacaactgcctggtctccattacagcatgaatgaacagtgtcggtttgatttcgggctcggatatatgatgtgcaccgcgtttcggacttttgacccttgcaagcagctctggtgttcacatccggacaatccctatttctgtaaaactaaaaaggggccgcctctggacggaaccatgtgcgcaccaggcaagttccggccaggtgcagtggctcacgcttgttacccttccacccttgggggccagggccggtggattgcatag

SEQ ID NO: 209048 - DNA, 1701 bp, Artificial Sequence
  derived and/or modified sequence
atggaccccccagctggagctgcccggcggctgctgtgcccagccctgctgctgctgctgctgctgctgcccccacccctgctgcccccacctcctcctccagccaatgcccggctggccgctgctgctgaccccccaggcggccccctgggccacggggctgagcgcatcctggccgtgcctgtgaggacagatgcccagggccgcctggtgagccacgtggtgtctgctgccaccagccgggccggcgtgcgggccaggagagctgcccctgtgaggacccccagcttccctggaggaaatgaggaggagcccggcagccacctgttctacaacgtgacagtgtttggccgggacctgcacctgcggctgcggcccaatgcccggctggtggcccctggggccaccatggagtggcagggcgagaagggcaccaccagggtggagcccctgctgggcagctgcctgtatgtgggagatgtggccggcctggccgaggccagctctgtggccctgagcaactgtgatggcctggccggcctcatccgcatggaggaggaggagttcttcatcgagcccctggagaagggcctggccgcccaggaggccgagcagggccgggtgcacgtggtgtacagaagaccacccaccagcccccccctgggcggcccccaggccctggacacaggagccagcctggacagcctggacagcctgagccgggccctgggcgtgctggaggagcacgccaacagcagcagaagaagagccaggagacatgctgctgatgatgactacaacatcgaggtgctgctgggcgtggatgattctgtggtgcagttccacggcaaggagcacgtgcagaagtacctgctgaccctgatgaacatcgtgaatgagatctaccatgatgagagcctgggcgcccacatcaacgtggtgctggtgcgcatcatcctgctgtcctatggcaagtccatgagcctcatcgagatcggcaaccccagccagagcctggagaatgtgtgccgctgggcctacctgcagcagaagccagacaccggccatgatgagtaccatgaccacgccatcttcctgacccggcaggactttggccccagcggcatgcagggctacgcccctgtgacaggcatgtgccaccctgtgcgcagctgcaccctgaaccatgaagatggcttcagcagcgcctttgtggtggcccacgagaccggccacgtgctgggcatggagcatgatggccagggcaacagatgtggagatgaggtgcggctgggcagcatcatggcccccctggtgcaggccgccttccaccgcttccactggagccgctgcagccagcaggagctgagccgctacctgcacagctatgactgcctgctggatgacccctttgcccatgactggccagccctgccccagctgcccggcctgcactacagcatgaatgagcagtgccgctttgattttggcctgggctacatgatgtgcacagccttccgcacctttgacccctgcaagcagctgtggtgcagccacccagacaacccctacttctgcaagaccaagaagggcccccccctggatggcaccatgtgtgcccctgggaagttccggcctggagctgtggcccacgcctgctaccccagcaccctgggcggccagggccgctggatcgcctag

SEQ ID NO: 209049 - DNA, 1701 bp, Artificial Sequence
  derived and/or modified sequence
atggacccccccgccggcgccgcccggcggctgctgtgccccgccctgctgctgctgctcttgctcctgccaccaccacttctgcctcccccacctccgcccgccaacgcacggttagccgccgctgcagacccacccggtggccccctgggacacggggccgagcgaatacttgccgtgcccgtgcgcacagacgctcaaggtcgactcgtctctcacgtggtctccgcagctacttcccgcgctggtgtgcgggctcggcgtgcggctcctgtgaggacccctagcttcccagggggcaatgaagaagagccgggaagtcatcttttttataatgtcaccgttttcggcagagacctccacttgcgactgagacccaacgccagattggtcgctcccggcgcaaccatggaatggcagggagaaaaaggaaccacccgcgtggaacccctgttggggagctgcctctatgtgggagacgtcgccggtctggctgaggcatcctctgtggccctgtcaaattgcgatgggcttgctggactgatccggatggaggaggaagagttcttcatcgaacccctggaaaaggggctggcggctcaggaggccgagcagggcagggtacatgtcgtctaccgaagacccccgacaagcccccctctgggcggacctcaagccttggacacaggcgctagtctggatagcctcgatagcctctcccgggctctgggcgtgctagaggagcacgccaatagcagtcgacggcgagcccgccgacacgccgctgacgacgactacaacatcgaagtactgctgggggttgacgacagtgttgtgcagtttcacggcaaagagcacgtgcaaaagtacctgctgacgttgatgaacattgttaacgagatttaccacgacgagagccttggggcccatataaatgtggtcctcgtgcgtatcatcctcttaagctatggcaagtccatgtcactaatcgaaattggtaatccgagccagagcctggaaaacgtgtgtcgctgggcgtacctccagcaaaaacctgataccgggcacgacgaataccacgaccacgccatcttcctgacaagacaggacttcgggccgagcgggatgcagggttacgcaccagtcaccgggatgtgccatccggtccgcagctgcactctaaaccacgaagacggcttttcttctgcgttcgtggtcgctcacgagaccggacatgtgctgggaatggagcacgatggtcagggtaatcgctgcggcgacgaagtccgactcgggtccatcatggctcccctggtgcaggccgcgttccatagattccattggtcccggtgctcacagcaagaactcagtagatacctacactcttatgattgtctattggatgacccttttgctcacgactggccagcattgccacaactgccagggctccactacagtatgaacgagcagtgcaggtttgacttcggtctgggttacatgatgtgcacagcatttagaacctttgatccctgtaagcagctctggtgttcccaccctgataacccctacttctgcaaaaccaaaaaaggcccaccactggatggaactatgtgcgcgccagggaaattccggcctggagccgttgcacacgcatgctacccgagtactcttggtggacagggacgctggatcgcgtag

SEQ ID NO: 209050 - DNA, 1701 bp, Artificial Sequence
  derived and/or modified sequence
atggatccaccagcaggcgctgctcggcgactgctttgtcctgcactcctcctcctgctccttttgctgcccccaccactgctcccccctcctcccccacctgctaatgcccgacttgcagcagcggcagatcccccagggggtcctttagggcatggtgccgaacggatccttgctgtaccagttagaacggatgcccagggacggctggtgagtcacgtggtgtcagccgctacatctagggctggggtgcgagccaggcgcgctgctccggtgaggacaccttcatttccaggagggaatgaagaggagcccggttcccacctgttctacaacgtaaccgtgtttggtcgcgatctgcatctgcgccttcgcccaaacgctcggcttgtagcgcctggcgcaacgatggaatggcagggagagaagggaaccacgcgggtggaaccacttctgggaagctgcctgtatgttggcgacgtggcgggactggctgaagctagttccgtggccctgtctaattgcgatggcctggcaggactcataagaatggaagaggaggaatttttcattgaacccttagagaaaggtctggcagcccaagaggccgagcaagggagagtgcacgttgtgtaccgcagacccccaacctccccccctcttggcggaccacaggccctggacactggagcaagccttgattccctggactcactgtctcgagccttaggggtgcttgaagagcacgctaattcttctcgacgtcgcgcacgacggcatgcagctgatgacgactacaacatcgaggtgctgctgggagtagacgacagcgtcgtgcagtttcatggaaaagagcacgtgcagaaatatcttctcacgctgatgaacatcgttaacgaaatttatcacgatgaatcactgggcgctcacattaatgtagtgctggtccgcattatccttttgtcttacggcaaaagcatgtcacttatcgagattgggaatccctcacagagcttagagaacgtctgtcggtgggcatacctgcagcaaaagccagatactggccacgacgaatatcatgaccatgcaatttttttaacgcggcaggacttcggcccatctggaatgcagggatacgcccctgtgactgggatgtgccaccccgtacgctcttgcacactcaatcacgaggacggcttctcttccgctttcgttgtcgctcatgagacaggccacgtgctcggcatggagcatgatggacaggggaatcgctgcggggatgaagtcaggctaggatcgattatggctcccctcgtacaggctgcattccaccgtttccactggtcccggtgcagccagcaggaactcagtaggtacctgcactcttacgactgcctgttagacgatccatttgctcacgactggccagcacttcctcagctgcctggactgcattactccatgaacgagcaatgccgcttcgacttcggtctgggctacatgatgtgcacagcatttaggacttttgatccatgtaaacagctctggtgcagccatccagataacccttacttttgcaaaactaaaaagggaccaccccttgacggcaccatgtgcgcccctggtaagtttaggcctggggctgtagcccacgcttgttatccttccactctaggcggacaaggaaggtggattgcttag

SEQ ID NO: 209051 - DNA, 1701 bp, Artificial Sequence
  derived and/or modified sequence
atggacccccccgccggcgccgccagaagactgctgtgccccgccctgctgctgctgctgctgctgctgcccccccccctgctgccccccccccccccccccgccaacgccagactggccgccgccgccgacccccccggcggccccctgggccacggcgccgagagaatcctggccgtgcccgtgagaaccgacgcccagggcagactggtgagccacgtggtgagcgccgccaccagcagagccggcgtgagagccagaagagccgcccccgtgagaacccccagcttccccggcggcaacgaggaggagcccggcagccacctgttctacaacgtgaccgtgttcggcagagacctgcacctgagactgagacccaacgccagactggtggcccccggcgccaccatggagtggcagggcgagaagggcaccaccagagtggagcccctgctgggcagctgcctgtacgtgggcgacgtggccggcctggccgaggccagcagcgtggccctgagcaactgcgacggcctggccggcctgatcagaatggaggaggaggagttcttcatcgagcccctggagaagggcctggccgcccaggaggccgagcagggcagagtgcacgtggtgtacagaagaccccccaccagcccccccctgggcggcccccaggccctggacaccggcgccagcctggacagcctggacagcctgagcagagccctgggcgtgctggaggagcacgccaacagcagcagaagaagagccagaagacacgccgccgacgacgactacaacatcgaggtgctgctgggcgtggacgacagcgtggtgcagttccacggcaaggagcacgtgcagaagtacctgctgaccctgatgaacatcgtgaacgagatctaccacgacgagagcctgggcgcccacatcaacgtggtgctggtgagaatcatcctgctgagctacggcaagagcatgagcctgatcgagatcggcaaccccagccagagcctggagaacgtgtgcagatgggcctacctgcagcagaagcccgacaccggccacgacgagtaccacgaccacgccatcttcctgaccagacaggacttcggccccagcggcatgcagggctacgcccccgtgaccggcatgtgccaccccgtgagaagctgcaccctgaaccacgaggacggcttcagcagcgccttcgtggtggcccacgagaccggccacgtgctgggcatggagcacgacggccagggcaacagatgcggcgacgaggtgagactgggcagcatcatggcccccctggtgcaggccgccttccacagattccactggagcagatgcagccagcaggagctgagcagatacctgcacagctacgactgcctgctggacgaccccttcgcccacgactggcccgccctgccccagctgcccggcctgcactacagcatgaacgagcagtgcagattcgacttcggcctgggctacatgatgtgcaccgccttcagaaccttcgacccctgcaagcagctgtggtgcagccaccccgacaacccctacttctgcaagaccaagaagggcccccccctggacggcaccatgtgcgcccccggcaagttcagacccggcgccgtggcccacgcctgctaccccagcaccctgggcggccagggcagatggatcgcctag

SEQ ID NO: 209052 - protein, 188 aa, Artificial Sequence
  derived and/or modified sequence
MPGGPGVLQALPATIFLLFLLSAVYLGPGCQALWMHKVPASLMVSLGEDAHFQCPHNSSNNANVTWWRVLHGNYTWPPEFLGPGEDPNEPPPRPFLDMGEGTKNRIITAEGIILLFCAVVPGTLLLFRKRWQNEKLGLDAGDEYEDENLYEGLNLDDCSMYEDISRGLQGTYQDVGSLNIGDVQLEKP

SEQ ID NO: 209053 - DNA, 567 bp, Artificial Sequence
  derived and/or modified sequence
atgcccggcggccccggagtgttgcaagctctgcccgcaactatatttttgctgtttcttctgtcggcggtctaccttggaccaggttgccaggcactgtggatgcataaggttcctgcatccctgatggtctccttgggggaagatgcccattttcaatgcccccacaatagttcaaacaacgcaaatgtgacttggtggagagtactgcacggaaactacacatggcctcccgagttcttgggtccaggagaggacccaaacgagcccccgccacggcccttcctggacatgggagaaggtaccaagaacagaatcatcacggccgaaggtataattttactgttctgtgccgttgtccctggcacactgctgctttttagaaagcggtggcagaatgagaagttggggctggacgccggcgacgaatatgaggatgagaatctctatgagggtctcaacctggacgattgttcgatgtacgaagacatctcccgcggattgcaggggacgtaccaggacgtgggctctcttaatataggcgatgtgcaactcgagaagccctag

SEQ ID NO: 209054 - DNA, 567 bp, Artificial Sequence
  derived and/or modified sequence
atgcctgggggccctggggtgctgcaggccctgcctgccaccatcttcctgctcttcctgctgtctgctgtgtacctgggccctggctgccaggccctgtggatgcacaaggtgcctgccagcctgatggtgtccctgggggaggatgcccacttccagtgcccccacaacagcagcaacaatgccaacgtgacctggtggagggtgctgcacggcaactacacctggcccccagagttcctgggccctggagaggaccccaatgagcccccaccccggcccttcctggacatgggagagggcaccaagaaccgcatcatcacagctgagggcatcatcctgctcttctgtgctgtggtgcccggcaccctgctgctcttcaggaagcgctggcagaatgagaagctgggcctggatgctggagatgaatatgaagatgagaacctgtatgagggcctgaacctggatgactgcagcatgtatgaggacatcagccggggcctgcagggcacctaccaggatgtgggcagcctgaacattggagatgtgcagctggagaagccctag

SEQ ID NO: 209055 - DNA, 567 bp, Artificial Sequence
  derived and/or modified sequence
atgcccggcggccccggcgtgctgcaggccctgcccgccaccatcttcctgctattcctgctgagcgccgtataccttgggccaggatgccaggctctgtggatgcacaaggtacccgcctcattaatggtgtccctgggggaggacgcccacttccagtgtccccataattcgtccaataatgcaaacgtgacatggtggcgggttctgcacggtaactacacttggccccctgagttcctcggccccggagaggacccgaatgagccacccccccgacccttcctagacatgggcgagggaacaaaaaatagaatcatcacagcagaaggcatcatcctgctgttttgcgcagtggtgcctgggacgctgctccttttccgcaaaagatggcagaatgaaaaactcggcctagatgcaggggatgaatacgaggacgagaacctgtacgaagggttgaacctggatgattgttccatgtatgaggacatcagtcgcggactgcaaggcacctatcaggatgttggaagccttaatataggagacgtgcagctggagaaaccctag

SEQ ID NO: 209056 - DNA, 567 bp, Artificial Sequence
  derived and/or modified sequence
atgcctggaggcccaggggtgctccaggccctgcccgcaacaatctttctcctcttcttgcttagtgcggtgtacctcggccctggatgccaggccttgtggatgcacaaagtgcccgcatctctgatggtctcactgggcgaggatgcacacttccaatgcccacacaactctagcaacaatgcgaacgtaacctggtggcgagttttgcacggaaattatacttggccgccagagttcctgggcccaggagaggaccccaacgagccccctcctcgacccttcttggatatgggagagggaacgaaaaatagaattatcacagctgaggggatcatcctgctcttctgtgctgtggtccctggcacattgctgctcttcaggaagcggtggcagaatgaaaagctcgggctcgacgccggagatgagtatgaggatgagaacctgtacgaaggtctgaatctcgacgattgctcgatgtatgaagacatctcacgcggactgcagggcacctaccaagacgtggggtccctgaacataggagatgttcagctggagaaaccctag

SEQ ID NO: 209057 - DNA, 1144 bp, Artificial Sequence
  derived and/or modified sequence
tccactcacagcctgaagcatacccggcaggggctgtccccaggcccaacaagcaaagggcccagtagcgagggccactggagcccatctccggggggctgggcaggaagtagggtggggtttggggtagggatctggtaccctgggactgctgcaactcaaactaaccaacccactgggagaagatgcctgggggtccaggagtcctccaagctctgcctgccaccatcttcctcctcttcctgctgtctgctgtctacctgggccctgggtgccaggccctgtggatgcacaaggtcccagcatcattgatggtgagcctgggggaagacgcccacttccaatgcccgcacaatagcagcaacaacgccaacgtcacctggtggcgcgtcctccatggcaactacacgtggccccctgagttcttgggcccgggcgaggaccccaatgagccgccccccaggcccttcctggacatgggggagggcaccaagaaccgaatcatcacagccgaggggatcatcctcctgttctgcgcggtggtgcctgggacgctgctgctgttcaggaaacgatggcagaacgagaagctcgggttggatgccggggatgaatatgaagatgaaaacctttatgaaggcctgaacctggacgactgctccatgtatgaggacatctcccggggcctccagggcacctaccaggatgtgggcagcctcaacataggagatgtccagctggagaagccgtgacacccctactcctgccaggctgcccccgcctgctgtgcacccagctccagtgtctcagctcacttccctgggacattctcctttcagcccttctgggggcttccttagtcatattcccccagtggggggtgggagggtaacctcactcttctccaggccaggcctccttggactcccctgggggtgtcccactcttcttccctctaaactgccccacctcctaacctaatccccccgccccgctgcctttcccaggctcccctcaccccagcgggtaatgagcccttaatcgctgcctctaggggagctgattgtagcagcctcgttagtgtcaccccctcctccctgatctgtcagggccacttagtgataataaattcttcccaactgca

SEQ ID NO: 209058 - DNA, 567 bp, Artificial Sequence
  derived and/or modified sequence
atgcccggcggccccggcgtgctgcaggccctgcccgccaccatcttcctgctgttcctgctgagcgccgtgtacctgggccccggctgccaggccctgtggatgcacaaggtgcccgccagcctgatggtgagcctgggcgaggacgcccacttccagtgcccccacaacagcagcaacaacgccaacgtgacctggtggagagtgctgcacggcaactacacctggccccccgagttcctgggccccggcgaggaccccaacgagcccccccccagacccttcctggacatgggcgagggcaccaagaacagaatcatcaccgccgagggcatcatcctgctgttctgcgccgtggtgcccggcaccctgctgctgttcagaaagagatggcagaacgagaagctgggcctggacgccggcgacgagtacgaggacgagaacctgtacgagggcctgaacctggacgactgcagcatgtacgaggacatcagcagaggcctgcagggcacctaccaggacgtgggcagcctgaacatcggcgacgtgcagctggagaagccctag

SEQ ID NO: 209059 - protein, 125 aa, Artificial Sequence
  derived and/or modified sequence
MARLALSPVPSHWMVALLLLLSAEPVPAARSEDRYRNPKGFSTLAQLKQRNTLKDGIIMIQTLLIILFIIVPIFLLLDKDDSKAGMEEDHTYEGLDIDQTATYEDIVTLRTGEVKWSVGEHPGQE

SEQ ID NO: 209060 - DNA, 378 bp, Artificial Sequence
  derived and/or modified sequence
atggcccgacttgctcttagtccggttcctagccactggatggtggccctgctgctcctgctgtccgctgaacctgtcccggccgcaagatcggaggatcgatatcgtaaccccaaggggtttagtacgctggctcagctgaagcagagaaacaccttgaaagatggcattattatgatccagaccctgctcatcattcttttcattatcgtgcccatctttttgcttctcgataaagacgacagtaaagcaggtatggaggaagaccatacatacgagggtttggacatagatcagacagcaacctatgaagatattgtaaccctgcgaaccggggaagtgaagtggagcgtgggagagcatcccggccaggaatag

SEQ ID NO: 209061 - DNA, 378 bp, Artificial Sequence
  derived and/or modified sequence
atggcccggctggccctgagccctgtgcccagccactggatggtggccctgctgctgctgctgtctgctgagcctgtgcctgctgcccggtctgaggaccgctacagaaaccccaagggcttcagcaccctggcccagctgaagcagaggaacaccctgaaggatggcatcatcatgatccagaccctgctgatcatcctcttcatcatcgtgcccatcttcctgctgctggacaaggatgacagcaaggccggcatggaggaggaccacacctatgagggcctggacatcgaccagacagccacctatgaggacatcgtgaccctgaggactggagaggtgaagtggagcgtgggggagcaccctggccaggagtag

SEQ ID NO: 209062 - DNA, 378 bp, Artificial Sequence
  derived and/or modified sequence
atggcccggctggccctgagccccgtgcccagccactggatggtggccctgctgctgctgctgagtgccgagccagttccagctgcacgcagtgaggaccgctaccgaaatccaaagggatttagcaccctggcccagctgaagcaacggaatacactgaaagacggtatcatcatgatccaaactcttcttattatactctttatcattgtgccaatcttcctcctcctcgacaaggacgattctaaggcgggcatggaagaggaccatacttatgaaggcctggacatcgatcagacagcaacgtacgaggacatagtgactctccgaacgggtgaggtcaagtggtcggttggagagcatcccgggcaggaatag

SEQ ID NO: 209063 - DNA, 378 bp, Artificial Sequence
  derived and/or modified sequence
atggcaagactcgcactctctccggtgccctcccactggatggtggccttgctccttctcctcagtgctgagcccgtgcccgctgccagaagcgaggacaggtataggaaccccaaaggctttagcacgctcgcgcaactgaagcagaggaacacactaaaggatgggatcattatgattcagacccttttaatcatcctctttatcatcgtgccgatatttctgctactggacaaggacgattccaaggccggaatggaagaggaccacacctacgaaggtcttgacatcgaccagactgccacttacgaagacatcgttactctgcgaactggagaggttaagtggtcagtgggggagcacccaggccaggagtag

SEQ ID NO: 209064 - DNA, 378 bp, Artificial Sequence
  derived and/or modified sequence
atggccaggctggcgttgtctcctgtgcccagccactggatggtggcgttgctgctgctgctctcagctgagccagtaccagcagccagatcggaggaccggtaccggaatcccaaaggattcagcaccttggcacagctgaagcagaggaacacgctgaaggatggtatcatcatgatccagacgctgctgatcatcctcttcatcatcgtgcctatcttcctgctgctggacaaggatgacagcaaggctggcatggaggaagatcacacctacgagggcctggacattgaccagacagccacctatgaggacatagtgacgctgcggacaggggaagtgaagtggtctgtaggtgagcacccaggccaggagtga

SEQ ID NO: 209065 - DNA, 378 bp, Artificial Sequence
  derived and/or modified sequence
atggccagactggccctgagccccgtgcccagccactggatggtggccctgctgctgctgctgagcgccgagcccgtgcccgccgccagaagcgaggacagatacagaaaccccaagggcttcagcaccctggcccagctgaagcagagaaacaccctgaaggacggcatcatcatgatccagaccctgctgatcatcctgttcatcatcgtgcccatcttcctgctgctggacaaggacgacagcaaggccggcatggaggaggaccacacctacgagggcctggacatcgaccagaccgccacctacgaggacatcgtgaccctgagaaccggcgaggtgaagtggagcgtgggcgagcaccccggccaggagtag

SEQ ID NO: 209066 - protein, 64 aa, Artificial Sequence
  derived and/or modified sequence
MDRWYLGGSPKGDVDPFYYDYETVRNGGLIFAGLAFIVGLLILLSRRFRCGGNKKRRQINEDEP

SEQ ID NO: 209067 - DNA, 513 bp, Artificial Sequence
  derived and/or modified sequence
gccactctccatccaggccccaggcaagcagcacctccctgctctcctgcactcctggacacaaccagcagctcctgccatggacaggtggtacctgggcggcagccccaagggggacgtggacccgttctactatgactatgagaccgttcgcaatgggggcctgatcttcgctggactggccttcatcgtggggctcctcatcctcctcagcagaagattccgctgtgggggcaataagaagcgcaggcaaatcaatgaagatgagccgtaacagcagcctcggcggtgccacccactgcactggggccagctgggaagccaagcatggccctgcctctggcgcctccccttcttccctgggctttagacctttgtccccgtcactgccagcgcttgggctgaaggaagctccagactcaatgtgacccccaggtggcatcgccaactcctgcctcgtgccacctcatgcttataataaagccggcgtcagagaccgctgcttccctcacc

SEQ ID NO: 209068 - DNA, 672 bp, Artificial Sequence
  derived and/or modified sequence
ccagccccgcagctgctccccatctctctgccaactgccagaacgacacaggaagctggggccggtgcctcagtgtgaagagggggagtgccactctccatccaggccccaggcaagcagcacctccctgctctcctgcactcctggacacaaccagcagctcctgccatggacaggtggtacctgggcggcagccccaagggggacgtggacccgttctactatgactatgagaccgttcgcaatgggggcctgatcttcgctggactggccttcatcgtggggctcctcatcctcctcagcagaagattccgctgtgggggcaataagaagcgcaggcaaatcaatgaagatgagccgtaacagcagcctcggcggtgccacccactgcactggggccagctgggaagccaagcatggccctgcctctggcgcctccccttcttccctgggctttagacctttgtccccgtcactgccagcgcttgggctgaaggaagctccagactcaatgtgacccccaggtggcatcgccaactcctgcctcgtgccacctcatgcttataataaagccggcgtcagagaccgctgcttccctcacctgcctgcctgtctccctcctctgtcaccaccagcctctccaagctcaagtacaaatacagccgggtctca

SEQ ID NO: 209069 - DNA, 195 bp, Artificial Sequence
  derived and/or modified sequence
atggacaggtggtatctggggggttcacctaagggggacgtggaccccttttattatgactatgagacggtaaggaatggcgggctcatttttgctggactggcttttattgttggtcttttaatcctgctctctagacgctttcgttgtggaggtaataaaaagcgacgccaaatcaacgaagacgagccttag

SEQ ID NO: 209070 - DNA, 195 bp, Artificial Sequence
  derived and/or modified sequence
atggacagatggtacctgggaggttctccaaagggtgatgtggatccattctattatgactacgaaaccgtcagaaatggagggctcatttttgcaggcctggcatttatcgtcggtctgctcattttgctgtctcgccggtttagatgtgggggcaacaaaaagcggcgtcaaatcaatgaggatgaaccgtag

SEQ ID NO: 209071 - DNA, 195 bp, Artificial Sequence
  derived and/or modified sequence
atggaccgctggtacctgggcggcagccccaagggagatgtggaccccttctactatgactatgaaacagtgagaaatggaggcctcatctttgctggcctggccttcatcgtgggcctgctgatcctgctgagccgccgcttccgctgtggcggcaacaagaagaggcggcagatcaatgaagatgagccctag

SEQ ID NO: 209072 - DNA, 195 bp, Artificial Sequence
  derived and/or modified sequence
atggaccggtggtacctgggcggcagccccaagggcgacgtggaccctttttactacgactatgaaacagtccgcaacggcggactcattttcgcgggcctggctttcatcgttggcttactgatcctgctgagcaggcgtttcaggtgtggcgggaacaagaaacgcagacaaataaacgaggatgaaccctag

SEQ ID NO: 209073 - DNA, 195 bp, Artificial Sequence
  derived and/or modified sequence
atggaccggtggtacctgggcggcagccccaagggcgacgtggacccattctattacgactacgagaccgtccgaaatggaggattgatattcgccggactggcatttatcgtgggacttctcatcttgctgtctcggcgcttcaggtgtggtgggaataagaagcgaagacaaataaacgaggatgagccctag

SEQ ID NO: 209074 - DNA, 195 bp, Artificial Sequence
  derived and/or modified sequence
atggatcgatggtacctgggaggttcaccaaagggggacgtggatcccttttattatgattatgagacggtccgtaatggtgggctgatctttgctggcctggcattcatcgtaggcctgctcatactgttgagtagaaggttccgatgcggaggaaataaaaaacgacggcagattaacgaagatgagccttag

SEQ ID NO: 209075 - DNA, 195 bp, Artificial Sequence
  derived and/or modified sequence
atggacaggtggtatctgggaggtagtccaaagggagacgtggacccattctactacgattacgaaactgtacgtaatggcggattgatattcgctggactggcgttcatcgtagggttgctgattcttttgtctcgcaggtttaggtgcggaggcaacaagaaaaggaggcagataaacgaggatgagccatag

SEQ ID NO: 209076 - DNA, 195 bp, Artificial Sequence
  derived and/or modified sequence
atggacagatggtacctgggcggcagccccaagggcgacgtggaccccttctactacgactacgagaccgtgagaaacggcggcctgatcttcgccggcctggccttcatcgtgggcctgctgatcctgctgagcagaagattcagatgcggcggcaacaagaagagaagacagatcaacgaggacgagccctag

SEQ ID NO: 209077 - protein, 579 aa, Artificial Sequence
  derived and/or modified sequence
MSSCRYNGGVMRPLSNLSASRRNLHEMDSEAQPLQPPASVGGGGGASSPSAAAAAAAAVSSSAPEIVVSKPEHNNSNNLALYGTGGGGSTGGGGGGGGSGHGSSSGTKSSKKKNQNIGYKLGHRRALFEKRKRLSDYALIFGMFGIVVMVIETELSWGAYDKASLYSLALKCLISLSTIILLGLIIVYHAREIQLFMVDNGADDWRIAMTYERIFFICLEILVCAIHPIPGNYTFTWTARLAFSYAPSTTTADVDIILSIPMFLRLYLIARVMLLHSKLFTDASSRSIGALNKINFNTRFVMKTLMTICPGTVLLVFSISLWIIAAWTVRACERYHDQQDVTSNFLGAMWLISITFLSIGYGDMVPNTYCGKGVCLLTGIMGAGCTALVVAVVARKLELTKAEKHVHNFMMDTQLTKRVKNAAANVLRETWLIYKNTKLVKKIDHAKVRKHQRKFLQAIHQLRSVKMEQRKLNDQANTLVDLAKTQNIMYDMISDLNERSEDFEKRIVTLETKLETLIGSIHALPGLISQTIRQQQRDFIEAQMESYDKHVTYNAERSRSSSRRRRSSSTAPPTSSESS

SEQ ID NO: 209078 - protein, 441 aa, Artificial Sequence
  derived and/or modified sequence
MSSCRYNGGVMRPLSNLSASRRNLHEMDSEAQPLQPPASVGGGGGASSPSAAAAAAAAVSSSAPEIVVSKPEHNNSNNLALYGTGGGGSTGGGGGGGGSGHGSSSGTKSSKKKNQNIGYKLGHRRALFEKRKRLSDYALIFGMFGIVVMVIETELSWGAYDKASLYSLALKCLISLSTIILLGLIIVYHAREIQLFMVDNGADDWRIAMTYERIFFICLEILVCAIHPIPGNYTFTWTARLAFSYAPSTTTADVDIILSIPMFLRLYLIARVMLLHSKLFTDASSRSIGALNKINFNTRFVMKTLMTICPGTVLLVFSISLWIIAAWTVRACERYHDQQDVTSNFLGAMWLISITFLSIGYGDMVPNTYCGKGVCLLTGIMGAGCTALVVAVVARKLELTKAEKHVHNFMMDTQLTKRVSYYPYIFKENIIVIFSVLGNMA

SEQ ID NO: 209079 - DNA, 1740 bp, Artificial Sequence
  derived and/or modified sequence
atgtcctcgtgtcgttacaatggcggggtaatgagaccactgtctaacctctcagcaagccggaggaacctccacgaaatggattccgaggcacagccccttcagccaccagcttctgtaggcggtggcggtggagcttcctccccctcggccgcagcagcagccgccgctgctgtgtcatccagtgcacccgaaattgtcgtgtctaagccggagcacaacaattctaacaatcttgcactctacggtaccggaggaggcggtagcactggcggaggggggggagggggaggtagtgggcacgggtcctcctccggaactaaaagttctaaaaagaagaaccagaatattgggtataagctcggccacagaagagccctcttcgaaaaacggaagagactgtcggattacgccctcatctttggaatgttcgggatcgtggtgatggtgattgaaacagagctgtcttggggcgcctatgataaggcttccctctatagcctagcccttaaatgcttaatctctttgtccacaattatcctgcttgggttgattattgtgtatcacgctagagagatccagctgtttatggtggacaatggtgccgatgactggcggatcgctatgacttacgaacgcatcttttttatttgcctggaaatcttggtgtgtgcaatacaccctattcccggtaattacacattcacctggacagctcggctggctttttcctatgcaccctccactacaactgctgacgtggatatcattctgagtatcccaatgtttctgaggctgtacctgattgcacgagtgatgctgctgcatagcaagctatttactgatgcttcctctagatctattggagctctgaataagatcaatttcaatacccggttcgtaatgaaaaccctgatgaccatctgtcccggaaccgtccttctcgtcttcagtatctccctgtggataatagcggcctggacagtgcgggcttgcgagcgttatcacgatcagcaggatgtgacttcaaacttcctgggcgccatgtggctcatatccatcactttcctgagtattggatacggggatatggtgcccaatacatattgcggaaagggagtctgtctgttaactggtatcatgggcgcaggttgtaccgctctcgtggtggcagttgttgctcgcaaacttgagctcaccaaagcagaaaaacacgtgcataatttcatgatggatacccagctgactaagcgagtgaaaaatgctgcagcaaatgtgctgcgtgaaacttggctgatctacaaaaataccaagctagttaagaaaattgatcacgccaaagtgcgcaaacaccaaagaaaatttttgcaagcgatacaccagttgagatcagtcaagatggagcagagaaaactcaatgaccaagctaacaccctggttgatttggcgaagacgcagaatataatgtacgacatgatcagtgatcttaatgagagatccgaggactttgagaagagaatagtcaccttagaaactaagctagagacgctgatcgggtccattcacgctctgcccgggcttatctcccaaaccattaggcagcagcagcgcgacttcatagaagcccagatggagtcctacgataaacacgtcacatacaacgcagagcgctccaggagtagcagcagaaggaggcgctctagcagtaccgcccctccaaccagctccgaaagctcctag

SEQ ID NO: 209080 - DNA, 1326 bp, Artificial Sequence
  derived and/or modified sequence
atgtcctcctgtagatacaatggtggagtaatgagacccctgagcaatcttagcgcctctcgccgcaatctgcacgagatggactcagaggcccagccgttgcaaccacccgcgtcagtgggaggcggggggggagctagctccccctccgccgcagctgctgccgccgcggcagtgagctcctctgcgcctgaaattgttgtgagcaaaccagaacacaacaattccaataatctggcgctgtatgggaccggcggaggtggaagcaccggcggtggcggtggggggggcggaagtggacacggctcttcgtccggtacgaagagtagcaaaaaaaagaaccaaaatatcggctacaaactgggacacagacgcgctttattcgaaaagaggaaaagactgtcggactatgctctgatatttggtatgttcggaattgtggtcatggtgatcgaaactgagttatcctggggggcttacgacaaggcatctctgtattccctcgcacttaaatgcctgataagcttaagcacgatcatattgttaggattgataatcgtgtaccacgcaagagaaatccagcttttcatggtggacaatggagccgacgactggcgaattgcaatgacttacgagcgcatcttcttcatatgtctcgagatactggtgtgtgccatccaccccatcccggggaactacacctttacttggaccgccagactcgcattctcatatgcacctagtacaacgaccgcagacgtggatatcatcctctcaatcccaatgttcttgcggctttacttgatcgcaagagtgatgttattgcattccaaactgttcacagatgccagcagtagatctattggcgccttaaataaaatcaacttcaataccagattcgtaatgaagaccttgatgaccatctgccccggaacggtgctgctggtgtttagtatatcactgtggatcatcgcagcctggaccgtaagggcctgcgaacgatatcatgatcagcaggacgtgacttcaaattttttgggggccatgtggttgattagtattacttttctgagcatcgggtatggtgatatggtgccaaatacatactgcgggaagggagtctgccttttaactggcatcatgggggccggctgtactgccctggtggtggccgtggttgctaggaagttggagctgacaaaagcagaaaagcacgttcacaacttcatgatggatactcagctcactaaacgggtctcatactatccctacatcttcaaagagaatatcatagtcattttcagtgtgttgggcaatatggcttag

SEQ ID NO: 209081 - DNA, 1740 bp, Artificial Sequence
  derived and/or modified sequence
atgagcagctgccgctacaatggaggagtgatgaggcccctgagcaacctgagcgccagcagaagaaacctgcacgagatggattctgaggcccagcccctgcagcccccagcctctgtgggcggcggcggcggggccagcagccccagcgctgctgctgctgctgctgctgctgtgagcagcagcgcccctgagatcgtggtgtccaagccagagcacaacaacagcaacaacctggccctgtatggcaccggcggcggcggcagcactggaggcggcggcggcggcggcggcagcggccacggcagcagcagcggcaccaagagcagcaagaagaagaaccagaacatcggctacaagctgggccaccggcgggccctgtttgagaagaggaagaggctgagtgactatgccctgatcttcggcatgtttggcatcgtggtgatggtgattgaaacagagctgtcctggggcgcctatgacaaggccagcctgtacagcctggccctgaagtgcctgatcagcctgagcaccatcatcctgctgggcctcatcatcgtgtaccacgcccgggagatccagctgttcatggtggacaacggggctgatgactggagaattgccatgacctatgagcgcatcttcttcatctgcctggagatcctggtgtgtgccatccaccccatccctggcaactacaccttcacctggacagcccggctggccttctcctatgcccccagcaccaccacagcagatgtggacatcatcctgagcatccccatgttcctgcggctgtacctgattgcccgggtgatgctgctgcacagcaagctgttcacagatgccagcagccgcagcatcggggccctgaacaagatcaacttcaacaccaggtttgtgatgaagaccctgatgaccatctgccccggcaccgtgctgctggtgttcagcatcagcctgtggatcatcgccgcctggacagtgcgggcctgtgagcgctaccatgaccagcaggatgtgaccagcaacttcctgggcgccatgtggctgatcagcatcaccttcctgagcatcggctatggagacatggtgcccaacacctactgtgggaagggcgtgtgcctgctgaccggcatcatgggcgccggctgcacagccctggtggtggccgtggtggccaggaagctggagctgaccaaggccgagaagcacgtgcacaacttcatgatggacacccagctgaccaagagggtgaagaatgctgctgccaacgtgctgcgggagacctggctgatctacaagaacaccaagctggtgaagaagattgaccacgccaaggtgaggaagcaccagaggaagttcctgcaggccatccaccagctgcggtctgtgaagatggagcagaggaagctgaatgaccaggccaacaccctggtggacctggccaagacccagaacatcatgtatgacatgatcagtgacctgaatgaaagaagtgaagattttgagaagagaattgtgaccctggagaccaagctggagaccctcatcggcagcatccacgccctgcccggcctcatcagccagaccatccggcagcagcagagggacttcatcgaggcccagatggagagctatgacaagcacgtgacctacaatgctgagaggagccgcagcagcagcagaagaagaagaagcagcagcacagccccacccaccagcagcgagagcagctag

SEQ ID NO: 209082 - DNA, 1326 bp, Artificial Sequence
  derived and/or modified sequence
atgagcagctgccgctacaatggaggagtgatgaggcccctgagcaacctgagcgccagcagaagaaacctgcacgagatggattctgaggcccagcccctgcagcccccagcctctgtgggcggcggcggcggggccagcagccccagcgctgctgctgctgctgctgctgctgtgagcagcagcgcccctgagatcgtggtgtccaagccagagcacaacaacagcaacaacctggccctgtatggcaccggcggcggcggcagcactggaggcggcggcggcggcggcggcagcggccacggcagcagcagcggcaccaagagcagcaagaagaagaaccagaacatcggctacaagctgggccaccggcgggccctgtttgagaagaggaagaggctgagtgactatgccctgatcttcggcatgtttggcatcgtggtgatggtgattgaaacagagctgtcctggggcgcctatgacaaggccagcctgtacagcctggccctgaagtgcctgatcagcctgagcaccatcatcctgctgggcctcatcatcgtgtaccacgcccgggagatccagctgttcatggtggacaacggggctgatgactggagaattgccatgacctatgagcgcatcttcttcatctgcctggagatcctggtgtgtgccatccaccccatccctggcaactacaccttcacctggacagcccggctggccttctcctatgcccccagcaccaccacagcagatgtggacatcatcctgagcatccccatgttcctgcggctgtacctgattgcccgggtgatgctgctgcacagcaagctgttcacagatgccagcagccgcagcatcggggccctgaacaagatcaacttcaacaccaggtttgtgatgaagaccctgatgaccatctgccccggcaccgtgctgctggtgttcagcatcagcctgtggatcatcgccgcctggacagtgcgggcctgtgagcgctaccatgaccagcaggatgtgaccagcaacttcctgggcgccatgtggctgatcagcatcaccttcctgagcatcggctatggagacatggtgcccaacacctactgtgggaagggcgtgtgcctgctgaccggcatcatgggcgccggctgcacagccctggtggtggccgtggtggccaggaagctggagctgaccaaggccgagaagcacgtgcacaacttcatgatggacacccagctgaccaagagggtgtcctactacccctacatcttcaaggagaacatcatcgtcatcttctctgtgctgggcaacatggcctag

SEQ ID NO: 209083 - DNA, 1740 bp, Artificial Sequence
  derived and/or modified sequence
atgagcagctgccggtacaacggcggcgtgatgcggcccctgagcaatctgagcgcgagcagaaggaacttgcatgaaatggactccgaagcccagcccctccagcccccagcctctgtaggcgggggcggaggtgccagctccccgagcgctgcggcggcagccgctgccgccgtgtcttccagcgcccctgagatcgttgtttcaaagccagaacacaacaattcaaacaatctcgccctatacgggacgggggggggaggatctaccggcgggggaggaggcggcggtgggtccggccacggctctagtagcggtactaaaagttccaaaaagaagaatcagaacattgggtacaaactcgggcacaggagggccctgttcgaaaaaagaaagcgtctttcagattatgctttgattttcggaatgttcggcattgtggtaatggttattgagaccgaactgtcttggggtgcttatgacaaggcctccttgtatagcctggccctgaagtgtctgatttccttatctactataatcctgcttggcctgattattgtataccatgcgcgcgagatacaactatttatggtggacaacggcgctgatgactggcgtattgctatgacctatgagcgtattttcttcatctgtttggagatactggtatgtgcaattcaccccatccccgggaattatacattcacttggacagctcgtctggcgttctcctacgccccttcaaccaccaccgctgatgtggatattatcctgagtattccgatgttcctgaggctttatctgattgcaagagtcatgcttctgcattcaaagctcttcacggatgcttctagcagaagcattggcgcccttaataaaatcaactttaacacgcgattcgtaatgaaaacgcttatgaccatctgcccgggtactgttctgcttgtgttttctatctccctgtggataatagctgcatggaccgttagggcttgtgagcgatatcacgatcagcaagacgtgacctcaaatttcctgggagccatgtggttaattagcattacatttcttagtataggatacggggatatggtgccaaacacctactgtggaaaaggggtgtgcctgttgacagggataatgggagctgggtgcactgctctcgtagtcgcagtagtcgcacgcaagctggaactgaccaaagctgagaagcacgttcacaacttcatgatggacactcaacttacgaagcgcgtgaagaacgctgctgcaaacgtgctgagagagacctggttgatttataagaacaccaagctcgtaaaaaagatcgaccacgccaaggtgagaaaacaccagaggaaatttttacaggccattcatcaactgaggtcagttaaaatggaacaacgaaaattaaacgatcaggccaatacactggtggatttggcgaagacccagaacattatgtatgacatgataagcgacttgaacgagcgcagcgaggatttcgaaaagagaattgtgactctggagaccaaacttgagaccttgatcgggtctatccatgccctgcccggccttatttctcaaacaattagacagcagcagcgagatttcatcgaggcccagatggagagttatgacaaacacgtgacttacaacgcagagcggtctaggagttctagtcggcggcgaagatcttcctcaactgcccctccgacaagcagcgagtcaagttag

SEQ ID NO: 209084 - DNA, 1326 bp, Artificial Sequence
  derived and/or modified sequence
atgagcagctgccggtacaacggcggcgtgatgcggcccctgagcaacctgagcgcctcaaggagaaacctccacgagatggactccgaggcccaacctctgcaaccccccgcgtctgtgggcggcggcgggggagccagtagtcccagcgcagcggctgctgctgctgccgctgtatctagctccgctcctgaaatcgtcgtcagcaaaccagagcacaataattccaataacctggccctgtacggcactggtggaggagggtcgaccggaggcggtggaggtggcggcggtagtggtcacggaagtagttctggcactaagagcagcaagaaaaaaaatcagaatatcggctacaagttaggtcaccggcgcgccctgtttgagaaacgcaagcggctgtccgattacgctctaatcttcggcatgtttgggatcgtagtcatggtgattgagacggagctctcatggggagcctacgacaaggcctccctgtattcactcgccctcaagtgcctcatatcattgtctactatcatcctgttgggcttgattattgtgtatcatgcaagggagatccagttgttcatggttgacaacggggctgacgattggagaattgccatgacctacgagcggatttttttcatctgcctggagatcctcgtgtgcgccattcacccgatccccggaaattatactttcacctggacagcccggttagctttttcttatgcaccttccactaccaccgccgatgtcgacatcattctgtccatccccatgtttctgaggctctatctgattgcgcgggtgatgcttctacacagtaagctattcaccgacgcatcgagcaggtctattggagctctaaataagattaactttaacacccgctttgtaatgaagaccctgatgactatctgtccggggaccgtgctgctggttttctccatatctctttggatcattgccgcttggacagtccgagcctgcgaacgttaccacgaccaacaagatgtcaccagcaactttctgggtgcaatgtggctcatttccattaccttcctatccatcggctatggtgatatggtccctaatacgtattgtggcaaaggggtatgcctactcaccgggatcatgggtgctggatgtaccgcactcgttgtggcagttgtggcccgaaagctggagctcactaaagccgaaaagcatgtccacaattttatgatggacacacagctgactaaacgcgttagttactacccctacattttcaaagagaacatcatcgttattttctccgtactgggcaacatggcatag

SEQ ID NO: 209085 - DNA, 1473 bp, Artificial Sequence
  derived and/or modified sequence
cttcaacactgtggaagctttgttctttcgctcttttgcaataaatcttgctactgctcactctttgggtccacactgcctttatgagctgtaacactcaccgcgaaaggtctgcagcttcactcctgaagccagcgagcccacgagcccacagggaggaatgaacaactccagatgcaccgccttaagagctgtaacactcacggcgaaggtctgcagcttcactcctgagccagcgagaccaggaacccaccagaaggaagaaactccgaacacatccgaacatcagaaggaacaaactccagacggcgccaccttaagagctgtaacactcaccgccagggtccggggcttcgttcttgaagtcagtgagaccaagaacccaccaattccggacgcagtaccatgatcaacaggatgttactagcaacttccttggagcgatgtggttgatatcaataacttttctctccattggttatggtgacatggtacctaacacatactgtggaaaaggagtctgcttacttactggaattatgggtgctggttgcacagccctggtggtagctgtagtggcaaggaagctagaacttaccaaagcagaaaaacacgtgcacaatttcatgatggatactcagctgactaaaagagtaaaaaatgcagctgccaatgtactcagggaaacatggctaatttacaaaaatacaaagctagtgaaaaagatagatcatgcaaaagtaagaaaacatcaacgaaaattcctgcaagctattcatcaattaagaagtgtaaaaatggaacagaggaaactgaatgaccaagcaaacactttggtggacttggcaaagacccagaacatcatgtatgatatgatttctgacttaaacgaaaggagtgaagacttcgagaagaggattgttaccctggaaacaaaactagagactttgattggtagcatccacgccctccctgggctcataagccagaccatcaggcagcagcagagagatttcattgaggctcagatggagagctacgacaagcacgtcacttacaatgctgagcggtcccggtcctcgtccaggaggcggcggtcctcttccacagcaccaccaacttcatcagagagtagctagaagagaataagttaaccacaaaataagactttttgccatcatatggtcaatattttagcttttattgtaaagcccctatggttctaatcagcgttatccgggttctgatgtcagaatcctgggaacctgaacactaagttttaggccaaaatgagtgaaaactctttttttttctttcagatgcacagggaatgcacctattattgctatatagattgttcctcctgtaatttcactaactttttattcatgcacttcaaacaaactttactactacattatatgatatataataaaaaaagttaatttctgcacatactcgtttggtcacttg

SEQ ID NO: 209086 - DNA, 1740 bp, Artificial Sequence
  derived and/or modified sequence
atgtcttcttgccggtacaatggaggggtcatgaggcctctgtctaacctttctgcctctaggaggaacctccacgagatggattccgaagcacagcccctgcagcccccagcatcagtcggcggtggcggaggggcttctagcccatcagcagctgctgccgctgcagccgctgtgtccagttccgcccctgaaatcgttgtttctaagcctgaacacaacaacagcaataacctggccctctatggaaccggaggaggtggctccacaggaggcggaggaggtggagggggttcaggtcatggaagcagtagcggcactaagagcagtaagaaaaagaatcagaacattggatataaacttggccaccgtagagcattgtttgagaagcgtaaacggctaagtgactacgccctaatatttggaatgtttggtattgtggttatggtgatcgaaactgaactgagttggggggcatatgacaaagccagcctgtactccctggctctgaagtgcctgatcagtttgagcactattatcctgcttggacttatcatcgtttaccatgccagagaaattcagctgttcatggtggacaacggcgctgatgactggcgcattgccatgacgtacgagcgcattttctttatctgtctggagatactggtgtgtgctattcaccccattccaggcaactacaccttcacttggacagccaggctggcctttagttacgccccttcaaccacaaccgctgatgttgacataattttgtccatacccatgtttcttcgactgtacctgatagccagagttatgctgctgcattccaagctttttactgatgcctcctctaggtcaattggggcattaaataaaattaactttaacacccgcttcgtgatgaaaactctcatgactatatgcccgggtaccgtactcttggtattttctatatcactctggatcatcgctgcctggaccgttagggcctgcgagaggtaccacgatcaacaggatgtgacatcaaacttccttggggcaatgtggctgatcagtatcacgttcttatctattggatacggcgacatggtgccaaatacgtattgcggcaagggtgtatgcttgctaacaggaattatgggcgcaggatgtacggcactagtggtggctgtggttgctcgtaaacttgagttgacaaaagcagagaagcacgtccacaactttatgatggacactcagcttaccaaacgtgtgaaaaacgccgcagccaatgtccttcgagaaacctggctgatctataagaacacaaagttggtgaaaaagatcgaccatgcgaaagtcagaaagcaccagcggaagttcctgcaggcaattcaccaactgagaagcgttaaaatggaacaacgtaagctcaacgatcaagccaacaccctggttgacctcgcgaaaactcagaatatcatgtacgatatgatttctgacctgaatgagcgatccgaagactttgaaaagcgtattgtaaccctagaaacaaagctcgaaacattgatcggctctattcacgctctcccaggtctgataagccaaaccatccgtcagcagcagagagacttcattgaagcacagatggaatcatatgataaacatgtgacttataatgctgagcgctccaggtccagtagcaggcggaggcgaagctctagcactgcgccacccacatcgtccgaaagtagctag

SEQ ID NO: 209087 - DNA, 1326 bp, Artificial Sequence
  derived and/or modified sequence
atgagctcatgccgctacaatggcggtgtcatgagaccattgtcgaatctttcagctagcaggcggaacctacacgagatggactctgaggcacaacctctacagccccctgcaagcgtcggcggaggcggaggtgcatcgagcccctcagcagccgcagcagccgcagccgctgtgtctagctctgccccagaaatcgtggtctcgaagcctgagcacaataatagtaataatctcgctctctatggtaccgggggaggcggtagcacgggagggggaggaggaggaggagggagtggccatggcagcagttccggaaccaaaagctctaagaaaaaaaaccagaacattggctacaagctggggcacaggcgcgctctgttcgagaaaagaaaacggctgtcagactatgccctcattttcggaatgttcggcatagttgtgatggtgatcgagaccgagctgtcctggggagcgtatgataaagcctctctctattccttggctctgaagtgtttaatcagcctgagtacaataattcttcttggactgattatagtctaccacgccagagaaattcagctcttcatggtggacaatggggcagacgactggcgcatcgccatgacatacgagcgtatcttctttatctgtttggagattctggtctgcgccattcaccctattcctggaaattatacctttacctggacggcccgtttggcattcagctatgctccgtccaccacaactgccgatgtcgacatcatactgtcaatcccgatgttcctgcgactgtacctgattgctcgcgtcatgctcctgcacagtaagctgttcaccgatgcgtcctcacgatcgatcggcgcattgaataaaatcaatttcaacactcggtttgtcatgaaaaccctgatgacgatctgccccggaacagtacttctcgtgttttcaatttctctctggataatcgctgcttggaccgtaagggcttgcgaacgataccatgatcagcaggacgtcacatcaaactttcttggcgcaatgtggttaattagtataacctttctaagtattgggtatggggatatggttcctaacacatattgcggcaagggagtgtgcctgcttacaggtatcatgggagccggttgtacagctctagtagtggcagtcgtcgcacgcaagctcgagctgaccaaggccgaaaaacatgtccataatttcatgatggatacccagctgaccaaacgggtgtcttactatccttatatattcaaagaaaacattatcgtcatcttctccgtgctcggaaatatggcttag

SEQ ID NO: 209088 - DNA, 1740 bp, Artificial Sequence
  derived and/or modified sequence
atgagcagctgcagatacaacggcggcgtgatgagacccctgagcaacctgagcgccagcagaagaaacctgcacgagatggacagcgaggcccagcccctgcagccccccgccagcgtgggcggcggcggcggcgccagcagccccagcgccgccgccgccgccgccgccgccgtgagcagcagcgcccccgagatcgtggtgagcaagcccgagcacaacaacagcaacaacctggccctgtacggcaccggcggcggcggcagcaccggcggcggcggcggcggcggcggcagcggccacggcagcagcagcggcaccaagagcagcaagaagaagaaccagaacatcggctacaagctgggccacagaagagccctgttcgagaagagaaagagactgagcgactacgccctgatcttcggcatgttcggcatcgtggtgatggtgatcgagaccgagctgagctggggcgcctacgacaaggccagcctgtacagcctggccctgaagtgcctgatcagcctgagcaccatcatcctgctgggcctgatcatcgtgtaccacgccagagagatccagctgttcatggtggacaacggcgccgacgactggagaatcgccatgacctacgagagaatcttcttcatctgcctggagatcctggtgtgcgccatccaccccatccccggcaactacaccttcacctggaccgccagactggccttcagctacgcccccagcaccaccaccgccgacgtggacatcatcctgagcatccccatgttcctgagactgtacctgatcgccagagtgatgctgctgcacagcaagctgttcaccgacgccagcagcagaagcatcggcgccctgaacaagatcaacttcaacaccagattcgtgatgaagaccctgatgaccatctgccccggcaccgtgctgctggtgttcagcatcagcctgtggatcatcgccgcctggaccgtgagagcctgcgagagataccacgaccagcaggacgtgaccagcaacttcctgggcgccatgtggctgatcagcatcaccttcctgagcatcggctacggcgacatggtgcccaacacctactgcggcaagggcgtgtgcctgctgaccggcatcatgggcgccggctgcaccgccctggtggtggccgtggtggccagaaagctggagctgaccaaggccgagaagcacgtgcacaacttcatgatggacacccagctgaccaagagagtgaagaacgccgccgccaacgtgctgagagagacctggctgatctacaagaacaccaagctggtgaagaagatcgaccacgccaaggtgagaaagcaccagagaaagttcctgcaggccatccaccagctgagaagcgtgaagatggagcagagaaagctgaacgaccaggccaacaccctggtggacctggccaagacccagaacatcatgtacgacatgatcagcgacctgaacgagagaagcgaggacttcgagaagagaatcgtgaccctggagaccaagctggagaccctgatcggcagcatccacgccctgcccggcctgatcagccagaccatcagacagcagcagagagacttcatcgaggcccagatggagagctacgacaagcacgtgacctacaacgccgagagaagcagaagcagcagcagaagaagaagaagcagcagcaccgccccccccaccagcagcgagagcagctag

SEQ ID NO: 209089 - DNA, 1326 bp, Artificial Sequence
  derived and/or modified sequence
atgagcagctgcagatacaacggcggcgtgatgagacccctgagcaacctgagcgccagcagaagaaacctgcacgagatggacagcgaggcccagcccctgcagccccccgccagcgtgggcggcggcggcggcgccagcagccccagcgccgccgccgccgccgccgccgccgtgagcagcagcgcccccgagatcgtggtgagcaagcccgagcacaacaacagcaacaacctggccctgtacggcaccggcggcggcggcagcaccggcggcggcggcggcggcggcggcagcggccacggcagcagcagcggcaccaagagcagcaagaagaagaaccagaacatcggctacaagctgggccacagaagagccctgttcgagaagagaaagagactgagcgactacgccctgatcttcggcatgttcggcatcgtggtgatggtgatcgagaccgagctgagctggggcgcctacgacaaggccagcctgtacagcctggccctgaagtgcctgatcagcctgagcaccatcatcctgctgggcctgatcatcgtgtaccacgccagagagatccagctgttcatggtggacaacggcgccgacgactggagaatcgccatgacctacgagagaatcttcttcatctgcctggagatcctggtgtgcgccatccaccccatccccggcaactacaccttcacctggaccgccagactggccttcagctacgcccccagcaccaccaccgccgacgtggacatcatcctgagcatccccatgttcctgagactgtacctgatcgccagagtgatgctgctgcacagcaagctgttcaccgacgccagcagcagaagcatcggcgccctgaacaagatcaacttcaacaccagattcgtgatgaagaccctgatgaccatctgccccggcaccgtgctgctggtgttcagcatcagcctgtggatcatcgccgcctggaccgtgagagcctgcgagagataccacgaccagcaggacgtgaccagcaacttcctgggcgccatgtggctgatcagcatcaccttcctgagcatcggctacggcgacatggtgcccaacacctactgcggcaagggcgtgtgcctgctgaccggcatcatgggcgccggctgcaccgccctggtggtggccgtggtggccagaaagctggagctgaccaaggccgagaagcacgtgcacaacttcatgatggacacccagctgaccaagagagtgagctactacccctacatcttcaaggagaacatcatcgtgatcttcagcgtgctgggcaacatggcctag

SEQ ID NO: 209090 - protein, 488 aa, Artificial Sequence
  derived and/or modified sequence
MASKILLNVQEEVTCPICLELLTEPLSLDCGHSLCRACITVSNKEAVTSMGGKSSCPVCGISYSFEHLQANQHLANIVERLKEVKLSPDNGKKRDLCDHHGEKLLLFCKEDRKVICWLCERSQEHRGHHTVLTEEVFKECQEKLQAVLKRLKKEEEEAEKLEADIREEKTSWKYQVQTERQRIQTEFDQLRSILNNEEQRELQRLEEEEKKTLDKFAEAEDELVQQKQLVRELISDVECRSQWSTMELLQDMSGIMKWSEIWRLKKPKMVSKKLKTVFHAPDLSRMLQMFRELTAVRCYWVDVTLNSVNLNLNLVLSEDQRQVISVPIWPFQCYNYGVLGSQYFSSGKHYWEVDVSKKTAWILGVYCRTYSRHMKYVVRRCANRQNLYTKYRPLFGYWVIGLQNKCKYGVFEESLSSDPEVLTLSMAVPPCRVGVFLDYEAGIVSFFNVTSHGSLIYKFSKCCFSQPVYPYFNPWNCPAPMTLCPPSS

SEQ ID NO: 209091 - DNA, 1467 bp, Artificial Sequence
  derived and/or modified sequence
atggccagcaagatcctgctgaacgtgcaggaggaggtgacctgccccatctgcctggagctgctgaccgagcccctgagcctggactgcggccacagcctgtgcagagcctgcatcaccgtgagcaacaaggaggccgtgaccagcatgggcggcaagagcagctgccccgtgtgcggcatcagctacagcttcgagcacctgcaggccaaccagcacctggccaacatcgtggagagactgaaggaggtgaagctgagccccgacaacggcaagaagagagacctgtgcgaccaccacggcgagaagctgctgctgttctgcaaggaggacagaaaggtgatctgctggctgtgcgagagaagccaggagcacagaggccaccacaccgtgctgaccgaggaggtgttcaaggagtgccaggagaagctgcaggccgtgctgaagagactgaagaaggaggaggaggaggccgagaagctggaggccgacatcagagaggagaagaccagctggaagtaccaggtgcagaccgagagacagagaatccagaccgagttcgaccagctgagaagcatcctgaacaacgaggagcagagagagctgcagagactggaggaggaggagaagaagaccctggacaagttcgccgaggccgaggacgagctggtgcagcagaagcagctggtgagagagctgatcagcgacgtggagtgcagaagccagtggagcaccatggagctgctgcaggacatgagcggcatcatgaagtggagcgagatctggagactgaagaagcccaagatggtgagcaagaagctgaagaccgtgttccacgcccccgacctgagcagaatgctgcagatgttcagagagctgaccgccgtgagatgctactgggtggacgtgaccctgaacagcgtgaacctgaacctgaacctggtgctgagcgaggaccagagacaggtgatcagcgtgcccatctggcccttccagtgctacaactacggcgtgctgggcagccagtacttcagcagcggcaagcactactgggaggtggacgtgagcaagaagaccgcctggatcctgggcgtgtactgcagaacctacagcagacacatgaagtacgtggtgagaagatgcgccaacagacagaacctgtacaccaagtacagacccctgttcggctactgggtgatcggcctgcagaacaagtgcaagtacggcgtgttcgaggagagcctgagcagcgaccccgaggtgctgaccctgagcatggccgtgcccccctgcagagtgggcgtgttcctggactacgaggccggcatcgtgagcttcttcaacgtgaccagccacggcagcctgatctacaagttcagcaagtgctgcttcagccagcccgtgtacccctacttcaacccctggaactgccccgcccccatgaccctgtgcccccccagcagctag

SEQ ID NO: 209092 - DNA, 1467 bp, Artificial Sequence
  derived and/or modified sequence
atggcttctaagattttgctcaacgtgcaagaggaggtgacttgtcctatttgtctcgagctgctgacagagcccttgtctctcgattgcggccactctctctgtcgagcctgcatcaccgtgtcaaacaaagaagccgtgactagcatgggaggaaagagtagctgccccgtttgtggaatctcatatagcttcgaacacctgcaggctaaccaacacttggctaacatcgtggagagacttaaggaagtgaaactttccccagataatggcaagaaacgggacctctgcgaccatcatggagaaaaactgctgctattttgcaaggaggacaggaaggtcatctgctggttgtgcgaaagatctcaggaacatcggggccaccatactgtgttgactgaagaagtatttaaggaatgccaggagaaactgcaggccgtactcaagcgacttaagaaggaagaagaagaagcggaaaaactggaagcggacattagggaggagaaaacatcctggaaatatcaagtgcagaccgagcgccaacgtatccagacagagttcgaccagctgcgaagtattctgaataacgaggagcagagagagctccaaagactggaagaagaagagaagaagaccctagataagttcgccgaagccgaggacgagcttgttcagcagaagcagcttgtgcgtgagctgatctccgacgtggaatgtagatcacagtggagtaccatggagctgctccaagacatgagtggaatcatgaagtggtccgaaatttggcgcctcaaaaagcctaaaatggtcagtaagaaactcaaaacagtgtttcacgcacccgacttgagtagaatgctgcagatgtttagggagctgaccgcagtccgatgttattgggtggatgtgacgctgaactcagtaaaccttaacctgaacctcgttctttctgaggaccaacggcaggtgatttctgtgcctatttggccgtttcagtgttataactacggtgtgctcgggtctcagtatttcagctctggtaagcactactgggaggtggacgtgtctaagaagaccgcttggattctgggcgtatattgccggacctattctagacatatgaagtacgtggtgagacggtgcgctaataggcagaatctctatacaaaataccgacctctctttgggtattgggtaatcggcctccagaacaaatgcaagtacggagtgtttgaagagagccttagcagtgatcctgaggtactgactctgtctatggctgtccctccatgtcgagtgggggtctttctggactatgaagccggaatcgtgtcattcttcaatgtcacatcacacggctctctgatttacaagttcagcaaatgctgtttttctcagccagtgtacccctatttcaacccctggaactgcccggccccaatgacgctttgcccaccctccagttag

SEQ ID NO: 209093 - DNA, 1467 bp, Artificial Sequence
  derived and/or modified sequence
atggctagcaaaatcttacttaatgttcaggaagaggtgacctgtccaatttgccttgaattgttaaccgaaccacttagtcttgactgcggacacagtctctgtagagcttgcatcactgtaagcaacaaggaagcggttacttccatggggggcaaatcttcttgcccagtttgtgggatatcctattcatttgaacatctgcaagcaaatcagcacctggccaacatagtggaacgcctgaaagaagtcaaactgagcccggataacggcaagaagagagacttatgcgaccatcacggcgaaaaactacttcttttttgcaaggaggacaggaaagtgatctgctggttgtgtgaaagatcacaggaacaccgggggcatcacaccgtgctaactgaggaggtcttcaaggaatgtcaggagaagttgcaggctgtacttaaacgcctgaaaaaagaggaggaggaggctgaaaaactcgaagcagatattcgggaggagaagacctcctggaagtaccaggtacagacagaacgccagagaatacaaactgaatttgatcaactgcgaagcattcttaataatgaagaacaaagggagctccagcggcttgaggaggaagagaagaagaccctggacaaatttgccgaggcggaggacgagcttgttcaacaaaagcagcttgtgcgagaattgatctcagacgtcgagtgtcggagccagtggagcacgatggagctccttcaagacatgtctggcatcatgaaatggtctgagatatggcgccttaagaagccaaaaatggtgagtaaaaagctcaagacggtgttccacgctcctgatctgagccgaatgctccagatgttcagagagcttactgcagtacgatgctattgggtggatgtgactctaaactccgtgaatttaaacctgaacctggtgcttagtgaagaccagaggcaggtcataagcgtgccaatctggccttttcagtgctacaactacggcgtgctcggttcacagtatttttctagtgggaagcattactgggaagtcgacgtatcgaagaaaacagcctggattttgggcgtttactgtcgcacttattctcgccacatgaaatacgtcgtccggcgttgtgccaaccggcagaacttatacaccaagtatcgaccactgttcgggtattgggtgattggcctacagaataagtgtaagtacggcgtgtttgaggagagcctgtcgagcgatccagaagtcctcacactgagcatggccgtgcctccttgcagggtaggtgtgtttctggactacgaagctggaattgtgagttttttcaatgtgacttctcacggcagtttgatctacaagttttctaagtgctgcttcagccagccagtctatccttatttcaacccatggaattgcccggctcctatgactctgtgccccccatccagctag

SEQ ID NO: 209094 - DNA, 1467 bp, Artificial Sequence
  derived and/or modified sequence
atggcgagcaagatactacttaatgtgcaagaggaagttacctgcccaatctgcctggaactgttaaccgagcccctctccctggattgtgggcactccctgtgtagagcttgtataacagtcagtaacaaggaggctgtgacctccatggggggaaagtccagttgcccagtctgtggaatcagctacagtttcgagcacctccaggctaatcagcatctggccaacatcgtggagcgtctgaaagaggtaaaactttcccctgacaatggaaaaaaaagagacctatgtgaccaccacggtgagaaattactcttgttttgtaaggaagatagaaaggttatttgttggctctgcgagcgctcgcaagagcacagggggcaccacaccgtcctaaccgaggaagtgttcaaggaatgccaggagaagttgcaggcggtcctaaaacggttaaagaaggaggaagaagaggccgagaagcttgaagccgacatcagggaagaaaaaacaagctggaaataccaggtacaaaccgagagacaacggattcagacagagttcgatcagttgagaagcatcctcaacaacgaagagcaacgagagctgcagcgactggaagaagaggaaaagaagaccctggataagttcgcagaggccgaggatgagcttgtgcagcaaaagcagctcgtccgcgaactgatcagcgacgtagagtgccggtcccaatggtcaacaatggaactccttcaggacatgtccggcatcatgaaatggtctgaaatctggcgtctgaaaaaaccaaaaatggtgtcaaagaaactgaagaccgtgtttcatgcccccgacttgagccgtatgctacagatgttccgcgaattaaccgccgttcgttgttattgggtggacgtgacactgaacagtgtgaatctcaacctcaacctggtattgtccgaggaccaacgacaggtgatctccgttcccatttggcctttccagtgttataactatggcgtcctgggtagccagtacttttccagcggcaagcactattgggaggtcgatgtgagtaagaagaccgcatggatactgggagtgtattgtagaacatactctcgccacatgaagtacgtggtgcgcaggtgtgccaacaggcagaatctgtatacaaaatatcgtccactcttcggctactgggtgattggcttacagaacaaatgtaagtacggcgtgttcgaggaatctttatcttccgaccccgaagtgctgaccctttccatggcagtccctccatgcagggttggggtcttcctggattacgaggctggcattgtttccttttttaatgttacaagccatggaagtttgatctataagttcagtaagtgttgtttctcacaacccgtttatccttacttcaacccatggaactgtccggccccgatgacactgtgtccaccttcttcgtag

SEQ ID NO: 209095 - DNA, 1467 bp, Artificial Sequence
  derived and/or modified sequence
atggccagcaagatcctgctgaatgtgcaggaggaggtgacctgccccatctgcctggagctgctgacagagcccctgagcctggactgtggccacagcctgtgccgggcctgcatcaccgtgagcaacaaggaggccgtgacctccatgggcggcaagagcagctgccctgtgtgtggcatctcctacagctttgagcacctgcaggccaaccagcacctggccaacatcgtggagcggctgaaggaggtgaagctgagcccagacaacgggaagaagagggacctgtgtgaccaccacggggagaagctgctgctcttctgcaaggaggacaggaaggtgatctgctggctgtgtgagaggagccaggagcaccggggccaccacacagtgctgacagaggaggtgttcaaggagtgccaggagaagctgcaggccgtgctgaagaggctgaagaaggaggaggaggaggccgagaagctggaggccgacatccgggaggagaagacctcctggaagtaccaggtgcagacagagcggcagaggatccagacagaatttgaccagctgcggagcatcctgaacaatgaggagcagcgggagctgcagaggctggaggaggaggagaagaagaccctggacaagtttgctgaggccgaggatgagctggtgcagcagaagcagctggtgcgggagctgatcagtgatgtggagtgccgcagccagtggagcaccatggagctgctgcaggacatgagcggcatcatgaagtggagcgagatctggaggctgaagaagcccaagatggtgtccaagaagctgaagacagtgttccacgccccagacctgagcaggatgctgcagatgttccgggagctgacagctgtgcgctgctactgggtggatgtgaccctgaacagcgtgaacctgaacctgaacctggtgctgtctgaggaccagaggcaggtgatctctgtgcccatctggcccttccagtgctacaactacggcgtgctgggcagccagtacttcagcagcggcaagcactactgggaggtggatgtgtccaagaagacagcctggatcctgggcgtgtactgcaggacctacagccgccacatgaagtatgtggtgagaagatgtgccaaccggcagaacctgtacaccaagtaccggcccctgtttggctactgggtgattggcctgcagaacaagtgcaagtatggagtgtttgaggagagcctgagcagtgaccctgaggtgctgaccctgtccatggctgtgcccccctgccgggtgggcgtcttcctggactatgaagctggcatcgtgtccttcttcaacgtgaccagccacggcagcctcatctacaagttcagcaagtgctgcttcagccagcctgtgtacccctacttcaacccctggaactgcccagcccccatgaccctgtgcccccccagcagctag

SEQ ID NO: 209096 - DNA, 1467 bp, Artificial Sequence
  derived and/or modified sequence
atggccagcaagatcctgctgaacgtgcaggaggaggtgacctgcccgatttgtctggagcttctgacagaaccactgagcctggattgcgggcactccctctgcagagcatgtatcacagtgtccaacaaggaagcggtaaccagcatggggggcaagtctagttgtcctgtgtgcggaatatcatactccttcgaacacctgcaagctaaccagcacctcgccaatatcgttgagcggttgaaagaagtcaaactgtcacccgataacgggaagaagcgtgacctgtgtgatcatcacggtgagaaattgcttctcttctgtaaggaggaccggaaggtgatttgttggctctgtgaacgttcacaggaacacaggggacaccatactgtacttaccgaggaggtattcaaggaatgccaggagaagcttcaggcagtgctaaagagactgaagaaagaggaggaggaggctgagaaattggaggctgacatcagggaggagaagacttcatggaagtatcaggtgcagactgagagacagcggattcagacggaatttgaccagttgcggtcaattctcaataacgaggagcagagggagctgcaacgcctggaagaggaagagaaaaaaacactggataagtttgctgaagcggaagatgaactggtacagcagaaacagctcgtgagggagcttatatctgatgtggagtgcagaagtcaatggagcacaatggaacttctgcaagacatgtctggtatcatgaaatggagtgagatctggagactgaaaaaacctaagatggtctccaaaaagcttaagacggtcttccacgccccagatctgagccgaatgctgcagatgtttcgagagctcacggccgtgcgctgttactgggtagatgtcaccctcaactccgtgaatctcaaccttaacctggtcctgagtgaggatcagcgccaggtgataagcgtgcccatttggcctttccagtgctacaattacggggtacttggctctcaatatttctcctccgggaaacattactgggaggtcgacgtgtccaagaagactgcatggatcctgggggtctattgccgcacttatagtagacatatgaaatacgtggtgagaaggtgtgctaatcggcagaacttatacactaaatatcgcccgctctttgggtactgggtgattggactgcaaaacaaatgtaagtacggagttttcgaagaatcgctgtcaagcgatccagaggtcttgacactgagcatggcggtgcccccgtgcagagtgggggtttttctggactacgaagccggaatcgttagcttcttcaatgtaacctctcatggttcgctgatttacaaattttcaaagtgctgtttctctcagcctgtctacccttattttaatccctggaactgcccagccccaatgactctttgccctccctcttcctag

SEQ ID NO: 209097 - DNA, 1467 bp, Artificial Sequence
  derived and/or modified sequence
atggccagcaagatcctgctgaacgtgcaggaggaggtgacctgccctatttgccttgagctcttgacagagcctttgagtcttgactgcggccatagcctatgcagagcttgcatcacggtcagcaacaaagaggcagtgacctccatggggggcaagagctcctgtcctgtttgcggaatttcttacagttttgagcacctccaagccaaccagcatctcgcaaatatagttgagcgtctgaaagaagtgaaactgtcgcctgataatggaaagaagagagacctgtgtgatcaccatggcgagaaactgttgttattttgtaaagaggacaggaaggtgatctgttggctgtgtgaacgatcccaggagcacagaggtcaccacacggtgttaaccgaggaggtgtttaaggagtgtcaggagaagctccaggccgtgcttaagagactgaaaaaagaggaggaagaggcagaaaagctagaagccgacattagagaggagaaaaccagctggaagtaccaggttcagacagagcgccagagaattcagaccgagttcgatcaactgcgctccattctgaacaacgaagagcagcgggaacttcagcgtctggaggaggaggaaaagaagactcttgataaattcgcagaagcagaagacgaactcgtccagcagaagcaactggtgcgggaactgatctccgacgtggaatgccgatctcagtggtcaaccatggaactcctacaggacatgagtggtatcatgaagtggtctgagatttggagattgaagaaacccaagatggttagcaaaaagctgaaaacagtattccatgcacccgacctcagccgcatgttgcagatgttccgtgaactcacagctgtgcgatgttactgggtcgacgtgacactgaactccgtgaacctaaacctaaatttggtgttgagcgaggatcagagacaggtcatcagcgtccctatctggccattccagtgttataattatggagtgttaggctctcagtattttagctcaggcaagcactactgggaggtggacgtgtctaagaaaaccgcctggatcctgggggtgtattgccgaacctactcgaggcacatgaaatatgtggtgagacgatgcgcaaatagacagaacttgtacaccaagtataggcctctcttcggctactgggtaatcggtctgcagaataaatgcaaatatggtgtattcgaagaatccctaagctctgaccccgaagtgctaaccttgtctatggccgttcctccctgcagggtgggcgtttttctggattacgaagcaggaatcgtgtccttttttaatgttaccagtcacgggtccctgatttataagttcagtaaatgctgtttctcacagcctgtgtacccgtattttaacccctggaattgtccagcaccaatgacattgtgtcccccttcttcctag

SEQ ID NO: 209098 - DNA, 1467 bp, Artificial Sequence
  derived and/or modified sequence
atggccagcaagatcctgctgaacgtgcaggaggaggtgacctgccccatctgtttggagttactgaccgagccgctctcgttagattgcggccactctctgtgccgcgcatgtatcaccgtgagtaacaaggaagccgtaacctcaatgggtgggaaaagttcttgtcctgtgtgtggaatctcatactctttcgagcacctccaggcaaaccagcaccttgccaatatcgtcgaacggttaaaggaggttaaactctcccctgacaatggtaagaaacgtgacctttgcgaccaccacggagaaaagctcctgctcttctgcaaggaagaccggaaggtgatttgttggctctgcgaacgaagtcaggagcaccggggccatcacacagtgctaacggaggaagtctttaaagaatgccaggagaaactccaggcggtgttaaaacgtcttaagaaggaggaagaggaggcggaaaaacttgaggccgacataagggaggaaaagacgagttggaagtaccaggtgcagaccgagcgtcaaaggatccagacagaattcgatcagctgcggagtatccttaataacgaagagcagcgcgagctacagaggctcgaagaagaagagaagaaaactttggataagtttgccgaggccgaggacgaactagtgcaacagaagcagctagtacgtgaactcatatcagacgtggaatgtcggtctcagtggagtacgatggagctgctccaggacatgtccggtatcatgaagtggtcagagatctggcggttaaagaagcctaagatggtcagtaaaaaattgaagacggtgtttcacgcccccgatctgtcgcggatgcttcaaatgtttcgggagctcacagcagtgcgttgctactgggttgacgtgactttgaactctgtgaacttaaatctcaatttggtgttgagcgaagatcagcggcaagttatatcagttcccatctggccattccagtgttataactacggggtccttggcagccaatacttctcttcaggcaaacactactgggaggtcgatgttagtaagaagactgcctggatcctaggggtctactgtcggacatattcgaggcatatgaagtacgtcgtccgccggtgtgcaaatagacagaacctttatacaaagtatcgtccactcttcgggtactgggtcattgggctccagaataaatgtaagtacggcgtcttcgaggaatccttatcgtctgatccagaggtgctaacgctgtcaatggctgttccaccatgtagggtgggagtgttccttgattacgaggccggtattgtgtccttctttaatgtgacctcccacgggagcctgatatacaaattcagcaagtgttgttttagtcagccagtttacccgtactttaatccctggaattgccccgccccaatgactctgtgtcctccctcctcctag

SEQ ID NO: 209099 - DNA, 1467 bp, Artificial Sequence
  derived and/or modified sequence
atggcgtccaagatcctcctaaatgtgcaggaagaggtaacctgccctatatgcctcgaattgctcacagaacctctcagcttagactgcggccactctctgtgccgggcttgcattacagtgtccaataaagaagccgtcacgagcatgggtgggaaatccagctgccccgtttgtggtataagctattcctttgagcatttgcaggccaaccagcatcttgcgaatattgtggagcggctgaaggaggtcaagctaagtccggacaatggaaaaaagagggacctgtgcgatcaccatggcgagaaactgcttctgttctgcaaggaggaccgcaaggttatttgctggctgtgcgagcggagccaagagcacagagggcaccatactgtcctcactgaggaggtgttcaaagaatgtcaggaaaagctgcaggccgtgctgaaacggcttaagaaggaagaggaagaggccgagaaactagaggccgatatccgcgaagagaagacttcctggaagtatcaggtccagactgagcggcaaaggatacaaaccgaattcgatcaacttaggtccatccttaataatgaagagcagagagaactgcagcgtctggaagaggaagagaagaagaccctggataagttcgctgaagccgaggatgaactggtccagcagaaacagctggtgcgcgagcttatctcagatgtggaatgtcgttctcagtggtccacgatggaactgcttcaggatatgagcggaatcatgaaatggagtgagatttggcggctgaagaagcccaagatggtgtcaaagaagttgaaaacagtgtttcacgctccagatctcagtaggatgctgcagatgttccgggaactgaccgctgtgagatgctattgggtggatgtgaccctcaattcagtgaatctgaatctgaatcttgttctgtcagaggaccaacgacaagtcatatcagtgcccatctggccctttcagtgctataactacggagttctcgggagccagtacttcagttcaggaaagcattattgggaagttgacgtgtccaaaaagactgcctggatcctgggagtgtactgtagaacttactcaaggcatatgaagtatgtcgtaagaagatgcgccaaccggcaaaatttgtataccaagtaccggccactttttggatactgggttatcggtctgcagaataaatgcaaatacggagtgtttgaggagtctctctcgtcagacccggaggtacttactctgtcaatggctgtccccccatgtagagtcggtgtcttcctcgattatgaagctggtatcgtgtcattttttaacgtaacaagccacggatccctcatatacaagttcagcaaatgctgctttagccagccagtgtacccctactttaatccttggaactgcccagcaccaatgacattgtgtcctccgtctagctag

SEQ ID NO: 209100 - DNA, 1467 bp, Artificial Sequence
  derived and/or modified sequence
atggcgtccaagatcttgctcaatgtacaggaagaggtgacctgtcccatatgcctggaactcctgacggagccactgagcttggactgcggccacagcttgtgcagggcttgtattacagtgtcaaataaggaggccgttacgtctatgggtgggaaatcttcctgccctgtgtgtggcatctcttattcatttgagcacctgcaggccaatcaacacttggccaatatcgtagaacggctgaaggaagtcaagctatccccagacaatggcaagaaacgggacctctgtgatcatcatggcgagaagctgctgctcttttgcaaagaggacagaaaagttatctgctggctgtgtgagcggagccaggagcacagaggccaccacaccgtgctgacggaggaagtttttaaagagtgccaggaaaaactgcaggccgtcctaaagagacttaagaaggaggaggaggaagccgaaaaactggaagccgatattagggaggaaaaaacaagctggaagtatcaggtccagacagagcggcaaaggatccagacggagtttgaccaactgagatccatattgaataacgaggagcagcgggaactgcagcgcctcgaagaagaagagaagaagacgctagacaagttcgccgaggccgaggatgaactggtgcagcagaagcaactggttagagagctgattagcgacgtggagtgtcgatcccaatggagtactatggagcttcttcaggatatgagcggcataatgaagtggagcgaaatctggcgcctgaagaaacctaaaatggtgagtaaaaagctcaaaacagtgttccacgccccagacctgagcagaatgctccaaatgttcagagagttgaccgcggtgcggtgttactgggtggacgtgacactcaactccgttaacctgaatctcaacctggtgctttccgaggatcaacgacaggttatctccgtgcccatctggcccttccaatgttataactacggggttttaggtagtcagtatttctcttcgggcaaacactattgggaagttgacgtgagcaaaaaaactgcttggatccttggtgtgtactgcaggacctatagtagacacatgaaatatgttgtacgcaggtgtgcaaaccgccaaaatctgtacacaaagtacagaccgctgtttggatattgggtcatagggctgcagaacaagtgtaaatacggcgtttttgaggaatcactgagttcagatccagaagtgctcaccttatccatggcagtgccaccctgcagggtgggcgttttcctcgattacgaggccggaattgtgtccttctttaacgtgacttcacacggtagtctcatatacaaattctccaaatgttgcttctcacaacctgtatacccctattttaatccttggaactgtccagccccaatgaccctctgccctccgtccagctag

SEQ ID NO: 209101 - DNA, 1467 bp, Artificial Sequence
  derived and/or modified sequence
atggcaagtaagattttgctcaatgttcaggaggaagttacatgccctatttgtctggagcttctgactgaacctctgagcctagattgcggacacagcctttgccgtgcctgtattactgtaagtaataaagaagctgtcaccagcatgggcggaaagagttcctgtccggtttgcggaatatcttactctttcgaacatctgcaagccaatcagcacctcgccaacatcgttgagcgtttgaaagaggtgaaactcagcccagacaatggcaagaagcgagatctgtgtgaccaccatggggagaaactgctgctgttctgcaaggaggatagaaaggtgatttgctggctgtgcgagagatctcaggagcaccggggacaccacaccgtgctaactgaggaagtatttaaagagtgtcaagaaaaacttcaggccgtactgaagaggctgaaaaaggaggaggaggaggcagagaaactcgaggctgacattcgcgaagagaagacaagctggaaataccaggtgcagacagaacgacagcgcattcagactgaatttgaccagttgcgttccatactaaataacgaagagcaaagagaactgcagcggttggaggaagaagagaaaaaaactctggacaagttcgcagaggctgaagatgagcttgtgcaacagaagcagctggtgagggaacttatcagcgatgtggagtgtcgcagccagtggagcacgatggagctgctccaagacatgtctgggatcatgaaatggtccgaaatttggagattgaagaagcctaagatggtctccaagaagctgaagactgttttccacgctcctgacttgtctcggatgctgcagatgttcagagaactgaccgccgtcagatgttattgggttgacgtgactttgaactctgtgaacctgaacctgaatcttgtcctttctgaagaccagaggcaggtgatctccgtgccaatttggccctttcaatgttataactatggagtgctgggctctcaatacttctccagcgggaaacactactgggaggtggacgtatccaagaagaccgcctggattttgggcgtgtactgccggacctactcacgacacatgaagtatgtggtacgccgatgcgctaatcgtcagaacctttacaccaagtaccggccactgttcgggtactgggtcattggccttcagaacaaatgcaagtacggggtgtttgaagagagtctttcaagcgatcctgaggtcctcaccttgtctatggccgtgcctccatgcagggtgggagtgtttctggactatgaggccggaattgtgtcattctttaacgtgaccagtcatggttctctaatctacaaattctcaaagtgttgcttctcacagcctgtctacccgtatttcaacccctggaattgtcccgcacccatgacactgtgccccccatcctcttag

SEQ ID NO: 209102 - DNA, 2151 bp, Artificial Sequence
  derived and/or modified sequence
atggcttcaaaaatcttgcttaacgtacaagaggaggtgacctgtcccatctgcctggagctgttgacagaacccttgagtctagactgtggccacagcctctgccgagcctgcatcactgtgagcaacaaggaggcagtgaccagcatgggaggaaaaagcagctgtcctgtgtgtggtatcagttactcatttgaacatctacaggctaatcagcatctggccaacatagtggagagactcaaggaggtcaagttgagcccagacaatgggaagaagagagatctctgtgatcatcatggagagaaactcctactcttctgtaaggaggataggaaagtcatttgctggctttgtgagcggtctcaggagcaccgtggtcaccacacagtcctcacggaggaagtattcaaggaatgtcaggagaaactccaggcagtcctcaagaggctgaagaaggaagaggaggaagctgagaagctggaagctgacatcagagaagagaaaacttcctggaagtatcaggtacaaactgagagacaaaggatacaaacagaatttgatcagcttagaagcatcctaaataatgaggagcagagagagctgcaaagattggaagaagaagaaaagaagacgctggataagtttgcagaggctgaggatgagctagttcagcagaagcagttggtgagagagctcatctcagatgtggagtgtcggagtcagtggtcaacaatggagctgctgcaggacatgagtggaatcatgaaatggagtgagatctggaggctgaaaaagccaaaaatggtttccaagaaactgaagactgtattccatgctccagatctgagtaggatgctgcaaatgtttagagaactgacagctgtccggtgctactgggtggatgtcacactgaattcagtcaacctaaatttgaatcttgtcctttcagaagatcagagacaagtgatatctgtgccaatttggccttttcagtgttataattatggtgtcttgggatcccaatatttctcctctgggaaacattactgggaagtggacgtgtccaagaaaactgcctggatcctgggggtatactgtagaacatattcccgccatatgaagtatgttgttagaagatgtgcaaatcgtcaaaatctttacaccaaatacagacctctatttggctactgggttatagggttacagaataaatgtaagtatggtgtctttgaagagtctttgtcctctgatcccgaggttttgactctctccatggctgtgcctccctgccgtgttggggttttcctcgactatgaagcaggcattgtctcatttttcaatgtcacaagccatggctccctcatttacaagttctctaaatgttgcttttctcagcctgtttatccatatttcaatccttggaactgtccagctcccatgactctatgcccaccaagctcttgaattttctcatttcttcacctacaaccctttgtcttgacttatctcctgcaactgactcatctgcaacattcacaccattgcttccttgtggtttcccttctttagaacttttactcatccttgagatgtatggtgtatttggcttgagttatgagagatgcttatttattcatttactctttttcatattttcagagaaagttacctaatccctcctaaagacacagcagtatgggtataacatccttgccttcccatttatccatgtttcactttatcactgatatgaagaggcccaaagcctgttagccaccatccatgctacctaggtagtccataggaaccacccccatgaccaccaccaacatcaactaaaggttcttggagggtatgtcagtgtgttgctcaggataccccaggtacatcaaggaatcaaggagaggaaaatatgagcaatatgtgtattcagagtgaagattttatgtccagagtatttgagctcaaaccttgcctgttgttttctaatcatgatgaatactttctcagtttctttttcctgaaatataaattgggatttaagactgtacctaactattaagatcactgtgtaaaactaagtgtctctaaatgtaatgcatcgatttagtgtctggaacataataaatatttgctctcatgattgct

SEQ ID NO: 209103 - protein, 717 aa, Artificial Sequence
  derived and/or modified sequence
MHGAARAPATSVSADCCIPAGLRLGPVPGTFKLGKYLSDRREPGPKKKVLTIQTSAHQVRMVRGELVDESGGSPLEWIGLIRAARNSQEQTLEAIADLPGGQIFYRALRDVQPGEELTVWYSNSLAQWFDIPTTATPTHDEKGEERYICWYCWRTFRYPNSLKAHLRFHCVFSGGGGGAFLHHEHAARQGAVPAADGLGLSPKPPAPDFAAPSQAGTLRPHPLGPPPVQACGAREGIKREASSAPSATSPTPGKWGQPKKGKEQLDRALDMSGAARGQGHFLGIVGGSSAGVGSLAFYPGVRSAFKPAGLARAAAAAHGDPYREESSSKQGAGLALGRLLGGGRACGRPGSGENSAAGGAGHHHHHHAHHHHHPKCLLAGDPPPPPPPGLPCSGALRGFPLLSVPPEEASAFKHVERAPPAAAALPGARYAQLPPAPGLPLERCALPPLDPGGLKAYPGGECSHLPAVMPAFTVYNGELLYGSPATTAYYPLKLHFGGLLKYPESISYFSGPAAAALSPAELGSLASIDREIAMHNQQLSEMAAGKGRGRLDSGTLPPAVAAAGGTGGGGSGGSGAGKPKTGHLCLYCGKLYSRKYGLKIHMRTHTGYKPLKCKVCLRPFGDPSNLNKHIRLHAEGNTPYRCEFCGKVLVRRRDLERHVKSRHPGQSLLAKAGDGPGAEPGYPPEPGDPKSDDSDVDVCFTDDQSDPEVGGGGERDL

SEQ ID NO: 209104 - protein, 707 aa, Artificial Sequence
  derived and/or modified sequence
MHGAARAPATSVSADCCIPAGLRLGPVPGTFKLGKYLSDRREPGPKKKVRMVRGELVDESGGSPLEWIGLIRAARNSQEQTLEAIADLPGGQIFYRALRDVQPGEELTVWYSNSLAQWFDIPTTATPTHDEKGEERYICWYCWRTFRYPNSLKAHLRFHCVFSGGGGGAFLHHEHAARQGAVPAADGLGLSPKPPAPDFAAPSQAGTLRPHPLGPPPVQACGAREGIKREASSAPSATSPTPGKWGQPKKGKEQLDRALDMSGAARGQGHFLGIVGGSSAGVGSLAFYPGVRSAFKPAGLARAAAAAHGDPYREESSSKQGAGLALGRLLGGGRACGRPGSGENSAAGGAGHHHHHHAHHHHHPKCLLAGDPPPPPPPGLPCSGALRGFPLLSVPPEEASAFKHVERAPPAAAALPGARYAQLPPAPGLPLERCALPPLDPGGLKAYPGGECSHLPAVMPAFTVYNGELLYGSPATTAYYPLKLHFGGLLKYPESISYFSGPAAAALSPAELGSLASIDREIAMHNQQLSEMAAGKGRGRLDSGTLPPAVAAAGGTGGGGSGGSGAGKPKTGHLCLYCGKLYSRKYGLKIHMRTHTGYKPLKCKVCLRPFGDPSNLNKHIRLHAEGNTPYRCEFCGKVLVRRRDLERHVKSRHPGQSLLAKAGDGPGAEPGYPPEPGDPKSDDSDVDVCFTDDQSDPEVGGGGERDL

SEQ ID NO: 209105 - DNA, 3204 bp, Artificial Sequence
  derived and/or modified sequence
ccatgtgaccctctcgggtgggactctgcagctgcttcgcagcgcaactctctcaccaaactccgcgcccttgcgctagcggtgccaaaaggctcccgccccgattgaaaaggcgcagtgcatgcccgcccgcgtcactccgcgggcggaggacgcacgtcggggcgcggctctctggctagcgcgcagctccagctctgtcactcgcgcccttccaaggacctggagcacccgagcgcctgcctggtggcggcggcaacaatgcacggagccgccagagcgccagccaccagcgtgagtgccgactgctgcatcccggccggcttgcgcctcggaccggtgcctggtaccttcaagctgggcaagtacctgtcagaccgcagggagcccgggcctaagaaaaaggtgcgcatggtgagaggggagctggtggacgagtcggggggctcccctctggagtggatagggttaatccgggcagccagaaactcccaggaacagactctggaagctattgcagacttacccggaggacagatcttctaccgagcattgcgagacgtccagccaggggaggagctgacagtgtggtattctaactccttggctcagtggttcgacatccccaccacagcgactccgactcacgacgagaaaggggaggagcgctacatctgctggtactgctggaggacgtttagataccccaacagccttaaggcacacctgcgtttccactgcgtgttcagcggcggtggaggcggcgccttcctgcaccacgaacacgcggctcgccaaggcgccgtcccagcggctgatggcctcggtctctccccaaaacccccggcgcccgatttcgccgcgccttcccaggcaggaactttgcgaccccaccccctgggcccgccaccagttcaggcctgcggtgcgcgggagggcatcaagcgcgaggcctcttccgcgccctcggccacctcgccgaccccaggcaagtgggggcagcccaagaagggcaaggagcagctggaccgtgccctggacatgagcggagccgcccgaggacaagggcacttcctcggcatcgtgggcggctcctcggcgggggtcggcagcctggctttctaccccggcgtgcgctcagctttcaagcccgccggcctagcgagggcggcggcggccgctcacggcgacccctaccgggaggagagcagcagcaagcaaggagccggcctcgctttgggcaggctgctgggcgggggccgggcgtgcgggcgccccgggagcggggagaactcggcggcgggcggcgcgggtcaccaccatcaccaccacgcgcaccaccaccaccatcccaagtgcctgctcgctggggacccgccgccgccgccgccgcctggcctgccctgctctggggccctgcgcggcttccctctgctctccgtccccccggaagaggcgtccgccttcaagcacgtggagcgcgccccgcccgcagccgccgcgctgccaggagcgcgttatgcgcagctgccccctgcgccggggttgcccctcgagcgctgcgcgctgccgcccctcgacccgggcggtctcaaagcctatccgggtggtgagtgcagccacctgcccgccgtcatgccggcctttacagtctacaacggggagctgctctacggctcaccggccaccaccgcttattacccgctcaaattgcacttcggcgggctgctgaagtatccggagtccatctcctacttcagcgggcctgcagcggccgccctaagccccgccgagctggggtcgctggccagcatcgaccgagagatcgccatgcacaatcagcagctgtccgagatggctgccgggaagggtcgcggacgcctggactcggggacgttgccaccggccgtcgcggcggcgggaggcaccgggggcggcggcagcggaggcagcggcgcaggtaagcccaagaccggccacctgtgcctctactgtggcaagctgtactcgcgcaagtatgggctcaagatccacatgcggacgcacacgggctacaagccactcaagtgcaaagtctgtctgcggcccttcggcgaccccagcaatctcaacaagcacatccggctgcacgccgagggcaatacgccctaccgctgcgagttctgcggcaaggtacttgtgcgccgccgggacctggagcgacatgtcaagtcccgccaccctggccagagtctgctcgccaaagcgggcgacggcccgggtgccgagcccggctatcccccggagcctggggatcccaagagcgacgacagtgacgtggacgtctgcttcacagacgaccagagcgaccccgaggttgggggcggcggggagcgcgacttgtaacgagtcttcccgggaaggggcggggtgaggacagagaggagtcgagggtttattctcgcagtagaggaactcctggtggtgggaagagggacccaatggacaaaaccgtttttgtttttgagagggcgccagatttgaaacagtgagaggtcccacatctggtgctgaaactcagagcaacagttcagaggtggcgtaaatctggccacctggagagctcgagtgccaccagtacctccgcaccccgggcctctggacttcttggatgagctcaccctgaaccgcccaggcggtctgctcttggtgttcagaatcacatcaatgcgaacgtcacagcgccttcgagggcgcagattttaactgccacgtatttttaagttgtacttttctgtggaggaaattgtgccttttgaaacgacgttttgtgtgtgtatttcacgttagcatttcattgcataggcaaaacactagtcacaattgggtagatgtgacatccatatacttgtttacattttatctgttctcatgtcaaagactactccttgccccattgaatatatagtggtagcaggtgtacaaattggtcaagttgcaattatttatgagaaaataatgataaatgtaaaatatctaaagcatgaatctaagagcacgcaatatataattttaaagaaaatattctatttggtagaatacaaatgtggtgtgtgttgttttataatgactgctgtacagtgggtatagtattttggttttggttccagattgtgcaatctttaagaaaaataaagatacaaacgagagttttgttcacttagt

SEQ ID NO: 209106 - DNA, 2154 bp, Artificial Sequence
  derived and/or modified sequence
atgcacggcgctgccagagctcccgcgacatcagtctcagcagattgctgtatcccagcgggacttcgcctgggacccgtgccaggaaccttcaaacttggaaaatacctgagcgatcgaagggagccgggacccaagaagaaggttcttacaattcagacttctgcccaccaagtccgcatggttcgaggggaattagtcgacgaaagcggggggagccctctggaatggatcggactgattcgggccgctcggaacagccaggagcagactttggaggccattgccgatcttcccggaggacagatcttctaccgcgccttgagagacgtgcagcccggcgaggagctgaccgtgtggtattccaatagcctggcacagtggtttgacatcccaaccacggccacacccacacatgatgagaagggcgaggaacggtatatatgctggtactgctggcgcactttccgctaccccaattcactgaaggcgcatctgcgctttcattgtgtattttctggcggaggcggaggtgcttttctgcatcacgagcacgctgccaggcaaggggcagtgcccgctgcagacgggctgggcttgtcccctaagccacccgctcctgacttcgcagccccctcacaggcagggacactcagacctcatccacttggaccgccaccggtccaggcctgtggcgctcgagagggcatcaagagggaagcatcgagtgccccatcggctacttccccaacaccagggaagtgggggcagccaaaaaaaggaaaggagcagcttgacagagctttagatatgtctggcgctgctcgcggacagggccatttcctgggtatcgtgggcggctcatccgctggtgttgggtctcttgctttctatcctggagttcggtccgccttcaaaccagcaggcctcgctcgtgcagccgctgcggcacacggcgatccttatcgagaagagagtagcagtaagcagggggcagggttagccctcgggcgcttgttagggggtggccgagcatgcggacgcccaggatcaggagagaatagtgccgcagggggagcaggccatcaccaccaccatcacgcccaccaccatcaccaccccaaatgcctgctggccggagatccccccccaccacctccgccggggctgccatgttcgggcgccctcagggggttcccgctactaagcgtgccaccagaggaggcaagcgcgttcaaacatgtcgaacgggcccctcctgcagcagctgcgctgcccggagcacgttacgctcagctgcccccagcgccaggtctacccttagagcgatgtgcgctgcccccactggatcccgggggcctcaaggcctacccgggcggcgagtgttctcacctacctgccgtaatgcctgccttcacagtgtataacggcgagctgctttacggtagcccggcgacgacagcctactacccccttaaattacactttggtggcctgttgaagtacccagagtctatttcctattttagcggccctgccgctgcagcactctcaccggcagaattaggatccctcgcatctatagacagagagatcgcaatgcataatcagcagctcagcgagatggcggcagggaaagggcgagggcggcttgactcaggtactcttccgcctgcagtagctgccgcaggcggcactggaggaggaggctccggaggatccggagcagggaagcctaaaactggacacctgtgtttgtattgcggcaagctgtactcgcgtaaatatggtctgaaaattcacatgcgcacgcacaccggctacaagcccctcaaatgcaaggtgtgcctccgacctttcggggacccaagcaatctgaataaacacatccggctccatgcagaaggcaacacaccttataggtgcgagttttgtggtaaggttttggtcaggagacgggatctggagcggcacgtgaagagcaggcatcctgggcagtccttgctagccaaggcaggggacggacctggagccgagcccggctacccacctgaaccaggcgatccaaagtctgacgacagcgatgtagacgtttgcttcactgacgatcaatcggatcccgaggtgggagggggcggcgaacgggacctgtag

SEQ ID NO: 209107 - DNA, 2124 bp, Artificial Sequence
  derived and/or modified sequence
atgcatggggccgctagagccccggccacgtcagtctctgccgactgctgcattcccgctggactgaggttgggtcccgtgccgggtacattcaaattgggaaaatacctctcagataggcgtgagcccggaccaaaaaagaaggtccgtatggtcagaggagaactcgtagatgagagcgggggaagtccactggaatggatcggcctgatccgagcagctcggaacagccaagaacagacattggaagccatagcagacctcccgggggggcagatcttttatagagcgctcagggacgtccaaccaggggaggaactgactgtatggtactccaactccctagcccaatggttcgacatccctaccaccgccaccccgacccacgacgaaaagggtgaggagaggtacatctgctggtactgttggcgaacgttccgctacccaaactctctgaaggcccaccttagatttcactgtgtgttctctggaggtgggggcggtgctttcctgcatcacgaacacgccgccagacagggagctgtgccagctgcggacggcttgggtttgagcccgaaaccacccgcgcctgattttgcggcgcctagtcaggctgggactttgcgtcctcatccccttggaccacctcccgtccaagcctgtggcgcacgggagggaattaaacgggaagcttccagtgccccgagtgccacaagtcctacaccaggcaagtggggccaacccaagaagggcaaagaacaactggaccgggcgttagacatgtcgggcgccgcgagggggcagggacacttcttaggaattgtgggaggctccagcgccggagtgggatcactggccttctaccctggagtgagatccgcgttcaagcctgccggcctggcacgggccgccgcagcagcgcacggagatccatatcgggaggagtctagttcaaagcagggggccggtctcgcgctgggcagactactgggtggggggagggcctgtggccgtcctggctccggggagaattccgccgctggaggagccgggcaccatcaccatcaccacgcccatcaccatcaccatcctaaatgccttctggctggtgacccccccccacctcctcctcccggccttccatgttccggcgcgctgcgcggatttcctctgctcagcgtaccacctgaagaggcctctgcatttaagcacgttgagcgagctccacctgctgcagctgccctccctggggcccggtatgctcagttgccccctgcccccgggcttcccctcgaaaggtgtgctctcccgccgcttgaccctgggggtctgaaggcgtaccctgggggggaatgtagccacctaccagccgtgatgcccgcctttactgtatacaatggcgagcttttatacgggtctcctgcgacaaccgcttactaccctctcaaactccacttcggggggctgctgaaatatccggaaagcatcagctatttcagcggcccagccgccgcggccctgagtccagcggagcttgggtccttagccagcatcgacagagaaatcgccatgcataaccagcagctatccgaaatggccgccggtaagggtcgaggacgcctagacagcgggacgctgccgccagccgtggctgcggccggtgggacagggggcggcggatctggcgggtcaggggccgggaagccgaagactggccacctgtgcttatattgtggcaaactgtactccaggaagtacggattaaagatccatatgcggacacacactggatataagcctctaaagtgcaaagtgtgcctgcggcccttcggcgacccatctaacctgaacaagcacatcagactccatgccgaaggcaatacgccctatcggtgcgagttttgcggaaaggtgttggtgcgcaggcgggatctggagcggcatgtcaagtccagacacccgggtcagtcgctgttagcgaaggccggggacgggccaggggcagagccaggatatcctcccgaacccggtgaccccaagtccgacgattccgacgtcgacgtttgttttacagacgatcagtcggaccccgaggtgggtggcggcggcgagcgcgacctctag

SEQ ID NO: 209108 - DNA, 2154 bp, Artificial Sequence
  derived and/or modified sequence
atgcacggggccgcccgggccccagccacctctgtgtctgctgactgctgcatcccagctggcctgcggctgggccctgtgcccggcaccttcaagctgggcaagtacctgagtgaccggcgggagcccggccccaagaagaaggtgctgaccatccagaccagcgcccaccaggtgaggatggtgcggggggagctggtggatgagagcggcggcagccccctggagtggattggcctcatccgggccgccaggaacagccaggagcagaccctggaggccatcgctgacctgcccggcggccagatcttctaccgggccctgagagatgtgcagcctggagaggagctgactgtgtggtacagcaacagcctggcccagtggtttgacatccccaccacagccacccccacccatgatgagaagggggaggagcgctacatctgctggtactgctggaggaccttccgctaccccaacagcctgaaggcccacctgcgcttccactgtgtgttttctgggggcggcggcggggccttcctgcaccatgaacatgctgcccggcagggcgctgtgcctgctgctgatggcctgggcctgagccccaagcccccagccccagactttgctgcccccagccaggccggcaccctgcggccccaccccctgggccccccacctgtgcaggcctgtggggcccgggagggcatcaagcgggaggccagcagcgcccccagcgccaccagccccacccctgggaagtggggccagcccaagaagggcaaggagcagctggaccgggccctggacatgtctggggccgcccggggccagggccacttcctgggcatcgtgggcggcagcagcgctggggtgggcagcctggccttctacccaggagtgcgcagcgccttcaagccagctggcctggcccgggctgctgctgctgcccacggggacccctaccgggaggagagcagcagcaagcagggcgccggcctggccctgggccgcctgctgggcggcggccgggcctgtggccggcccggcagcggagaaaattctgctgctggaggagctggccaccaccaccaccaccacgcccaccaccaccaccaccccaagtgcctgctggccggggaccccccacctcctcctcctcctggcctgccctgcagcggggccctgcggggcttccccctgctgtctgtgcccccagaggaggccagcgccttcaagcacgtggagcgggcccctcctgctgctgctgccctgcccggggcccgctatgcccagctgcccccagcccctggcctgcccctggagcgctgtgccctgccccccctggaccccggcggcctgaaggcctacccaggaggagaatgtagccacctgcctgctgtgatgcctgccttcaccgtgtacaacggggagctgctgtatggcagccctgccaccacagcctactaccccctgaagctgcactttggaggcctgctgaagtacccagagagcatctcctacttcagcggccctgctgctgctgccctgagccctgctgagctgggcagcctggccagcattgaccgggagatcgccatgcacaaccagcagctgtctgagatggccgccggcaagggccggggccgcctggacagcggcaccctgcccccagctgtggccgctgctgggggcaccggcggcggcggcagcggcggcagcggggccggcaagcccaagacaggccacctgtgcctgtactgtgggaagctgtacagcaggaaatatggcctgaagatccacatgaggacccacacaggctacaagcccctgaagtgcaaggtgtgcctgcggccctttggagaccccagcaacctgaacaagcacatccggctgcacgccgagggcaacaccccctaccgctgtgagttctgtgggaaggtgctggtgagaagaagagacctggagcggcacgtgaagagccgccaccctggccagagcctgctggccaaggctggagatggccctggagctgagcccggctacccacctgagcccggggaccccaagagtgatgacagtgatgtggatgtgtgcttcacagatgaccagagcgaccctgaggtgggcggcggcggggagcgggacctgtag

SEQ ID NO: 209109 - DNA, 2124 bp, Artificial Sequence
  derived and/or modified sequence
atgcacggggccgcccgggccccagccacctctgtgtctgctgactgctgcatcccagctggcctgcggctgggccctgtgcccggcaccttcaagctgggcaagtacctgagtgaccggcgggagcccggccccaagaagaaggtgaggatggtgcggggggagctggtggatgagagcggcggcagccccctggagtggattggcctcatccgggccgccaggaacagccaggagcagaccctggaggccatcgctgacctgcccggcggccagatcttctaccgggccctgagagatgtgcagcctggagaggagctgactgtgtggtacagcaacagcctggcccagtggtttgacatccccaccacagccacccccacccatgatgagaagggggaggagcgctacatctgctggtactgctggaggaccttccgctaccccaacagcctgaaggcccacctgcgcttccactgtgtgttttctgggggcggcggcggggccttcctgcaccatgaacatgctgcccggcagggcgctgtgcctgctgctgatggcctgggcctgagccccaagcccccagccccagactttgctgcccccagccaggccggcaccctgcggccccaccccctgggccccccacctgtgcaggcctgtggggcccgggagggcatcaagcgggaggccagcagcgcccccagcgccaccagccccacccctgggaagtggggccagcccaagaagggcaaggagcagctggaccgggccctggacatgtctggggccgcccggggccagggccacttcctgggcatcgtgggcggcagcagcgctggggtgggcagcctggccttctacccaggagtgcgcagcgccttcaagccagctggcctggcccgggctgctgctgctgcccacggggacccctaccgggaggagagcagcagcaagcagggcgccggcctggccctgggccgcctgctgggcggcggccgggcctgtggccggcccggcagcggagaaaattctgctgctggaggagctggccaccaccaccaccaccacgcccaccaccaccaccaccccaagtgcctgctggccggggaccccccacctcctcctcctcctggcctgccctgcagcggggccctgcggggcttccccctgctgtctgtgcccccagaggaggccagcgccttcaagcacgtggagcgggcccctcctgctgctgctgccctgcccggggcccgctatgcccagctgcccccagcccctggcctgcccctggagcgctgtgccctgccccccctggaccccggcggcctgaaggcctacccaggaggagaatgtagccacctgcctgctgtgatgcctgccttcaccgtgtacaacggggagctgctgtatggcagccctgccaccacagcctactaccccctgaagctgcactttggaggcctgctgaagtacccagagagcatctcctacttcagcggccctgctgctgctgccctgagccctgctgagctgggcagcctggccagcattgaccgggagatcgccatgcacaaccagcagctgtctgagatggccgccggcaagggccggggccgcctggacagcggcaccctgcccccagctgtggccgctgctgggggcaccggcggcggcggcagcggcggcagcggggccggcaagcccaagacaggccacctgtgcctgtactgtgggaagctgtacagcaggaaatatggcctgaagatccacatgaggacccacacaggctacaagcccctgaagtgcaaggtgtgcctgcggccctttggagaccccagcaacctgaacaagcacatccggctgcacgccgagggcaacaccccctaccgctgtgagttctgtgggaaggtgctggtgagaagaagagacctggagcggcacgtgaagagccgccaccctggccagagcctgctggccaaggctggagatggccctggagctgagcccggctacccacctgagcccggggaccccaagagtgatgacagtgatgtggatgtgtgcttcacagatgaccagagcgaccctgaggtgggcggcggcggggagcgggacctgtag

SEQ ID NO: 209110 - DNA, 3234 bp, Artificial Sequence
  derived and/or modified sequence
ccatgtgaccctctcgggtgggactctgcagctgcttcgcagcgcaactctctcaccaaactccgcgcccttgcgctagcggtgccaaaaggctcccgccccgattgaaaaggcgcagtgcatgcccgcccgcgtcactccgcgggcggaggacgcacgtcggggcgcggctctctggctagcgcgcagctccagctctgtcactcgcgcccttccaaggacctggagcacccgagcgcctgcctggtggcggcggcaacaatgcacggagccgccagagcgccagccaccagcgtgagtgccgactgctgcatcccggccggcttgcgcctcggaccggtgcctggtaccttcaagctgggcaagtacctgtcagaccgcagggagcccgggcctaagaaaaaggtattgaccattcagacctctgcccaccaggtgcgcatggtgagaggggagctggtggacgagtcggggggctcccctctggagtggatagggttaatccgggcagccagaaactcccaggaacagactctggaagctattgcagacttacccggaggacagatcttctaccgagcattgcgagacgtccagccaggggaggagctgacagtgtggtattctaactccttggctcagtggttcgacatccccaccacagcgactccgactcacgacgagaaaggggaggagcgctacatctgctggtactgctggaggacgtttagataccccaacagccttaaggcacacctgcgtttccactgcgtgttcagcggcggtggaggcggcgccttcctgcaccacgaacacgcggctcgccaaggcgccgtcccagcggctgatggcctcggtctctccccaaaacccccggcgcccgatttcgccgcgccttcccaggcaggaactttgcgaccccaccccctgggcccgccaccagttcaggcctgcggtgcgcgggagggcatcaagcgcgaggcctcttccgcgccctcggccacctcgccgaccccaggcaagtgggggcagcccaagaagggcaaggagcagctggaccgtgccctggacatgagcggagccgcccgaggacaagggcacttcctcggcatcgtgggcggctcctcggcgggggtcggcagcctggctttctaccccggcgtgcgctcagctttcaagcccgccggcctagcgagggcggcggcggccgctcacggcgacccctaccgggaggagagcagcagcaagcaaggagccggcctcgctttgggcaggctgctgggcgggggccgggcgtgcgggcgccccgggagcggggagaactcggcggcgggcggcgcgggtcaccaccatcaccaccacgcgcaccaccaccaccatcccaagtgcctgctcgctggggacccgccgccgccgccgccgcctggcctgccctgctctggggccctgcgcggcttccctctgctctccgtccccccggaagaggcgtccgccttcaagcacgtggagcgcgccccgcccgcagccgccgcgctgccaggagcgcgttatgcgcagctgccccctgcgccggggttgcccctcgagcgctgcgcgctgccgcccctcgacccgggcggtctcaaagcctatccgggtggtgagtgcagccacctgcccgccgtcatgccggcctttacagtctacaacggggagctgctctacggctcaccggccaccaccgcttattacccgctcaaattgcacttcggcgggctgctgaagtatccggagtccatctcctacttcagcgggcctgcagcggccgccctaagccccgccgagctggggtcgctggccagcatcgaccgagagatcgccatgcacaatcagcagctgtccgagatggctgccgggaagggtcgcggacgcctggactcggggacgttgccaccggccgtcgcggcggcgggaggcaccgggggcggcggcagcggaggcagcggcgcaggtaagcccaagaccggccacctgtgcctctactgtggcaagctgtactcgcgcaagtatgggctcaagatccacatgcggacgcacacgggctacaagccactcaagtgcaaagtctgtctgcggcccttcggcgaccccagcaatctcaacaagcacatccggctgcacgccgagggcaatacgccctaccgctgcgagttctgcggcaaggtacttgtgcgccgccgggacctggagcgacatgtcaagtcccgccaccctggccagagtctgctcgccaaagcgggcgacggcccgggtgccgagcccggctatcccccggagcctggggatcccaagagcgacgacagtgacgtggacgtctgcttcacagacgaccagagcgaccccgaggttgggggcggcggggagcgcgacttgtaacgagtcttcccgggaaggggcggggtgaggacagagaggagtcgagggtttattctcgcagtagaggaactcctggtggtgggaagagggacccaatggacaaaaccgtttttgtttttgagagggcgccagatttgaaacagtgagaggtcccacatctggtgctgaaactcagagcaacagttcagaggtggcgtaaatctggccacctggagagctcgagtgccaccagtacctccgcaccccgggcctctggacttcttggatgagctcaccctgaaccgcccaggcggtctgctcttggtgttcagaatcacatcaatgcgaacgtcacagcgccttcgagggcgcagattttaactgccacgtatttttaagttgtacttttctgtggaggaaattgtgccttttgaaacgacgttttgtgtgtgtatttcacgttagcatttcattgcataggcaaaacactagtcacaattgggtagatgtgacatccatatacttgtttacattttatctgttctcatgtcaaagactactccttgccccattgaatatatagtggtagcaggtgtacaaattggtcaagttgcaattatttatgagaaaataatgataaatgtaaaatatctaaagcatgaatctaagagcacgcaatatataattttaaagaaaatattctatttggtagaatacaaatgtggtgtgtgttgttttataatgactgctgtacagtgggtatagtattttggttttggttccagattgtgcaatctttaagaaaaataaagatacaaacgagagttttgttcacttagt

SEQ ID NO: 209111 - DNA, 2429 bp, Artificial Sequence
  derived and/or modified sequence
gccattcagcggcctcgattatgcagggggctgagggaaccactccatgtgaccctctcgggtgggactctgcagctgcttcgcagcgcaactctctcaccaaactccgcgcccttgcgctagcggtgccaaaaggctcccgccccgattgaaaaggcgcagtgcatgcccgcccgcgtcactccgcgggcggaggacgcacgtcggggcgcggctctctggctagcgcgcagctccagctctgtcactcgcgcccttccaaggacctggagcacccgagcgcctgcctggtggcggcggcaacaatgcacggagccgccagagcgccagccaccagcgtgagtgccgactgctgcatcccggccggcttgcgcctcggaccggtgcctggtaccttcaagctgggcaagtacctgtcagaccgcagggagcccgggcctaagaaaaaggtgcgcatggtgagaggggagctggtggacgagtcggggggctcccctctggagtggatagggttaatccgggcagccagaaactcccaggaacagactctggaagctattgcagacttacccggaggacagatcttctaccgagcattgcgagacgtccagccaggggaggagctgacagtgtggtattctaactccttggctcagtggttcgacatccccaccacagcgactccgactcacgacgagaaaggggaggagcgctacatctgctggtactgctggaggacgtttagataccccaacagccttaaggcacacctgcgtttccactgcgtgttcagcggcggtggaggcggcgccttcctgcaccacgaacacgcggctcgccaaggcgccgtcccagcggctgatggcctcggtctctccccaaaacccccggcgcccgatttcgccgcgccttcccaggcaggaactttgcgaccccaccccctgggcccgccaccagttcaggcctgcggtgcgcgggagggcatcaagcgcgaggcctcttccgcgccctcggccacctcgccgaccccaggcaagtgggggcagcccaagaagggcaaggagcagctggaccgtgccctggacatgagcggagccgcccgaggacaagggcacttcctcggcatcgtgggcggctcctcggcgggggtcggcagcctggctttctaccccggcgtgcgctcagctttcaagcccgccggcctagcgagggcggcggcggccgctcacggcgacccctaccgggaggagagcagcagcaagcaaggagccggcctcgctttgggcaggctgctgggcgggggccgggcgtgcgggcgccccgggagcggggagaactcggcggcgggcggcgcgggtcaccaccatcaccaccacgcgcaccaccaccaccatcccaagtgcctgctcgctggggacccgccgccgccgccgccgcctggcctgccctgctctggggccctgcgcggcttccctctgctctccgtccccccggaagaggcgtccgccttcaagcacgtggagcgcgccccgcccgcagccgccgcgctgccaggagcgcgttatgcgcagctgccccctgcgccggggttgcccctcgagcgctgcgcgctgccgcccctcgacccgggcggtctcaaagcctatccgggtggtgagtgcagccacctgcccgccgtcatgccggcctttacagtctacaacggggagctgctctacggctcaccggccaccaccgcttattacccgctcaaattgcacttcggcgggctgctgaagtatccggagtccatctcctacttcagcgggcctgcagcggccgccctaagccccgccgagctggggtcgctggccagcatcgaccgagagatcgccatgcacaatcagcagctgtccgagatggctgccgggaagggtcgcggacgcctggactcggggacgttgccaccggccgtcgcggcggcgggaggcaccgggggcggcggcagcggaggcagcggcgcaggtaagcccaagaccggccacctgtgcctctactgtggcaagctgtactcgcgcaagtatgggctcaagatccacatgcggacgcacacgggctacaagccactcaagtgcaaagtctgtctgcggcccttcggcgaccccagcaatctcaacaagcacatccggctgcacgccgagggcaatacgccctaccgctgcgagttctgcggcaaggtacttgtgcgccgccgggacctggagcgacatgtcaagtcccgccaccctggccagagtctgctcgccaaagcgggcgacggcccgggtgccgagcccggctatcccccggagcctggggatcccaagagcgacgacagtgacgtggacgtctgcttcacagacgaccagagcgaccccgaggttgggggcggcggggagcgcgacttgtaa

SEQ ID NO: 209112 - DNA, 2154 bp, Artificial Sequence
  derived and/or modified sequence
atgcacggcgccgcccgggcccccgccaccagcgtgagcgccgactgttgtattcctgccggactcagactgggccccgtgccaggtacgtttaagctgggtaaatacctttctgatcgcagggaaccaggccccaagaaaaaggttctgactatccagacctctgcacaccaggtcagaatggtgcgcggggaactggttgatgagtccggagggtctcctctggaatggatcggccttattagagcggctcgaaattctcaagagcaaacgctggaggcaattgctgaccttcccggaggccagatcttctaccgtgcgctgcgcgacgtccagcccggcgaggagttaaccgtgtggtactctaattcccttgcccagtggttcgacatcccaactaccgctactccgactcacgacgaaaagggtgaggaacgttatatctgctggtattgctggagaacatttcgataccccaactctttgaaagcacacctccggtttcattgcgtgttctccggcggcggtgggggagcctttctgcatcatgagcacgccgcccgtcagggcgccgtgccagccgctgatgggctcggcctgtccccaaagcctccggctcccgacttcgccgctccctcccaggccggcactctgaggcctcaccctttaggaccaccaccggttcaagcctgtggggcccgcgaaggaatcaaacgtgaggcttctagcgccccgagcgctacgtctcctacccccgggaaatgggggcagcccaaaaaaggtaaagaacaactggacagggccctagatatgtctggggctgcccggggtcaaggccattttctggggatagtcggaggctccagtgctggagtcggatcactggccttctatccaggcgtcagatccgcctttaagccagctggcctggctcgtgccgcggcagccgctcatggcgacccctaccgggaagagtcctcctctaagcagggtgcaggcctagccttagggagactattaggcgggggccgagcttgtgggcgaccaggtagtggtgagaattctgctgccgggggagctgggcatcaccaccatcatcatgcgcatcaccatcatcacccaaaatgccttctggccggggatcctccaccacctccccctccgggactaccttgttcaggagctttaagagggttccctctcctcagcgtgccccctgaggaggcaagtgcttttaaacatgtcgaacgcgcacctcctgccgctgccgctctgcctggggcacgctacgcccagctccccccagccccaggtctgcccctcgaacggtgcgccctccctcccctggatcccggtgggctgaaggcctatccggggggtgagtgtagtcatctccccgccgtgatgcccgcgtttactgtctacaacggcgagctcctgtatgggtcacctgcaaccaccgcatattatcccctaaaactccattttggaggcctccttaagtaccctgagtccatttcttacttctctggtccggccgcagcagcgctgagtccagctgagttgggcagtcttgcaagcatcgatagagagatcgcaatgcacaaccagcagcttagtgagatggccgcgggcaaaggtcgaggtaggctcgattcaggaacgctcccgcccgcggtggccgccgctggggggaccggaggcggaggcagcgggggaagtggggccgggaaaccaaaaactgggcacctgtgtttatactgcggcaagctgtactctagaaagtatggcctgaaaatccacatgcgtacccacacaggctataagccactgaaatgcaaagtctgtttaagacctttcggtgacccttccaatctcaataagcacattcgtttacacgccgaggggaatactccatacaggtgtgagttttgtggcaaagttctggtccgacgacgggacctcgaacgacacgtcaagagccgccacccggggcagagccttctcgccaaggcaggcgatggtcccggcgccgaacccgggtaccctccagagcccggggacccaaagagtgatgactctgacgttgatgtgtgctttactgacgaccagagtgatccggaggtcggcggaggcggcgaaagagatctctag

SEQ ID NO: 209113 - DNA, 2124 bp, Artificial Sequence
  derived and/or modified sequence
atgcacggcgccgcccgggcccccgccaccagcgtgagcgccgactgctgcataccggccggcctccgcctgggacccgtgcctggcaccttcaagctcggcaagtacctgtccgatcgccgtgaaccgggcccaaaaaaaaaggtgcggatggtgaggggcgaattagtcgatgagagcggcggcagtcccttggagtggatcgggttgatcagagccgctaggaatagccaagaacagactcttgaggcaatcgctgatctgcccggagggcagattttctaccgggctctcagggacgttcaaccaggagaggaattaacagtgtggtatagtaacagtctggcacagtggtttgacatccccaccaccgccactccaacacatgacgaaaagggggaagagcgatatatttgttggtattgctggagaactttccgatacccaaactctctcaaagctcacctgcgttttcattgtgtctttagcggtggagggggcggggcctttctgcaccacgagcatgccgcccgccagggcgccgtccccgctgccgacgggctcgggttaagtcctaagcctcctgcccccgactttgctgccccttctcaagcgggaaccctgcggcctcaccccctgggaccacccccagtccaggcctgcggtgccagggaggggatcaagagggaggcaagctccgcaccttcggccacctcaccaaccccgggcaaatggggacaacccaagaagggtaaagagcagcttgacagggcattagatatgtccggggccgcccggggacagggtcattttctcggaatcgtgggcgggagcagcgctggagtcggcagtctggctttttaccctggggtacgcagcgctttcaaacccgcagggctggcaagggctgctgctgcagctcacggcgatccttaccgtgaagaatcctcctcaaagcagggggccggcttggccttgggacgcctactggggggaggccgagcctgcgggcgccccggttccggagaaaattccgccgccggtggcgcaggccaccaccaccatcatcacgctcaccaccaccaccatcctaaatgtctgctggccggggacccacccccccctccaccccctggcctaccttgtagcggcgctctcaggggatttcctctccttagtgtccccccagaggaggcttccgccttcaaacatgtcgaaagggccccgcctgctgcagccgctctgcctggtgctcgttacgcacagctgccccccgctccagggctgcccctggagagatgtgccctgcctcctttagatccaggtggcttgaaagcctatccaggcggcgagtgtagccatttacctgctgtgatgccggcttttaccgtttacaatggcgagctattatacggaagtcccgccacaaccgcttattatcctctcaaactccactttggcggcctgcttaaatacccagagagcatcagttacttttctgggcccgccgccgcggccctgtctcctgcagagcttgggagcctggcctcaattgatagggagatagcaatgcacaaccaacaactgagcgaaatggcagccggcaaggggcgcggcagacttgacagtggaacgctgccacctgccgtagcagcagccgggggcacaggggggggcggctccggagggtctggagctggcaagcctaaaactggccacctctgtctttactgtggaaagctgtactcccggaagtacggactgaaaatacacatgcgtacccatactggttacaaaccactgaagtgcaaggtatgtctcaggccattcggcgatccttccaatctcaacaaacatattcggctgcacgctgaagggaacacaccttatagatgtgaattttgcggcaaggtcctcgttaggcgcagggacctcgaacggcatgtaaaatcacggcaccctggccaatcccttcttgccaaagctggggacgggccaggagctgaaccagggtatccacccgagccgggagatcctaagtccgacgacagcgacgtggacgtttgtttcaccgatgaccagagcgacccagaggtaggcggggggggcgagcgggacttgtag

SEQ ID NO: 209114 - DNA, 2154 bp, Artificial Sequence
  derived and/or modified sequence
atgcatggggcagcccgagcaccggcaacctccgtgtcggctgactgttgtatccccgcaggcctacggctgggacccgtacccggtacctttaagctcggaaaatacctctctgacagacgcgagcctggccctaaaaagaaagtactgacgattcagacaagtgcccaccaagttcggatggtccgcggagaactggtggacgaatccgggggttctcccctcgagtggatcggattgatacgcgcagccaggaactcacaagagcaaacgctggaggctattgcagacctgccgggtggacagatcttttacagggctctacgagacgtgcaacctggcgaggagcttaccgtctggtacagcaattcccttgcccagtggtttgatatcccaacaaccgccacacctacccacgacgaaaagggtgaggagcggtatatctgctggtattgttggcgcacttttagatacccaaatagcttgaaggcacacctgagattccattgtgtttttagtgggggaggcggaggcgcttttctgcaccacgaacacgccgcaaggcagggtgccgtccccgctgccgatgggctaggcttatcgcccaagcccccagccccagacttcgccgctccttcgcaggctggaacgttgaggccgcatcctctgggtccgccacctgtacaggcctgcggtgcacgagaaggtatcaagagagaggcttctagcgctccatctgcaacttcccctaccccgggaaagtgggggcagcccaaaaagggtaaggagcaactggatcgcgcactcgatatgagcggtgccgctcgcggtcaaggccatttcctcggcattgtgggtggcagcagcgcaggagttggctcgctggctttctaccctggggtgcggtcagctttcaaaccggcaggactggcccgagctgcagctgctgcccacggtgatccatatagggaagaaagctcatccaaacaaggagccggtctggcgctggggaggctgctgggtggaggcagagcgtgcggaaggcccggtagcggcgagaacagcgctgcagggggagctggccaccaccaccaccaccacgctcatcaccaccatcacccaaaatgcctgttggccggagatcccccaccccctccaccccctgggctgccctgctcgggggcactccgcggattccccctcctctccgtgccccctgaagaagcatcagcctttaaacacgtggagcgcgcaccacccgctgcagccgctctgcccggtgccagatacgctcaattgcctcccgctcctgggttgcctttggaacggtgtgcactgcctcccctggatcccggaggcctcaaagcttatcctgggggtgagtgtagccaccttcccgcagttatgccggcttttactgtctacaatggggagctgctgtacgggagccccgctactaccgcttactatccattgaagttacattttggcggactactgaaatatcccgagtccatcagttatttttccggacccgctgctgctgctctcagccccgctgagctcggaagcctagcttccatcgacagggagatagcgatgcacaatcaacagctctctgagatggctgctggaaagggcagagggaggctcgattccggtaccctaccgccagcagttgcggcagcgggagggacaggaggagggggatctgggggtagcggtgccggtaagcccaagacaggccacctgtgtctgtactgcggaaagttatattctcgcaaatacggacttaaaatacacatgcgcacccatactggctataaaccactcaagtgcaaggtgtgcctgcgccctttcggggacccttcaaatctaaacaagcacatcagactccatgcagagggaaacaccccctatcgctgcgaattttgcggaaaagtgcttgttcggcgaagagacctggagcgacatgttaagagccgccacccaggccagtcactcctggctaaggcaggcgatggacccggagctgagccaggctacccacctgagcccggagaccctaagagtgacgatagtgatgtggatgtctgtttcacagatgaccagtccgacccagaggttggaggcggtggggagcgcgacttatag

SEQ ID NO: 209115 - DNA, 2124 bp, Artificial Sequence
  derived and/or modified sequence
atgcacggggctgcacgggctccagcgacttctgtctcggcagactgctgcattcccgctggactgcggctgggcccagtgccgggtacattcaagcttggcaagtatctgagtgacagacgcgaacccggacccaagaagaaggttcgtatggtgagaggagaattggtcgatgagtcagggggatctccactggagtggatcgggctaattcgtgctgcacgaaatagtcaggagcagacccttgaagccatagctgacctccccggtggacagatcttttaccgagccttgcgggacgttcagcccggagaggagctaacagtgtggtacagcaattcactggcccagtggttcgatattccaacaaccgcgactccgacgcatgatgagaagggggaagaacgctacatctgttggtactgctggaggaccttcagatatcccaactcattgaaagcccacctaagatttcactgtgtttttagcggaggtggcggaggggcatttcttcatcacgagcatgcagccaggcaaggcgcagtgccagcggctgacggactgggcctgagcccaaagcccccagcacccgacttcgcagcgcctagtcaggctggaaccttgcggcctcacccattggggccaccacctgttcaagcatgcggcgcaagagaggggattaagagagaagccagtagcgccccatccgccacttcccctacacctgggaagtggggccagcccaagaagggcaaggagcaattggacagagctctagacatgtctggggcagccaggggccaggggcacttccttgggatcgtgggaggatccagtgccggagtaggaagtctggcattttatcccggagtgcggtctgcctttaaaccagccggtttagcaagggcagcggcagctgctcatggggacccctatcgagaagagtcctcaagcaagcagggagccggactcgcgctggggcgtctgctcgggggtggtcgcgcatgcggcagacccggttctggagaaaacagtgctgctggaggcgctggtcaccatcatcaccaccatgcccatcaccaccaccatcccaagtgcctgctggcgggtgacccaccaccgcctcccccaccaggcctaccttgctcaggagcactgagaggcttccccttactgtctgttccaccagaggaggctagcgcttttaagcacgtggaacgagcacctcctgccgctgcggcactgcctggtgctcgctacgcacaacttcctcctgccccagggctccctctggaaaggtgtgctttgcccccactggacccgggaggccttaaggcttaccctggcggagagtgttcccatttaccagccgtcatgccggctttcacagtctataatggagaactgctctatggcagtcccgctaccactgcctactaccctcttaagttacatttcgggggtctattaaagtaccctgagagcatatcttatttctctggccctgcggcagcagctttgagtcctgcggaattaggcagtctggcatctatcgaccgggagatcgccatgcataatcagcagctgtcggaaatggctgccggtaaaggacgtgggagactggatagcggtacattaccacctgctgtcgccgcagcagggggaacgggcggaggtggttccggcggaagcggcgcaggcaagcccaagacaggacacctgtgcctgtactgcgggaagctctatagccggaaatatggactcaaaatacacatgcgcactcacacaggttacaagcccttgaaatgtaaagtgtgcctacgcccattcggggacccgtcgaatctgaataaacacatccgtctacatgccgagggaaacacgccataccgctgtgagttctgcggcaaggtcctagtccggcgacgcgacctggagcgacacgtcaagagccgtcatcccggacagtctttactggctaaagcaggtgacggtccaggagcggaacctggctatccaccagagccaggggatccaaaatcagacgactccgatgtggatgtttgtttcaccgacgatcagagcgatcctgaagtcgggggtggcggagagcgcgatctgtag

SEQ ID NO: 209116 - DNA, 2154 bp, Artificial Sequence
  derived and/or modified sequence
atgcacggcgccgccagagcccccgccaccagcgtgagcgccgactgctgcatccccgccggcctgagactgggccccgtgcccggcaccttcaagctgggcaagtacctgagcgacagaagagagcccggccccaagaagaaggtgctgaccatccagaccagcgcccaccaggtgagaatggtgagaggcgagctggtggacgagagcggcggcagccccctggagtggatcggcctgatcagagccgccagaaacagccaggagcagaccctggaggccatcgccgacctgcccggcggccagatcttctacagagccctgagagacgtgcagcccggcgaggagctgaccgtgtggtacagcaacagcctggcccagtggttcgacatccccaccaccgccacccccacccacgacgagaagggcgaggagagatacatctgctggtactgctggagaaccttcagataccccaacagcctgaaggcccacctgagattccactgcgtgttcagcggcggcggcggcggcgccttcctgcaccacgagcacgccgccagacagggcgccgtgcccgccgccgacggcctgggcctgagccccaagccccccgcccccgacttcgccgcccccagccaggccggcaccctgagaccccaccccctgggccccccccccgtgcaggcctgcggcgccagagagggcatcaagagagaggccagcagcgcccccagcgccaccagccccacccccggcaagtggggccagcccaagaagggcaaggagcagctggacagagccctggacatgagcggcgccgccagaggccagggccacttcctgggcatcgtgggcggcagcagcgccggcgtgggcagcctggccttctaccccggcgtgagaagcgccttcaagcccgccggcctggccagagccgccgccgccgcccacggcgacccctacagagaggagagcagcagcaagcagggcgccggcctggccctgggcagactgctgggcggcggcagagcctgcggcagacccggcagcggcgagaacagcgccgccggcggcgccggccaccaccaccaccaccacgcccaccaccaccaccaccccaagtgcctgctggccggcgaccccccccccccccccccccccggcctgccctgcagcggcgccctgagaggcttccccctgctgagcgtgccccccgaggaggccagcgccttcaagcacgtggagagagccccccccgccgccgccgccctgcccggcgccagatacgcccagctgccccccgcccccggcctgcccctggagagatgcgccctgccccccctggaccccggcggcctgaaggcctaccccggcggcgagtgcagccacctgcccgccgtgatgcccgccttcaccgtgtacaacggcgagctgctgtacggcagccccgccaccaccgcctactaccccctgaagctgcacttcggcggcctgctgaagtaccccgagagcatcagctacttcagcggccccgccgccgccgccctgagccccgccgagctgggcagcctggccagcatcgacagagagatcgccatgcacaaccagcagctgagcgagatggccgccggcaagggcagaggcagactggacagcggcaccctgccccccgccgtggccgccgccggcggcaccggcggcggcggcagcggcggcagcggcgccggcaagcccaagaccggccacctgtgcctgtactgcggcaagctgtacagcagaaagtacggcctgaagatccacatgagaacccacaccggctacaagcccctgaagtgcaaggtgtgcctgagacccttcggcgaccccagcaacctgaacaagcacatcagactgcacgccgagggcaacaccccctacagatgcgagttctgcggcaaggtgctggtgagaagaagagacctggagagacacgtgaagagcagacaccccggccagagcctgctggccaaggccggcgacggccccggcgccgagcccggctacccccccgagcccggcgaccccaagagcgacgacagcgacgtggacgtgtgcttcaccgacgaccagagcgaccccgaggtgggcggcggcggcgagagagacctgtag

SEQ ID NO: 209117 - DNA, 2124 bp, Artificial Sequence
  derived and/or modified sequence
atgcacggcgccgccagagcccccgccaccagcgtgagcgccgactgctgcatccccgccggcctgagactgggccccgtgcccggcaccttcaagctgggcaagtacctgagcgacagaagagagcccggccccaagaagaaggtgagaatggtgagaggcgagctggtggacgagagcggcggcagccccctggagtggatcggcctgatcagagccgccagaaacagccaggagcagaccctggaggccatcgccgacctgcccggcggccagatcttctacagagccctgagagacgtgcagcccggcgaggagctgaccgtgtggtacagcaacagcctggcccagtggttcgacatccccaccaccgccacccccacccacgacgagaagggcgaggagagatacatctgctggtactgctggagaaccttcagataccccaacagcctgaaggcccacctgagattccactgcgtgttcagcggcggcggcggcggcgccttcctgcaccacgagcacgccgccagacagggcgccgtgcccgccgccgacggcctgggcctgagccccaagccccccgcccccgacttcgccgcccccagccaggccggcaccctgagaccccaccccctgggccccccccccgtgcaggcctgcggcgccagagagggcatcaagagagaggccagcagcgcccccagcgccaccagccccacccccggcaagtggggccagcccaagaagggcaaggagcagctggacagagccctggacatgagcggcgccgccagaggccagggccacttcctgggcatcgtgggcggcagcagcgccggcgtgggcagcctggccttctaccccggcgtgagaagcgccttcaagcccgccggcctggccagagccgccgccgccgcccacggcgacccctacagagaggagagcagcagcaagcagggcgccggcctggccctgggcagactgctgggcggcggcagagcctgcggcagacccggcagcggcgagaacagcgccgccggcggcgccggccaccaccaccaccaccacgcccaccaccaccaccaccccaagtgcctgctggccggcgaccccccccccccccccccccccggcctgccctgcagcggcgccctgagaggcttccccctgctgagcgtgccccccgaggaggccagcgccttcaagcacgtggagagagccccccccgccgccgccgccctgcccggcgccagatacgcccagctgccccccgcccccggcctgcccctggagagatgcgccctgccccccctggaccccggcggcctgaaggcctaccccggcggcgagtgcagccacctgcccgccgtgatgcccgccttcaccgtgtacaacggcgagctgctgtacggcagccccgccaccaccgcctactaccccctgaagctgcacttcggcggcctgctgaagtaccccgagagcatcagctacttcagcggccccgccgccgccgccctgagccccgccgagctgggcagcctggccagcatcgacagagagatcgccatgcacaaccagcagctgagcgagatggccgccggcaagggcagaggcagactggacagcggcaccctgccccccgccgtggccgccgccggcggcaccggcggcggcggcagcggcggcagcggcgccggcaagcccaagaccggccacctgtgcctgtactgcggcaagctgtacagcagaaagtacggcctgaagatccacatgagaacccacaccggctacaagcccctgaagtgcaaggtgtgcctgagacccttcggcgaccccagcaacctgaacaagcacatcagactgcacgccgagggcaacaccccctacagatgcgagttctgcggcaaggtgctggtgagaagaagagacctggagagacacgtgaagagcagacaccccggccagagcctgctggccaaggccggcgacggccccggcgccgagcccggctacccccccgagcccggcgaccccaagagcgacgacagcgacgtggacgtgtgcttcaccgacgaccagagcgaccccgaggtgggcggcggcggcgagagagacctgtag

SEQ ID NO: 209118 - DNA, 384 bp, Artificial Sequence
  derived and/or modified sequence
atgcccaccatgtggaggatgctgcaccaggccctgaagctgcggcggaggacagtgctggccggccaggagatctcctatgtgctgcctgtgatgtttgtggtgtctgaggaggacagcaacagagatgtgttcctggtggccggctaccgccacctggagtttggagagagaattgccatctggggcagctccatgcagcacgtggagcggcggcgctggcccctggacagcatccagaagaggatgggccagagcttcaccggctgggccgaggaggccgcccctggcatgaagaccaagaaggagtatgcagaaattggagtgaagccccggcagaatgcctgtgagatgtgccccggcatgatcctgagcaccacctag

SEQ ID NO: 209119 - protein, 425 aa, Artificial Sequence
  derived and/or modified sequence
MPYVDRQNRICGFLDIEEHENSGKFLRRYFILDTQANCLLWYMDNPQNLAMGAGAVGALQLTYISKVSIATPKQKPKTPFCFVINALSQRYFLQANDQKDMKDWVEALNQASKITVPKGGGLPMTTEVLKSLAAPPALEKKPQVAYKTEIIGGVVVHTPISQNGGDGQEGSEPGSHTILRRSQSYIPTSGCRASTGPPLIKSGYCVKQGNVRKSWKRRFFALDDFTICYFKCEQDREPLRTIFLKDVLKTHECLVKSGDLLMRDNLFEIITSSRTFYVQADSPEDMHSWIKEIGAAVQALKCHPRETSFSRSISLTRPGSSSLSSGPNSILCRGRPPLEEKKALCKAPSVASSWQPWTPVPQAGEKLLPPGDTSEDSLFTPRPGEGSAPGVLPSSRIRHRSEPQHPKEKPFMFNLDDENIRTSDV

SEQ ID NO: 209120 - protein, 115 aa, Artificial Sequence
  derived and/or modified sequence
MPYVDRQNRICGFLDIEEHENSGKFLRRYFILDTQANCLLWYMDNPQNLAMGAGAVGALQLTYISKVSIATPKQKPKTPFCFVINALSQRYFLQANDQKDMKDWVEALNQASKIT

SEQ ID NO: 209121 - protein, 375 aa, Artificial Sequence
  derived and/or modified sequence
MGAGAVGALQLTYISKVSIATPKQKPKTPFCFVINALSQRYFLQANDQKDMKDWVEALNQASKITVPKGGGLPMTTEVLKSLAAPPALEKKPQVAYKTEIIGGVVVHTPISQNGGDGQEGSEPGSHTILRRSQSYIPTSGCRASTGPPLIKSGYCVKQGNVRKSWKRRFFALDDFTICYFKCEQDREPLRTIFLKDVLKTHECLVKSGDLLMRDNLFEIITSSRTFYVQADSPEDMHSWIKEIGAAVQALKCHPRETSFSRSISLTRPGSSSLSSGPNSILCRGRPPLEEKKALCKAPSVASSWQPWTPVPQAGEKLLPPGDTSEDSLFTPRPGEGSAPGVLPSSRIRHRSEPQHPKEKPFMFNLDDENIRTSDV

SEQ ID NO: 209122 - DNA, 1278 bp, Artificial Sequence
  derived and/or modified sequence
atgccctatgtcgatagacagaacaggatctgtggctttcttgacatagaagaacacgaaaattctggtaagtttctcaggcgctacttcatcttggatacacaggccaattgcttactgtggtatatggacaatccacagaatctggcgatgggggcgggggcggtgggagccctccagctgacatacatctccaaggtgtcgatcgccacacccaaacagaaacctaagacaccattctgcttcgttataaacgctctctcacaacggtactttttacaggccaacgaccagaaggatatgaaagactgggtggaggccctgaaccaggcgtctaaaatcaccgttccaaaaggcggggggcttcccatgaccacagaggtgctaaagagcctggccgcccccccagccctggaaaagaagccacaggttgcctacaaaaccgagattattggaggagtagtagttcatacaccaatttcccaaaacggtggggatggacaggaaggcagtgagccgggtagccatactatattacggaggtcgcaaagctacataccaacctccgggtgcagggcctctactggcccccccttgatcaaaagtggttactgtgtgaagcaagggaatgtgaggaagagttggaagaggaggtttttcgcactggatgatttcacgatctgctacttcaagtgcgaacaagacagggagcccttgcgtacaatctttttgaaagatgtactgaagacgcatgagtgcctcgtgaagtcaggggacttattaatgagagacaacctgtttgagatcattaccagttctcgtacattctacgtacaagccgacagtcccgaggacatgcactcttggattaaggaaataggggccgccgtacaggcgcttaagtgccatcccagggaaacatctttctcgaggtccatttcactcacccggccaggcagctcctcactttcatcaggccccaattccatcctgtgtagagggaggccaccacttgaagagaagaaggccctgtgtaaagcgccgtccgtggctagcagttggcagccttggacacctgtaccacaagcaggtgagaagctgctaccacccggggacacctctgaggactcacttttcactccaaggccaggcgagggatctgcgcctggcgtcctaccatcatctaggattcggcacaggtccgagccccagcaccctaaggagaagccctttatgtttaatttggatgacgaaaacatccgaacctccgatgtatag

SEQ ID NO: 209123 - DNA, 1128 bp, Artificial Sequence
  derived and/or modified sequence
atgggggccggcgctgtgggcgctctccagctgacatacatttctaaggtctctatcgccacccccaagcagaagccgaagaccccgttttgtttcgtcattaatgctttgtcccaacggtacttcctgcaggctaatgaccagaaagatatgaaggattgggtggaagctctgaaccaagctagcaagataacggtgccaaaggggggaggcttacccatgaccactgaggtcttgaagtccctcgcagcaccacccgccctggagaaaaaaccccaggtggcctacaaaaccgagattatcggcggcgtcgtagttcatacgcccatttcccagaatggcggagatggccaagaggggtccgaacctggttcccacacaatcctgcggagatcacagtcttatatccctacaagcggttgtagagcaagtaccgggcccccacttataaagtctgggtattgtgtaaagcagggtaacgtgaggaagagttggaagcgccgtttttttgcattggatgatttcaccatctgctactttaagtgcgaacaagacagggagcccctacgcaccatttttttgaaggacgtgttgaaaacacatgagtgcttagtaaaaagcggggacctgctgatgcgggataatctcttcgagatcattacaagctctcggactttctacgtgcaggcagacagccctgaagatatgcacagctggatcaaggaaatcggggccgccgtgcaggccctcaagtgccacccgcgggagaccagcttctcacggagtatttccctgacaagacctggtagcagcagccttagcagtggtccaaattccattctgtgcaggggcagaccgcccctggaagagaaaaaggcactctgtaaggctccaagcgtggccagttcctggcagccatggacccccgtccctcaggctggcgagaagctgctgccccctggagatacttccgaggattctctatttaccccacggcctggggaggggtccgccccgggcgtactcccatcttcccgaatcagacacaggtccgaaccccagcatcctaaagagaagccttttatgttcaatctggatgatgagaacattcgcacctcagacgtttag

SEQ ID NO: 209124 - DNA, 1278 bp, Artificial Sequence
  derived and/or modified sequence
atgccctacgtggaccggcagaaccgcatctgtggcttcctggacatcgaggagcacgagaacagcggcaagttcctgcggcgctacttcatcctggacacccaggccaactgcctgctgtggtacatggacaacccccagaacctggccatgggcgctggagctgtgggcgccctgcagctgacctacatcagcaaggtgtccatcgccacccccaagcagaagcccaagacccccttctgcttcgtcatcaatgccctgagccagcgctacttcctgcaggccaatgaccagaaggacatgaaggactgggtggaggccctgaaccaggccagcaagatcaccgtgcccaagggcggcggcctgcccatgaccacagaggtgctgaagagcctggccgcccccccagccctggagaagaagccccaggtggcctacaagacagagatcattggaggagtggtggtgcacacccccatcagccagaatggaggagatggccaggagggcagcgagcccggcagccacaccatcctgcggcgcagccagagctacatccccaccagcggctgccgggccagcactggacctcctctcatcaagagcggctactgtgtgaagcagggcaatgtgaggaagtcctggaagaggcgcttctttgccctggatgacttcaccatctgctacttcaagtgtgagcaggaccgggagcccctgcggaccatcttcctgaaggatgtgctgaagacccatgagtgcctggtgaagagcggggacctgctgatgagggacaacctgtttgagatcatcaccagcagcaggaccttctacgtgcaggccgacagccctgaggacatgcacagctggatcaaggagattggagctgctgtgcaggccctgaagtgccacccccgggagaccagcttcagccgcagcatcagcctgacccggcccggcagcagcagcctgagcagcggccccaacagcatcctgtgccggggccggccccccctggaggagaagaaggccctgtgcaaggcccccagcgtggccagctcctggcagccctggacccctgtgccccaggccggggagaagctgctgcccccaggggacaccagcgaggacagcctcttcacccccaggcctggagagggcagcgcccctggggtgctgcccagcagccgcatccgccacaggtctgagccccagcaccccaaggagaagcccttcatgttcaacctggatgatgagaacatccgcaccagtgatgtgtag

SEQ ID NO: 209125 - DNA, 1128 bp, Artificial Sequence
  derived and/or modified sequence
atgggcgctggagctgtgggcgccctgcagctgacctacatcagcaaggtgtccatcgccacccccaagcagaagcccaagacccccttctgcttcgtcatcaatgccctgagccagcgctacttcctgcaggccaatgaccagaaggacatgaaggactgggtggaggccctgaaccaggccagcaagatcaccgtgcccaagggcggcggcctgcccatgaccacagaggtgctgaagagcctggccgcccccccagccctggagaagaagccccaggtggcctacaagacagagatcattggaggagtggtggtgcacacccccatcagccagaatggaggagatggccaggagggcagcgagcccggcagccacaccatcctgcggcgcagccagagctacatccccaccagcggctgccgggccagcactggacctcctctcatcaagagcggctactgtgtgaagcagggcaatgtgaggaagtcctggaagaggcgcttctttgccctggatgacttcaccatctgctacttcaagtgtgagcaggaccgggagcccctgcggaccatcttcctgaaggatgtgctgaagacccatgagtgcctggtgaagagcggggacctgctgatgagggacaacctgtttgagatcatcaccagcagcaggaccttctacgtgcaggccgacagccctgaggacatgcacagctggatcaaggagattggagctgctgtgcaggccctgaagtgccacccccgggagaccagcttcagccgcagcatcagcctgacccggcccggcagcagcagcctgagcagcggccccaacagcatcctgtgccggggccggccccccctggaggagaagaaggccctgtgcaaggcccccagcgtggccagctcctggcagccctggacccctgtgccccaggccggggagaagctgctgcccccaggggacaccagcgaggacagcctcttcacccccaggcctggagagggcagcgcccctggggtgctgcccagcagccgcatccgccacaggtctgagccccagcaccccaaggagaagcccttcatgttcaacctggatgatgagaacatccgcaccagtgatgtgtag

SEQ ID NO: 209126 - DNA, 1278 bp, Artificial Sequence
  derived and/or modified sequence
atgccctacgtggaccggcagaaccggatctgcggcttcctggacatcgaggaacatgagaactcgggcaaattcctgagaagatacttcatccttgatacgcaagccaactgccttctttggtatatggataacccacagaacctggccatgggagccggtgctgttggggctctgcagttgacgtacatttccaaagtctctatcgccactccaaaacagaaacctaagactccgttctgctttgtcataaatgcacttagtcagcggtatttcctgcaggcaaatgaccagaaagacatgaaggattgggtcgaggcgcttaaccaggcatccaaaatcaccgtgcccaaaggcggtggcctcccaatgacaaccgaggtccttaaatcattggcagccccccccgcgctggagaagaagccccaggtagcctataaaactgaaatcattggcggggttgtggtgcacactcctatcagccaaaacggcggggatgggcaggaaggttctgagccaggaagccacactatcttgagacggtcccagtcttatattccaactagtgggtgtagggcgagcacgggccctcctcttattaagagcgggtactgtgtgaagcagggtaatgttcgcaagtcctggaaacgcagatttttcgcattggatgattttacgatttgctactttaagtgtgagcaggaccgggagcccctccgcacaatctttctcaaagacgtgttaaagacacatgagtgcctggtcaaaagtggtgacctcctcatgcgcgataacctgtttgaaatcatcaccagcagtagaaccttctatgtccaggcagactctcccgaagacatgcatagctggataaaggaaattggggccgccgtccaggccctgaaatgccatccacgggaaacctcattcagccggtccattagtctgactcgaccagggagctcatccctgagtagtggccccaactcaatactgtgtcgagggcgcccaccactagaggagaagaaggctttgtgcaaagcacctagcgtggcttcaagctggcagccctggacccctgtgccccaggccggcgagaagctcctgccacccggggacacaagcgaggattctttgtttactccacgcccgggtgaaggcagtgccccgggggtcctccccagcagcaggatccggcaccgcagtgagccacagcacccaaaagagaagccattcatgttcaacttagacgacgagaacattagaacgtccgatgtctag

SEQ ID NO: 209127 - DNA, 1128 bp, Artificial Sequence
  derived and/or modified sequence
atgggcgccggcgccgtgggcgccctgcagctgacctacatcagcaaagtgtccatcgcaacaccaaagcagaaaccaaaaacccctttctgcttcgtcattaatgcactctcccaaagatactttttgcaagcaaacgatcagaaggacatgaaagattgggtggaggcactgaatcaggctagtaagatcaccgtcccaaagggcggaggtctgcctatgaccactgaggtgcttaagtccctggccgcacctccagcactggaaaagaagcctcaggttgcttacaagacggaaatcattggcggtgtcgtcgtgcacacaccaattagccagaatgggggggatggccaggagggaagcgagcctggatcccataccattctccgaaggtctcaaagttacattcctacaagtggctgccgagctagcactgggccccctttgatcaaatctggctattgcgtcaaacaggggaacgtacgcaagagttggaaaaggagattcttcgcactcgatgattttacaatatgctatttcaaatgcgaacaggacagagaacctctgaggacaatctttctgaaggacgtgctgaaaactcatgaatgcttagtgaagagcggcgacctgctcatgcgtgataatttattcgagattatcaccagctccagaacattttatgtgcaggctgattcccccgaagatatgcactcttggatcaaggaaattggagcagccgttcaggctctgaaatgtcatccacgggaaacaagtttcagcagaagtatttctctgaccaggcccgggagctcatctctcagcagcggccctaattctattctatgccgagggcgcccgcctcttgaggagaaaaaagctctctgcaaagccccctccgtggccagctcctggcagccctggacaccagtgcctcaggccggcgaaaagctacttcctcccggtgacacgagtgaagactccctgttcacccctaggcctggggaggggagcgctcctggtgtgttaccaagttctaggatcaggcaccgatcggagccacagcaccctaaggagaaaccttttatgtttaacttggacgatgaaaatattcgcacatccgacgtatag

SEQ ID NO: 209128 - DNA, 5638 bp, Artificial Sequence
  derived and/or modified sequence
aatgcgaaacgtaattaacccggaaaaaagagccgagggacgggagagaaggagggggcactgggggagaccagagcgaggggagcgagaggcgcggagagtttggcaggcagacccagaaatccctggagcgcggcggacccggcggccggaggggcgaccccgcccgatgtaacgcgccccgcccgagccccggcccctgcacggggggggtgatgtgagcagagcccaggaatgccttatgtggatcggcagaaccgaatctgtgggtttctggacatcgaggagcatgagaacagcggcaagtttctgcggaggtacttcattctggacacccaggctaactgcctcctctggtatatggacaacccccagaatctggcaatgggggcaggagctgttggagctttgcagctgacctacatctcgaaggtgagcatagctaccccaaaacagaaaccaaaaactccattttgctttgttatcaatgccctgtctcagagatatttccttcaagccaatgatcagaaagatatgaaggactgggttgaagccctgaaccaagccagcaagatcaccgttcccaaaggtgggggcctacccatgaccactgaagttctcaagagcttagcagctcctccagccctggagaagaagccacaggtggcctacaagacggagatcattggaggggtggtggtccacacacccatcagccagaacggtggggatgggcaggaagggagtgagcccgggtcccacaccatccttcgaaggtctcagagttacatccccacgtcaggctgccgtgcttccactgggcctcccctcattaagagtggttactgcgtgaagcaagggaatgtgcggaagagctggaaacgtcgcttctttgcacttgatgactttaccatctgctacttcaagtgtgagcaggaccgagaaccactgcgcaccatatttcttaaggatgttctgaagacccatgaatgtctggtcaagtctggtgatctcttaatgagggacaacctgtttgaaataataacaagctccaggaccttctacgtacaggcagacagtccagaagacatgcacagctggattaaggagattggcgcagctgtccaggccctcaagtgccaccccagagaaacgtccttttctagatccatttctttgacccgacctggaagctccagcctttcaagtgggcccaactctatcctgtgcagggggcggccacctttggaggaaaagaaagccctctgcaaagccccctctgtggcctcctcctggcagccctggacacctgtcccccaggctggggagaagctgcttccacctggagacacttcagaggactccttgttcacgcctcgtcctggggagggcagcgcccctggggtgctgcccagctcccggataaggcacagatcggagccccagcaccccaaggagaagccgtttatgttcaaccttgatgatgaaaacatacggacctctgatgtgtgatggagcacagtgccatgggagggagggagggagggaggacttgagagaaggaggctgtgactcagtttctctaccttgttggagggtagtcagaggcctttatgtcactcatattcctgtggatgctctttgggagggaggggcccatccagctgggctgtgtgtgtgtgtgtgtgtgtgtgtgtgtgtgtgtgtaatatcaacgcagtgtatttaatttggggaagtcactaggttagaactgtaggcatactcagtggagaggaagctacctattctattctaactattctgaggtcttcctggagagggattgttttagcagctcctctccagagggggctggaagtccagtttcaccaatgaccaagttttatttccttgtccttgttttagttttttcattttgttttcagtccaggtgcctcgcagctcttttggaatgggccagcattagtctaattttaagcgctatgtgttttgtacccttgcaaacttgctttctctttcttcttgctgttgccctttgaatgaagccttgtgtgcttgcatgatcagaccctgtaataggatgaatttccatgcacttaacatgaagagatacaaaaagaatctagagagagatatatatttttaatgaaatagaagcttggcatagaaacattgatttagatgttatgagttgctggccagagattcctcagataaaagagcctagaaaattgagttttgagcgggcatggtggctcacgcctgtaatgccagtagtttgggaggctgaggcgggtggatcacctgaggtcaggagttcgagatcagcctggccaacatggtgaaaccccgcctctactaaaaaatatgcaaaattagccgggcgtggtggtgcaggcctgtaatcccagctactcagaggctgaggcaggagattcacttgaacccaggaggtggaggttgcagtgagccaagatcgcgccattgcactccagtcagggcaacaagagtgaaactccgtctcaaaatataaaagaaaattgagtgtcccacccaaattttagggcgtacctccttccatttgataagaagatgctatttccagtgtccctgggagaattcttccatccagtttatatggtgaattgccaccagcgttccctaaaggaagagagaacttagcttatttctgtctgtgacttttatcagctagatcagttaattgtatttttaaattaaaaattagtaactagaggaagagactaagagaactatttttacctgagtaaatgctctcctcttcttgtgtccaaatctaatgcagaggtgaaaacacttgatgagaaaatcctttgtggcttgaggggaatcatgtttctttcaggacgtgttgtttccctgaagtctatgtcacactgagaactttttctgactgcactgctttggagctattcatttaaattgagtttggcctagttttcctggtataaaacaggaaatctacattgttccctctttctctcccttccatcccttcccctgcctttcctatacacgctggtgtgcttttgccctcagaaattcttggtttgggagttatgtatttttgagtgatcgaggttatgacatacttggagcggcatgatttcaagaagccattccaaattcttatagctccttagctctggttttactctcgtattttccccaagaaaattttttggctattcaaagaaagcacaaaatatgtgatgtggaactcatgaaaatagggacttttgatatctctttaaatattccctgactcacggaaaagatgtcctcttttggtgtatacattgtgaaaatctacccatttatctctctctctctcttttcttttaaataaattatctgataaggccggcaaggtggctcacgcctgtaatcccagcactttgggaggccgaggcgagcggatcacgaggtcaggagatcgagaccgcggtgaaaccccgtctctactaaaaatacgaaaaaaaaattagccgggcgcagtggcaggcgcctgtagtcccagctacttgggaggctgcggcaggagaatggtgtgaacctgggaggcggagcttgcagtgagccaagatcgcgccactgcactccagcctgggcgacagagcaagactccatctcaaaaaaaaaattatctgataggttactattgctaaattaattggccattataataagctgatttgtttcttattcagcaagatctcttttgagaatgtgacaaattaaacatacatagaatccatatggtattatcctgataaagggaaacgaggacactaagactgtcaaatggaaatcttcttgtcaattggcaaacacttgggaattccacattagagcattgcttgtttttaattttttttttttaatttttaaaagacagggtctcactctcttacccaggctagagtgcagtggtgtgatcatagttcatcataactttgaatctctgggcttaagcaatcctcccatgttagcttcccaagtagctaggactacagggttgtgctaccacgcctggctaatttttaatttttttttatctacagagcctggctatgttgcccaggctctctcaaactcctggcccaagtgatcctcctgccttggcctcctaaagtgttgggattacaggtgtgagccactgcacctagccagaacatcgttaatgtagttcaatatgagataaattattatcttcaatgaaacaagctctaaaagcattccattcctaaattgtatttcaaacttcctattttgttgatatttcttaacttctggccagttttggaccataatcttttaatgtgaaccaaagatggtacgtatttgaccaaagcagttagttttaaatgtataaaattgaaccaaatggaaaaaataggttggggatgcagtatagattagtgactaagtgcataggctctggagtaaatctgagtttttttttttttaaaggaactaaaaaatgtactgcattttctttgtggaataaaagccttgcctgagttgtgctattttcataaggcttttgaagtggtcttgacccactgtgtgtaacagtatttcaggtggtcctccccatggctgaataatgccatccattattctttaatttttatttttagaaacagtgtttcactctgtcacccaggctggagtgcagtggcctgatcatggctcactgcagcctggacctcctgggctcaagtgatcttcctgcctcacagcctcccaaagtactcagattataggtgtgagccaccacgcctggccaccatctattacttttgaaatcttcaaaagacttgcttactcaatgtcagctgatggttggtaaaaataatttggcctttagtgttaagtgagacatcataagggtattgaggtatacattatggagattgatgtcaggtcagaatattggagttatacatctatttctgagttgaatactcagctcccacgagaaagaaagtagttttaaggtccagcttcttagtctacttgaagcaaattttttttcttttatatttctgaatataaatatactcttatatgggctaaaaagaccccatgaataaatagcaggttcagtagttgaggagtggagtttagtaggtttgttttcagtataaattagataacatgtggaggtcacagcattttggaaattgagtgtccccaagtgagctttgtttataaactttcaaaatgtcggaagtggacaggtttgttaaatcttgtctgccagcacccttttcttcctttgttccttttcctctctgtgttattgcctgcggcagccagtccttcatactagatagagttcagataaagcaaacgtttggcaaaaacatactgtttgacctcctccccctctgcttatgaaggggtagcatgattctgtgttttaaagcagtgatgtttcagctgtgaaatgcactcgctgtaagctctaggctgagtgcatggaaactgttacgcttctcattttatgtgatctcctaattggtatgtagcaaaaattttctaaaactgttttgtggcttgttttgtaataaaaccatgtgaaatactg

SEQ ID NO: 209129 - DNA, 1749 bp, Artificial Sequence
  derived and/or modified sequence
agagaaggagggggcactgggggagaccagagcgaggggagcgagaggcgcggagagtttggcaggcagacccagaaatccctggagcgcggcggacccggcggccggaggggcgaccccgcccgatgtaacgcgccccgcccgagccccggcccctgcacgggggggaatctggcaatgggggcaggagctgttggagctttgcagctgacctacatctcgaaggtgagcatagctaccccaaaacagaaaccaaaaactccattttgctttgttatcaatgccctgtctcagagatatttccttcaagccaatgatcagaaagatatgaaggactgggttgaagccctgaaccaagccagcaagatcaccgttcccaaaggtgggggcctacccatgaccactgaagttctcaagagcttagcagctcctccagccctggagaagaagccacaggtggcctacaagacggagatcattggaggggtggtggtccacacacccatcagccagaacggtggggatgggcaggaagggagtgagcccgggtcccacaccatccttcgaaggtctcagagttacatccccacgtcaggctgccgtgcttccactgggcctcccctcattaagagtggttactgcgtgaagcaagggaatgtgcggaagagctggaaacgtcgcttctttgcacttgatgactttaccatctgctacttcaagtgtgagcaggaccgagaaccactgcgcaccatatttcttaaggatgttctgaagacccatgaatgtctggtcaagtctggtgatctcttaatgagggacaacctgtttgaaataataacaagctccaggaccttctacgtacaggcagacagtccagaagacatgcacagctggattaaggagattggcgcagctgtccaggccctcaagtgccaccccagagaaacgtccttttctagatccatttctttgacccgacctggaagctccagcctttcaagtgggcccaactctatcctgtgcagggggcggccacctttggaggaaaagaaagccctctgcaaagccccctctgtggcctcctcctggcagccctggacacctgtcccccaggctggggagaagctgcttccacctggagacacttcagaggactccttgttcacgcctcgtcctggggagggcagcgcccctggggtgctgcccagctcccggataaggcacagatcggagccccagcaccccaaggagaagccgtttatgttcaaccttgatgatgaaaacatacggacctctgatgtgtgatggagcacagtgccatgggagggagggagggagggaggacttgagagaaggaggctgtgactcagtttctctaccttgttggagggtagtcagaggcctttatgtcactcatattcctgtggatgctctttgggagggaggggcccatccagctgggctgtgtgtgtgtgtgtgtgtgtgtgtgtgtgtgtgtgtaatatcaacgcagtgtatttaatttggggaagtcactaggttagaactgtaggcatactcagtggagaggaagctacctattctattctaactattctgaggtcttcctggagagggattgttttagcagctcctctccagagggggctggaagtccagtttcaccaatgaccaagttttatttccttgtccttgttttagttttttcattttgttttcagtccaggtgcctcgcagctcttttggaat

SEQ ID NO: 209130 - DNA, 1278 bp, Artificial Sequence
  derived and/or modified sequence
atgccttatgtggataggcagaaccgaatatgtggcttcttggacatagaggagcacgaaaattccggcaagttcttgcggcgttactttatccttgacactcaagccaactgcctgctgtggtatatggacaaccctcagaatctggcaatgggcgcaggagccgtgggtgcactgcagctcacctatatctctaaagtatctattgctacccctaagcagaagccaaaaacccccttctgtttcgtcatcaatgctctgagccagcggtattttctccaggctaatgatcaaaaggacatgaaggactgggttgaggctctcaaccaagcatcaaaaataaccgtgcctaagggaggtggcctgcccatgactacagaagttctgaagagcctcgccgcaccacccgctctggagaagaagccacaggttgcctataagactgagatcatcggtggcgttgtcgtccacacaccaatcagccagaacggcggagacgggcaagagggaagcgagcccggttctcatactatactccggaggtcccagagctacatacccacatcaggctgcagggcttccacaggccctccattaattaaatccggttactgcgtgaaacagggtaatgttcgtaaatcatggaagcgcaggttctttgctctcgatgattttacaatttgttattttaagtgcgaacaagaccgcgagcctctccgcacgatctttctgaaggacgtgctgaaaactcatgagtgccttgtaaaatcgggtgatctgttgatgagggacaatcttttcgagattatcacaagttcaagaacattctacgtgcaggcagatagtccagaggatatgcactcttggatcaaggagatcggagctgctgtgcaggccttgaagtgtcatcctagggaaacctctttcagcaggtccatcagcctgactcggccaggctccagctccctgtcctcaggcccaaattctattttatgccggggacgcccaccccttgaagaaaaaaaagccctgtgcaaggctccttcggtggcgtcttcgtggcagccctggacccccgtgcctcaggcgggtgaaaagctgctgccccctggtgacacctctgaggactccttatttacgccaaggcccggtgaagggagcgcccctggcgtgttaccttcttctaggataaggcatcggagcgagcctcagcaccccaaggagaagcctttcatgtttaatctagacgatgagaacattcggactagcgacgtgtag

SEQ ID NO: 209131 - DNA, 1128 bp, Artificial Sequence
  derived and/or modified sequence
atgggagccggagccgtgggagccctccagttgacgtacataagcaaggtctctatagctacgcctaagcagaaacctaaaacacctttctgctttgtcattaacgctctgtctcaacggtattttctacaggctaacgaccagaaggacatgaaagactgggtcgaagctctcaatcaggccagcaaaattactgtccctaaaggtggaggtctgccaatgacgacagaggtcctaaagtcccttgctgctccgccagctctggaaaagaagccacaggtggcctataagaccgagataattggaggcgtggtggtgcatactcccatttcccaaaacgggggtgatggccaggaaggctcagagccagggagccacactattctgcgtagatcgcagtcctacattcccacttcgggatgccgcgcttcaacaggtccccctctgataaagtctggatactgcgtcaagcaggggaacgtccggaagtcatggaagcggaggttctttgccctggacgattttacaatctgctacttcaagtgtgagcaggatcgggagccactgcggacgatcttcctgaaagatgtcctgaagactcatgagtgtttagtgaagtcgggcgacctactgatgagggataatctgtttgaaataataacgtcatcgcgcaccttttatgtccaggctgactcgcctgaagatatgcattcctggatcaaggaaatcggcgctgcagtccaggccctgaagtgtcacccccgtgagacaagtttctccaggtcaatctccctgacaaggccaggctcttctagcctgtcatcggggcctaactcaattctgtgtcgcggtcggccacccctcgaagaaaagaaggcattgtgcaaagcccctagcgtggccagctcatggcaaccctggactcccgtgccccaggccggtgaaaaattactcccaccaggcgatacctccgaagattctctgttcactcccagaccaggcgaaggtagcgcacctggcgtcctgccatcctctagaatccgtcaccgcagcgagccacaacatccgaaagagaaacccttcatgttcaatctggatgacgaaaatatcagaacctccgacgtgtag

SEQ ID NO: 209132 - DNA, 1278 bp, Artificial Sequence
  derived and/or modified sequence
atgccctacgtggacagacagaacagaatctgcggcttcctggacatcgaggagcacgagaacagcggcaagttcctgagaagatacttcatcctggacacccaggccaactgcctgctgtggtacatggacaacccccagaacctggccatgggcgccggcgccgtgggcgccctgcagctgacctacatcagcaaggtgagcatcgccacccccaagcagaagcccaagacccccttctgcttcgtgatcaacgccctgagccagagatacttcctgcaggccaacgaccagaaggacatgaaggactgggtggaggccctgaaccaggccagcaagatcaccgtgcccaagggcggcggcctgcccatgaccaccgaggtgctgaagagcctggccgccccccccgccctggagaagaagccccaggtggcctacaagaccgagatcatcggcggcgtggtggtgcacacccccatcagccagaacggcggcgacggccaggagggcagcgagcccggcagccacaccatcctgagaagaagccagagctacatccccaccagcggctgcagagccagcaccggcccccccctgatcaagagcggctactgcgtgaagcagggcaacgtgagaaagagctggaagagaagattcttcgccctggacgacttcaccatctgctacttcaagtgcgagcaggacagagagcccctgagaaccatcttcctgaaggacgtgctgaagacccacgagtgcctggtgaagagcggcgacctgctgatgagagacaacctgttcgagatcatcaccagcagcagaaccttctacgtgcaggccgacagccccgaggacatgcacagctggatcaaggagatcggcgccgccgtgcaggccctgaagtgccaccccagagagaccagcttcagcagaagcatcagcctgaccagacccggcagcagcagcctgagcagcggccccaacagcatcctgtgcagaggcagaccccccctggaggagaagaaggccctgtgcaaggcccccagcgtggccagcagctggcagccctggacccccgtgccccaggccggcgagaagctgctgccccccggcgacaccagcgaggacagcctgttcacccccagacccggcgagggcagcgcccccggcgtgctgcccagcagcagaatcagacacagaagcgagccccagcaccccaaggagaagcccttcatgttcaacctggacgacgagaacatcagaaccagcgacgtgtag

SEQ ID NO: 209133 - DNA, 1128 bp, Artificial Sequence
  derived and/or modified sequence
atgggcgccggcgccgtgggcgccctgcagctgacctacatcagcaaggtgagcatcgccacccccaagcagaagcccaagacccccttctgcttcgtgatcaacgccctgagccagagatacttcctgcaggccaacgaccagaaggacatgaaggactgggtggaggccctgaaccaggccagcaagatcaccgtgcccaagggcggcggcctgcccatgaccaccgaggtgctgaagagcctggccgccccccccgccctggagaagaagccccaggtggcctacaagaccgagatcatcggcggcgtggtggtgcacacccccatcagccagaacggcggcgacggccaggagggcagcgagcccggcagccacaccatcctgagaagaagccagagctacatccccaccagcggctgcagagccagcaccggcccccccctgatcaagagcggctactgcgtgaagcagggcaacgtgagaaagagctggaagagaagattcttcgccctggacgacttcaccatctgctacttcaagtgcgagcaggacagagagcccctgagaaccatcttcctgaaggacgtgctgaagacccacgagtgcctggtgaagagcggcgacctgctgatgagagacaacctgttcgagatcatcaccagcagcagaaccttctacgtgcaggccgacagccccgaggacatgcacagctggatcaaggagatcggcgccgccgtgcaggccctgaagtgccaccccagagagaccagcttcagcagaagcatcagcctgaccagacccggcagcagcagcctgagcagcggccccaacagcatcctgtgcagaggcagaccccccctggaggagaagaaggccctgtgcaaggcccccagcgtggccagcagctggcagccctggacccccgtgccccaggccggcgagaagctgctgccccccggcgacaccagcgaggacagcctgttcacccccagacccggcgagggcagcgcccccggcgtgctgcccagcagcagaatcagacacagaagcgagccccagcaccccaaggagaagcccttcatgttcaacctggacgacgagaacatcagaaccagcgacgtgtag

SEQ ID NO: 209134 - protein, 390 aa, Artificial Sequence
  derived and/or modified sequence
MPDTNSTINLSLSTRVTLAFFMSLVAFAIMLGNALVILAFVVDKNLRHRSSYFFLNLAISDFFVGVISIPLYIPHTLFEWDFGKEICVFWLTTDYLLCTASVYNIVLISYDRYLSVSNAVSYRTQHTGVLKIVTLMVAVWVLAFLVNGPMILVSESWKDEGSECEPGFFSEWYILAITSFLEFVIPVILVAYFNMNIYWSLWKRDHLSRCQSHPGLTAVSSNICGHSFRGRLSSRRSLSASTEVPASFHSERQRRKSSLMFSSRTKMNSNTIASKMGSFSQSDSVALHQREHVELLRARRLAKSLAILLGVFAVCWAPYSLFTIVLSFYSSATGPKSVWYRIAFWLQWFNSFVNPLLYPLCHKRFQKAFLKIFCIKKQPLPSQHSRSVSS

SEQ ID NO: 209135 - DNA, 1173 bp, Artificial Sequence
  derived and/or modified sequence
atgcctgacaccaacagcaccatcaatctctcactgtcaacccgcgttacgctggcattttttatgagtctagtagcgttcgccataatgctgggcaatgcccttgtcattctcgcttttgtagtggataagaatttgcgacatagaagctcttacttcttcctgaacctcgcgatttccgatttctttgtgggggtaatctccattcccctatatatccctcacacgctgttcgagtgggacttcggaaaggagatctgcgtcttctggctgaccactgactacctgctgtgcacggcaagcgtgtacaacattgtgctcatctcgtacgatcggtatctgtcagtctctaacgccgttagctaccgaacacagcatacgggggtgttgaaaatcgtgactctcatggttgccgtgtgggttctcgcatttctcgtgaacgggccaatgatactcgtcagcgagagttggaaggacgaaggctctgagtgtgaacccgggtttttctccgagtggtacattctggccattacatcctttctcgagttcgttatccctgtcatcctggttgcctactttaatatgaacatttactggtcactgtggaagagagaccacctcagccgatgtcaatcgcatccagggcttaccgctgttagctccaacatctgtggacactcttttcggggacgcctttctagtcggcgatcactgagcgcctcaactgaggttcctgcttcttttcatagcgaacgacagcgacggaagtcttcgctaatgttctcatctcggactaagatgaactcaaataccattgcatccaaaatgggaagcttctcccagtccgattctgtggcactccatcagcgggaacacgtggaactgctcagagctcgacggcttgccaagagtctcgctattctcctcggtgtgttcgctgtttgttgggctccttacagccttttcacaatcgtgcttagcttttattccagtgcgacaggcccaaagtccgtctggtaccgcatagccttctggctccagtggttcaatagctttgtgaaccccctcctgtatcctctgtgtcataaaagattccagaaagcatttctcaaaatcttttgcattaagaagcaacccctcccgagtcagcattcccgttccgtcagctcttag

SEQ ID NO: 209136 - DNA, 3668 bp, Artificial Sequence
  derived and/or modified sequence
ggaagactacacattttaggtatgtgattagaaaacatacttgtcagaattgtctggctggattaatttgctaatttgaccttcttcatcatttgatgtgatgccagatactaatagcacaatcaatttatcactaagcactcgtgttactttagcattttttatgtccttagtagcttttgctataatgctaggaaatgctttggtcattttagcttttgtggtggacaaaaaccttagacatcgaagtagttatttttttcttaacttggccatctctgacttctttgtgggtgtgatctccattcctttgtacatccctcacacgctgttcgaatgggattttggaaaggaaatctgtgtattttggctcactactgactatctgttatgtacagcatctgtatataacattgtcctcatcagctatgatcgatacctgtcagtctcaaatgctgtgtcttatagaactcaacatactggggtcttgaagattgttactctgatggtggccgtttgggtgctggccttcttagtgaatgggccaatgattctagtttcagagtcttggaaggatgaaggtagtgaatgtgaacctggatttttttcggaatggtacatccttgccatcacatcattcttggaattcgtgatcccagtcatcttagtcgcttatttcaacatgaatatttattggagcctgtggaagcgtgatcatctcagtaggtgccaaagccatcctggactgactgctgtctcttccaacatctgtggacactcattcagaggtagactatcttcaaggagatctctttctgcatcgacagaagttcctgcatcctttcattcagagagacagaggagaaagagtagtctcatgttttcctcaagaaccaagatgaatagcaatacaattgcttccaaaatgggttccttctcccaatcagattctgtagctcttcaccaaagggaacatgttgaactgcttagagccaggagattagccaagtcactggccattctcttaggggtttttgctgtttgctgggctccatattctctgttcacaattgtcctttcattttattcctcagcaacaggtcctaaatcagtttggtatagaattgcattttggcttcagtggttcaattcctttgtcaatcctcttttgtatccattgtgtcacaagcgctttcaaaaggctttcttgaaaatattttgtataaaaaagcaacctctaccatcacaacacagtcggtcagtatcttcttaaagacaattttctcacctctgtaaattttagtctcaatctcacctaaatgaatcaggtctgccctttatcttgcccttttcattctaccaacagatctgcactttgaagtcaatggtaaattactccagtgaataatagcagtataatatgacttgataatatttttgtaaacttgtagtcataatagtactatattcttcttagtcctcacctcttccttgtcttttagatcttaatttcatgctgattacaaaaatccagttttgttttctttctatgttccatgcataatacagtcttaagtgaatttctcttttttaattttatcgtaatagaaacttatccagtttgaaaatcattccctaaagcatgcaataggaaaaagaacctcctggctgggactgcccaactctgttctgatcagtgggtgggtgaggtagggtttgagttggcaagagcagggaacgggcatgtgcccaggtgagctcctgtgtgtgtccagattttatattcctaatcccagtaaggaagaaagcgtagtgtgggagaggagagagctgatgactgcagttctcaaaggtcctcagtgaagttattttggaggccctggtggtcacaggatcagaaggcaagggataggcagtggtcaccaatggttgaaagtatggcttgtcccatttcttcctgttctctttttctagcttccacatcagcttccttttttgagaacatatagaagaagaaggctaagagatggtgaagagactgcatgattaaactagatagacctggtatacagtcactgaactagtagatgtcaataattattatttttaaaaatttttatttgttggccgggcatggtggctcacgcctgaaatcccagcactttgggaggccaaggtgggcggatcatgaggtcaggagatcgagaccatcctggccaacatggtgaaaccccatctgtactaaaatacaaacaagtagctggttgtggcgccgcatgcctgtagtcccagctactcgggaggctgaggcaggggaattgcttgaacccgggaggcggagtttgccagcctggcaacagaacaagactctgtctaaaaagaaaaaaaaatttttttgtttaagacagcatcttgctctgtctcccaggctggagcgtagtaatgcaatcatagctcactgcagcctggaactccttggctcaagcaatcctgctgccttggcctcccaagtatgtaggactacaggtactcgccaccacacctggataattaaaaaattatttctgtagagatgaagtctcactgtgttgcccagcctgggtgtcaataattattttttaaaaaaaatttttaaaaaggttttttgagacagattcttgctctgtcacccaggctggagtgcagtagcatgatcagggatcactgcaacctctgcctcctgggttcaagcgattcttgtgcctaagccacctgagcagctgggattacaggtgcatgccaccatgcctggctaattttggtatttttagtagagatgaggttttgccattttggtcaggctggaatttttttttttttaattttgataagacagggtattgccgtgttggccagactggtctcaaactcctgggctgaaacaatcctcccgccttggcctcccaaagtgctgggattataggcacaagacaccacaataattattgcctgtatgtcaattattattttaaaatattgttgtatttacttaatgtctttaatgcatttgcccaatattttacattgtactgctcagaggtattcctttattatgtggttagcataggttatactttgctgacgattcacattttattagtttggttatgttttgtccttttaaaacattttcttttgagatgggggtcttgctctgttgcccacgcaggagtgcagtggcatgctctcagctcactgcagccctgactgcctaggctccagcaatcttcttacgtcagcctccagagtagctgggaccgcaggcacttgccaccacgccccactaaaaattttttaaattgttgcctttcttgaagtgttctctgcctgtctttgtcacaaaatttcatttttctcatagttaatttcatctctccggtaagattttattggtgtttcttttataactttgcagttcttacaccgtttggtgattttcatgtttcttagaaactttaaacctttaacttcaaacattaaaatacaagtcttttaagtacatgagtgcttagaaatgtacataatgtttatatacacttatgccttacattaaagtccaatatgagaaatacatgtttaacattcaataataattttaaaaatttgagaaataaactctcataaatgca

SEQ ID NO: 209137 - DNA, 1173 bp, Artificial Sequence
  derived and/or modified sequence
atgccagacaccaacagcaccatcaacctgagcctgagcaccagggtgaccctggccttcttcatgagcctggtggcctttgccatcatgctgggcaatgccctggtgatcctggcctttgtggtggacaagaacctgcggcacaggagcagctacttcttcctgaacctggccatcagtgacttctttgtgggcgtcatcagcatccccctgtacatcccccacaccctgtttgagtgggactttgggaaggagatctgtgtgttctggctgaccacagactacctgctgtgcacagcctctgtgtacaacatcgtgctgatctcctatgaccgctacctgtctgtgtccaatgctgtgtcctaccgcacccagcacactggagtgctgaagatcgtgaccctgatggtggccgtgtgggtgctggccttcctggtgaatggccccatgatcctggtgtctgagagctggaaggatgagggctctgaatgtgagcccggcttcttcagcgagtggtacatcctggccatcaccagcttcctggagtttgtgattcctgtgatcctggtggcctacttcaacatgaacatctactggagcctgtggaagagggaccacctgagccgctgccagagccaccctggcctgacagctgtgagcagcaacatctgtggccacagcttccggggccgcctgagcagcagaagaagcctgagcgccagcacagaggtgcctgccagcttccacagcgagcggcagaggaggaagagcagcctgatgttcagcagcaggaccaagatgaacagcaacaccatcgccagcaagatgggcagcttcagccagagcgacagcgtggccctgcaccagcgggagcacgtggagctgctgcgggcccggcggctggccaagagcctggccatcctgctgggcgtgtttgctgtgtgctgggccccctacagcctcttcaccatcgtgctgtccttctacagcagcgccaccggccccaagtctgtgtggtaccgcatcgccttctggctgcagtggttcaacagctttgtgaaccccctgctgtaccccctgtgccacaagcgcttccagaaggccttcctgaagatcttctgcatcaagaagcagcccctgcccagccagcacagccgctctgtgagcagctag

SEQ ID NO: 209138 - DNA, 1173 bp, Artificial Sequence
  derived and/or modified sequence
atgcccgacaccaacagcaccatcaacctgagcctgagcacccgggtgaccttggcatttttcatgagcttagtggcttttgcgattatgctcggaaacgcacttgtcatccttgcctttgtggtggataagaacctcagacatcgatcaagctatttcttccttaacttggctatttcggactttttcgtcggtgttatctccatcccactctacataccgcacacactgtttgaatgggatttcgggaaagagatctgtgtgttctggctgacaacggattatctcctctgcacagcaagcgtctacaatatcgtgctgattagttatgatagatacctgtcagtaagcaacgctgtgtcttatcgaacgcaacacacgggagtactgaagatcgtgacactaatggtggctgtgtgggtcttagctttcttagtgaacggccctatgatcttagtaagcgagtcgtggaaagacgaagggtctgagtgtgaacctggcttctttagcgagtggtatattctggccatcacctctttcctagaatttgtgatccccgtgatcctggttgcatatttcaatatgaacatttattggtcactttggaagagggatcacctgagtcgctgtcagagccatcccggtctgacagctgtaagcagcaatatttgtggtcattccttcaggggacggctcagtagtcggcgaagcctgagtgccagcactgaggtgcctgcatctttccacagtgagcgccagagacggaagagctctctcatgttctcctcgcggactaaaatgaattctaacacaatcgccagtaagatgggctcctttagccagtcagatagcgttgcactgcaccagcgggagcacgtcgaactattgcgtgctcggaggctggccaagagcctggccattttgcttggagtcttcgccgtctgttgggccccctactctctgtttaccattgtacttagcttctattcatcggccaccggccccaagagcgtgtggtatcgtatagcgttctggctccagtggttcaatagctttgttaaccccctgctgtaccctctttgccacaaaagatttcagaaggctttcctcaagatcttctgtattaaaaagcagcctctcccttcccagcactcccggtcggtgtcctcttag

SEQ ID NO: 209139 - DNA, 1173 bp, Artificial Sequence
  derived and/or modified sequence
atgcccgataccaattctacaattaacttgagtttaagtacccgtgtgacactggcctttttcatgagcttggtggccttcgctattatgctaggcaatgccctcgttatcctggctttcgtcgtcgacaagaacctgcgacacaggtcaagctatttctttctgaatctagctattagtgacttcttcgtgggcgtaatctcaatacccttgtatatcccgcacactttgtttgagtgggacttcggaaaagagatctgtgtgttctggctgacaacagactatctgttgtgcactgctagcgtctacaatattgtcttgataagctacgaccggtatttgtcagtctccaatgccgtatcctatcggactcaacacaccggggtgctgaaaatcgttacattgatggttgcagtgtgggtactggcgtttctggtgaacggccctatgatactggtctcggagtcctggaaagatgagggcagcgagtgcgagcctggtttcttctccgaatggtacatcttagccatcacatcttttctcgaatttgtaatacccgtaatattagtcgcttattttaatatgaatatatactggagtctctggaagcgtgaccatctgtctaggtgtcaaagccaccccggattgactgctgtgtcttcaaacatctgcggacacagtttccgagggcgactctcctcacggagatcactgtcagcctcaacagaagttccagcctcattccactccgagagacagagaaggaagagttcgcttatgttttcctctcgtactaaaatgaatagtaacaccatcgcctcgaaaatggggtcctttagccagagcgactcagtggccttacaccagagggaacacgtggagctgttgcgggctcgcaggttggccaagagcttggctatactactcggcgttttcgcagtgtgctgggccccatacagcctgttcactatagtgctgtctttctactcctccgcgactggccctaagagcgtgtggtaccgtattgcattttggcttcagtggttcaattcatttgtgaatcctctgctgtatcccctatgtcataaaaggtttcagaaggcatttcttaagatcttctgcattaaaaagcagcccctgcctagccagcactcccgatctgtctctagctag

SEQ ID NO: 209140 - DNA, 1173 bp, Artificial Sequence
  derived and/or modified sequence
atgcccgacaccaacagcaccatcaacctgagcctgagcaccagagtgaccctggccttcttcatgagcctggtggccttcgccatcatgctgggcaacgccctggtgatcctggccttcgtggtggacaagaacctgagacacagaagcagctacttcttcctgaacctggccatcagcgacttcttcgtgggcgtgatcagcatccccctgtacatcccccacaccctgttcgagtgggacttcggcaaggagatctgcgtgttctggctgaccaccgactacctgctgtgcaccgccagcgtgtacaacatcgtgctgatcagctacgacagatacctgagcgtgagcaacgccgtgagctacagaacccagcacaccggcgtgctgaagatcgtgaccctgatggtggccgtgtgggtgctggccttcctggtgaacggccccatgatcctggtgagcgagagctggaaggacgagggcagcgagtgcgagcccggcttcttcagcgagtggtacatcctggccatcaccagcttcctggagttcgtgatccccgtgatcctggtggcctacttcaacatgaacatctactggagcctgtggaagagagaccacctgagcagatgccagagccaccccggcctgaccgccgtgagcagcaacatctgcggccacagcttcagaggcagactgagcagcagaagaagcctgagcgccagcaccgaggtgcccgccagcttccacagcgagagacagagaagaaagagcagcctgatgttcagcagcagaaccaagatgaacagcaacaccatcgccagcaagatgggcagcttcagccagagcgacagcgtggccctgcaccagagagagcacgtggagctgctgagagccagaagactggccaagagcctggccatcctgctgggcgtgttcgccgtgtgctgggccccctacagcctgttcaccatcgtgctgagcttctacagcagcgccaccggccccaagagcgtgtggtacagaatcgccttctggctgcagtggttcaacagcttcgtgaaccccctgctgtaccccctgtgccacaagagattccagaaggccttcctgaagatcttctgcatcaagaagcagcccctgcccagccagcacagcagaagcgtgagcagctag

SEQ ID NO: 209141 - protein, 452 aa, Artificial Sequence
  derived and/or modified sequence
MELALRRSPVPRWLLLLPLLLGLNAGAVIDWPTEEGKEVWDYVTVRKDAYMFWWLYYATNSCKNFSELPLVMWLQGGPGGSSTGFGNFEEIGPLDSDLKPRKTTWLQAASLLFVDNPVGTGFSYVNGSGAYAKDLAMVASDMMVLLKTFFSCHKEFQTVPFYIFSESYGGKMAAGIGLELYKAIQRGTIKCNFAGVALGDSWISPVDSVLSWGPYLYSMSLLEDKGLAEVSKVAEQVLNAVNKGLYREATELWGKAEMIIEQNTDGVNFYNILTKSTPTSTMESSLEFTQSHLVCLCQRHVRHLQRDALSQLMNGPIRKKLKIIPEDQSWGGQATNVFVNMEEDFMKPVISIVDELLEAGINVTVYNGQLDLIVDTMGQEAWVRKLKWPELPKFSQLKWKALYSDPKSLETSAFVKSYKNLAFYWILKAGHMVPSDQGDMALKMMRLVTQQE

SEQ ID NO: 209142 - DNA, 1359 bp, Artificial Sequence
  derived and/or modified sequence
atggaactagctctgagacggtccccagtgcctcgatggctgctcctcctgcccctgctgctcggcctcaatgcgggagcggtgattgattggcccactgaggaggggaaagaggtgtgggattacgtcactgtaagaaaggatgcctacatgttttggtggctgtactacgcaaccaattcttgtaagaatttttctgaacttcctctggtgatgtggttgcaggggggacccggagggagtagcacaggttttgggaattttgaagaaataggtcctctcgactcagatttgaaacctcggaaaacaacttggttacaagctgccagcctactgttcgtcgataaccccgtcgggacaggttttagctacgttaacgggtctggagcctacgcaaaagacctggctatggttgctagcgacatgatggtgctcttgaaaaccttcttctcttgtcataaagaattccagaccgtcccattttacatcttcagcgaaagttacggagggaagatggctgccggaattgggcttgagctctacaaggccatccagcggggaacgatcaaatgtaacttcgccggagtcgcactgggtgactcgtggatttctccggtagattccgtgctgagttggggcccttacttatacagcatgtccctgctcgaggataaagggctggctgaagtgagcaaggttgccgagcaagtgctgaatgccgtcaataaaggtctgtatcgagaggccaccgaactatggggaaaagctgagatgatcatcgagcagaacacagacggtgtcaacttctataatattctgacgaagagcacacccacatctactatggaatcatccctcgagttcacccaatcccatcttgtgtgtctttgtcagaggcacgtcagacacttgcaacgggatgctttgagccagttaatgaatggcccaatccgaaaaaaactaaaaattattcctgaggatcagtcgtggggcggacaggccaccaacgtgttcgtgaacatggaagaagactttatgaagcctgtgattagtattgtggacgagttgctagaagctgggatcaacgtgacagtgtacaacggtcagcttgacctgatcgtggatacgatgggtcaggaggcctgggtgagaaagctgaaatggcccgagctgcccaagtttagccagttgaagtggaaggccttatactctgatccgaagtccctggaaactagtgcctttgtgaagtcatacaaaaatctggctttctattggatcctgaaggctggtcatatggtgccttccgatcagggcgacatggcccttaagatgatgaggctagtcacacagcaggagtag

SEQ ID NO: 209143 - DNA, 1359 bp, Artificial Sequence
  derived and/or modified sequence
atggaattggcattgagacgaagccctgtgcccagatggctactgctgctgcccctgcttctgggactcaacgcaggagccgtaatcgattggcccacagaggagggcaaagaggtgtgggattatgtcaccgtacgaaaggatgcttatatgttttggtggttatactacgcaactaacagttgcaagaatttcagcgagttgccactggttatgtggcttcaaggcggcccaggcggttcctcgaccgggttcgggaactttgaggagattggacctctcgatagtgatttgaagcctcgcaagaccacctggctgcaggctgcttctctgctgtttgttgataatcccgtcggcacaggttttagctacgtgaatggctcgggcgcctatgcaaaggatctcgccatggtggctagcgacatgatggtgctactgaaaaccttcttttcctgccataaagaatttcaaaccgtcccgttttatatcttctcggaaagttatgggggaaagatggctgctggcatcggcctggaactttacaaggcaattcagcgaggaactatcaaatgtaattttgccggagttgcacttggcgactcttggattagccctgtcgattctgtcctttcctggggaccctacctctactccatgtccttgctagaggataagggcctcgctgaagtgtccaaggtggcagaacaggtcctgaacgccgtgaacaaaggcttatatcgagaagcgactgaactttggggtaaagcggagatgattattgagcagaatactgacggagtcaatttttacaatatactgaccaagagtacacctacctccacaatggaatcctcgctggaatttactcagtctcacttggtatgtctttgccagcgccatgtacgacatttgcagagagatgccttatctcaattgatgaacgggccaatcagaaagaagctgaagataatacctgaggaccagtcctgggggggccaggctacaaacgtgtttgtcaatatggaagaagatttcatgaagcctgtgatttctatagtggacgaactgttggaggccggtatcaacgtgactgtgtataacgggcagctagacctcattgttgacactatgggccaagaagcatgggtgaggaaactcaagtggcccgagctgcccaaattctcacaacttaaatggaaagccctgtacagtgaccctaaaagtttagaaacatctgcctttgttaagtcatataagaacctagctttctattggatacttaaggctggtcacatggtgcccagtgatcagggagacatggccttaaagatgatgcggctggtcacgcaacaggagtag

SEQ ID NO: 209144 - DNA, 1359 bp, Artificial Sequence
  derived and/or modified sequence
atggaactcgccctacggcgatcccccgttcccaggtggctgcttctgctcccattgctgctggggcttaacgccggcgctgtgatcgactggcccaccgaagaagggaaagaggtgtgggactatgtcactgtaagaaaagacgcatatatgttctggtggttgtattacgctaccaattcttgcaaaaattttagtgagttgcctctcgtgatgtggctgcagggcggtccaggcggttctagcactggtttcggaaactttgaagagataggtccattggattcagacttaaaaccaagaaagacaacctggctacaggctgcatctctgttgtttgtggataaccctgtgggcacaggtttcagctacgtgaatggaagcggagcttacgcaaaggatctcgcaatggttgccagcgacatgatggtcttgctaaagacatttttcagctgtcacaaagaattccaaaccgtgcctttttatattttttctgagtcatatggtggaaaaatggccgccggaataggcctggagttgtacaaggcaattcagcgtggcacaataaaatgtaatttcgctggggtggctctgggggacagttggattagtccagtcgactcagtcctgtcatggggcccatacttgtactctatgtcacttctggaagataaggggctggcagaagttagcaaagtggccgaacaggtcctcaatgcagtaaataaaggtttgtaccgggaggctaccgaactctggggcaaagcagagatgattatcgaacagaacaccgacggagttaatttttataatatcctcacaaaatccactcctacctctacaatggaaagttctctggagtttacacagtcacacctagtgtgtctctgtcagaggcacgtgcggcatctccagagggacgccttgagtcagctgatgaacggcccgatacggaaaaagctcaaaataatcccggaagatcagtcctggggaggacaagctaccaatgtcttcgtgaatatggaagaagattttatgaaacctgtgatttcaattgtggatgaattgctcgaggccggaataaacgttactgtgtataacgggcagcttgacctgatagtggacacaatggggcaggaggcatgggtgcgaaaactcaagtggcccgaactgcctaaattctctcagctaaagtggaaagccctttattccgatcctaagagccttgagactagtgcctttgtgaagagttacaagaacctcgccttctattggattttaaaagccggccatatggtgccaagcgatcaaggtgatatggcactgaaaatgatgagacttgtgactcagcaagagtag

SEQ ID NO: 209145 - DNA, 1943 bp, Artificial Sequence
  derived and/or modified sequence
gtgatggggcgccgggtccagcctgttgctgatgctgccgtgcggtacttgtcatggagctggcactgcggcgctctcccgtcccgcggtggttgctgctgctgccgctgctgctgggcctgaacgcaggagctgtcattgactggcccacagaggagggcaaggaagtatgggattatgtgacggtccgcaaggatgcctacatgttctggtggctctattatgccaccaactcctgcaagaacttctcagaactgcccctggtcatgtggcttcagggcggtccaggcggttctagcactggatttggaaactttgaggaaattgggccccttgacagtgatctcaaaccacggaaaaccacctggctccaggctgccagtctcctatttgtggataatcccgtgggcactgggttcagttatgtgaatggtagtggtgcctatgccaaggacctggctatggtggcttcagacatgatggttctcctgaagaccttcttcagttgccacaaagaattccagacagttccattctacattttctcagagtcctatggaggaaaaatggcagctggcattggtctagagctttataaggccattcagcgagggaccatcaagtgcaactttgcgggggttgccttgggtgattcctggatctcccctgttgattcggtgctctcctggggaccttacctgtacagcatgtctcttctcgaagacaaaggtctggcagaggtgtctaaggttgcagagcaagtactgaatgccgtaaataaggggctctacagagaggccacagagctgtgggggaaagcagaaatgatcattgaacagaacacagatggggtgaacttctataacatcttaactaaaagcactcccacgtctacaatggagtcgagtctagaattcacacagagccacctagtttgtctttgtcagcgccacgtgagacacctacaacgagatgccttaagccagctcatgaatggccccatcagaaagaagctcaaaattattcctgaggatcaatcctggggaggccaggctaccaacgtctttgtgaacatggaggaggacttcatgaagccagtcattagcattgtggacgagttgctggaggcagggatcaacgtgacggtgtataatggacagctggatctcatcgtagataccatgggtcaggaggcctgggtgcggaaactgaagtggccagaactgcctaaattcagtcagctgaagtggaaggccctgtacagtgaccctaaatctttggaaacatctgcttttgtcaagtcctacaagaaccttgctttctactggattctgaaagctggtcatatggttccttctgaccaaggggacatggctctgaagatgatgagactggtgactcagcaagaataggatggatggggctggagatgagctggtttggccttggggcacagagctgagctgaggccgctgaagctgtaggaagcgccattcttccctgtatctaactggggctgtgatcaagaaggttctgaccagcttctgcagaggataaaatcattgtctctggaggcaatttggaaattatttctgcttcttaaaaaaacctaagattttttaaaaaattgatttgttttgatcaaaataaaggatgataatagatattattttttcttatgacagaagcaaatgatgtgatttatagaaaaactgggaaatacaggtacccaaagagtaaatcaacatctgtatacccccttcccaggggtaagcactgttaccaatttagcatatgtccttgcagaatttttttttctatatatacatatatattttttaccaaaatgaatcattactctatgttgttttactatttgtttgacatatcagtatatctgaaacaccttttcatgtcaataaatgttcttctctaacattttt

SEQ ID NO: 209146 - DNA, 1359 bp, Artificial Sequence
  derived and/or modified sequence
atggagctggccctgagaagaagccccgtgcccagatggctgctgctgctgcccctgctgctgggcctgaacgccggcgccgtgatcgactggcccaccgaggagggcaaggaggtgtgggactacgtgaccgtgagaaaggacgcctacatgttctggtggctgtactacgccaccaacagctgcaagaacttcagcgagctgcccctggtgatgtggctgcagggcggccccggcggcagcagcaccggcttcggcaacttcgaggagatcggccccctggacagcgacctgaagcccagaaagaccacctggctgcaggccgccagcctgctgttcgtggacaaccccgtgggcaccggcttcagctacgtgaacggcagcggcgcctacgccaaggacctggccatggtggccagcgacatgatggtgctgctgaagaccttcttcagctgccacaaggagttccagaccgtgcccttctacatcttcagcgagagctacggcggcaagatggccgccggcatcggcctggagctgtacaaggccatccagagaggcaccatcaagtgcaacttcgccggcgtggccctgggcgacagctggatcagccccgtggacagcgtgctgagctggggcccctacctgtacagcatgagcctgctggaggacaagggcctggccgaggtgagcaaggtggccgagcaggtgctgaacgccgtgaacaagggcctgtacagagaggccaccgagctgtggggcaaggccgagatgatcatcgagcagaacaccgacggcgtgaacttctacaacatcctgaccaagagcacccccaccagcaccatggagagcagcctggagttcacccagagccacctggtgtgcctgtgccagagacacgtgagacacctgcagagagacgccctgagccagctgatgaacggccccatcagaaagaagctgaagatcatccccgaggaccagagctggggcggccaggccaccaacgtgttcgtgaacatggaggaggacttcatgaagcccgtgatcagcatcgtggacgagctgctggaggccggcatcaacgtgaccgtgtacaacggccagctggacctgatcgtggacaccatgggccaggaggcctgggtgagaaagctgaagtggcccgagctgcccaagttcagccagctgaagtggaaggccctgtacagcgaccccaagagcctggagaccagcgccttcgtgaagagctacaagaacctggccttctactggatcctgaaggccggccacatggtgcccagcgaccagggcgacatggccctgaagatgatgagactggtgacccagcaggagtag

SEQ ID NO: 209147 - DNA, 1359 bp, Artificial Sequence
  derived and/or modified sequence
atggagctggcgctgcgaagatcacctgtgccacggtggttactgcttctgcctctcctgcttggactgaatgcaggcgctgtgatagactggcctacagaggaaggaaaagaggtttgggactacgtgacagtcagaaaagacgcctacatgttctggtggctatactacgcaaccaactcttgtaagaactttagcgaactacctctggtgatgtggttgcaggggggacccggcggctcatcaaccggattcggaaattttgaggagattggacccctcgattctgatctgaagcccaggaagacaacttggctgcaggccgcctcactcttgtttgtcgacaaccccgtggggaccggattctcatatgttaacggcagcggggcttacgccaaagacttagctatggtggcatcagatatgatggtcttactgaagacattcttctcctgtcacaaggaatttcaaaccgtgcctttttacatcttctccgagagttacgggggtaaaatggctgctggaatcggacttgaattatacaaagcaatacagagaggcacaattaagtgtaatttcgccggagtcgccctgggtgactcatggatctccccagtggactcagttctgtcttggggcccatacctgtactccatgtccctgctggaagacaaagggctggccgaggtgagtaaagtggcagagcaagttctgaacgccgtgaataaagggctgtatagggaggcaacagagctgtggggcaaagcggagatgatcatagagcagaacacagacggcgtgaatttctacaatattctgaccaagtctacccctacatccactatggagtcttccttggagttcacccaatcccacctggtatgtctgtgtcagagacacgtgcgacatctgcaaagggacgccctgtctcagttaatgaacggaccaattagaaagaaactgaagattattcctgaggaccagagctggggggggcaggcgaccaatgtcttcgtgaatatggaggaagatttcatgaagccagtcatatcaattgtagacgaactactcgaggcaggaatcaatgtgactgtctataatggtcaactggacctcattgtggataccatgggccaagaagcttgggtgcgaaaactcaagtggccagagctgcctaaattctcacaactgaagtggaaggccctgtatagcgacccaaaaagtctcgaaacttcagcgtttgtgaagtcctataaaaacttagccttttattggatcttgaaggcaggtcatatggtaccctctgatcaaggtgacatggcactgaaaatgatgcggcttgtgacacagcaggagtag

SEQ ID NO: 209148 - DNA, 1359 bp, Artificial Sequence
  derived and/or modified sequence
atggagctggccctgcggcgcagccctgtgccccgctggctgctgctgctgcccctgctgctgggcctgaatgctggagctgtgattgactggcccacagaggagggcaaggaggtgtgggactatgtgacagtgaggaaggatgcctacatgttctggtggctgtactatgccaccaacagctgcaagaacttcagcgagctgcccctggtgatgtggctgcagggcggccctgggggcagcagcactggatttggaaactttgaggagatcggccccctggacagcgacctgaagcccaggaagaccacctggctgcaggccgccagcctgctgtttgtggacaaccctgtgggcaccggcttctcctatgtgaatggcagcggggcctatgccaaggacctggccatggtggccagtgacatgatggtgctgctgaagaccttcttcagctgccacaaggagttccagacagtgcccttctacatcttcagcgagagctatggaggcaagatggccgccggcatcggcctggagctgtacaaggccatccagaggggcaccatcaagtgcaactttgctggggtggccctgggggacagctggatcagccctgtggacagcgtgctgtcctggggcccctacctgtacagcatgagcctgctggaggacaagggcctggccgaggtgtccaaggtggccgagcaggtgctgaatgctgtgaacaagggcctgtaccgggaggccacagagctgtggggcaaggccgagatgatcatcgagcagaacacagatggagtgaacttctacaacatcctgaccaagagcacccccaccagcaccatggagagcagcctggagttcacccagagccacctggtgtgcctgtgccagagacatgtgcgccacctgcagagagatgccctgagccagctgatgaatggccccatcaggaagaagctgaagatcatccctgaggaccagagctggggcggccaggccaccaacgtgtttgtgaacatggaggaggacttcatgaagcctgtgatcagcatcgtggatgagctgctggaggccggcatcaacgtgacagtgtacaacggccagctggacctgattgtggacaccatgggccaggaggcctgggtgaggaagctgaagtggccagagctgcccaagttcagccagctgaagtggaaggccctgtacagcgaccccaagagcctggagaccagcgcctttgtgaagagctacaagaacctggccttctactggatcctgaaggccggccacatggtgcccagcgaccagggcgacatggccctgaagatgatgaggctggtgacccagcaggagtag

SEQ ID NO: 209149 - DNA, 1359 bp, Artificial Sequence
  derived and/or modified sequence
atggagctggccctgcggcggagccccgtgccccggtggctgctgcttctaccactgttgttgggattgaacgccggcgctgtgatcgactggccaaccgaggaaggaaaggaagtgtgggactacgtcacagtgaggaaagacgcctacatgttttggtggctgtattatgctacaaattcctgcaaaaatttcagtgagcttccgctggtcatgtggctgcaaggcggaccaggtggctcaagcacagggtttgggaactttgaggaaatagggccactggattctgatctcaagccccgcaagactacttggctacaggctgctagcctcttgttcgtggacaatccggtaggcacagggttctcctatgtgaacggatctggcgcttatgccaaagacctggcgatggtcgcgtcagatatgatggtgctcctaaagacctttttctcctgtcacaaagaattccagacagtacccttctatatttttagcgaatcctacggcggaaagatggctgctgggattggacttgagctgtacaaggccattcagagggggaccataaagtgcaacttcgcaggcgtcgcactcggggatagctggataagtcctgtggatagcgtactctcatgggggccttacctgtacagcatgtctctgttagaggacaaagggctcgccgaggtgtccaaggtggctgagcaggtgctgaacgctgttaacaagggcctatacagggaggccactgagctctggggcaaggccgaaatgattatcgaacagaatactgatggtgtgaatttctataacatcctaaccaaatctacgcccacctcaactatggagagctctcttgagtttacccagtctcatctggtgtgcttgtgtcaacgacatgtgcggcatctccagcgggatgccctcagccagctgatgaacggcccaatccgaaaaaaactcaagataattcctgaggatcagtcttggggtgggcaggccaccaatgtgtttgtcaacatggaggaagattttatgaaacctgttatttcaatcgtggatgaactccttgaggcagggatcaacgtgaccgtgtacaacggccaactcgacctgatcgttgatacaatggggcaggaggcctgggtccgtaagttgaaatggcccgagctgcccaaattctcacagctgaagtggaaggctctgtactcagaccctaagtcgctggagacaagcgcattcgtgaaaagctataaaaatctggccttctactggatcttaaaggccggtcacatggtgcccagtgaccagggcgacatggccctgaagatgatgcgcttggttacgcagcaggagtag

SEQ ID NO: 209150 - RNA, 1359 nt, Artificial Sequence
  derived and/or modified sequence
auggaauuggcauugagacgaagcccugugcccagauggcuacugcugcugccccugcuucugggacucaacgcaggagccguaaucgauuggcccacagaggagggcaaagaggugugggauuaugucaccguacgaaaggaugcuuauauguuuuggugguuauacuacgcaacuaacaguugcaagaauuucagcgaguugccacugguuauguggcuucaaggcggcccaggcgguuccucgaccggguucgggaacuuugaggagauuggaccucucgauagugauuugaagccucgcaagaccaccuggcugcaggcugcuucucugcuguuuguugauaaucccgucggcacagguuuuagcuacgugaauggcucgggcgccuaugcaaaggaucucgccaugguggcuagcgacaugauggugcuacugaaaaccuucuuuuccugccauaaagaauuucaaaccgucccguuuuauaucuucucggaaaguuaugggggaaagauggcugcuggcaucggccuggaacuuuacaaggcaauucagcgaggaacuaucaaauguaauuuugccggaguugcacuuggcgacucuuggauuagcccugucgauucuguccuuuccuggggacccuaccucuacuccauguccuugcuagaggauaagggccucgcugaaguguccaagguggcagaacagguccugaacgccgugaacaaaggcuuauaucgagaagcgacugaacuuugggguaaagcggagaugauuauugagcagaauacugacggagucaauuuuuacaauauacugaccaagaguacaccuaccuccacaauggaauccucgcuggaauuuacucagucucacuugguaugucuuugccagcgccauguacgacauuugcagagagaugccuuaucucaauugaugaacgggccaaucagaaagaagcugaagauaauaccugaggaccaguccugggggggccaggcuacaaacguguuugucaauauggaagaagauuucaugaagccugugauuucuauaguggacgaacuguuggaggccgguaucaacgugacuguguauaacgggcagcuagaccucauuguugacacuaugggccaagaagcaugggugaggaaacucaaguggcccgagcugcccaaauucucacaacuuaaauggaaagcccuguacagugacccuaaaaguuuagaaacaucugccuuuguuaagucauauaagaaccuagcuuucuauuggauacuuaaggcuggucacauggugcccagugaucagggagacauggccuuaaagaugaugcggcuggucacgcaacaggaguag

SEQ ID NO: 209151 - RNA, 1359 nt, Artificial Sequence
  derived and/or modified sequence
auggaacucgcccuacggcgaucccccguucccagguggcugcuucugcucccauugcugcuggggcuuaacgccggcgcugugaucgacuggcccaccgaagaagggaaagaggugugggacuaugucacuguaagaaaagacgcauauauguucuggugguuguauuacgcuaccaauucuugcaaaaauuuuagugaguugccucucgugauguggcugcagggcgguccaggcgguucuagcacugguuucggaaacuuugaagagauagguccauuggauucagacuuaaaaccaagaaagacaaccuggcuacaggcugcaucucuguuguuuguggauaacccugugggcacagguuucagcuacgugaauggaagcggagcuuacgcaaaggaucucgcaaugguugccagcgacaugauggucuugcuaaagacauuuuucagcugucacaaagaauuccaaaccgugccuuuuuauauuuuuucugagucauaugguggaaaaauggccgccggaauaggccuggaguuguacaaggcaauucagcguggcacaauaaaauguaauuucgcugggguggcucugggggacaguuggauuaguccagucgacucaguccugucauggggcccauacuuguacucuaugucacuucuggaagauaaggggcuggcagaaguuagcaaaguggccgaacagguccucaaugcaguaaauaaagguuuguaccgggaggcuaccgaacucuggggcaaagcagagaugauuaucgaacagaacaccgacggaguuaauuuuuauaauauccucacaaaauccacuccuaccucuacaauggaaaguucucuggaguuuacacagucacaccuagugugucucugucagaggcacgugcggcaucuccagagggacgccuugagucagcugaugaacggcccgauacggaaaaagcucaaaauaaucccggaagaucaguccuggggaggacaagcuaccaaugucuucgugaauauggaagaagauuuuaugaaaccugugauuucaauuguggaugaauugcucgaggccggaauaaacguuacuguguauaacgggcagcuugaccugauaguggacacaauggggcaggaggcaugggugcgaaaacucaaguggcccgaacugccuaaauucucucagcuaaaguggaaagcccuuuauuccgauccuaagagccuugagacuagugccuuugugaagaguuacaagaaccucgccuucuauuggauuuuaaaagccggccauauggugccaagcgaucaaggugauauggcacugaaaaugaugagacuugugacucagcaagaguag

SEQ ID NO: 209152 - protein, 589 aa, Artificial Sequence
  derived and/or modified sequence
MYRWLVRILGTIFRFCDRSVPPARALLKRRRSDSTLFSTVDTDEIPAKRPRLDCFIHQVKNSLYNAASLFGFPFQLTTKPMVTSACNGTRNVAPSGEVFSNSSSCELTGSGSWNNMLKLGNKSPNGISDYPKIRVTVTRDQPRRVLPSFGFTLNSEGCNRRPGGRRHSKGNPESSLMWKPQEQAVTEMISEESGKGLRRPHCTVEEGVQKEEREKYRKLLERLKESGHGNSVCPVTSNYHSSQRSQMDTLKTKGWGEEQNHGVKTTQFVPKQYRLVETRGPLCSLRSEKRCSKGKITDTETMVGIRFENESRRGYQLEPDLSEEVSARLRLGSGSNGLLRRKVSIIETKEKNCSGKERDRRTDDLLELTEDMEKEISNALGHGPQDEILSSAFKLRITRGDIQTLKNYHWLNDEVINFYMNLLVERNKKQGYPALHVFSTFFYPKLKSGGYQAVKRWTKGVNLFEQEIILVPIHRKVHWSLVVIDLRKKCLKYLDSMGQKGHRICEILLQYLQDESKTKRNSDLNLLEWTHHSMKPHEIPQQLNGSDCGMFTCKYADYISRDKPITFTQHQMPLFRKKMVWEILHQQLL

SEQ ID NO: 209153 - protein, 413 aa, Artificial Sequence [sequence omitted]

SEQ ID NO: 209154 - protein, 579 aa, Artificial Sequence
  derived and/or modified sequence
MDSHPCLYCGPQDSEGTNWQTSPSTLFSTVDTDEIPAKRPRLDCFIHQVKNSLYNAASLFGFPFQLTTKPMVTSACNGTRNVAPSGEVFSNSSSCELTGSGSWNNMLKLGNKSPNGISDYPKIRVTVTRDQPRRVLPSFGFTLNSEGCNRRPGGRRHSKGNPESSLMWKPQEQAVTEMISEESGKGLRRPHCTVEEGVQKEEREKYRKLLERLKESGHGNSVCPVTSNYHSSQRSQMDTLKTKGWGEEQNHGVKTTQFVPKQYRLVETRGPLCSLRSEKRCSKGKITDTETMVGIRFENESRRGYQLEPDLSEEVSARLRLGSGSNGLLRRKVSIIETKEKNCSGKERDRRTDDLLELTEDMEKEISNALGHGPQDEILSSAFKLRITRGDIQTLKNYHWLNDEVINFYMNLLVERNKKQGYPALHVFSTFFYPKLKSGGYQAVKRWTKGVNLFEQEIILVPIHRKVHWSLVVIDLRKKCLKYLDSMGQKGHRICEILLQYLQDESKTKRNSDLNLLEWTHHSMKPHEIPQQLNGSDCGMFTCKYADYISRDKPITFTQHQMPLFRKKMVWEILHQQLL

SEQ ID NO: 209155 - DNA, 72 bp, Artificial Sequence
  derived and/or modified sequence
gaaatcatcatcaaacggaatcgaatggaatcattgaatggaatggaatggaatcatcatggaatggaaacg

SEQ ID NO: 209156 - DNA, 85 bp, Artificial Sequence
  derived and/or modified sequence
aatggactcgaatgaaatcatcatcaaacggaatcgaatggaatcattgaatggaatggaatggaatcatcatggaatggaaacg

SEQ ID NO: 209157 - DNA, 1770 bp, Artificial Sequence
  derived and/or modified sequence
atgtacagatggctggtgagaatcctgggcaccatcttcagattctgcgacagaagcgtgccccccgccagagccctgctgaagagaagaagaagcgacagcaccctgttcagcaccgtggacaccgacgagatccccgccaagagacccagactggactgcttcatccaccaggtgaagaacagcctgtacaacgccgccagcctgttcggcttccccttccagctgaccaccaagcccatggtgaccagcgcctgcaacggcaccagaaacgtggcccccagcggcgaggtgttcagcaacagcagcagctgcgagctgaccggcagcggcagctggaacaacatgctgaagctgggcaacaagagccccaacggcatcagcgactaccccaagatcagagtgaccgtgaccagagaccagcccagaagagtgctgcccagcttcggcttcaccctgaacagcgagggctgcaacagaagacccggcggcagaagacacagcaagggcaaccccgagagcagcctgatgtggaagccccaggagcaggccgtgaccgagatgatcagcgaggagagcggcaagggcctgagaagaccccactgcaccgtggaggagggcgtgcagaaggaggagagagagaagtacagaaagctgctggagagactgaaggagagcggccacggcaacagcgtgtgccccgtgaccagcaactaccacagcagccagagaagccagatggacaccctgaagaccaagggctggggcgaggagcagaaccacggcgtgaagaccacccagttcgtgcccaagcagtacagactggtggagaccagaggccccctgtgcagcctgagaagcgagaagagatgcagcaagggcaagatcaccgacaccgagaccatggtgggcatcagattcgagaacgagagcagaagaggctaccagctggagcccgacctgagcgaggaggtgagcgccagactgagactgggcagcggcagcaacggcctgctgagaagaaaggtgagcatcatcgagaccaaggagaagaactgcagcggcaaggagagagacagaagaaccgacgacctgctggagctgaccgaggacatggagaaggagatcagcaacgccctgggccacggcccccaggacgagatcctgagcagcgccttcaagctgagaatcaccagaggcgacatccagaccctgaagaactaccactggctgaacgacgaggtgatcaacttctacatgaacctgctggtggagagaaacaagaagcagggctaccccgccctgcacgtgttcagcaccttcttctaccccaagctgaagagcggcggctaccaggccgtgaagagatggaccaagggcgtgaacctgttcgagcaggagatcatcctggtgcccatccacagaaaggtgcactggagcctggtggtgatcgacctgagaaagaagtgcctgaagtacctggacagcatgggccagaagggccacagaatctgcgagatcctgctgcagtacctgcaggacgagagcaagaccaagagaaacagcgacctgaacctgctggagtggacccaccacagcatgaagccccacgagatcccccagcagctgaacggcagcgactgcggcatgttcacctgcaagtacgccgactacatcagcagagacaagcccatcaccttcacccagcaccagatgcccctgttcagaaagaagatggtgtgggagatcctgcaccagcagctgctgtag

SEQ ID NO: 209158 - DNA, 1740 bp, Artificial Sequence
  derived and/or modified sequence
atggacagccacccctgcctgtactgcggcccccaggacagcgagggcaccaactggcagaccagccccagcaccctgttcagcaccgtggacaccgacgagatccccgccaagagacccagactggactgcttcatccaccaggtgaagaacagcctgtacaacgccgccagcctgttcggcttccccttccagctgaccaccaagcccatggtgaccagcgcctgcaacggcaccagaaacgtggcccccagcggcgaggtgttcagcaacagcagcagctgcgagctgaccggcagcggcagctggaacaacatgctgaagctgggcaacaagagccccaacggcatcagcgactaccccaagatcagagtgaccgtgaccagagaccagcccagaagagtgctgcccagcttcggcttcaccctgaacagcgagggctgcaacagaagacccggcggcagaagacacagcaagggcaaccccgagagcagcctgatgtggaagccccaggagcaggccgtgaccgagatgatcagcgaggagagcggcaagggcctgagaagaccccactgcaccgtggaggagggcgtgcagaaggaggagagagagaagtacagaaagctgctggagagactgaaggagagcggccacggcaacagcgtgtgccccgtgaccagcaactaccacagcagccagagaagccagatggacaccctgaagaccaagggctggggcgaggagcagaaccacggcgtgaagaccacccagttcgtgcccaagcagtacagactggtggagaccagaggccccctgtgcagcctgagaagcgagaagagatgcagcaagggcaagatcaccgacaccgagaccatggtgggcatcagattcgagaacgagagcagaagaggctaccagctggagcccgacctgagcgaggaggtgagcgccagactgagactgggcagcggcagcaacggcctgctgagaagaaaggtgagcatcatcgagaccaaggagaagaactgcagcggcaaggagagagacagaagaaccgacgacctgctggagctgaccgaggacatggagaaggagatcagcaacgccctgggccacggcccccaggacgagatcctgagcagcgccttcaagctgagaatcaccagaggcgacatccagaccctgaagaactaccactggctgaacgacgaggtgatcaacttctacatgaacctgctggtggagagaaacaagaagcagggctaccccgccctgcacgtgttcagcaccttcttctaccccaagctgaagagcggcggctaccaggccgtgaagagatggaccaagggcgtgaacctgttcgagcaggagatcatcctggtgcccatccacagaaaggtgcactggagcctggtggtgatcgacctgagaaagaagtgcctgaagtacctggacagcatgggccagaagggccacagaatctgcgagatcctgctgcagtacctgcaggacgagagcaagaccaagagaaacagcgacctgaacctgctggagtggacccaccacagcatgaagccccacgagatcccccagcagctgaacggcagcgactgcggcatgttcacctgcaagtacgccgactacatcagcagagacaagcccatcaccttcacccagcaccagatgcccctgttcagaaagaagatggtgtgggagatcctgcaccagcagctgctgtag

SEQ ID NO: 209159 - DNA, 1770 bp, Artificial Sequence
  derived and/or modified sequence
atgtaccgatggctggtgaggattttgggtaccatcttcaggttttgtgatagaagcgtgcccccagccagagccctgcttaaacgccgtagatctgacagtacactgttcagcaccgtcgatacagacgaaatcccagcgaagcgtcccagactggactgctttatccaccaggtgaagaattctctgtataacgcagcttccttgttcggcttcccctttcagctcactacaaaacctatggtgacctcagcctgcaatgggacacgtaatgtggccccttcaggagaagtgtttagcaactctagctcttgtgagttgactggatccggttcctggaataacatgctgaagctcgggaataaatcaccaaatggaatctccgactatcccaaaatccgcgttaccgtaacccgggaccagccacggcgggtcctgccaagcttcggattcactctgaattctgaaggctgcaataggcgaccgggcggccgtagacattccaaaggcaatcctgagtcgtccctgatgtggaagccgcaggagcaggccgtaaccgagatgatctcagaagagtctggcaaaggtctcaggcggccacactgcacagttgaagaaggtgtgcagaaagaggaacgcgagaaatataggaagctacttgaacgtttgaaagagagtggacacggcaacagcgtctgtcccgtcacttccaactaccactcatctcagcggtcccagatggacaccctgaaaaccaaagggtggggcgaggaacagaatcatggtgtgaaaacaactcagttcgttccaaaacagtaccgccttgttgaaacgcggggccccctctgttcactgaggtctgagaagagatgctccaagggcaaaattactgataccgaaaccatggtgggcatcagattcgagaatgagtctcggagaggctatcagctcgaacccgacctctccgaggaagtgagtgctcgacttcgtttaggctcagggtcaaacgggctgcttcggcgcaaagtctctatcatagagaccaaggagaagaattgctccggaaaagaacgggataggcggacggacgatcttcttgaacttacggaagacatggagaaggagatctcaaatgcacttggacacggccctcaggacgagattctttcttcggcattcaaacttaggataacacgtggtgatatccagacattgaaaaactaccattggctgaatgacgaagtcataaacttttatatgaacctgttggttgagcgcaacaagaagcagggatatcctgccttacatgtttttagtaccttcttttatcctaagttgaaatcaggcggctaccaggccgtgaagcggtggaccaagggggtcaacctgttcgaacaagaaattatcctggtgccaatccaccgcaaagtacactggtctttggtggtaattgatctgagaaaaaagtgtcttaaatatctggactccatgggccagaaaggacatcgcatttgcgagattctccttcagtatctgcaggatgaaagcaaaactaaacggaactccgatcttaatcttctggagtggacgcaccactctatgaaaccacacgaaattcctcaacagctaaatgggtccgattgtgggatgttcacttgcaagtatgccgactacatcagtcgagacaagcccattaccttcacgcaacatcagatgccactgttccgcaaaaaaatggtttgggagatcctgcatcaacaactgctgtag

SEQ ID NO: 209160 - DNA, 1740 bp, Artificial Sequence
  derived and/or modified sequence
atggacagccacccctgtttgtactgcgggccacaggacagtgaggggacgaattggcagacctctccatctacgctgttttccacagtcgatacagatgagatccccgcaaagagaccacgtttggattgctttatccaccaggtcaaaaatagcctgtataatgccgcctctttgtttgggttcccatttcagctaaccaccaagccaatggtcacatctgcgtgtaatgggacccgaaacgtggccccctcaggcgaggtcttctccaatagctccagctgcgagcttactgggtccgggtcatggaacaatatgctgaaactaggcaacaaatcacccaatggcatcagcgactaccccaagatccgagtgactgtcactcgagaccagccccgacgcgtgctgccaagctttgggttcaccctaaattccgaaggttgcaacaggaggcccggagggaggagacattctaaaggcaaccctgagagctcactgatgtggaagccccaggagcaggctgtgacagaaatgatatcagaggagtcggggaagggactgcgccgaccacactgcaccgtggaggagggcgtccagaaagaagagagagagaagtatcggaagctacttgagcggctgaaagagtctggtcacgggaatagcgtctgccccgtaacctccaactatcatagctcacaaaggtcacagatggacaccctgaagactaaaggttggggggaggaacagaaccacggggtgaagactacgcagtttgtcccaaaacagtacagactagtggaaacaagaggtcctctgtgcagtctgcgaagcgagaaaaggtgctccaagggaaagatcactgatacagagaccatggtgggcattcgatttgaaaatgagtcacgacgcggttaccagcttgaaccggatctgtcggaggaggtgagcgcgagactgcgcctggggtctggctccaatggactcctgcggcggaaggtttcgatcatcgagacaaaggagaagaattgctcaggcaaagagagagacaggcggaccgatgatctgctggaacttaccgaggacatggaaaaagagatatctaacgcccttggacacggcccccaggatgagatcctcagctccgcttttaaactgcggatcacacgtggcgatattcaaacccttaagaactaccactggctcaacgacgaggttatcaatttctacatgaacctgctggtggaacgaaacaaaaagcaagggtacccagcgctgcacgtctttagcaccttcttttatcccaaactcaagtccggcggctaccaagccgtgaagagatggacaaaaggagtgaacctcttcgaacaggagatcatcctggtacccattcatcggaaggtgcattggtcactggtggtcatcgatctgcgtaagaagtgcctgaaatacctagattcgatgggccagaagggccaccgaatctgtgagatcctgcttcaatacctgcaggacgaatccaagacaaaaagaaacagtgatctgaatcttctagaatggactcaccatagtatgaagccccacgagatcccacagcagcttaatggatctgactgcgggatgttcacctgtaagtatgcagactacatctcacgcgataagccaataacttttacccaacatcagatgccgctcttcaggaaaaaaatggtctgggagatccttcaccaacagctgctctag

SEQ ID NO: 209161 - DNA, 1770 bp, Artificial Sequence
  derived and/or modified sequence
atgtaccgctggctggtgcgcatcctgggcaccatcttccgcttctgtgacagatctgtgcccccagcccgggccctgctgaagagaagaagaagtgacagcaccctcttcagcacagtggacacagatgagatcccagccaagaggccccggctggactgcttcatccaccaggtgaagaacagcctgtacaatgctgccagcctgtttggcttccccttccagctgaccaccaagcccatggtgaccagcgcctgcaatggcaccagaaatgtggcccccagcggggaggtgttcagcaacagcagcagctgtgagctgaccggcagcggctcctggaacaacatgctgaagctgggcaacaagagccccaacggcatcagtgactaccccaagatccgggtgacagtgacccgggaccagcccaggagagtgctgcccagctttggcttcaccctgaacagcgagggctgcaacagaagacctgggggcagaagacacagcaaaggaaatcctgagagcagcctgatgtggaagccccaggagcaggccgtgacagagatgatcagcgaggagagcggcaagggcctgcggcggccccactgcaccgtggaggagggcgtgcagaaggaggagcgggagaagtacaggaagctgctggagcggctgaaggagagcggccacggcaacagcgtgtgccctgtgaccagcaactaccacagcagccagaggagccagatggacaccctgaagaccaagggctggggcgaggagcagaaccacggcgtgaagaccacccagtttgtgcccaagcagtaccgcctggtggagacccggggccccctgtgcagcctgcggtctgagaagcgctgcagcaagggcaagatcacagacacagagaccatggtgggcatccgctttgaaaatgaaagccggcggggctaccagctggagccagacctgtctgaggaggtgtctgcccggctgcggctgggcagcggcagcaatggcctgctgcggaggaaggtgtccatcatcgagaccaaggagaagaactgcagcggcaaggagcgggacagaagaacagatgacctgctggagctgacagaggacatggagaaggagatcagcaatgccctgggccacggcccccaggatgagatcctgagcagcgccttcaagctgcgcatcaccaggggggacatccagaccctgaagaactaccactggctgaatgatgaagtcatcaacttctacatgaacctgctggtggagaggaacaagaagcagggctacccagccctgcacgtgttcagcaccttcttctaccccaagctgaagagcggcggctaccaggccgtgaagcgctggaccaagggcgtgaacctgtttgagcaggagatcatcctggtgcccatccacaggaaggtgcactggagcctggtggtgattgacctgaggaagaagtgcctgaagtacctggacagcatgggccagaagggccaccgcatctgtgagatcctgctgcagtacctgcaggatgagagcaagaccaagaggaacagcgacctgaacctgctggagtggacccaccacagcatgaagccccatgagatcccccagcagctgaatggaagtgactgtggcatgttcacctgcaagtatgctgactacatcagccgggacaagcccatcaccttcacccagcaccagatgcccctcttcaggaagaagatggtgtgggagatcctgcaccagcagctgctgtag

SEQ ID NO: 209162 - DNA, 1740 bp, Artificial Sequence
  derived and/or modified sequence
atggacagccacccctgcctgtactgcggcccccaggacagcgagggcaccaactggcagaccagccccagcaccctcttcagcacagtggacacagatgagatcccagccaagaggccccggctggactgcttcatccaccaggtgaagaacagcctgtacaatgctgccagcctgtttggcttccccttccagctgaccaccaagcccatggtgaccagcgcctgcaatggcaccagaaatgtggcccccagcggggaggtgttcagcaacagcagcagctgtgagctgaccggcagcggctcctggaacaacatgctgaagctgggcaacaagagccccaacggcatcagtgactaccccaagatccgggtgacagtgacccgggaccagcccaggagagtgctgcccagctttggcttcaccctgaacagcgagggctgcaacagaagacctgggggcagaagacacagcaaaggaaatcctgagagcagcctgatgtggaagccccaggagcaggccgtgacagagatgatcagcgaggagagcggcaagggcctgcggcggccccactgcaccgtggaggagggcgtgcagaaggaggagcgggagaagtacaggaagctgctggagcggctgaaggagagcggccacggcaacagcgtgtgccctgtgaccagcaactaccacagcagccagaggagccagatggacaccctgaagaccaagggctggggcgaggagcagaaccacggcgtgaagaccacccagtttgtgcccaagcagtaccgcctggtggagacccggggccccctgtgcagcctgcggtctgagaagcgctgcagcaagggcaagatcacagacacagagaccatggtgggcatccgctttgaaaatgaaagccggcggggctaccagctggagccagacctgtctgaggaggtgtctgcccggctgcggctgggcagcggcagcaatggcctgctgcggaggaaggtgtccatcatcgagaccaaggagaagaactgcagcggcaaggagcgggacagaagaacagatgacctgctggagctgacagaggacatggagaaggagatcagcaatgccctgggccacggcccccaggatgagatcctgagcagcgccttcaagctgcgcatcaccaggggggacatccagaccctgaagaactaccactggctgaatgatgaagtcatcaacttctacatgaacctgctggtggagaggaacaagaagcagggctacccagccctgcacgtgttcagcaccttcttctaccccaagctgaagagcggcggctaccaggccgtgaagcgctggaccaagggcgtgaacctgtttgagcaggagatcatcctggtgcccatccacaggaaggtgcactggagcctggtggtgattgacctgaggaagaagtgcctgaagtacctggacagcatgggccagaagggccaccgcatctgtgagatcctgctgcagtacctgcaggatgagagcaagaccaagaggaacagcgacctgaacctgctggagtggacccaccacagcatgaagccccatgagatcccccagcagctgaatggaagtgactgtggcatgttcacctgcaagtatgctgactacatcagccgggacaagcccatcaccttcacccagcaccagatgcccctcttcaggaagaagatggtgtgggagatcctgcaccagcagctgctgtag

SEQ ID NO: 209163 - DNA, 1770 bp, Artificial Sequence
  derived and/or modified sequence
atgtaccggtggctggtgcggatcctgggcaccatcttccggttctgtgaccgttctgtgccaccggcacgtgcattgctgaagcgccgaaggagcgatagcaccctcttctccaccgtggacactgacgagatccctgcaaaaaggcctaggttggattgtttcatacaccaggtaaagaactctctgtataacgctgccagtctgtttggttttccatttcaattgaccaccaagcccatggttacgagcgcctgcaatggcacccgaaatgttgccccaagcggagaggtattttccaactcaagctcttgtgagctgactggctcaggctcctggaataacatgctgaagctgggtaataaatctcctaatggcatctccgactaccccaaaataagagtgaccgttacccgggatcaacctcggagggtgctgcctagcttcggcttcactcttaactccgagggttgcaacagaaggccaggtggccgtcgccactccaaaggcaaccctgagagctcattgatgtggaagccacaagagcaggcggtgactgagatgatatctgaggaaagcggaaaagggctgaggcgaccccactgtaccgtcgaggagggtgtccaaaaggaagagcgcgaaaagtaccgcaaactcctcgaacgactgaaggagtctggacacggtaatagtgtttgcccagtgacctcgaactaccattccagccaaagaagccagatggacacactcaagacgaagggctggggtgaggaacaaaaccacggcgtgaaaaccacacagttcgtgcccaaacagtacagacttgtcgaaacaagaggtcccttgtgctccttgagatcagaaaagcgctgctcaaaaggaaagatcaccgacaccgagacaatggtagggatccgattcgagaatgagtctagacgaggttatcagctagaaccagacttatcagaggaagtctccgcccgccttcggctgggaagtgggtctaatggactgctgcggcgcaaagtttcaatcatagagactaaagaaaagaactgttcaggaaaggaacgggatcgtcggacagacgacctgcttgaattaactgaagatatggaaaaggaaatcagtaatgccttaggccacggaccacaagacgagattctctcgagtgcattcaagctgagaattactaggggagacattcaaacactgaagaactaccactggctcaatgacgaggtgatcaacttctacatgaacttgttagtcgagcggaataaaaagcagggctaccccgccctgcacgtgtttagtacttttttttacccaaagctcaagagtggaggctaccaggctgtgaagagatggaccaagggcgtaaacctcttcgagcaggagattattctggtacccattcaccgtaaggttcactggagtcttgttgttatcgatctccgaaagaaatgccttaagtacctggatagtatggggcagaaaggacacaggatttgcgaaatcctactacaatacctgcaggacgagagcaaaaccaagcggaactccgacctgaaccttctggagtggactcatcattcgatgaaaccccacgaaatcccacaacagctgaacggtagtgattgtggaatgttcacttgcaagtacgctgactatatctctcgtgacaagccaattactttcactcaacatcaaatgccacttttccgcaagaaaatggtatgggaaattctccaccagcagcttctttag

SEQ ID NO: 209164 - DNA, 1740 bp, Artificial Sequence
  derived and/or modified sequence
atggacagccacccctgcctgtactgcggcccccaggacagcgagggaacaaattggcaaacttccccttctaccttgttttctactgtggatacagatgagattcccgcgaagcggccccggctggactgctttatccaccaggtgaaaaactcactgtacaacgccgcaagcctttttggcttcccctttcaactgaccactaagccaatggtgacttccgcttgtaacggcacccgcaacgtggccccatcaggagaagtcttcagcaattcaagttcatgtgagctcaccggctcagggtcttggaataatatgttgaaattgggcaacaagtctcccaatggcatttctgactaccctaaaattcgggtgaccgtgacacgggatcagccacgacgcgtcctccctagtttcgggttcaccctgaatagtgaaggctgtaacaggcgccccgggggaagacgccactcaaagggaaatcctgagtcttctctcatgtggaaacctcaagaacaggcagtgactgagatgatatccgaagaaagtgggaagggcctccgtaggccacactgtaccgtcgaggagggcgtgcaaaaggaagaaagggaaaaatacaggaagcttctcgagcgcctcaaggagtcaggccatgggaattctgtctgcccagttacaagtaactaccactcctcccagcgatcacagatggatacgctgaaaacaaaaggctggggggaagaacagaaccacggcgttaagactacgcagttcgtacccaagcagtacaggctggtggagactcgcgggcccctgtgctcattaaggtccgagaaaagatgcagcaaagggaaaattactgatacagagaccatggtggggataaggtttgagaacgagtcaagacggggatatcagctggaaccggatctgtcagaggaggtatccgcaaggctgagactggggtctgggtctaacggcttgctgcgaagaaaggtttccattatcgaaacaaaagaaaagaattgttctggcaaggaacgcgacagacggacggatgacctgctcgagctgaccgaggatatggaaaaggaaatctccaatgctctcgggcacggaccgcaagacgagatactgtctagcgcttttaaacttaggataacgcggggagacatccagaccctcaaaaattaccactggctgaacgacgaagtgatcaatttctatatgaacctattggtagaacggaacaagaagcagggatatcccgcactgcacgtgttttcaaccttcttttaccctaaactaaaaagcggagggtaccaggcagttaaacgatggaccaagggagtcaacttgttcgaacaggagattattctggtgcctattcaccggaaagtacattggtcgctggtggtcatcgatctgcggaagaaatgtctgaagtacctagattcaatgggccagaaaggacatcgtatatgtgagatcctcttgcaatacctacaagatgagagcaaaacaaagcgtaattctgacctgaatctgttagagtggacgcatcactccatgaagcctcacgagataccacagcagctcaacgggagtgactgcgggatgtttacatgcaagtatgccgactacatttcccgcgataagcctataacctttacacaacaccaaatgccgctgttccgcaagaaaatggtctgggagatcctccaccaacaactgctgtag

SEQ ID NO: 209165 - DNA, 1770 bp, Artificial Sequence
  derived and/or modified sequence
atgtaccgatggctggtgagaattctcgggactattttccgattctgtgacaggtccgtgccacctgcaagagctcttttgaagcgaaggcggagcgattcgactctcttctcaaccgttgacactgatgaaatcccagctaagaggcccaggctcgactgtttcatacatcaggtcaagaatagtctctacaacgccgcatcgctgtttgggtttccctttcagctgactaccaagccaatggttacttccgcctgtaacggcacccgaaatgtcgccccttcaggcgaggtgttctcaaactctagttcttgcgagctcactggctcagggtcttggaataacatgctaaaattgggcaacaaatcccccaatggaatcagtgactatccgaagattagagtgaccgtgacccgtgaccaacctcgccgagtcctcccatcttttgggttcactctcaattccgagggatgcaaccggaggcccggtggccgtcgacactccaagggcaaccctgagagctctctgatgtggaagcctcaggagcaagcggtgaccgaaatgatcagtgaagaaagcggtaagggactgcggagaccccattgtactgtggaggaaggggtgcagaaggaagagcgcgagaagtatcggaagctgcttgagaggctgaaggaatcaggccacggaaactccgtgtgcccagtaacctccaactaccacagctcccaaaggtctcaaatggacacgcttaagactaaagggtggggggaagagcaaaaccacggagtgaagacaactcagtttgttccaaagcagtatagactagtggagacacgaggaccactctgttccttgcgctcagaaaagcgctgcagcaaaggcaagattaccgacaccgaaaccatggtgggcataaggtttgaaaacgagtctcgcaggggataccaactggagccagatttatcagaggaggtctcagcgagactcaggctgggctcagggagcaacggcctgttaagaagaaaagtctcgattatcgagactaaagaaaagaattgttccggcaaggaacgcgacagacgcacagacgatctgttggaactgaccgaggacatggagaaagagatatccaatgcactaggacatggacctcaagacgagattcttagtagcgcttttaagctgaggatcacacggggagatatccagactctgaagaattaccactggctcaatgacgaggtgataaatttttacatgaatctactggtggaacggaataaaaagcaaggataccctgccctgcacgttttcagcacatttttctacccaaaactgaagagcggaggatatcaggcagtgaagaggtggactaagggcgtgaatctgtttgaacaggaaattatcctggtgcccatacaccgtaaagtgcactggtcactcgtcgtcatcgatctcagaaagaaatgtcttaaatacctggacagtatgggccaaaaaggacataggatatgcgagattttacttcagtatttgcaggacgagtccaagacgaaaaggaactcagatctgaacctcctggagtggacgcaccatagcatgaagccacatgaaatcccccagcagctgaatggctcagattgtggcatgtttacctgtaaatacgccgactatatctcacgggacaagcccattacttttacgcagcatcagatgcctttgtttaggaagaaaatggtgtgggaaatcctgcaccagcaactgttatag

SEQ ID NO: 209166 - DNA, 1740 bp, Artificial Sequence
  derived and/or modified sequence
atggactctcatccttgtctctactgtggtcctcaggactccgagggaacaaactggcagacctccccctcgaccctgtttagcactgtggatacagacgaaattcctgctaagaggcctagactagattgcttcatccaccaagttaagaattccctctataacgctgccagcctttttggtttccctttccagttgaccaccaaacccatggtcaccagtgcctgcaacggtactagaaatgtcgcaccatcaggagaggtgttttcaaactcctcctcatgcgagttgactggatctgggtcctggaacaacatgcttaagttgggaaacaaatctcctaatggcatatctgactaccccaagattcgggtgactgtgacccgggaccagcctaggagagtgctcccgtctttcggtttcaccctaaattcggaaggttgcaacagacgcccagggggtcgaaggcattccaaaggaaatcctgaaagctctctcatgtggaagccccaggagcaggctgttactgagatgatatcggaggaatctggaaaggggctgaggcgacctcattgtacagtggaagagggagtgcagaaggaagaacgcgaaaaatacaggaagctcctggaaagacttaaagagtcaggccatggaaattcggtgtgccccgtgacgtccaactaccactcctcccagcggagtcaaatggataccctgaagactaaagggtggggtgaggaacagaatcatggggtgaagactactcaatttgtgcccaaacagtaccgcctggtcgaaacccggggtcctttatgctcccttcgctccgaaaagaggtgcagcaagggcaaaatcaccgatacagagaccatggttggtattaggtttgaaaacgagtctcgccgtgggtatcagttggaacccgacctgagcgaggaggtatccgcccgtctcagactgggcagtggctccaatgggctccttcggcgtaaggtgtctatcatcgaaactaaagagaagaattgctcaggcaaagagagagatcgcaggaccgatgatctgttagaactgactgaggacatggagaaagagatttcaaacgcattaggtcacgggcctcaggacgagattttatccagcgctttcaagcttcgcattacacggggtgacatccagaccctgaaaaactaccattggctcaatgatgaggtgatcaacttctatatgaatctgctggtagagcggaacaagaaacagggctacccagcactgcatgtgttttccacctttttttatcctaaactgaaatcgggcggttatcaggcagtgaagcgttggaccaaaggagttaacctgttcgagcaggaaatcattcttgtgcccatccacagaaaggtgcactggagtcttgtggtcatcgacttacgcaagaagtgtctgaaatacctcgatagtatgggccagaaggggcaccgaatctgcgaaatcttgcttcagtacttacaggatgaatcaaaaaccaaacgcaattcagatcttaacctgctggagtggacacaccacagcatgaagccacatgagatcccccaacaactaaatggctcagactgcgggatgttcacctgtaagtatgcagactacatctctagagacaagccaattacctttactcagcatcagatgcctctgttccggaagaagatggtgtgggagatcctgcatcagcaactgttgtag

SEQ ID NO: 209167 - DNA, 5717 bp, Artificial Sequence
  derived and/or modified sequence
gtgcgcagattgagaatggagctttccggtcgggcgggaggaggtgacgtcaggagtggtggcgggcgggggcctctggtagccctggggacgctgtatctgtgggctcttgaatcgcgtcacaaatcagcgaccgaactctggcggtggtggttaagacggcgaaggcggcagcggcggcgacagctctggggtttgcgtctcggggtgtgtcggccgccgctgctgcttgggcctggtatgtacagatggctggttaggattctcggcaccattttccgtttctgcgaccggtcggtgccccctgcccgggccctcctgaagaggcggcgctcagacagcactctgttttctacagtggacactgatgaaataccagccaaaagaccaagattagattgctttattcaccaagtgaaaaacagtctctacaatgctgccagcttatttggattcccattccagctgaccacaaagcccatggtaacttctgcttgtaatggaacacggaatgtggccccttcaggagaggtattttcgaactcttcatcttgtgaactgacaggttctggatcctggaacaacatgctgaaactgggtaataaatctcctaatggaataagtgactatccaaagatcagagtgacagttacccgagatcagccacgcagagtcctgccttcctttggttttactttgaactcagaaggctgtaatagaagaccaggtggccgtcgccatagcaaaggtaatccagagagttctttaatgtggaaacctcaggaacaggctgtaacagagatgatttctgaagagagtggcaagggtctgaggcgtccccattgtactgtggaggagggtgttcaaaaagaggaaagagagaagtaccgaaagttattggaacgacttaaagaaagtggtcatggaaactctgtctgtcctgtaacttcaaattatcacagttctcaaagaagtcagatggacacattaaagaccaaaggctggggggaagagcaaaatcacggagtcaaaacaactcagtttgttccaaaacaatatagacttgttgaaacaaggggacctctatgttcattgagaagtgaaaagaggtgttcaaaggggaaaattactgatacagagacgatggtcggaatcagatttgaaaatgaaagtaggaggggataccaactggagcctgacctatcagaagaagtgtcggcccgactccgcctgggcagtggaagcaatggcttactcaggaggaaagtgtcaataattgagacaaaggaaaagaattgctcaggcaaagagagggacagaagaacggacgatctccttgaacttacagaggacatggaaaaggaaatcagtaatgccctaggccatggcccacaggatgaaatcctaagtagtgctttcaaattgcgaattactcgaggagatattcagacattaaagaactatcactggctcaatgatgaagtcattaatttttacatgaatcttctggtggaaagaaataaaaagcaaggctatccagcacttcatgtattcagtactttcttctatcctaaattaaagtctgggggttaccaagcagtgaaacgatggaccaaaggggtaaatctctttgaacaagaaattattctggtgcctattcatcggaaggtacattggagcctggtggtgattgacctaagaaaaaagtgtcttaaatatctggattctatgggacaaaagggccacaggatctgtgagattctccttcagtatttacaggatgaaagtaagaccaaaagaaatagtgatctgaatcttttagagtggacccatcacagcatgaaaccacacgagattcctcaacagctgaatgggagtgattgtggaatgtttacttgtaaatatgcagattatatttctagggacaaacctatcacatttactcagcaccagatgcctctcttccggaagaagatggtgtgggaaatccttcatcagcagttgctgtgagaaaactttgcctggtccctctagctgctggtggttctttcacagacatttccatatacctcatgcattgtgggttaaaaagtccctgcatcacttctgttctcacaggtactgagctgtcaaaagtgcatgaaggcctctcactgtactctagtcctgacttggggtgcagagggctgcttgcaatcctgtttgtaaggctgtgcctgctcagagctttggactgttcaacccacacaagaacaaacgctaactaatattttttttaagagattcttttccctatgaatgtgggaaatgcaggatttattctgtgaattgtttgtttctgtgtgtttgttcagcgtattcattcactcactcgtttgcaaacataatgggcagtggtcatttactgctgctcttttacagttagctctaaattacttgtttgaactatttatttctgaaaggaatgttactcaagctgccactccctgctgaagagcaggagggaactctcactgggggcggaaggaagtggagctggagcagtaactgccaacatgaagctggagggtttgggattttttttgtttttgtttttttgaggctcaaaaaatgctgggagaaatgaaaatgctgtgggatagggctcctgttgcctttcagaggaagtctgacactacagcgttggcacagtgccgtgaacagtggaactgtgcccaagggactctgattatccaagcatcttccgaagagtgttgtggtcaccttaaagagacttccccttctggaaatgtggtgacttggcttagtcttcaaactggattcatggatttgaagtaactgtaaaccctaaatcttcattttcatcccagatctggttgagtataaacctcagaattgtaggggctggcctgagctgtttatttcaaaagatactattcaatttaaagctatttttcctcagagtttttgttttctatatattaagtctaaattaagttttctactcattaagactaacatctccccactccatccccactgaaatttgtggaagaaaatttagtacttggctctgaggttgccagttatacaataatctattttgcatatgaaagtttgtatttaacttttttgttcattaaaaaccttactgatatggttataacttcagacagtttagagttggtcagaacatattttgcaagatctagtgcctagtgttgcttttctgatgtaataaaaggtggtctggcagaacctaaaaaagtatatgctgaaatgatttctaaccctctccctacttaaacctcccagacttgttctggttcataaaagcaagaggtaaaactggaaaaattgtgcacgtgttacctatgaatctacacgcctgccatttgcagtgctccggctgctggtcccagaggtatactggttacagctattgcagccagttccctgagacttgtaaaactcctggtttaggacatggggcctgtggtgtggatggaaaatgctgggcctactggatggtcagccagaggccatgtggtgggtgatgactgaagcgggagcaggttgtaccacacctctcccccccccctcccactccccctccctccctctcccctccccctccctccctcccccctccctccctcccccccctccccctccctccccctccctctctccctaacacccaccctccccctttcccccaccctccccccttctcccctttccccaccctccctccccccttccccctcccccccccccccccgcagcccctgctcctttctctgggctcctggcattgtgccagtgagtgctgggaccaggtaatgagcacagccaaaaaggccagaggttcactaggtcagcatcataccaaacgcctggctttcaccaggcatcagtgtgcttcacttgagagtttggtaccatggttaagatcgagtccatgctaggtaagtcctgttaggaatgtcagtttgtattccgcccacgtgaatgatgctgagcttaatgtattattttgaggggcttcttcagagcagttctcactgagctttccattaacctacactcttccggacggctcttaaaacttgcaggacataatgaaattgggaagagcagagtgttgaagtctatagcatggccttctgcttgaccctgagttcctgaattgaatgtgggagaccacaggccatacttctctaggcactcacatgtctcccttggcataaggaaacatgttagtaatatagttttttagatccaaacagtttatttggatctaaaagtttaagtgttcagttgaaaaacagctattgattttattagtagcaaattatcaccattaaagccagtggttttttttttgttttttttttttgttttttttttttttttttgcgacagagtctcttgtcgcccaggctggagtacaatggtgtgatctcagctcactgcaacctccgcctcccaggttcaagcgattctcctgcctcagcctcctgcgtagctgggattacaggtgcccaccaccacaccctgctaatttttgtacttttagtagagatggggtttcgccatgttggccaggctggtcttgaactgctgacctcaggtgatccacccgcctcggcctcccaaagtgctggtattacagtcatgagccacctcacccagcctgtttttgagacggagtttcacttttgtcgcccaggctggagtgcaatggcgctatctcagctcactgcaacccccacctcccaggttcaagcgattctcctgcctcagcctcccgagtagctgggattacaggcatgtgccaccacccctggctaattttgtatttttagtggagacggggtttctccatgttggtcaggctggtcttaaactcccgacctcaagtgatctgcccgcctcggcctcccaaagtgctgggattacaggcgtgagccattgcacctgtccctgccagtgtgtttttaaaatagtttagggggttgagaaaagatgcagtgagccattattctcctttagcaggtagtctcttaaaaattgatgtggattttaaaaatataccattgagaacacgtatctttctcaaacttgaccttgaacagagctggatgggggtgggagggaaacagatttggggcatatggaagatattcttgggagccccatattctacctcagttaccgaaggctattagaacctctgaatttttcctcctctgaaatcctaagcacaacttcagaaaaccatgtctgatagcggatgtcttcctgctgtgaggagctgcttgatgtggggaccaaggtgtgggtgtgggcggaatgtatcctagtagaaacagtgaacctcagatatgaataaataagcaagagaccgaaagttaagtgtgtgacaacctcagtactgtagttaagctacattctttaaattagcttttgtgaactgattgggaacctaatctcttttgtaactgtttgagaaaaactctgaagcacctgatattcaaacaaacttatggtacttactaactcatttgtaaattggcgatgtagctggctgtagtattgctttgataatttttttcttttaatttacctaatatatataaggaaggggtttggatatattaaaataggtgttaattttatctatttaccaataaattcatctctttaattca

SEQ ID NO: 209168 - DNA, 2383 bp, Artificial Sequence
  derived and/or modified sequence
acaaatcagcgaccgaactctggcggtggtggttaagacggcgaaggcggcagcggcggcgacagctctggggtttgcgtctcggggtgtgtcggccgccgctgctgcttgggcctggtatgtacagatggctggttaggattctcggcaccattttccgtttctgcgaccggtcggtgccccctgcccgggccctcctgaagaggcggcgctcagacagcactctgttttctacagtggacactgatgaaataccagccaaaagaccaagattagattgctttattcaccaagtgaaaaacagtctctacaatgctgccagcttatttggattcccattccagctgaccacaaagcccatggtaacttctgcttgtaatggaacacggaatgtggccccttcaggagaggtaataaatctcctaatggaataagtgactatccaaagatcagagtgacagttacccgagatcagccacgcagagtcctgccttcctttggttttactttgaactcagaaggctgtaatagaagaccaggtggccgtcgccatagcaaaggtaatccagagagttctttaatgtggaaacctcaggaacaggctgtaacagagatgatttctgaagagagtggcaagggtctgaggcgtccccattgtactgtggaggagggtgttcaaaaagaggaaagagagaagtaccgaaagttattggaacgacttaaagaaagtggtcatggaaactctgtctgtcctgtaacttcaaattatcacagttctcaaagaagtcagatggacacattaaagaccaaaggctggggggaagagcaaaatcacggagtcaaaacaactcagtttgttccaaaacaatatagacttgttgaaacaaggggacctctatgttcattgagaagtgaaaagaggtgttcaaaggggaaaattactgatacagagacgatggtcggaatcagatttgaaaatgaaagtaggaggggataccaactggagcctgacctatcagaagaagtgtcggcccgactccgcctgggcagtggaagcaatggcttactcaggaggaaagtgtcaataattgagacaaaggaaaagaattgctcaggcaaagagagggacagaagaacggacgatctccttgaacttacagaggacatggaaaaggaaatcagtaatgccctaggccatggcccacaggatgaaatcctaagtagtgctttcaaattgcgaattactcgaggagatattcagacattaaagaactatcactggctcaatgatgaagtcattaatttttacatgaatcttctggtggaaagaaataaaaagcaaggctatccagcacttcatgtattcagtactttcttctatcctaaattaaagtctgggggttaccaagcagtgaaacgatggaccaaaggggtaaatctctttgaacaagaaattattctggtgcctattcatcggaaggtacattggagcctggtggtgattgacctaagaaaaaagtgtcttaaatatctggattctatgggacaaaagggccacaggatctgtgagattctccttcagtatttacaggatgaaagtaagaccaaaagaaatagtgatctgaatcttttagagtggacccatcacagcatgaaaccacacgagattcctcaacagctgaatgggagtgattgtggaatgtttacttgtaaatatgcagattatatttctagggacaaacctatcacatttactcagcaccagatgcctctcttccggaagaagatggtgtgggaaatccttcatcagcagttgctgtgagaaaactttgcctggtccctctagctgctggtggttctttcacagacatttccatatacctcatgcattgtgggttaaaaagtccctgcatcacttctgttctcacaggtactgagctgtcaaaagtgcatgaaggcctctcactgtactctagtcctgacttggggtgcagagggctgcttgcaatcctgtttgtaaggctgtgcctgctcagagctttggactgttcaacccacacaagaacaaacgctaactaatattttttttaagagattcttttccctatgaatgtgggaaatgcaggatttattctgtgaattgtttgtttctgtgtgtttgttcagcgtattcattcactcactcgtttgcaaacataatgggcagtggtcatttactgctgctcttttacagttagctctaaattacttgtttgaactatttatttctgaaaggaatgttactcaagctgccactccctgctgaagagcaggagggaactctcactgggggcggaaggaagtggagctggagcagtaactgccaacatgaagctggagggtt

SEQ ID NO: 209169 - DNA, 2108 bp, Artificial Sequence
  derived and/or modified sequence
aaggataatcccactccttggccagtggatggacagtcacccatgtctctactgtggaccacaggacagcgaaggcaccaactggcagacaagtcccagcactctgttttctacagtggacactgatgaaataccagccaaaagaccaagattagattgctttattcaccaagtgaaaaacagtctctacaatgctgccagcttatttggattcccattccagctgaccacaaagcccatggtaacttctgcttgtaatggaacacggaatgtggccccttcaggagaggtattttcgaactcttcatcttgtgaactgacaggttctggatcctggaacaacatgctgaaactgggtaataaatctcctaatggaataagtgactatccaaagatcagagtgacagttacccgagatcagccacgcagagtcctgccttcctttggttttactttgaactcagaaggctgtaatagaagaccaggtggccgtcgccatagcaaaggtaatccagagagttctttaatgtggaaacctcaggaacaggctgtaacagagatgatttctgaagagagtggcaagggtctgaggcgtccccattgtactgtggaggagggtgttcaaaaagaggaaagagagaagtaccgaaagttattggaacgacttaaagaaagtggtcatggaaactctgtctgtcctgtaacttcaaattatcacagttctcaaagaagtcagatggacacattaaagaccaaaggctggggggaagagcaaaatcacggagtcaaaacaactcagtttgttccaaaacaatatagacttgttgaaacaaggggacctctatgttcattgagaagtgaaaagaggtgttcaaaggggaaaattactgatacagagacgatggtcggaatcagatttgaaaatgaaagtaggaggggataccaactggagcctgacctatcagaagaagtgtcggcccgactccgcctgggcagtggaagcaatggcttactcaggaggaaagtgtcaataattgagacaaaggaaaagaattgctcaggcaaagagagggacagaagaacggacgatctccttgaacttacagaggacatggaaaaggaaatcagtaatgccctaggccatggcccacaggatgaaatcctaagtagtgctttcaaattgcgaattactcgaggagatattcagacattaaagaactatcactggctcaatgatgaagtcattaatttttacatgaatcttctggtggaaagaaataaaaagcaaggctatccagcacttcatgtattcagtactttcttctatcctaaattaaagtctgggggttaccaagcagtgaaacgatggaccaaaggggtaaatctctttgaacaagaaattattctggtgcctattcatcggaaggtacattggagcctggtggtgattgacctaagaaaaaagtgtcttaaatatctggattctatgggacaaaagggccacaggatctgtgagattctccttcagtatttacaggatgaaagtaagaccaaaagaaatagtgatctgaatcttttagagtggacccatcacagcatgaaaccacacgagattcctcaacagctgaatgggagtgattgtggaatgtttacttgtaaatatgcagattatatttctagggacaaacctatcacatttactcagcaccagatgcctctcttccggaagaagatggtgtgggaaatccttcatcagcagttgctgtgagaaaactttgcctggtccctctagctgctggtggttctttcacagacatttccatatacctcatgcattgtgggttaaaaagtccctgcatcacttctgttctcacaggtactgagctgtcaaaagtgcatgaaggcctctcactgtactctagtcctgacttggggtgcagagggctgcttgcaatcctgtttgtaaggctgtgcctgctcagagctttggactgttcaacccacacaagaacaaacgctaactaatattttttttaagagattcttttccctatgaatgtgggaaatgcaggatttattctgtgaattgtttgtttctgtgtgtttgt

SEQ ID NO: 209170 - protein, 711 aa, Artificial Sequence
  derived and/or modified sequence
MAVYRLCVTTGPYLRAGTLDNISVTLVGTCGESPKQRLDRMGRDFAPGSVQKYKVRCTAELGELLLLRVHKERYAFFRKDSWYCSRICVTEPDGSVSHFPCYQWIEGYCTVELRPGTARTICQDSLPLLLDHRTRELRARQECYRWKIYAPGFPCMVDVNSFQEMESDKKFALTKTTTCVDQGDSSGNRYLPGFPMKIDIPSLMYMEPNVRYSATKTISLLFNAIPASLGMKLRGLLDRKGSWKKLDDMQNIFWCHKTFTTKYVTEHWCEDHFFGYQYLNGVNPVMLHCISSLPSKLPVTNDMVAPLLGQDTCLQTELERGNIFLADYWILAEAPTHCLNGRQQYVAAPLCLLWLSPQGALVPLAIQLSQTPGPDSPIFLPTDSEWDWLLAKTWVRNSEFLVHENNTHFLCTHLLCEAFAMATLRQLPLCHPIYKLLLPHTRYTLQVNTIARATLLNPEGLVDQVTSIGRQGLIYLMSTGLAHFTYTNFCLPDSLRARGVLAIPNYHYRDDGLKIWAAIESFVSEIVGYYYPSDASVQQDSELQAWTGEIFAQAFLGRESSGFPSRLCTPGEMVKFLTAIIFNCSAQHAAVNSGQHDFGAWMPNAPSSMRQPPPQTKGTTTLKTYLDTLPEVNISCNNLLLFWLVSQEPKDQRPLGTYPDEHFTEEAPRRSIAAFQSRLAQISRDIQERNQGLALPYTYLDPPLIENSVSI

SEQ ID NO: 209171 - DNA, 2136 bp, Artificial Sequence
  derived and/or modified sequence
atggccgtataccgcttgtgtgtgaccacaggcccatatctgagagcaggcacactggacaatatcagtgtgacactcgtcggcacatgtggggagtccccaaagcagcgcttagaccggatggggcgggattttgcacctggcagtgtgcagaaatacaaggttcgttgcaccgcagaactgggggaattgctgttgctgagagtgcataaagaacgttacgccttttttagaaaagatagctggtactgtagccgcatttgtgtgactgagcctgatggcagcgtgtctcatttcccttgctatcaatggatcgaaggctactgtacagtggagcttcggcctggtacagccagaacaatatgccaggacagcctgccattattgttagatcacagaacccgggagttgagagcccgtcaagagtgctatcgttggaagatttacgctcctggcttcccctgtatggttgacgtgaacagttttcaggaaatggaatcagacaagaagtttgctttgacaaagacaactacatgtgttgatcagggtgattccagcgggaatagatatttgcccggattcccaatgaaaatcgatatccctagcctgatgtatatggagcccaatgtgcgctattccgctacaaagactatttctctgctgttcaatgctatccccgcgagtctcgggatgaaactgcgcggtctcttggatcggaagggcagctggaaaaagttagatgacatgcagaacatcttctggtgccacaagactttcacaacaaagtacgttactgagcactggtgtgaagatcacttctttgggtaccagtatctgaatggcgttaaccctgtgatgctgcactgtatctctagccttccgagtaagttgcctgttacaaacgatatggtagctcctttgttaggacaggatacctgcctccagaccgagctggaaaggggcaatattttcctggccgactattggatcttggcggaggctcctacccattgtttaaatgggcggcaacagtatgttgcggcccctctgtgcctgctctggctcagccctcagggcgccttagtacctctcgccatccagctgagccagacgcctgggcccgattcgcctatctttcttcctaccgattccgagtgggactggctgctagctaagacctgggtccgaaattcagaatttctcgtccacgaaaataatactcacttcctttgcactcatctgctctgcgaagcattcgctatggccactctcaggcagcttcccctctgtcacccaatttacaaactgttactgccccacacccgctatacgttgcaggtcaatactattgccagggcaacacttctgaacccagaaggacttgtcgaccaagtgacgtccatcggtagacaaggcctgatttacctaatgagcacaggattggcccactttacatatacgaacttctgcctcccggacagcctgcgtgcacggggggttttggcaatccctaactaccactacagagatgacggcctcaagatatgggccgcaattgagagttttgtatccgaaattgtgggatactactacccaagcgacgcttccgtgcagcaggattcagaactgcaggcttggactggggaaatttttgctcaagctttcttgggtcgtgaatctagtggtttcccttcccgattatgcactcctggggagatggtgaagttcctgactgccattatattcaattgcagtgcacagcacgccgcagtgaactcaggacagcacgatttcggtgcctggatgcctaatgccccctcaagcatgaggcagccccctccccagacgaaaggcacgactactctgaagacatacctcgacacacttcccgaagtgaacatttcctgtaacaacctgcttctgttctggctggtgtcgcaggagcctaaagatcagcgaccactgggaacttatccagacgagcacttcactgaggaagctccacgcaggagtattgctgcctttcagtcccggttagcccagatctcccgcgatatacaggagagaaaccaaggtctagcgctgccgtatacctacctggaccctcccctgatagagaacagcgtgagcatttag

SEQ ID NO: 209172 - DNA, 2136 bp, Artificial Sequence
  derived and/or modified sequence
atggctgtgtaccgcctgtgtgtgaccaccggcccctacctgcgggccggcaccctggacaacatctctgtgaccctggtgggcacctgtggggagagccccaagcagaggctggacaggatgggccgggactttgcccctggctctgtgcagaagtacaaggtgcgctgcacagctgagctgggggagctgctgctgctgcgggtgcacaaggagagatatgccttcttcaggaaggacagctggtactgcagccgcatctgtgtgacagagccagatggctctgtgagccacttcccctgctaccagtggattgagggctactgcaccgtggagctgcggcctggaacagcccggaccatctgccaggacagcctgcccctgctgctggaccacaggacccgggagctgcgggcccggcaggagtgctaccgctggaagatctatgcccctggcttcccctgcatggtggatgtgaacagcttccaggagatggagagtgacaagaagtttgccctgaccaagaccaccacctgtgtggaccagggcgacagcagcggcaaccgctacctgcccggcttccccatgaagattgacatccccagcctgatgtacatggagcccaacgtgcgctacagcgccaccaagaccatcagcctgctcttcaatgccatcccagccagcctgggcatgaagctgcggggcctgctggacaggaagggctcctggaagaagctggatgacatgcagaacatcttctggtgccacaagaccttcaccaccaagtatgtgacagagcactggtgtgaggaccacttcttcggctaccagtacctgaatggagtgaaccctgtgatgctgcactgcatcagcagcctgcccagcaagctgcctgtgaccaatgacatggtggcccccctgctgggccaggacacctgcctgcagacagagctggagcggggcaacatcttcctggccgactactggatcctggccgaggcccccacccactgcctgaatggccggcagcagtatgtggccgcccccctgtgcctgctgtggctgagcccccagggcgccctggtgcccctggccatccagctgagccagaccccaggccctgacagccccatcttcctgcccacagacagcgagtgggactggctgctggccaagacctgggtgaggaacagcgagttcctggtgcatgagaacaacacccacttcctgtgcacccacctgctgtgtgaggcctttgccatggccaccctgcggcagctgcccctgtgccaccccatctacaagctgctgctgccccacacccgctacaccctgcaggtgaacaccatcgcccgggccaccctgctgaaccctgagggcctggtggaccaggtgaccagcatcggccggcagggcctcatctacctgatgagcacaggcctggcccacttcacctacaccaacttctgcctgcctgacagcctgcgggcccggggcgtgctggccatccccaactaccactacagagatgatggcctgaagatctgggccgccatcgagagctttgtgtctgagatcgtgggctactactaccccagtgatgcctctgtgcagcaggacagcgagctgcaggcctggacaggagagatctttgcccaggccttcctgggccgggagagcagcggcttccccagccggctgtgcaccccaggagagatggtgaagttcctgacagccatcatcttcaactgcagcgcccagcacgccgctgtgaacagcggccagcacgactttggagcctggatgcccaatgcccccagctccatgaggcagcccccaccccagaccaagggcaccaccaccctgaagacctacctggacaccctgcctgaggtgaacatcagctgcaacaacctgctgctcttctggctggtgtcccaggagcccaaggaccagaggcccctgggcacctacccagatgagcacttcacagaggaggcccccaggaggagcattgctgccttccagagccggctggcccagatcagccgggacatccaggagaggaaccagggcctggccctgccctacacctacctggacccccccctgattgagaacagcgtgtccatctag

SEQ ID NO: 209173 - DNA, 2136 bp, Artificial Sequence
  derived and/or modified sequence
atggccgtgtaccggctgtgcgtgaccaccggcccctacctgcgggcaggcacgcttgacaacattagcgtgaccctggtgggcacatgcggagagagccccaagcagaggctcgaccgaatgggacgagatttcgcccccggcagcgtacagaaatataaagtcaggtgtactgctgagctgggagagctgttactgctgagagtgcataaggagagatacgcatttttcagaaaggattcatggtactgctcacgcatttgtgtcacagaaccggacggcagtgtgtctcattttccttgctatcagtggattgaaggttactgtaccgtggaacttagacccgggacagcccgcaccatttgtcaggactccctcccactgctcttggatcatcggacacgggagctgcgggctcgccaggagtgctatcggtggaagatttatgctcctggcttcccctgcatggtggatgtaaattcattccaggaaatggagtctgacaagaagttcgctctgaccaaaaccaccacctgcgtggatcagggggacagctctggaaacagatacttgcctggttttccaatgaaaattgacattccgagcttgatgtacatggaaccaaatgttcgttactccgcaacaaagacaatctccctcctgtttaacgccatccctgcaagtctgggcatgaagctcagaggccttcttgatagaaaaggaagttggaagaagctcgacgatatgcagaacattttttggtgccataagacatttaccactaaatatgtgacggagcattggtgtgaggatcactttttcgggtatcagtatctgaatggcgtgaaccccgttatgctgcactgtatcagctccctgccctcgaagctgcccgtgacaaatgacatggtggcccccctcctcgggcaggatacatgtcttcagactgagttagagcgcggcaacatctttctggccgattattggatcctggctgaagccccgactcattgcctaaacgggagacagcaatacgtcgccgccccattatgcctactgtggctttcaccacagggtgcccttgtgcctcttgctattcaactgagtcagacccctggacctgattctccgatatttcttcccacagattcagaatgggactggctcctcgcaaagacttgggtaagaaatagcgagtttctggtccatgagaataatacccatttcttgtgcactcatctgctttgtgaggcgttcgctatggctactctgcggcaacttcccttgtgtcatcccatttacaaactgctgcttccccatacccggtacacgctccaggtcaatacaattgcgagagcaacattactgaatcccgaaggcctggtggaccaagtcaccagtatcggcagacagggattaatttatctcatgagtacaggcctggcacattttacctatacaaatttctgcctcccagacagtttacgcgctcggggtgtgcttgctatcccgaactaccactatcgcgacgacggcttgaagatttgggctgccattgaatctttcgttagcgagatagtcgggtattactacccctctgatgcttccgtgcagcaagatagtgaactgcaggcttggactggcgagatcttcgctcaagcatttctgggccgggagagctcaggattcccctctcgcttatgcacgcccggcgagatggtgaaatttttaacagctatcatctttaactgttccgcgcagcatgccgccgtgaattccggtcaacatgattttggagcttggatgcccaacgcccccagcagcatgcggcagcctcccccccagactaaaggcacaactaccttgaagacctatctggataccctgccagaagtgaacatatcatgtaataaccttctccttttctggctggtctcccaagaacccaaagatcagcgccccctcggaacctacccagacgaacactttacggaggaggcgccccgtaggagcatcgctgctttccagtccagattagcgcagatttcccgtgacattcaggagcgtaatcaaggcctcgcactgccctacacgtatttagacccccctttaatcgaaaacagtgtaagcatttag

SEQ ID NO: 209174 - DNA, 2136 bp, Artificial Sequence
  derived and/or modified sequence
atggctgtctacaggctttgtgtcaccaccggtccctatcttcgtgcaggcaccttggacaacatctctgtgactctggtcgggacttgcggggagtcccccaaacagcgcctcgaccggatggggagagacttcgccccaggctccgtccagaaatataaggtgagatgcactgccgaactcggtgagctgcttctcctcagagtccataaggagcggtacgctttctttagaaaagattcatggtattgctcacgcatttgcgtgaccgagcctgatggctcagtgagccatttcccttgctaccagtggattgaggggtactgtaccgtagagttacgcccaggcacagcaaggacaatttgtcaggatagcctaccgctgttgctggaccatcgtacccgggagcttagggctaggcaggagtgttatcgatggaaaatttacgcccctggatttccttgcatggtcgacgtgaacagttttcaggagatggaatctgacaaaaagtttgccctaactaagactaccacctgcgtcgatcagggggatagctctggcaatcgctatcttccaggcttccccatgaagatcgacatcccttcactcatgtacatggaaccgaacgtccggtacagcgcgaccaagaccatatctctactctttaatgccattcccgcaagcttgggcatgaagctgaggggactattagacaggaaaggcagctggaaaaagcttgatgatatgcagaacatattttggtgccacaagacattcactacaaagtatgtcaccgagcactggtgcgaggaccacttctttggatatcagtacctcaacggcgtgaaccctgtcatgttgcactgcatctcgtccttaccctcaaagctgcctgtcaccaatgacatggtagccccactgctcggccaggatacatgtctgcagactgagctggagaggggcaatatctttttggcagactactggatattggccgaagctcctacgcattgtctgaacggaagacagcaatatgtagccgcacccctctgcttactttggctgtcaccccaaggagcattggtgcctttggctatccagctgtcccagacccctggccctgacagccctatcttcctgccgacagactcagaatgggattggctgcttgcaaaaacctgggttcgcaactctgagttcttagtgcatgaaaacaatacacactttctttgtactcaccttctctgtgaggcttttgctatggcaacactacggcagctccctttgtgccatccaatatacaaactcctgctgcctcatactcgctacaccctgcaggttaacactatcgccagggctacattactgaatcccgaggggttggtggatcaggtgacaagcattggcaggcagggattaatctacctcatgagtacagggctcgcccatttcacctacactaacttctgtctgcctgatagcctcagggccagaggtgtcctggccatccctaattaccactatagagatgacggactgaaaatctgggcagctatcgagagctttgtgtcggaaatcgtcggctattactacccgagcgatgcgagcgtccagcaggactcggaactgcaggcttggaccggagagatctttgctcaggcgttcctcggcagagaatcttctggcttcccctcccggctatgcacacccggtgaaatggttaagtttctgaccgccattatctttaattgtagtgcgcagcatgccgctgttaactcggggcagcacgactttggtgcttggatgccaaatgctccatcgtccatgcggcaaccaccccctcaaacaaagggtactaccacactgaaaacgtatttggatacgctaccagaagtgaacataagctgcaacaacctgcttctgttttggctggtgtctcaggagccaaaagaccagcgcccactaggaacatacccagacgagcatttcaccgaagaggcccctcggagatcgattgcggctttccagtctaggctcgctcagattagcagagacatccaggagcggaaccaaggccttgccctgccttacacttacctggatcctccactaatcgaaaacagcgtctctatctag

SEQ ID NO: 209175 - DNA, 2136 bp, Artificial Sequence
  derived and/or modified sequence
atggccgtgtacagactgtgcgtgaccaccggcccctacctgagagccggcaccctggacaacatcagcgtgaccctggtgggcacctgcggcgagagccccaagcagagactggacagaatgggcagagacttcgcccccggcagcgtgcagaagtacaaggtgagatgcaccgccgagctgggcgagctgctgctgctgagagtgcacaaggagagatacgccttcttcagaaaggacagctggtactgcagcagaatctgcgtgaccgagcccgacggcagcgtgagccacttcccctgctaccagtggatcgagggctactgcaccgtggagctgagacccggcaccgccagaaccatctgccaggacagcctgcccctgctgctggaccacagaaccagagagctgagagccagacaggagtgctacagatggaagatctacgcccccggcttcccctgcatggtggacgtgaacagcttccaggagatggagagcgacaagaagttcgccctgaccaagaccaccacctgcgtggaccagggcgacagcagcggcaacagatacctgcccggcttccccatgaagatcgacatccccagcctgatgtacatggagcccaacgtgagatacagcgccaccaagaccatcagcctgctgttcaacgccatccccgccagcctgggcatgaagctgagaggcctgctggacagaaagggcagctggaagaagctggacgacatgcagaacatcttctggtgccacaagaccttcaccaccaagtacgtgaccgagcactggtgcgaggaccacttcttcggctaccagtacctgaacggcgtgaaccccgtgatgctgcactgcatcagcagcctgcccagcaagctgcccgtgaccaacgacatggtggcccccctgctgggccaggacacctgcctgcagaccgagctggagagaggcaacatcttcctggccgactactggatcctggccgaggcccccacccactgcctgaacggcagacagcagtacgtggccgcccccctgtgcctgctgtggctgagcccccagggcgccctggtgcccctggccatccagctgagccagacccccggccccgacagccccatcttcctgcccaccgacagcgagtgggactggctgctggccaagacctgggtgagaaacagcgagttcctggtgcacgagaacaacacccacttcctgtgcacccacctgctgtgcgaggccttcgccatggccaccctgagacagctgcccctgtgccaccccatctacaagctgctgctgccccacaccagatacaccctgcaggtgaacaccatcgccagagccaccctgctgaaccccgagggcctggtggaccaggtgaccagcatcggcagacagggcctgatctacctgatgagcaccggcctggcccacttcacctacaccaacttctgcctgcccgacagcctgagagccagaggcgtgctggccatccccaactaccactacagagacgacggcctgaagatctgggccgccatcgagagcttcgtgagcgagatcgtgggctactactaccccagcgacgccagcgtgcagcaggacagcgagctgcaggcctggaccggcgagatcttcgcccaggccttcctgggcagagagagcagcggcttccccagcagactgtgcacccccggcgagatggtgaagttcctgaccgccatcatcttcaactgcagcgcccagcacgccgccgtgaacagcggccagcacgacttcggcgcctggatgcccaacgcccccagcagcatgagacagccccccccccagaccaagggcaccaccaccctgaagacctacctggacaccctgcccgaggtgaacatcagctgcaacaacctgctgctgttctggctggtgagccaggagcccaaggaccagagacccctgggcacctaccccgacgagcacttcaccgaggaggcccccagaagaagcatcgccgccttccagagcagactggcccagatcagcagagacatccaggagagaaaccagggcctggccctgccctacacctacctggacccccccctgatcgagaacagcgtgagcatctag

SEQ ID NO: 209176 - protein, 602 aa, Artificial Sequence
  derived and/or modified sequence
MRGGRARPAWESFMGLPPRSSAKWGAGQSLDRLCCAPGSRGLAGAPGRMRAPPAGRSQPAGGPGDSLPHPPGGLGPGGSAWARRAEAAASRARGGGRGGPGITWAEAGPGAPGGLSPESGRRQRERWRLPAFPPSRAWAPSRTGERQPGERAHLRLSARPALPGAGLLSAPLSARNPGLVRGPAPWSLASAGAPPRAALSPAGALLLQPPARRVLCPRSEGGSRTGRAGPSGWAPPRGARSAESTDRLKGMALTVDVAGPAPWGFRITGGRDFHTPIMVTKVAERGKAKDADLRPGDIIVAINGESAEGMLHAEAQSKIRQSPSPLRLQLDRSQATSPGQTNGDSSLEVLATRFQGSVRTYTESQSSLRSSYSSPTSLSPRAGSPFSPPPSSSSLTGEAAISRSFQSLACSPGLPAADRLSYSGRPGSRQAGLGRAGDSAVLVLPPSPGPRSSRPSMDSEGGSLLLDEDSEVFKMLQENREGRAAPRQSSSFRLLQEALEAEERGGTPAFLPSSLSPQSSLPASRALATPPKLHTCEKCSTSIANQAVRIQEGRYRHPGCYTCADCGLNLKMRGHFWVGDELYCEKHARQRYSAPATLSSRA

SEQ ID NO: 209177 - protein, 352 aa, Artificial Sequence
  derived and/or modified sequence
MALTVDVAGPAPWGFRITGGRDFHTPIMVTKVAERGKAKDADLRPGDIIVAINGESAEGMLHAEAQSKIRQSPSPLRLQLDRSQATSPGQTNGDSSLEVLATRFQGSVRTYTESQSSLRSSYSSPTSLSPRAGSPFSPPPSSSSLTGEAAISRSFQSLACSPGLPAADRLSYSGRPGSRQAGLGRAGDSAVLVLPPSPGPRSSRPSMDSEGGSLLLDEDSEVFKMLQENREGRAAPRQSSSFRLLQEALEAEERGGTPAFLPSSLSPQSSLPASRALATPPKLHTCEKCSTSIANQAVRIQEGRYRHPGCYTCADCGLNLKMRGHFWVGDELYCEKHARQRYSAPATLSSRA

SEQ ID NO: 209178 - DNA, 559 bp, Artificial Sequence
  derived and/or modified sequence
agacacaggcccgccgccgcgccggcgcctagcccgccgggtcagcgcggccaggcctcgccgccggccccgctcccagggtgcaccgcggctagcgctggggtgggagcgggcgagatgcgccgggcgggcggtgcccactgacctccctcggcggcccggcccgggcagcgcccgagcccaggcagccccgcccgccgcgccccgcccagcccatgggccacgggcccccaccgccgcccgccgggaggaccgagcctaagagggcagccgcctgaaggaacgcgacggcggcgcccgcagcacaggaagtttgcggagaggacgcttgaactgaataatccacgctggagctctcagatcactagatggaaagtcagaggtcaaacacccttacatggacgtgctgaagccatcaaaaaacaaaacagaaaaaaacctctaggaaatgatctaggaaaatgtatttttcagtgctgtacaagcgtcttgaattactctggtagcttttccagaaagacccatgacttcaccacatttctcgagttacgatgaaggt

SEQ ID NO: 209179 - DNA, 1809 bp, Artificial Sequence
  derived and/or modified sequence
atgagaggaggccgagcccgtccggcttgggaatcattcatggggcttccccctagatcctccgctaaatggggggcaggacagagcctggacaggctttgctgtgctccaggcagccgggggctggcaggcgcacctggccgcatgcgtgccccaccggctggaaggtctcagccggcaggggggcctggcgatagtctgcctcacccccccggcggattgggcccaggaggcagcgcgtgggccagaagagctgaagcagctgccagtcgtgcacgggggggaggccgcgggggccccgggatcacctgggctgaagcaggaccaggcgcaccaggcgggctgtcccccgaaagcgggcgtcggcaacgggaacgttggcggctgccagcattccccccctccagagcatgggcaccatcccggactggcgagaggcaacccggggagcgggcccatctgagattgtccgctaggcccgcactgccgggcgcgggactcctgtctgcacccttgagcgctcgaaaccccggcctagtgcgaggtcctgcaccatggagtctggcctcggctggggcccccccgagggccgccctgagccccgctggggcactgctgcttcagcctcccgctcggagggttctatgcccaagatctgagggtggatcccggaccggacgcgctgggccgtccggatgggcccctcctcggggtgctcgctccgccgaaagcactgacagactgaaggggatggccttaacggtcgacgtcgccggtcccgccccctggggctttcgcataacaggcgggcgggacttccatacacccataatggtgacaaaggtcgcagagcgcggcaaggctaaggatgcggacctgcggcctggcgatattattgtggcaattaatggcgagtctgcagaagggatgctgcatgctgaggctcagtcaaagattagacagtccccaagtcctctgagactacaactcgaccgcagtcaagctaccagtcccggacaaacgaatggcgactcatctttagaggtcctggctacccgcttccaagggagcgtgcgcacttataccgaatctcaatcatccttacgatctagctactctagccccaccagcctgtctccgagggccggctctcctttcagcccccctccttcctctagttctctgaccggcgaggccgccatttcgcggtcctttcagagtctcgcatgctccccggggttgcctgccgccgataggctgtcttactccggccgtccaggctcccgccaggcgggtctcggaagggccggggattccgccgtcctggtgctccctccttctccgggaccccgctcttccaggccatcaatggacagcgaggggggctctctgctgctcgacgaagattcagaggtgtttaaaatgcttcaagaaaacagagaaggacgggccgctccccggcagtcctcctcctttaggctgttgcaagaagccctcgaggcagaagaaagagggggcacccctgcatttcttccttcttctctgtccccccagtctagtttgcccgcgagtagggctttagctacaccaccaaagctccacacctgtgagaaatgctcaactagcattgctaaccaggccgtcagaatccaggagggcagatataggcaccctgggtgttacacctgcgcggattgcggactcaacctcaaaatgcgaggtcatttttgggtgggcgacgagttatattgcgaaaaacacgccagacagaggtattccgcccctgccaccctgtcttcaagggcatag

SEQ ID NO: 209180 - DNA, 1059 bp, Artificial Sequence
  derived and/or modified sequence
atggccttaacagtcgacgtggctggcccagccccgtggggctttcgtataaccggcggaagagactttcatacacccattatggttaccaaagtagcagaaagggggaaggctaaagacgccgaccttaggccaggagatattattgtggctattaatggcgagagcgccgagggtatgctgcacgccgaagcacagtctaagattagacagagccctagccctctgagactgcagctggaccgctcccaggctacatcaccaggacagacaaacggtgattcaagcttggaggtcctggcgactagattccaaggctctgtgcgcacatacacagagagccagtcttcgctccggagcagttattccagccccacgtctctgagcccacgtgccgggagcccattttcaccgccacctagttccagcagcctgaccggagaggctgccatctccaggtcttttcagagcctcgcgtgtagtcctggattgcctgcagctgatcgtctgtcatattcggggcgcccagggtcccggcaggctgggctgggacgcgcaggtgactccgcagtcttagtgctgccccctagccccggtcctcgatcttcaaggccctccatggattctgagggggggtctctgctcttggacgaggatagcgaggtgtttaaaatgctgcaggaaaatagagaaggcagggccgccccgagacagtcatcttcttttaggttgctgcaggaggccttggaagccgaggagcggggaggcaccccagcctttctacctagcagtctgtcacctcagtcatctctgcctgcctctcgggccctggctacaccgccaaaattgcatacatgcgagaagtgttctacctccatcgccaatcaggctgtcaggatccaggagggtagataccgccacccgggctgctacacttgtgccgactgcgggctgaatctgaaaatgcgcggccacttctgggtcggcgacgagctgtattgcgaaaagcatgcacgacagcgctattccgcaccagccaccctttcttcacgcgcgtag

SEQ ID NO: 209181 - DNA, 1059 bp, Artificial Sequence
  derived and/or modified sequence
atggctttaacagtcgatgttgcgggtcctgccccttggggtttcagaatcaccggtggaagagacttccacacccccataatggtcacaaaggtggccgagagaggtaaagcaaaggacgctgatctgaggccgggcgacattatcgtggccatcaatggggagagcgccgagggaatgctgcacgccgaggctcaatcgaagataagacagtcgccatccccacttaggctgcaactagacaggtcccaggcaacgtcccccggacagaccaacggagatagctcgctggaagttttggcaacacgcttccagggcagtgtgcgcacatacacagagtcccagagctctcttcgctcctcctatagcagtcccacatcactgagtcctcgggctgggtcgccttttagtccccccccctcatcctcatcactaactggggaggctgccataagtaggtcatttcagtctctagcatgttcccccgggctgcctgccgctgaccggttgtcttactctggtcgcccagggagtcggcaggccggactcggtagggctggggacagcgccgttctggttctgcctcctagtccaggccctagatcatcccgaccgtccatggatagtgaaggcggctccttattactggatgaggattcggaggtgtttaaaatgttgcaggagaatcgcgagggacgagccgccccacgccagagttccagctttaggctgctacaagaggctttagaggccgaagagcgaggcggaacccctgccttcctgccatccagtctgtcacctcagagctcccttccagcatcaagagccttggccacgcctccgaaactgcacacatgcgagaagtgctctacttccatcgcgaaccaagctgtccggatccaagagggtcggtatcgacatcccggctgttatacatgcgcagattgtggactgaatctgaagatgcgtggacacttttgggtgggggatgagctctactgcgagaagcacgcccggcagcggtacagcgcaccggctacattaagtagcagagcctag

SEQ ID NO: 209182 - DNA, 1059 bp, Artificial Sequence
  derived and/or modified sequence
atggcccttacggtggacgtggcaggcccagcaccctggggatttcggatcacggggggacgcgatttccacactcccatcatggtgactaaagtggctgaacgcggaaaagccaaagacgcagacctgcgtccgggagatatcatcgtcgcgataaacggcgaatcagcagagggtatgcttcatgccgaagcgcagtccaagatcagacagtctccatccccgctgcggctccaactggataggtctcaggcaactagccctggacagacaaacggagatagttctctggaggtgctggcgactagattccaagggagcgtgcgaacgtatactgagtctcaaagttctctcagatcttcttactcttctccaacatcactctcaccgcgcgcaggaagccccttctctcccccaccttcctcctcatcccttacaggtgaggctgccatcagccgaagttttcagagcctcgcctgctcacctggactgcctgctgccgatcgtttaagttactctggtcgtcctggcagtcgacaggccggcctgggccgggccggtgactctgctgtgctcgtacttcctcccagccctggccctcgttcttctagaccttccatggactccgaaggagggtccctgctgctggatgaagactcggaagtgtttaaaatgttacaggagaatagggagggacgcgcagcacccagacaaagctcttcattcagactgcttcaagaagctctcgaagcagaagaacgcgggggtactcctgccttcctcccaagtagcctgagtccccagagcagtttacctgccagtagagctctcgccacaccacctaaacttcacacatgtgagaaatgttctacctcgatcgccaatcaagcagttagaattcaggagggtcggtaccggcaccccgggtgttacacctgcgctgactgcggcctgaatctaaaaatgagagggcacttctgggtgggagacgaactgtattgcgagaagcacgcaagacaacgatacagcgcgccagcaactctttcatctcgagcctag

SEQ ID NO: 209183 - DNA, 1809 bp, Artificial Sequence
  derived and/or modified sequence
atgagaggaggccgggcccggcctgcctgggagagcttcatgggcctgcccccaagaagcagcgccaagtggggcgccggccagagcctggaccggctgtgctgtgcccctggcagccggggcctggccggggcccctggccgcatgagggcccccccagctggccgcagccagcctgctgggggccctggggacagcctgccccaccccccaggcggcctgggccctgggggcagcgcctgggccaggagagctgaggccgccgccagccgggcccggggcggcggccggggcggccctggcatcacctgggccgaggccggccctggggcccctgggggcctgagccctgagagcggccggcggcagcgggagcgctggaggctgcctgccttcccccccagccgggcctgggcccccagcaggactggagagcggcagcccggggagcgggcccacctgcggctgagcgcccggcctgccctgcctggagctggcctgctgagcgcccccctgagcgccagaaatcctggcctggtgcggggccctgccccctggagcctggccagcgctggggccccacccagggctgccctgagccctgctggggccctgctgctgcagcccccagcccggcgggtgctgtgccccaggtctgagggcggcagcaggacaggccgggccggccccagcggctgggccccacccaggggggcccggtctgctgagagcacagaccggctgaagggcatggccctgactgtggatgtggccggccctgccccctggggcttccgcatcaccggcggccgggacttccacacccccatcatggtgaccaaggtggccgagcggggcaaggccaaggatgctgacctgcggcctggggacatcatcgtggccatcaatggagagagcgctgagggcatgctgcatgctgaggcccagagcaagatccggcagagccccagccccctgcggctgcagctggacaggagccaggccaccagccctggccagaccaacggggacagcagcctggaggtgctggccacccgcttccagggctctgtgaggacctacacagagagccagagcagcctgcggagcagctacagcagccccaccagcctgagcccccgggccggcagccccttcagccccccacccagcagcagcagcctgaccggggaggccgccatcagccgctccttccagagcctggcctgcagccctggcctgcctgctgctgaccggctgagctacagcggccggcccggcagccggcaggccggcctgggccgggccggggacagcgctgtgctggtgctgccccccagccctggccccaggagcagccggcccagcatggattctgagggcggcagcctgctgctggatgaggacagcgaggtgttcaagatgctgcaggagaaccgggagggccgggccgccccccggcagagcagcagcttccggctgctgcaggaggccctggaggccgaggagcggggcggcaccccagccttcctgcccagcagcctgagcccccagagcagcctgcctgccagccgggccctggccaccccacccaagctgcacacctgtgagaagtgcagcaccagcatcgccaaccaggccgtgcgcatccaggagggccgctaccgccaccctggctgctacacctgtgccgactgtggcctgaacctgaagatgaggggccacttctgggtgggagatgagctgtactgtgagaagcacgcccggcagcgctacagcgccccagccaccctgagcagccgggcctag

SEQ ID NO: 209184 - DNA, 1059 bp, Artificial Sequence
  derived and/or modified sequence
atggccctgactgtggatgtggccggccctgccccctggggcttccgcatcaccggcggccgggacttccacacccccatcatggtgaccaaggtggccgagcggggcaaggccaaggatgctgacctgcggcctggggacatcatcgtggccatcaatggagagagcgctgagggcatgctgcatgctgaggcccagagcaagatccggcagagccccagccccctgcggctgcagctggacaggagccaggccaccagccctggccagaccaacggggacagcagcctggaggtgctggccacccgcttccagggctctgtgaggacctacacagagagccagagcagcctgcggagcagctacagcagccccaccagcctgagcccccgggccggcagccccttcagccccccacccagcagcagcagcctgaccggggaggccgccatcagccgctccttccagagcctggcctgcagccctggcctgcctgctgctgaccggctgagctacagcggccggcccggcagccggcaggccggcctgggccgggccggggacagcgctgtgctggtgctgccccccagccctggccccaggagcagccggcccagcatggattctgagggcggcagcctgctgctggatgaggacagcgaggtgttcaagatgctgcaggagaaccgggagggccgggccgccccccggcagagcagcagcttccggctgctgcaggaggccctggaggccgaggagcggggcggcaccccagccttcctgcccagcagcctgagcccccagagcagcctgcctgccagccgggccctggccaccccacccaagctgcacacctgtgagaagtgcagcaccagcatcgccaaccaggccgtgcgcatccaggagggccgctaccgccaccctggctgctacacctgtgccgactgtggcctgaacctgaagatgaggggccacttctgggtgggagatgagctgtactgtgagaagcacgcccggcagcgctacagcgccccagccaccctgagcagccgggcctag

SEQ ID NO: 209185 - DNA, 1809 bp, Artificial Sequence
  derived and/or modified sequence
atgcggggcggccgggcccggcccgcctgggagagcttcatgggcctgccacctaggagtagcgccaagtggggggctgggcaatcactggacaggctctgctgtgccccgggctcaagaggtttggctggcgcaccaggacgcatgcgtgcccctccagctggaaggtctcagccagctgggggacccggagattcacttccccacccacctgggggcctgggcccgggaggctccgcgtgggctcggcgagccgaggccgcagcttctagggctcgaggcggtggccgtggcgggcccggtatcacttgggccgaggctggtcctggcgccccagggggattgtctcctgagagtggtcgcaggcagagagagcgctggaggctccctgccttcccgccttcaagggcatgggctccctctcgtacaggtgagaggcagcccggggagcgcgcgcacctcagactgtccgcccggccggcactgcctggagccggactgctatcagccccattgagtgcaaggaaccccggattggttagagggccagcaccctggagcctcgcaagtgccggagcgccgccccgcgcagccctgagtcctgccggggccctgctacttcagcctcccgcgcggagagtcttatgcccaagatcagagggcgggagtcgaactgggcgggccgggccgagcggctgggcgccacctcgcggtgccaggagcgcggagtctactgacaggctcaaaggcatggccttaacagtcgatgtggctggacccgctccatggggctttaggattactggcggacgtgacttccacacccctattatggtgaccaaagtggccgagagaggtaaagccaaggatgcagatttgcgacctggggatatcattgttgccattaatggggaatccgcagaggggatgctccatgccgaggcccagagcaagatacgacaatctcccagcccattaagactacagcttgaccggagccaggccactagcccaggccagactaacggagattcctctttggaggtgctggccacccggtttcaaggaagcgttcggacttacacggagagccagtcatccctgcggtcctcatacagctcacctacgtctctgtcccccagggctggcagccctttctcacctcctccttcatcttcaagtctgacgggcgaagcagccattagccgaagttttcagtcgctagcttgttcaccagggctgcccgcagcggataggttgagttatagtgggcggccaggtagccgccaggctggcttgggaagagccggggactctgcagttcttgtcctccccccatctccaggcccacgaagcagcaggcccagtatggacagcgaagggggatctttactgctcgacgaagactccgaggtctttaaaatgttgcaggaaaaccgagaaggcagggctgccccccggcagagttccagctttcggttattacaggaggctctggaggcggaggaacggggaggaacccccgcatttctcccaagcagtctgtcaccacagtcctctcttccagcgtctcgtgcgttagctacccctcccaaactgcacacgtgtgagaaatgttctacctctatcgcaaaccaggccgttcggattcaagagggcaggtataggcacccggggtgctatacttgcgccgattgcgggttgaacctcaagatgcgggggcatttctgggtcggggacgagctctactgtgagaagcacgcccgacagcgatattcagcccccgcgactttgtccagcagggcatag

SEQ ID NO: 209186 - DNA, 1059 bp, Artificial Sequence
  derived and/or modified sequence
atggccctgaccgtggacgtggccggccccgccccctggggcttccgaatcacaggcgggcgagacttccatactccaataatggtgacgaaggtagccgaaaggggcaaggctaaggacgcagaccttcggcctggtgacatcatcgtagccattaatggggagtcagcagaaggaatgctgcacgccgaggctcagtctaagatcagacagtctccgagccctctgcgcctacagctggacagatcccaggccaccagtcccgggcagaccaacggtgactcttcccttgaggtactcgcaactcgcttccaggggagcgttagaacatacaccgagagccagtcaagtctgcggtcatcatattccagccccacttctctgagtcccagggctggctcaccattcagcccacccccttcttcgagctcactgaccggggaggctgcgattagcagatctttccaaagcttagcgtgtagcccagggctgcctgcggcagatagactaagctacagcggtcggcctggaagtagacaggccggcctggggcgggcaggcgactccgccgtgttagttcttcccccctcaccggggccgcgatctagtagaccctccatggactccgaaggggggtcacttttgttggacgaagattccgaggtgttcaagatgctacaggaaaaccgcgagggccgagccgcgccaaggcagtcttcttcattcaggctcctacaagaggcgctcgaggccgaagagaggggcggtaccccagcctttctgccctccagcctaagccctcagtctagcctgcccgcctccagagctctggcgacacctccaaagctgcacacctgcgagaagtgctctaccagtattgccaaccaagccgtgagaatccaggaagggaggtaccgccatcccgggtgctatacttgcgcggactgcggtttaaacctcaagatgcgggggcatttttgggtaggcgatgagctgtactgcgagaaacacgcaagacagaggtactctgctcctgcaaccctgtcttcacgtgcttag

SEQ ID NO: 209187 - DNA, 1059 bp, Artificial Sequence
  derived and/or modified sequence
atggccctgaccgtggacgtggccggccccgccccctggggcttccgcattacagggggaagagatttccacacgcccattatggtgactaaggttgccgagcggggtaaagctaaggatgctgatcttcgccccggagacatcatcgtggctataaatggcgagagcgccgaagggatgttgcatgcggaagcgcagagtaaaatacggcagtcacctagtcccctgcgactccagcttgatcgcagtcaggcaacttccccaggtcagacaaatggtgattcaagcttggaggtgcttgccacccgcttccagggatctgtgaggacatacactgaaagccagtcgagtctccgctcgagctatagctctcctacatccttaagccctagggccggtagccctttttcccctcctcctagttccagctcgctcacaggcgaggcagctatttcccgatctttccagtccctggcgtgcagcccaggcctgcctgccgcggacagactgtcctactcaggacggcctggctcccgacaggcgggcctgggcagagcaggagatagcgcagtgctggttctgccaccctcccctggtcctagaagcagtagaccctctatggatagcgaaggcgggtcccttctacttgacgaggactccgaagtgtttaaaatgttgcaagaaaacagagaaggccgcgccgccccgcgacagtctagtagcttccgcctgctgcaggaagccctggaggctgaggagcgaggcggcacgccagcgtttctccctagctccctgtctccgcagagctctctccctgcctcccgcgcccttgcgacccctccaaagcttcatacatgtgagaaatgtagtacctctattgcgaatcaggcagtccgtattcaggaggggagatatcggcatcctgggtgttacacgtgcgccgactgcggtctcaatctgaagatgcgcgggcacttctgggtaggggacgagctctactgtgagaaacacgcccggcagaggtattctgcacctgctaccctctctagccgagcttag

SEQ ID NO: 209188 - DNA, 1059 bp, Artificial Sequence
  derived and/or modified sequence
atggccctgaccgtggacgtggccggccccgccccctggggcttcaggataactggtggacgggacttccatacccccattatggtcactaaagtcgctgaacggggaaaagctaaggatgccgatttgcgtcccggagatattatcgtggcaataaatggagagtctgcggaaggtatgctgcacgccgaggcccagtccaagatccgacaatcgcctagtcctctgcgcctgcaattggaccggtcccaggcaacatcgccaggacaaacaaacggcgacagcagcctggaagtgttggcgactcgttttcagggcagcgtcaggacttatacagagagccagtccagtctgcgttcctcgtacagctctcctaccagtctgagccctcgcgcgggatccccctttagcccaccacctagttcctcgagcctgaccggggaggctgctatctcgcgctctttccagtcactggcatgcagccctggactgcctgcggcagacaggctgagctactctgggcgccctggctcaagacaggctgggctaggtcgtgccggggactcagctgtattggtgctcccgccttccccggggcccagaagctcccgcccgtccatggattccgaaggtggaagcctcctactcgacgaagacagtgaagtgttcaaaatgctgcaagaaaaccgggagggtcgtgcagctcctcgccagagctcatcattcagacttttgcaggaggcccttgaggccgaagaaagggggggaacacccgcctttctgcccagttcactctcgccccaaagttccctccctgcttcaagggcgctggcaacaccacccaaactgcacacctgtgaaaaatgcagcacatccatcgctaaccaggcggtgcgcatacaggaaggacgctaccgtcatcccggatgttatacttgcgcagattgcggtctaaatctcaaaatgagaggccacttctgggtcggcgacgaactctactgtgagaaacacgccagacagcgctacagcgcgcccgccactctgagtagccgtgcctag

SEQ ID NO: 209189 - DNA, 2236 bp, Artificial Sequence
  derived and/or modified sequence
agacacacccaggcagcccaccctgcccaggacctggggatgcggggcgggagagcgcggccggcgtgggagagctttatggggctgccccctcgatcgtctgcgaagtggggcgcggggcagtccctggaccggctctgctgtgctccgggcagtcgggggcttgcgggcgctccggggaggatgcgggcaccaccggctggacggtcgcagcctgcagggggccctggggacagcctgcctcatccccccggcgggctcgggccaggtggcagcgcctgggctcgccgcgcggaggcggcggcttctcgggctaggggcggcggcaggggcggccccgggatcacatgggcggaggcaggtccgggagccccgggcgggctctccccagagtcgggtagacggcagcgggagcggtggcgtctccccgccttccctccctcccgggcctgggcgcccagccggacaggtgagcggcagccaggtgagcgcgcccacctgcgcctctccgcgcggcccgccctccccggcgccgggctcctctccgcgcccctgtcggcgcggaaccctggcctcgtccgcggcccagctccctggagcctcgcatcagcgggggcgcccccgcgagctgcgctctccccggccggagcgctcctcctccagcccccagcccgcagggtactttgccctcggagcgaaggaggctccagaactggtagagccgggccatcgggctgggcacctccccgcggcgcccgcagcgcggagtccactgaccggctcaaaggtatggcgttgacggtggatgtggccgggccagcgccctggggcttccgtatcacagggggcagggatttccacacgcccatcatggtgactaaggtggccgagcggggcaaagccaaggacgctgacctccggcctggagacataatcgtggccatcaacggggaaagcgcggagggcatgctgcatgccgaggcccagagcaagatccgccagagcccctcgcccctgcggctgcagctggaccggtctcaggctacgtctccagggcagaccaatggggacagctccttggaagtgctggcgactcgcttccagggctccgtgaggacatacactgagagtcagtcctccttaaggtcctcctactccagcccaacctccctcagcccgagggccggcagccccttctcaccaccaccctctagcagctccctcactggagaggcagccatcagccgcagcttccagagtctggcatgttccccgggcctccccgctgctgaccgcctgtcctactcaggccgccctggaagccgacaggccggcctcggccgcgctggcgactcggcggtgctggtgctgccgccttccccgggccctcgttcctccaggcccagcatggactcggaagggggaagcctcctcctggacgaggactcggaagtcttcaagatgctgcaggaaaatcgcgagggacgggcggccccccgacagtccagctcctttcggctcttgcaggaagccctggaggctgaggagagaggtggcacgccagccttcttgcccagctcactgagcccccagtcctccctgcccgcctccagggccctggccacccctcccaagctccacacttgtgagaagtgcagtaccagcatcgcgaaccaggctgtgcgcatccaggagggccggtaccgccaccccggctgctacacctgtgccgactgtgggctgaacctgaagatgcgcgggcacttctgggtgggtgacgagctgtactgtgagaagcatgcccgccagcgctactccgcacctgccaccctcagctctcgggcctgagcccgccatgccctcagcctgcctcactgctgggccagggtcatgcctatataagttggcatggcagggacaatggtgggcagttgctcttacatgagctaagtttggagacctgaggcccctttgtcctcgctgggtgggccaaggtctgggacctgtcttggactgtgggagactcaccctcaccttgccaggcctctcccctgcaggactggcattgcactagtctgaggtggccactgcctttgatcaacctttgtgtgcgagggtctaagtagggtcgaacacagaagtgggaaggagaggggtgggccaggggctaatggtgtcactgtgtaaagtttttgacatactagctctataaatatatgaatatggacaaaataaa

SEQ ID NO: 209190 - DNA, 1719 bp, Artificial Sequence
  derived and/or modified sequence
agagtcgggtagacggcagcgggagcggtggcgtctccccgccttccctccctcccgggcctgggcgcccagccggacaggtgagcggcagccaggtgagcgcgcccacctgcgcctctccgcgcggcccgccctccccggcgccgggctcctctccgcgcccctgtcggcgcggaaccctggcctcgtccgcggcccagctccctggagcctcgcatcagcgggggcgcccccgcgagctgcgctctccccggccggagcgctcctcctccagcccccagcccgcagggtactttgccctcggagcgaaggaggctccagaactggtagagccgggccatcgggctgggcacctccccgcggcgcccgcagcgcggagtccactgaccggctcaaaggtatggcgttgacggtggatgtggccgggccagcgccctggggcttccgtatcacagggggcagggatttccacacgcccatcatggtgactaaggtggccgagcggggcaaagccaaggacgctgacctccggcctggagacataatcgtggccatcaacggggaaagcgcggagggcatgctgcatgccgaggcccagagcaagatccgccagagcccctcgcccctgcggctgcagctggaccggtctcaggctacgtctccagggcagaccaatggggacagctccttggaagtgctggcgactcgcttccagggctccgtgaggacatacactgagagtcagtcctccttaaggtcctcctactccagcccaacctccctcagcccgagggccggcagccccttctcaccaccaccctctagcagctccctcactggagaggcagccatcagccgcagcttccagagtctggcatgttccccgggcctccccgctgctgaccgcctgtcctactcaggccgccctggaagccgacaggccggcctcggccgcgctggcgactcggcggtgctggtgctgccgccttccccgggccctcgttcctccaggcccagcatggactcggaagggggaagcctcctcctggacgaggactcggaagtcttcaagatgctgcaggaaaatcgcgagggacgggcggccccccgacagtccagctcctttcggctcttgcaggaagccctggaggctgaggagagaggaaccaggctgtgcgcatccaggagggccggtaccgccaccccggctgctacacctgtgccgactgtgggctgaacctgaagatgcgcgggcacttctgggtgggtgacgagctgtactgtgagaagcatgcccgccagcgctactccgcacctgccaccctcagctctcgggcctgagcccgccatgccctcagcctgcctcactgctgggccagggtcatgcctatataagttggcatggcagggacaatggtgggcagttgctcttacatgagctaagtttggagacctgaggcccctttgtcctcgctgggtgggccaaggtctgggacctgtcttggactgtgggagactcaccctcaccttgccaggcctctcccctgcaggactggcattgcactagtctgaggtggccactgcctttgatcaacctttgtgtgcgagggtctaagtagggtcgaacacagaagtgggaaggagaggggtgggccaggggctaatggtgtcactgtgtaaagtttttgacatactagctctataaatatatgaatatgg

SEQ ID NO: 209191 - DNA, 1757 bp, Artificial Sequence
  derived and/or modified sequence
agagtcgggtagacggcagcgggagcggtggcgtctccccgccttccctccctcccgggcctgggcgcccagccggacaggtgagcggcagccaggtgagcgcgcccacctgcgcctctccgcgcggcccgccctccccggcgccgggctcctctccgcgcccctgtcggcgcggaaccctggcctcgtccgcggcccagctccctggagcctcgcatcagcgggggcgcccccgcgagctgcgctctccccggccggagcgctcctcctccagcccccagcccgcagggtactttgccctcggagcgaaggaggctccagaactggtagagccgggccatcgggctgggcacctccccgcggcgcccgcagcgcggagtccactgaccggctcaaaggtatggcgttgacggtggatgtggccgggccagcgccctggggcttccgtatcacagggggcagggatttccacacgcccatcatggtgactaaggtggccgagcggggcaaagccaaggacgctgacctccggcctggagacataatcgtggccatcaacggggaaagcgcggagggcatgctgcatgccgaggcccagagcaagatccgccagagcccctcgcccctgcggctgcagctggaccggtctcaggctacgtctccagggcagaccaatggggacagctccttggaagtgctggcgactcgcttccagggctccgtgaggacatacactgagagtcagtcctccttaaggtcctcctactccagcccaacctccctcagcccgagggccggcagccccttctcaccaccaccctctagcagctccctcactggagaggcagccatcagccgcagccggcctcggccgcgctggcgactcggcggtgctggtgctgccgccttccccgggccctcgttcctccaggcccagcatggactcggaagggggaagcctcctcctggacgaggactcggaagtcttcaagatgctgcaggaaaatcgcgagggacgggcggccccccgacagtccagctcctttcggctcttgcaggaagccctggaggctgaggagagaggtggcacgccagccttcttgcccagctcactgagcccccagtcctccctgcccgcctccagggccctggccacccctcccaagctccacacttgtgagaagtgcagtaccagcatcgcgaaccaggctgtgcgcatccaggagggccggtaccgccaccccggctgctacacctgtgccgactgtgggctgaacctgaagatgcgcgggcacttctgggtgggtgacgagctgtactgtgagaagcatgcccgccagcgctactccgcacctgccaccctcagctctcgggcctgagcccgccatgccctcagcctgcctcactgctgggccagggtcatgcctatataagttggcatggcagggacaatggtgggcagttgctcttacatgagctaagtttggagacctgaggcccctttgtcctcgctgggtgggccaaggtctgggacctgtcttggactgtgggagactcaccctcaccttgccaggcctctcccctgcaggactggcattgcactagtctgaggtggccactgcctttgatcaacctttgtgtgcgagggtctaagtagggtcgaacacagaagtgggaaggagaggggtgggccaggggctaatggtgtcactgtgtaaagtttttgacatactagctctataaatatatgaatatgg

SEQ ID NO: 209192 - DNA, 1837 bp, Artificial Sequence
  derived and/or modified sequence
agagtcgggtagacggcagcgggagcggtggcgtctccccgccttccctccctcccgggcctgggcgcccagccggacaggtgagcggcagccaggtgagcgcgcccacctgcgcctctccgcgcggcccgccctccccggcgccgggctcctctccgcgcccctgtcggcgcggaaccctggcctcgtccgcggcccagctccctggagcctcgcatcagcgggggcgcccccgcgagctgcgctctccccggccggagcgctcctcctccagcccccagcccgcagggtactttgccctcggagcgaaggaggctccagaactggtagagccgggccatcgggctgggcacctccccgcggcgcccgcagcgcggagtccactgaccggctcaaaggtatggcgttgacggtggatgtggccgggccagcgccctggggcttccgtatcacagggggcagggatttccacacgcccatcatggtgactaaggtggccgagcggggcaaagccaaggacgctgacctccggcctggagacataatcgtggccatcaacggggaaagcgcggagggcatgctgcatgccgaggcccagagcaagatccgccagagcccctcgcccctgcggctgcagctggaccggtctcaggctacgtctccagggcagaccaatggggacagctccttggaagtgctggcgactcgcttccagggctccgtgaggacatacactgagagtcagtcctccttaaggtcctcctactccagcccaacctccctcagcccgagggccggcagccccttctcaccaccaccctctagcagctccctcactggagaggcagccatcagccgcagcttccagagtctggcatgttccccgggcctccccgctgctgaccgcctgtcctactcaggccgccctggaagccgacaggccggcctcggccgcgctggcgactcggcggtgctggtgctgccgccttccccgggccctcgttcctccaggcccagcatggactcggaagggggaagcctcctcctggacgaggactcggaagtcttcaagatgctgcaggaaaatcgcgagggacgggcggccccccgacagtccagctcctttcggctcttgcaggaagccctggaggctgaggagagaggtggcacgccagccttcttgcccagctcactgagcccccagtcctccctgcccgcctccagggccctggccacccctcccaagctccacacttgtgagaagtgcagtaccagcatcgcgaaccaggctgtgcgcatccaggagggccggtaccgccaccccggctgctacacctgtgccgactgtgggctgaacctgaagatgcgcgggcacttctgggtgggtgacgagctgtactgtgagaagcatgcccgccagcgctactccgcacctgccaccctcagctctcgggcctgagcccgccatgccctcagcctgcctcactgctgggccagggtcatgcctatataagttggcatggcagggacaatggtgggcagttgctcttacatgagctaagtttggagacctgaggcccctttgtcctcgctgggtgggccaaggtctgggacctgtcttggactgtgggagactcaccctcaccttgccaggcctctcccctgcaggactggcattgcactagtctgaggtggccactgcctttgatcaacctttgtgtgcgagggtctaagtagggtcgaacacagaagtgggaaggagaggggtgggccaggggctaatggtgtcactgtgtaaagtttttgacatactagctctataaatatatgaatatgg

SEQ ID NO: 209193 - DNA, 1491 bp, Artificial Sequence
  derived and/or modified sequence
gggagcggtggcgtctccccgccttccctccctcccgggcctgggcgcccagccggacaggtgagcggcagccaggtatggcgttgacggtggatgtggccgggccagcgccctggggcttccgtatcacagggggcagggatttccacacgcccatcatggtgactaaggtggccgagcggggcaaagccaaggacgctgacctccggcctggagacataatcgtggccatcaacggggaaagcgcggagggcatgctgcatgccgaggcccagagcaagatccgccagagcccctcgcccctgcggctgcagctggaccggtctcaggctacgtctccagggcagaccaatggggacagctccttggaagtgctggcgactcgcttccagggctccgtgaggacatacactgagagtcagtcctccttaaggtcctcctactccagcccaacctccctcagcccgagggccggcagccccttctcaccaccaccctctagcagctccctcactggagaggcagccatcagccgcagcttccagagtctggcatgttccccgggcctccccgctgctgaccgcctgtcctactcaggccgccctggaagccgacaggccggcctcggccgcgctggcgactcggcggtgctggtgctgccgccttccccgggccctcgttcctccaggcccagcatggactcggaagggggaagcctcctcctggacgaggactcggaagtcttcaagatgctgcaggaaaatcgcgagggacgggcggccccccgacagtccagctcctttcggctcttgcaggaagccctggaggctgaggagagaggtggcacgccagccttcttgcccagctcactgagcccccagtcctccctgcccgcctccagggccctggccacccctcccaagctccacacttgtgagaagtgcagtaccagcatcgcgaaccaggctgtgcgcatccaggagggccggtaccgccaccccggctgctacacctgtgccgactgtgggctgaacctgaagatgcgcgggcacttctgggtgggtgacgagctgtactgtgagaagcatgcccgccagcgctactccgcacctgccaccctcagctctcgggcctgagcccgccatgccctcagcctgcctcactgctgggccagggtcatgcctatataagttggcatggcagggacaatggtgggcagttgctcttacatgagctaagtttggagacctgaggcccctttgtcctcgctgggtgggccaaggtctgggacctgtcttggactgtgggagactcaccctcaccttgccaggcctctcccctgcaggactggcattgcactagtctgaggtggccactgcctttgatcaacctttgtgtgcgagggtctaagtagggtcgaacacagaagtgggaaggagaggggtgggccaggggctaatggtgtcactgtgtaaagtttttgacatacta

SEQ ID NO: 209194 - DNA, 1463 bp, Artificial Sequence
  derived and/or modified sequence
aagcccctgagtagctgctccgggagctgtggtgccctctccttctccctttggctcctctcctgctgccttacagtgcccccagagccggctaggggcatggacttcacctcctggtcctctcttcctcaggtatggcgttgacggtggatgtggccgggccagcgccctggggcttccgtatcacagggggcagggatttccacacgcccatcatggtgactaaggtggccgagcggggcaaagccaaggacgctgacctccggcctggagacataatcgtggccatcaacggggaaagcgcggagggcatgctgcatgccgaggcccagagcaagatccgccagagcccctcgcccctgcggctgcagctggaccggtctcaggctacgtctccagggcagaccaatggggacagctccttggaagtgctggcgactcgcttccagggctccgtgaggacatacactgagagtcagtcctccttaaggtcctcctactccagcccaacctccctcagcccgagggccggcagccccttctcaccaccaccctctagcagctccctcactggagaggcagccatcagccgcagcttccagagtctggcatgttccccgggcctccccgctgctgaccgcctgtcctactcaggccgccctggaagccgacaggccggcctcggccgcgctggcgactcggcggtgctggtgctgccgccttccccgggccctcgttcctccaggcccagcatggactcggaagggggaagcctcctcctggacgaggactcggaagtcttcaagatgctgcaggaaaatcgcgagggacgggcggccccccgacagtccagctcctttcggctcttgcaggaagccctggaggctgaggagagaggaaccaggctgtgcgcatccaggagggccggtaccgccaccccggctgctacacctgtgccgactgtgggctgaacctgaagatgcgcgggcacttctgggtgggtgacgagctgtactgtgagaagcatgcccgccagcgctactccgcacctgccaccctcagctctcgggcctgagcccgccatgccctcagcctgcctcactgctgggccagggtcatgcctatataagttggcatggcagggacaatggtgggcagttgctcttacatgagctaagtttggagacctgaggcccctttgtcctcgctgggtgggccaaggtctgggacctgtcttggactgtgggagactcaccctcaccttgccaggcctctcccctgcaggactggcattgcactagtctgaggtggccactgcctttgatcaacctttgtgtgcgagggtctaagtagggtcgaacacagaagtgggaaggagaggggtgggccaggggctaatggtgtcactgtgtaaagtttttgacatactagctctataaatatatgaatatggacaaaataaa

SEQ ID NO: 209195 - DNA, 1487 bp, Artificial Sequence
  derived and/or modified sequence
tctcctgctgccttacagtgcccccagagccggctaggggcatggacttcacctcctggtcctctcttcctcaggtatggcgttgacggtggatgtggccgggccagcgccctggggcttccgtatcacagggggcagggatttccacacgcccatcatggtgactaaggtggccgagcggggcaaagccaaggacgctgacctccggcctggagacataatcgtggccatcaacggggaaagcgcggagggcatgctgcatgccgaggcccagagcaagatccgccagagcccctcgcccctgcggctgcagctggaccggtctcaggctacgtctccagggcagaccaatggggacagctccttggaagtgctggcgactcgcttccagggctccgtgaggacatacactgagagtcagtcctccttaaggtcctcctactccagcccaacctccctcagcccgagggccggcagccccttctcaccaccaccctctagcagctccctcactggagaggcagccatcagccgcagcttccagagtctggcatgttccccgggcctccccgctgctgaccgcctgtcctactcaggccgccctggaagccgacaggccggcctcggccgcgctggcgactcggcggtgctggtgctgccgccttccccgggccctcgttcctccaggcccagcatggactcggaagggggaagcctcctcctggacgaggactcggaagtcttcaagatgctgcaggaaaatcgcgagggacgggcggccccccgacagtccagctcctttcggctcttgcaggaagccctggaggctgaggagagaggtggcacgccagccttcttgcccagctcactgagcccccagtcctccctgcccgcctccagggccctggccacccctcccaagctccacacttgtgagaagtgcagtaccagcatcgcgaaccaggctgtgcgcatccaggagggccggtaccgccaccccggctgctacacctgtgccgactgtgggctgaacctgaagatgcgcgggcacttctgggtgggtgacgagctgtactgtgagaagcatgcccgccagcgctactccgcacctgccaccctcagctctcgggcctgagcccgccatgccctcagcctgcctcactgctgggccagggtcatgcctatataagttggcatggcagggacaatggtgggcagttgctcttacatgagctaagtttggagacctgaggcccctttgtcctcgctgggtgggccaaggtctgggacctgtcttggactgtgggagactcaccctcaccttgccaggcctctcccctgcaggactggcattgcactagtctgaggtggccactgcctttgatcaacctttgtgtgcgagggtctaagtagggtcgaacacagaagtgggaaggagaggggtgggccaggggctaatggtgtcactgtgtaaagtttttgacata

SEQ ID NO: 209196 - DNA, 1809 bp, Artificial Sequence
  derived and/or modified sequence
atgcgaggcggtcgggctcgccctgcttgggagagctttatgggcctgccccctcgctcatccgccaagtggggggctggccaatcgctagatcgcctatgttgtgcaccagggtcccgaggcttagcgggtgctccagggagaatgcgcgcaccacccgctggacgctcacagccggctgggggaccgggagattccttgcctcatccaccgggtgggctcgggccagggggaagtgcttgggccagacgggcagaagccgctgcgtccagggctagaggagggggtcggggtgggccaggtattacttgggcagaagcgggacctggcgcacccggaggtctgtcgccagagtccgggaggcgccaaagagaaaggtggcgcctgccagcttttcccccatctcgagcctgggctccaagcaggacgggagagcgccaaccgggtgagcgcgcacacctgagactgtctgcaagaccggctctgcccggagccggactgctcagcgccccattgtctgctcgtaatcccggactggtacggggacccgctccctggtccttggccagtgctggcgctccccctagagctgccctgtcccccgctggagcacttcttctccagcccccagcccgtcgtgtcttgtgccccaggagtgaaggagggtcgagaacaggccgagccggtccatcagggtgggctccgccacgaggagctcgctccgccgagtccactgatagactgaagggaatggccttaacagtggacgtggcagggccagctccttgggggttcaggattacaggcggacgcgactttcacaccccaatcatggtgaccaaggtggctgagcggggaaaagcaaaggatgctgacctgaggccaggagacatcatagtggcgataaatggtgagagcgccgaaggcatgctacatgcagaagcccagagtaagattcggcagtccccctcacctctgcggttgcagctggacagatcacaagccacttctcccggacagactaatggggattcgagcctagaagtacttgctaccaggttccaaggaagcgtccgaacttacaccgagtcccagagcagcttgcggagcagttacagctcccccacctccctgtctcctcgcgctggttcaccttttagtcctccacccagctccagttctttgaccggcgaggcggctattagtcggagctttcagtccctagcctgcagtccgggactgcccgcagccgaccggctctcttactctgggcgaccgggttccagacaagccggactcgggagagctggtgacagtgctgtgctcgtgctgccaccctctcccggacccaggtcctcccggccaagcatggactcagagggaggttctctcctgttggatgaggatagtgaagtctttaaaatgctgcaggagaaccgcgaaggcagggccgcacctcggcagagttcatctttcagattgctccaagaggcgctggaggccgaggagagggggggaaccccggcatttttgccttccagcctgtccccacagtcttccctgcctgctagcagagctctggccactccaccaaagctgcacacctgtgaaaaatgttctacttcaatcgccaatcaggcagttcggatccaggagggtaggtaccgacaccctggctgttatacatgtgctgactgcggcttgaacttgaaaatgagagggcatttctgggtgggggatgagctttactgcgaaaagcacgcaagacaacgctattctgcacccgctacactcagcagccgggcttag

SEQ ID NO: 209197 - DNA, 1059 bp, Artificial Sequence
  derived and/or modified sequence
atggctctcactgtagacgtagctgggcctgcaccatgggggtttcgaatcactgggggtcgcgattttcatactccaataatggtgaccaaagtggctgagagagggaaggccaaggatgcggacctgcggccaggagatatcatcgtggccatcaacggtgaatccgccgaaggcatgctccacgctgaggctcagtccaagattcgtcaatcacccagcccattaaggctccagctagatagatcgcaggctactagccccggacagactaatggagactcaagcttagaagtccttgcaacacgctttcaggggagcgtccgaacatacaccgaatcccagtcttcactgagatcctcttactccagccctacgagtctttcaccccgagccggttcccccttttcacctcctccatcttcctcttcccttactggtgaggcagctatcagtcgatcattccagtcgcttgcatgctcaccaggactccctgccgcagacagactgtcatactctggacggccaggatcaagacaggctgggctgggccgagcaggcgactccgccgtgttagtactcccccctagcccaggcccacgttcatctaggcccagcatggatagcgaagggggatctctgctgctagacgaagactcagaggtctttaaaatgctccaagaaaatcgagagggcagagcagccccacgacagagttcctcctttcgcctgctgcaggaagctctggaggcggaggaacgcggtggaacacccgcttttctcccctccagtctcagcccccagtccagccttccagcttctcgcgctctggccactccgccaaagctgcatacttgtgaaaagtgttctacgtcaattgcaaatcaggccgtaaggattcaggaggggaggtataggcatcccggatgctacacatgcgccgactgtggcctcaatctgaagatgaggggacacttctgggtgggagacgagctttactgtgagaagcacgctcgtcagcgatactccgcccctgcaaccctctcttcgagagcttag

SEQ ID NO: 209198 - DNA, 1059 bp, Artificial Sequence
  derived and/or modified sequence
atggccctgacagtcgatgtcgcgggaccagcaccgtggggcttccggattactggtggtagggactttcacacacccataatggtgactaaagtggccgagcggggaaaggctaaggacgctgatctgaggcccggagatatcatcgtggcaatcaacggggaaagcgctgagggaatgcttcatgccgaagcgcagtccaagatcagacaatcgccctcacccctcagactgcagctagatcgcagccaggcgaccagcccaggtcagacaaatggagacagttctctcgaagtgctggccactcggtttcaagggtcagtccgaacctacacagaaagccagtcctcattgcggagtagctactcttcccctacatccctttcacccagggcgggtagtccgttctctccccctcctagcagcagcagcttgactggtgaggctgccatctctaggagcttccagtcactggcttgttcacccggtctgcccgctgcagaccgcttgtcctattctggcaggccaggatcccgccaggccggtctgggtcgggctggcgacagcgctgtcttggtgttacctccatctcctggtccaaggagcagccggccatcaatggactcagaaggcggttcattacttctggacgaagatagcgaggtgttcaaaatgttgcaggagaacagagaaggcagggcagccccacggcagtcatcctccttcagattactccaggaagcgttggaggccgaggagcgcggtggtacgcccgcatttctcccaagctccctgagccctcaaagctccctccctgccagtagagcactggctacccctcccaagctgcacacctgcgaaaaatgtagtactagtatagccaaccaggccgtccggattcaggagggaagatatcgacatcccggatgctatacttgtgccgactgcgggctgaacctcaagatgaggggccacttttgggtaggcgatgagttgtactgtgagaaacatgccagacaacgatacagcgcacccgcaactctttccagccgcgcttag

SEQ ID NO: 209199 - DNA, 1059 bp, Artificial Sequence
  derived and/or modified sequence
atggctctgacggtcgacgtcgctggcccagctccttggggcttccgaattaccggcggtagggactttcacaccccaatcatggtgaccaaggtggccgagagagggaaggccaaggacgccgatctgcgcccaggggacatcattgtggctattaacggcgagtcagcagaaggcatgcttcatgcagaagctcagtccaagatccgccagtcaccatcaccacttcgcctgcagctggaccgatcccaggccactagtccagggcaaactaacggggatagctctctagaggttttggccacccgtttccagggtagtgtacgaacttacacagaaagtcagtcgtccctccgatcctcctatagctctccaacgtctctgagtcctcgcgctggatccccgttcagcccaccacccagcagttcttcacttacaggcgaagccgctatttcaaggtcctttcagagcttggcatgttcacccggactccccgctgcagatcggctctcctacagcggcagacctggaagccgacaggcaggccttgggagagctggagacagtgctgtgcttgtgctacccccatcccctggacctcgttccagcaggccatccatggattctgagggcggtagcctgcttctcgacgaggactccgaggtgttcaagatgctgcaagagaatagggaaggaagagccgcacccagacagtcctcctctttcagactgctccaggaggcgctggaggcagaggaaaggggaggcacaccagcttttctgccatcttcactgtctccccagtccagcctccccgcatcacgggctttggcgactccacctaagctccatacttgtgaaaaatgtagtacatcaatcgcaaaccaagcagttcggattcaagaggggaggtacaggcaccctggatgttatacctgcgcggactgtgggctgaatctgaaaatgagggggcacttctgggtgggtgatgagctgtactgcgagaaacacgcacgacagaggtactctgccccagctactctgagctcaagggcctag

SEQ ID NO: 209200 - DNA, 1809 bp, Artificial Sequence
  derived and/or modified sequence
atgagaggcggcagagccagacccgcctgggagagcttcatgggcctgccccccagaagcagcgccaagtggggcgccggccagagcctggacagactgtgctgcgcccccggcagcagaggcctggccggcgcccccggcagaatgagagccccccccgccggcagaagccagcccgccggcggccccggcgacagcctgccccacccccccggcggcctgggccccggcggcagcgcctgggccagaagagccgaggccgccgccagcagagccagaggcggcggcagaggcggccccggcatcacctgggccgaggccggccccggcgcccccggcggcctgagccccgagagcggcagaagacagagagagagatggagactgcccgccttcccccccagcagagcctgggcccccagcagaaccggcgagagacagcccggcgagagagcccacctgagactgagcgccagacccgccctgcccggcgccggcctgctgagcgcccccctgagcgccagaaaccccggcctggtgagaggccccgccccctggagcctggccagcgccggcgccccccccagagccgccctgagccccgccggcgccctgctgctgcagccccccgccagaagagtgctgtgccccagaagcgagggcggcagcagaaccggcagagccggccccagcggctgggccccccccagaggcgccagaagcgccgagagcaccgacagactgaagggcatggccctgaccgtggacgtggccggccccgccccctggggcttcagaatcaccggcggcagagacttccacacccccatcatggtgaccaaggtggccgagagaggcaaggccaaggacgccgacctgagacccggcgacatcatcgtggccatcaacggcgagagcgccgagggcatgctgcacgccgaggcccagagcaagatcagacagagccccagccccctgagactgcagctggacagaagccaggccaccagccccggccagaccaacggcgacagcagcctggaggtgctggccaccagattccagggcagcgtgagaacctacaccgagagccagagcagcctgagaagcagctacagcagccccaccagcctgagccccagagccggcagccccttcagccccccccccagcagcagcagcctgaccggcgaggccgccatcagcagaagcttccagagcctggcctgcagccccggcctgcccgccgccgacagactgagctacagcggcagacccggcagcagacaggccggcctgggcagagccggcgacagcgccgtgctggtgctgccccccagccccggccccagaagcagcagacccagcatggacagcgagggcggcagcctgctgctggacgaggacagcgaggtgttcaagatgctgcaggagaacagagagggcagagccgcccccagacagagcagcagcttcagactgctgcaggaggccctggaggccgaggagagaggcggcacccccgccttcctgcccagcagcctgagcccccagagcagcctgcccgccagcagagccctggccaccccccccaagctgcacacctgcgagaagtgcagcaccagcatcgccaaccaggccgtgagaatccaggagggcagatacagacaccccggctgctacacctgcgccgactgcggcctgaacctgaagatgagaggccacttctgggtgggcgacgagctgtactgcgagaagcacgccagacagagatacagcgcccccgccaccctgagcagcagagcctag

SEQ ID NO: 209201 - DNA, 1059 bp, Artificial Sequence
  derived and/or modified sequence
atggccctgaccgtggacgtggccggccccgccccctggggcttcagaatcaccggcggcagagacttccacacccccatcatggtgaccaaggtggccgagagaggcaaggccaaggacgccgacctgagacccggcgacatcatcgtggccatcaacggcgagagcgccgagggcatgctgcacgccgaggcccagagcaagatcagacagagccccagccccctgagactgcagctggacagaagccaggccaccagccccggccagaccaacggcgacagcagcctggaggtgctggccaccagattccagggcagcgtgagaacctacaccgagagccagagcagcctgagaagcagctacagcagccccaccagcctgagccccagagccggcagccccttcagccccccccccagcagcagcagcctgaccggcgaggccgccatcagcagaagcttccagagcctggcctgcagccccggcctgcccgccgccgacagactgagctacagcggcagacccggcagcagacaggccggcctgggcagagccggcgacagcgccgtgctggtgctgccccccagccccggccccagaagcagcagacccagcatggacagcgagggcggcagcctgctgctggacgaggacagcgaggtgttcaagatgctgcaggagaacagagagggcagagccgcccccagacagagcagcagcttcagactgctgcaggaggccctggaggccgaggagagaggcggcacccccgccttcctgcccagcagcctgagcccccagagcagcctgcccgccagcagagccctggccaccccccccaagctgcacacctgcgagaagtgcagcaccagcatcgccaaccaggccgtgagaatccaggagggcagatacagacaccccggctgctacacctgcgccgactgcggcctgaacctgaagatgagaggccacttctgggtgggcgacgagctgtactgcgagaagcacgccagacagagatacagcgcccccgccaccctgagcagcagagcctag

SEQ ID NO: 209202 - protein, 532 aa, Artificial Sequence
  derived and/or modified sequence
MIQAQESITLEDVAVDFTWEEWQLLGAAQKDLYRDVMLENYSNLVAVGYQASKPDALFKLEQGEQLWTIEDGIHSGACSDIWKVDHVLERLQSESLVNRRKPCHEHDAFENIVHCSKSQFLLGQNHDIFDLRGKSLKSNLTLVNQSKGYEIKNSVEFTGNGDSFLHANHERLHTAIKFPASQKLISTKSQFISPKHQKTRKLEKHHVCSECGKAFIKKSWLTDHQVMHTGEKPHRCSLCEKAFSRKFMLTEHQRTHTGEKPYECPECGKAFLKKSRLNIHQKTHTGEKPYICSECGKGFIQKGNLIVHQRIHTGEKPYICNECGKGFIQKTCLIAHQRFHTGKTPFVCSECGKSCSQKSGLIKHQRIHTGEKPFECSECGKAFSTKQKLIVHQRTHTGERPYGCNECGKAFAYMSCLVKHKRIHTREKQEAAKVENPPAERHSSLHTSDVMQEKNSANGATTQVPSVAPQTSLNISGLLANRNVVLVGQPVVRCAASGDNRGFAQDRNLVNAVNVVVPSVINYVLFYVTENP

SEQ ID NO: 209203 - DNA, 2358 bp, Artificial Sequence
  derived and/or modified sequence
agcagtttacggaagtgtaacgttgaggcccttcttgtgtatctggagaaaatagaggttctgactcctcaggagcaaaaaacataacctgaagagggaggaagtggatttggggttcaccatttcttggggcacacttgattgaaaactgagacttctgaagagaaggccagaagatacaaagacagaccatcccagttgaatgctgtcttccaagaacagaagaaaatgatccaggcccaggaatccataacactggaggatgtggctgtggacttcacttgggaggagtggcaactcctgggcgctgctcagaaggacctgtaccgggatgtgatgttggagaactacagcaacctggtggcagtggggtatcaagccagcaaaccggatgcactcttcaagttggaacaaggagaacaactgtggacaattgaagatggaatccacagtggagcctgttcagacatatggaaagttgatcatgtgctggagcgcttgcagagtgaaagcctggtgaacagaaggaaaccatgtcatgaacatgatgcatttgaaaatattgttcattgcagcaaaagtcagtttctgttagggcaaaatcatgatatatttgacttacgtggaaaaagtttgaaatccaatttaactttagttaaccagagcaaaggctatgaaataaagaactctgttgagtttactggaaatggggactcctttcttcatgctaaccatgaacgacttcatactgcaattaaattccctgcaagtcaaaaactcatcagcactaagtcccaattcatcagtcccaagcatcagaaaacacgaaaattagagaagcatcatgtgtgcagtgaatgtgggaaagccttcatcaagaagtcttggctaactgatcaccaggtaatgcatacaggagagaaaccccacagatgtagtctatgtgagaaagccttctccagaaagttcatgcttactgaacatcagcgaactcatacaggagaaaaaccttatgaatgccctgaatgtggcaaagcctttctcaagaaatcacggctcaacatacatcagaaaacacataccggagagaaaccctatatatgcagtgaatgtggaaaaggcttcatccagaaaggaaatctcattgtacaccagcgaattcatacaggtgagaaaccttatatatgcaatgaatgtggaaaaggcttcattcagaagacgtgtctcatagcacatcagagatttcacacaggaaagacgccctttgtgtgcagtgaatgtggaaaatcctgttctcagaaatcaggtctcattaaacatcaaagaattcacacaggagagaaaccctttgaatgtagtgaatgtgggaaagcctttagcacaaagcaaaagctcattgtccatcaaaggactcatacaggagagagaccctatggctgtaacgagtgtgggaaagcgtttgcgtatatgtcgtgtctggttaagcataagagaatacacacaagggagaaacaagaggcagccaaggtggaaaatcctcctgcagagaggcacagctcattacacaccagtgatgtcatgcaggagaaaaactctgctaacggggcgactacacaagtgccttctgtggcccctcagacatcattaaacatcagcggcctcctcgcaaacaggaacgtagtccttgtgggacagccagtggtcagatgtgcagcctcaggagataacagaggatttgcacaggacagaaaccttgtgaatgcagtgaatgtggttgtgccttccgtgatcaattatgtcttattttatgttacagaaaacccataggaagaaaactcagatctatgtggaaaagggttgagcaaaaatttgtagttcattatgtggccgaaaagcatacactgagagaacatgtataaggctgagatagcctgataaactcatcctattaaaatgtatgctgtgatacacaggcaaatttgatgttaacctaagcacatacacagcaattgctcgactgtgtcaattaaatgagtaaaggaagcccaagtacttttaagtggaggaaatgaagtactgtgaatttttaaaacagatgagataattggtgtcgggagtgttgcagtgactgaaaagcttcataaggggcagttggtgggaaagggctaatactgtaatggtggaatgtgggacacatatgtgtcaattcagtttccttagaccagtgccagtgtggaggattaattgaaaaccaggaccataaactttcagaactttgtattatgcagagggatctgtgaaactagtcaatttgtttcattaaacaaatattttaaaattaaaaaaaaaaaaaaaaaa

SEQ ID NO: 209204 - DNA, 1599 bp, Artificial Sequence
  derived and/or modified sequence
atgatccaggcccaggagagcatcaccctggaggacgtggccgtggacttcacctgggaggagtggcagctgctgggcgccgcccagaaggacctgtacagagacgtgatgctggagaactacagcaacctggtggccgtgggctaccaggccagcaagcccgacgccctgttcaagctggagcagggcgagcagctgtggaccatcgaggacggcatccacagcggcgcctgcagcgacatctggaaggtggaccacgtgctggagagactgcagagcgagagcctggtgaacagaagaaagccctgccacgagcacgacgccttcgagaacatcgtgcactgcagcaagagccagttcctgctgggccagaaccacgacatcttcgacctgagaggcaagagcctgaagagcaacctgaccctggtgaaccagagcaagggctacgagatcaagaacagcgtggagttcaccggcaacggcgacagcttcctgcacgccaaccacgagagactgcacaccgccatcaagttccccgccagccagaagctgatcagcaccaagagccagttcatcagccccaagcaccagaagaccagaaagctggagaagcaccacgtgtgcagcgagtgcggcaaggccttcatcaagaagagctggctgaccgaccaccaggtgatgcacaccggcgagaagccccacagatgcagcctgtgcgagaaggccttcagcagaaagttcatgctgaccgagcaccagagaacccacaccggcgagaagccctacgagtgccccgagtgcggcaaggccttcctgaagaagagcagactgaacatccaccagaagacccacaccggcgagaagccctacatctgcagcgagtgcggcaagggcttcatccagaagggcaacctgatcgtgcaccagagaatccacaccggcgagaagccctacatctgcaacgagtgcggcaagggcttcatccagaagacctgcctgatcgcccaccagagattccacaccggcaagacccccttcgtgtgcagcgagtgcggcaagagctgcagccagaagagcggcctgatcaagcaccagagaatccacaccggcgagaagcccttcgagtgcagcgagtgcggcaaggccttcagcaccaagcagaagctgatcgtgcaccagagaacccacaccggcgagagaccctacggctgcaacgagtgcggcaaggccttcgcctacatgagctgcctggtgaagcacaagagaatccacaccagagagaagcaggaggccgccaaggtggagaacccccccgccgagagacacagcagcctgcacaccagcgacgtgatgcaggagaagaacagcgccaacggcgccaccacccaggtgcccagcgtggccccccagaccagcctgaacatcagcggcctgctggccaacagaaacgtggtgctggtgggccagcccgtggtgagatgcgccgccagcggcgacaacagaggcttcgcccaggacagaaacctggtgaacgccgtgaacgtggtggtgcccagcgtgatcaactacgtgctgttctacgtgaccgagaacccctag

SEQ ID NO: 209205 - DNA, 1599 bp, Artificial Sequence
  derived and/or modified sequence
atgattcaggcccaagagtcaattacgttggaagatgtggcagtggattttacatgggaggagtggcaactgttgggcgcagcacagaaagacctctatagggacgtaatgctcgaaaactatagtaacctggtagccgtcgggtaccaagctagcaaacccgatgcgctcttcaagctggaacagggcgagcaactttggaccatagaggacggaattcacagcggcgcctgctccgacatctggaaggtggatcatgttcttgagcgccttcagtcagaatctctggtgaatagaagaaagccttgccatgagcatgatgctttcgagaatattgtgcactgtagtaagtctcagtttctgttaggccagaaccatgacatcttcgatcttcgtggtaagagtttaaagtctaacctgacccttgttaatcagtcaaaaggttacgagattaagaattccgtggagttcacaggaaatggtgactcatttctccacgccaatcacgaaagattgcatacagccattaaattccccgccagccagaaactcatatctacaaaaagccaattcatcagccctaagcatcaaaaaacccggaaactggaaaaacaccacgtatgtagcgagtgtggcaaagcatttattaagaagagttggctgacggatcatcaggtgatgcacacaggcgaaaaaccacaccggtgctcactgtgcgagaaagcctttagccggaaattcatgttgaccgaacaccaacgaactcatacgggagaaaagccgtatgagtgcccagagtgcgggaaagctttcttgaagaaaagccgcctaaatatacatcaaaagacccacacgggcgagaagccctacatctgcagtgagtgcgggaagggatttattcagaaaggtaacctgattgtgcatcagcggattcacaccggcgagaaaccctatatatgtaatgaatgtggaaagggcttcatacagaaaacttgcctgatcgcgcaccagaggttccacacagggaagaccccatttgtttgtagcgaatgtggaaagtcatgctcacagaaatcagggctaataaaacaccagcgcatccacaccggtgagaagccattcgagtgtagcgaatgtggtaaggccttttcaactaagcaaaaactgatcgtccaccagcggacacacactggagaacgcccttatggttgtaatgaatgtgggaaagcattcgcatacatgtcgtgcttggtaaagcataagaggatccacacacgagagaagcaggaggccgctaaggtggagaacccccctgccgagcggcacagttctctgcatacctcagatgtgatgcaggagaaaaacagtgctaatggcgctacgacccaggtgcctagcgttgccccccaaacgtccctgaacatttcaggcctgctcgctaatcggaacgtggtgctggtgggtcaacccgtggtcaggtgtgccgcctctggcgacaacaggggtttcgcacaggaccgcaacttggttaacgcggtgaacgtggttgtaccatccgtgatcaactatgttcttttttacgtgaccgagaatccgtag

SEQ ID NO: 209206 - DNA, 1599 bp, Artificial Sequence
  derived and/or modified sequence
atgatccaggcccaggagagcatcaccctggaggatgtggccgtggacttcacctgggaggagtggcagctgctgggcgccgcccagaaggacctgtacagagatgtgatgctggagaactacagcaacctggtggccgtgggctaccaggccagcaagccagatgccctcttcaagctggagcagggcgagcagctgtggaccattgaagatggcatccacagcggggcctgcagcgacatctggaaggtggaccacgtgctggagcggctgcagagcgagagcctggtgaacagaaggaagccctgccacgagcatgatgcctttgagaacatcgtgcactgcagcaagagccagttcctgctgggccagaaccacgacatctttgacctgcggggcaagagcctgaagagcaacctgaccctggtgaaccagagcaagggctatgagatcaagaacagcgtggagttcaccggaaatggagacagcttcctgcacgccaaccacgagcggctgcacacagccatcaagtttcctgccagccagaagctgatcagcaccaagagccagttcatcagccccaagcaccagaagaccaggaagctggagaagcaccacgtgtgcagtgaatgtgggaaggccttcatcaagaagtcctggctgacagaccaccaggtgatgcacactggagagaagccccaccgctgcagcctgtgtgagaaggccttcagcaggaagttcatgctgacagagcaccagaggacccacactggagagaagccctatgaatgtccagaatgtgggaaggccttcctgaagaagagccggctgaacatccaccagaagacccacactggagagaagccctacatctgcagtgaatgtgggaagggcttcatccagaagggcaacctgattgtgcaccagaggatccacactggagagaagccctacatctgcaatgaatgtgggaagggcttcatccagaagacctgcctgattgcccaccagcgcttccacacaggcaagaccccatttgtgtgcagtgaatgtgggaagagctgcagccagaagagcggcctcatcaagcaccagaggatccacactggagagaagccctttgaatgttctgaatgtgggaaggccttcagcaccaagcagaagctgattgtgcaccagaggacccacactggagagcggccctacggctgcaatgaatgtgggaaggcctttgcctacatgagctgcctggtgaagcacaagaggatccacacccgggagaagcaggaggccgccaaggtggagaaccccccagctgagcggcacagcagcctgcacaccagtgatgtgatgcaggagaagaacagcgccaacggggccaccacccaggtgcccagcgtggccccccagaccagcctgaacatcagcggcctgctggccaacagaaatgtggtgctggtgggccagcctgtggtgcgctgtgccgccagcggggacaacagaggatttgcccaggacaggaacctggtgaatgctgtgaatgtggtggtgcccagcgtcatcaactacgtgctcttctacgtgacagagaacccctag

SEQ ID NO: 209207 - DNA, 1599 bp, Artificial Sequence
  derived and/or modified sequence
atgatccaggcccaggagagcatcaccctggaggacgtggccgtggatttcacttgggaagaatggcagctgcttggcgccgcccaaaaggacttgtacagggatgtgatgctggaaaattattccaacctcgtggcagtgggctaccaggctagtaagccagacgccctgtttaaactggagcaaggagagcagctgtggacaatcgaggacggcatccactctggggcgtgctctgacatatggaaggtggaccatgtgctggagagactgcagtcagaatctctggttaataggagaaaaccctgccacgagcatgatgcctttgagaatatagttcactgcagcaagtctcagttccttctcgggcagaaccacgatatctttgacctacgtggtaaatccctgaagtctaaccttaccttggtgaaccagtccaagggatacgagattaaaaactctgtcgagttcactggaaacggcgattcctttctgcatgccaaccacgagcgcctgcatactgcaattaaattcccggcatcccagaaactgatatcgaccaaaagtcagtttatctcaccaaagcaccagaagaccagaaagctggaaaagcaccacgtctgttctgagtgtggcaaggctttcattaaaaagtcctggctgactgaccatcaagtcatgcacaccggcgagaaaccccatagatgttccctctgtgaaaaagccttcagcagaaaatttatgctcacggagcatcaaaggactcacaccggcgagaagccatacgagtgccccgagtgtggcaaagccttcctgaagaagtcacgcctgaacatccaccagaaaactcacaccggcgagaaaccctacatctgttccgaatgcggaaaagggtttattcagaaggggaatctgatcgtccaccagcgcattcacacaggagaaaaaccctacatttgtaacgagtgtggaaaagggtttatccagaagacctgccttattgcccaccagcggttccatactggaaaaacgccattcgtctgtagcgagtgcgggaagtcatgcagtcagaagtccggcttaataaagcatcaacgaatccacacaggcgaaaaaccattcgagtgcagtgagtgcgggaaagcattttcaactaaacaaaagttgattgtgcaccaacgcacccataccggagagcggccttacggatgcaatgaatgcggcaaggcatttgcttatatgtcttgtctggtcaagcacaaaagaattcatacccgggagaagcaggaggccgcgaaagtggagaaccccccagctgagcgccattcttccctgcatacaagcgacgtcatgcaagaaaagaatagtgccaacggcgcaaccacacaggtgcccagcgtggcaccacaaacgtccctgaacatttctggactattggccaataggaacgtggtgctggtgggtcagccagtagtgaggtgcgctgccagcggtgataacaggggcttcgcccaggatagaaatctggtaaatgcggtgaacgtcgtcgtgccaagtgtcataaattacgtcttgttctacgtgacggaaaacccttag

SEQ ID NO: 209208 - DNA, 1599 bp, Artificial Sequence
  derived and/or modified sequence
atgatccaggctcaggaaagcatcacgctcgaggacgtcgctgttgatttcacttgggaagaatggcagctgctgggtgcggctcagaaggacttatacagggatgtgatgctagagaattactccaatctggtagctgttggataccaggcctctaagcccgacgcactgttcaagctcgagcagggcgaacagttgtggacaatcgaagacgggattcactctggggcatgttcagatatctggaaagtggatcacgtgctggagcgattgcagagtgagagcctcgtgaacagacgaaaaccctgccacgaacatgatgctttcgaaaatatcgtgcattgtagcaaatcacagttcctgcttgggcagaaccatgacatctttgacctaaggggaaagtccctcaagtccaatttgacactcgtcaaccagtccaagggatacgagattaaaaactccgtggagtttactgggaacggggattccttcctgcatgcaaaccatgaacggctgcacaccgccatcaagtttccggcatcccaaaagctgatcagtacaaagagtcagtttatttcaccaaaacatcagaagactagaaagcttgagaagcaccacgtatgttctgagtgtggaaaagcattcatcaagaagtcgtggctgactgaccatcaggtgatgcatacaggggagaagccccacaggtgctccttgtgcgagaaggcttttagcagaaaatttatgctcaccgaacaccaacggacacatacaggtgagaaaccctatgagtgcccagaatgtggcaaggccttccttaagaaatcacggctcaatatccatcagaagactcacacaggggagaagccttacatatgctccgagtgcggcaagggctttattcagaaagggaacctgatcgtacaccagcgcatacacacaggggaaaagccctatatctgtaatgagtgtggtaaaggattcatccagaaaacttgcctgatcgctcaccagcgatttcacacggggaagacgccatttgtgtgttctgagtgtgggaagtcctgttctcagaaaagcggattaataaagcaccagcgcattcacactggagaaaagccattcgagtgctccgagtgtggcaaggcattttcaacgaaacagaaactgattgtgcatcagagaacccacacaggtgagagaccatatggttgtaacgagtgcgggaaggcctttgcatatatgtcctgtctcgtgaagcacaagagaatccacacgagagaaaaacaagaagcggctaaggtcgagaatccacctgccgaaaggcatagctctctccacacctccgacgtgatgcaggaaaaaaacagcgctaatggagcaacaacacaggtgccttccgtcgctccacagacctctctcaacatcagtggactgttagccaataggaatgtcgttttagtaggacaacccgttgtgcgttgtgcagcctctggcgataatcgcggttttgcacaagaccggaacttagtcaatgctgtcaatgtggtagtgccgagtgtcatcaactacgtcctgttttatgtgacagaaaacccctag

SEQ ID NO: 209209 - DNA, 2340 bp, Artificial Sequence
  derived and/or modified sequence
agcagtttacggaagtgtaacgttgaggcccttcttgtgtatctggagaaaatagaggttctgactcctcaggagcaaaaaacataacctgaagagggaggaagtggatttggggttcaccatttcttggggcacacttgattgaaaactgagacttctgaagagaaggccagaagatacaaagacagaccatcccagttgaatgctgtcttccaagaacagaagaaaatgatccaggcccaggaatccataacactggaggatgtggctgtggacttcacttgggaggagtggcaactcctgggcgctgctcagaaggacctgtaccgggatgtgatgttggagaactacagcaacctggtggcagtggggtatcaagccagcaaaccggatgcactcttcaagttggaacaaggagaacaactgtggacaattgaagatggaatccacagtggagcctgttcagacatatggaaagttgatcatgtgctggagcgcttgcagagtgaaagcctggtgaacagaaggaaaccatgtcatgaacatgatgcatttgaaaatattgttcattgcagcaaaagtcagtttctgttagggcaaaatcatgatatatttgacttacgtggaaaaagtttgaaatccaatttaactttagttaaccagagcaaaggctatgaaataaagaactctgttgagtttactggaaatggggactcctttcttcatgctaaccatgaacgacttcatactgcaattaaattccctgcaagtcaaaaactcatcagcactaagtcccaattcatcagtcccaagcatcagaaaacacgaaaattagagaagcatcatgtgtgcagtgaatgtgggaaagccttcatcaagaagtcttggctaactgatcaccaggtaatgcatacaggagagaaaccccacagatgtagtctatgtgagaaagccttctccagaaagttcatgcttactgaacatcagcgaactcatacaggagaaaaaccttatgaatgccctgaatgtggcaaagcctttctcaagaaatcacggctcaacatacatcagaaaacacataccggagagaaaccctatatatgcagtgaatgtggaaaaggcttcatccagaaaggaaatctcattgtacaccagcgaattcatacaggtgagaaaccttatatatgcaatgaatgtggaaaaggcttcattcagaagacgtgtctcatagcacatcagagatttcacacaggaaagacgccctttgtgtgcagtgaatgtggaaaatcctgttctcagaaatcaggtctcattaaacatcaaagaattcacacaggagagaaaccctttgaatgtagtgaatgtgggaaagcctttagcacaaagcaaaagctcattgtccatcaaaggactcatacaggagagagaccctatggctgtaacgagtgtgggaaagcgtttgcgtatatgtcgtgtctggttaagcataagagaatacacacaagggagaaacaagaggcagccaaggtggaaaatcctcctgcagagaggcacagctcattacacaccagtgatgtcatgcaggagaaaaactctgctaacggggcgactacacaagtgccttctgtggcccctcagacatcattaaacatcagcggcctcctcgcaaacaggaacgtagtccttgtgggacagccagtggtcagatgtgcagcctcaggagataacagaggatttgcacaggacagaaaccttgtgaatgcagtgaatgtggttgtgccttccgtgatcaattatgtcttattttatgttacagaaaacccataggaagaaaactcagatctatgtggaaaagggttgagcaaaaatttgtagttcattatgtggccgaaaagcatacactgagagaacatgtataaggctgagatagcctgataaactcatcctattaaaatgtatgctgtgatacacaggcaaatttgatgttaacctaagcacatacacagcaattgctcgactgtgtcaattaaatgagtaaaggaagcccaagtacttttaagtggaggaaatgaagtactgtgaatttttaaaacagatgagataattggtgtcgggagtgttgcagtgactgaaaagcttcataaggggcagttggtgggaaagggctaatactgtaatggtggaatgtgggacacatatgtgtcaattcagtttccttagaccagtgccagtgtggaggattaattgaaaaccaggaccataaactttcagaactttgtattatgcagagggatctgtgaaactagtcaatttgtttcattaaacaaatattttaaaatt

SEQ ID NO: 209210 - protein, 568 aa, Artificial Sequence
  derived and/or modified sequence
MGGIMAPKDIMTNTHAKSILNSMNSLRKSNTLCDVTLRVEQKDFPAHRIVLAACSDYFCAMFTSELSEKGKPYVDIQGLTASTMEILLDFVYTETVHVTVENVQELLPAACLLQLKGVKQACCEFLESQLDPSNCLGIRDFAETHNCVDLMQAAEVFSQKHFPEVVQHEEFILLSQGEVEKLIKCDEIQVDSEEPVFEAVINWVKHAKKEREESLPNLLQYVRMPLLTPRYITDVIDAEPFIRCSLQCRDLVDEAKKFHLRPELRSQMQGPRTRARLGANEVLLVVGGFGSQQSPIDVVEKYDPKTQEWSFLPSITRKRRYVASVSLHDRIYVIGGYDGRSRLSSVECLDYTADEDGVWYSVAPMNVRRGLAGATTLGDMIYVSGGFDGSRRHTSMERYDPNIDQWSMLGDMQTAREGAGLVVASGVIYCLGGYDGLNILNSVEKYDPHTGHWTNVTPMATKRSGAGVALLNDHIYVVGGFDGTAHLSSVEAYNIRTDSWTTVTSMTTPRCYVGATVLRGRLYAIAGYDGNSLLSSIECYDPIIDSWEVVTSMGTQRCDAGVCVLREK

SEQ ID NO: 209211 - DNA, 1707 bp, Artificial Sequence
  derived and/or modified sequence
atgggcggcatcatggcccccaaggacatcatgaccaacacccacgccaagagcatcctgaacagcatgaacagcctgagaaagagcaacaccctgtgcgacgtgaccctgagagtggagcagaaggacttccccgcccacagaatcgtgctggccgcctgcagcgactacttctgcgccatgttcaccagcgagctgagcgagaagggcaagccctacgtggacatccagggcctgaccgccagcaccatggagatcctgctggacttcgtgtacaccgagaccgtgcacgtgaccgtggagaacgtgcaggagctgctgcccgccgcctgcctgctgcagctgaagggcgtgaagcaggcctgctgcgagttcctggagagccagctggaccccagcaactgcctgggcatcagagacttcgccgagacccacaactgcgtggacctgatgcaggccgccgaggtgttcagccagaagcacttccccgaggtggtgcagcacgaggagttcatcctgctgagccagggcgaggtggagaagctgatcaagtgcgacgagatccaggtggacagcgaggagcccgtgttcgaggccgtgatcaactgggtgaagcacgccaagaaggagagagaggagagcctgcccaacctgctgcagtacgtgagaatgcccctgctgacccccagatacatcaccgacgtgatcgacgccgagcccttcatcagatgcagcctgcagtgcagagacctggtggacgaggccaagaagttccacctgagacccgagctgagaagccagatgcagggccccagaaccagagccagactgggcgccaacgaggtgctgctggtggtgggcggcttcggcagccagcagagccccatcgacgtggtggagaagtacgaccccaagacccaggagtggagcttcctgcccagcatcaccagaaagagaagatacgtggccagcgtgagcctgcacgacagaatctacgtgatcggcggctacgacggcagaagcagactgagcagcgtggagtgcctggactacaccgccgacgaggacggcgtgtggtacagcgtggcccccatgaacgtgagaagaggcctggccggcgccaccaccctgggcgacatgatctacgtgagcggcggcttcgacggcagcagaagacacaccagcatggagagatacgaccccaacatcgaccagtggagcatgctgggcgacatgcagaccgccagagagggcgccggcctggtggtggccagcggcgtgatctactgcctgggcggctacgacggcctgaacatcctgaacagcgtggagaagtacgacccccacaccggccactggaccaacgtgacccccatggccaccaagagaagcggcgccggcgtggccctgctgaacgaccacatctacgtggtgggcggcttcgacggcaccgcccacctgagcagcgtggaggcctacaacatcagaaccgacagctggaccaccgtgaccagcatgaccacccccagatgctacgtgggcgccaccgtgctgagaggcagactgtacgccatcgccggctacgacggcaacagcctgctgagcagcatcgagtgctacgaccccatcatcgacagctgggaggtggtgaccagcatgggcacccagagatgcgacgccggcgtgtgcgtgctgagagagaagtag

SEQ ID NO: 209212 - DNA, 1707 bp, Artificial Sequence
  derived and/or modified sequence
atgggcgggattatggccccgaaagatattatgacaaacacacacgccaaatcaatactcaactcaatgaactccctcagaaagtccaatacattgtgtgacgtgactttgagagttgagcaaaaggatttccctgcccaccggattgtgctcgctgcctgcagcgactacttttgtgctatgtttacctccgaactgagcgagaaagggaaaccttatgtcgatatccagggcctgacagcatctactatggagatactgctcgatttcgtgtacacagagacagtccatgttacggtcgagaacgtgcaggagcttctacctgctgcatgtctccttcagctcaaaggcgtgaaacaagcctgttgcgaatttttggaatcccagctggacccctccaattgtctcggaatccgcgatttcgctgaaacacacaattgtgtggaccttatgcaggctgccgaagtatttagccagaaacattttccggaggtggtgcaacacgaggagttcatcttgctgtcgcaaggggaggtggagaaactgatcaaatgcgacgagatacaggtggatagtgaggagcctgtgtttgaggcagtgatcaattgggttaagcacgccaagaaagagagagaagagtccctgcctaatctgctgcaatacgtacgcatgcccttactgacaccaagatacattacagatgtgattgatgccgagccgttcatccgatgcagtcttcagtgccgcgacctggtggacgaggccaaaaaatttcatctccggccagaattgagatcacaaatgcagggtcccagaactcgtgccaggctgggagctaacgaagtgttactggtggtcggcggcttcggcagccagcagtcccccatagacgttgtcgaaaaatacgaccccaagactcaggagtggagtttcctcccatccattacaaggaaaagacgatatgtagctagtgtgtcattacacgatcgtatctatgtgatcggaggttatgacggtcgttctcgcctttcatctgtggagtgcctggactacacagcagacgaggacggagtttggtattcagtggcgcccatgaatgtccggaggggtctcgccggtgcaactacccttggggacatgatttacgtgtcaggaggcttcgatggcagccgaaggcacacaagcatggaaaggtacgaccctaacatcgaccaatggtctatgctgggagatatgcagactgcccgggaaggagctggactggtggtcgcatcaggcgtaatttattgccttggtggttatgatggcctgaatatccttaactctgtggagaagtatgaccctcatacaggtcattggacaaacgtaacacctatggccaccaagcggtccggtgctggcgtggcactattaaatgatcacatatatgtggtcggaggctttgacggaactgctcatttgagcagtgttgaagcttacaacatcagaacagacagctggacaacagtgacatcaatgacaacaccgaggtgttatgttggtgcaaccgtactccgaggccggctgtatgctatagcaggctacgatgggaactcacttctgtcttccatcgagtgctacgaccccattatcgacagctgggaggtggtcacctccatggggacgcagagatgtgacgcgggtgtgtgtgtcctgcgcgaaaagtag

SEQ ID NO: 209213 - DNA, 1707 bp, Artificial Sequence
  derived and/or modified sequence
atgggcggcatcatggcccccaaggacatcatgaccaacacccacgccaagagcatcctgaacagcatgaacagcctgaggaagagcaacaccctgtgtgatgtgaccctgcgggtggagcagaaggacttccctgcccacagaattgtgctggccgcctgcagcgactacttctgtgccatgttcaccagcgagctgtctgagaagggcaagccctacgtggacatccagggcctgacagccagcaccatggagatcctgctggactttgtgtacacagaaacagtgcacgtgacagtggagaatgtgcaggagctgctgcctgctgcctgcctgctgcagctgaagggcgtgaagcaggcctgctgtgagttcctggagagccagctggaccccagcaactgcctgggcatccgggactttgctgagacccacaactgtgtggacctgatgcaggccgctgaggtgttcagccagaagcacttccctgaggtggtgcagcacgaggagttcatcctgctgagccagggcgaggtggagaagctgatcaagtgtgatgagatccaggtggacagcgaggagcctgtgtttgaagctgtgatcaactgggtgaagcacgccaagaaggagcgggaggagagcctgcccaacctgctgcagtatgtgaggatgcccctgctgaccccccgctacatcacagatgtgattgatgctgagcccttcatccgctgcagcctgcagtgccgggacctggtggatgaggccaagaagttccacctgcggcctgagctgcggagccagatgcagggccccaggacccgggcccggctgggcgccaatgaggtgctgctggtggtgggcggcttcggcagccagcagagccccattgatgtggtggagaagtatgaccccaagacccaggagtggagcttcctgcccagcatcaccaggaagagaagatatgtggcctctgtgtccctgcatgaccgcatctacgtgattggaggctatgatggccgcagccggctgagctctgtggagtgcctggactacacagcagatgaagatggagtgtggtacagcgtggcccccatgaatgtgcggcggggcctggccggggccaccaccctgggggacatgatctacgtgtctgggggctttgatggcagcagaagacacacctccatggagagatatgaccccaacatcgaccagtggagcatgctgggggacatgcagacagcccgggagggcgccggcctggtggtggccagcggggtcatctactgcctgggcggctatgatggcctgaacatcctgaacagcgtggagaagtatgacccccacacaggccactggaccaacgtgacccccatggccaccaagaggtctggggccggcgtggccctgctgaatgaccacatctacgtggtgggcggctttgatggaacagcccacctgagctctgtggaggcctacaacatcagaacagacagctggaccaccgtgacctccatgaccaccccccgctgctacgtgggcgccaccgtgctgcggggccgcctgtatgccatcgccggctatgatggcaacagcctgctgagcagcattgagtgctatgaccccatcatcgacagctgggaggtggtgacctccatgggcacccagagatgtgatgctggggtgtgtgtgctgcgggagaagtag

SEQ ID NO: 209214 - DNA, 1707 bp, Artificial Sequence
  derived and/or modified sequence
atgggcggcatcatggcccccaaggacatcatgaccaacacccacgcaaaaagtattctcaactcaatgaattcattaaggaaaagcaacaccttgtgcgatgttacactacgggtggaacagaaggatttcccggctcatagaatcgttctggctgcatgttccgattacttttgtgctatgtttacatccgagttgtctgagaaagggaagccatacgttgacatccagggactcactgcttcaacaatggagatcctgttggacttcgtgtacaccgaaaccgtccacgttacggtggagaatgtccaagaactgctgcctgccgcgtgtttactgcagcttaagggcgttaagcaagcgtgttgcgaattcctcgagtctcaactggatccgtcaaattgtctgggcattcgtgattttgccgaaacgcataactgtgtcgatcttatgcaggctgcagaagtcttcagccagaaacacttcccagaagtcgtacagcacgaagagttcattctgctgtcacagggggaagtggagaagctcataaagtgtgatgagatccaggtggactcagaggaaccggttttcgaagcagttatcaactgggtcaaacatgccaagaaggagcgtgaggaaagcttgccaaacttacttcagtacgtgcgcatgcccctgctaactcccaggtatatcacagatgtcattgacgcagagccattcattagatgctcactgcaatgtcgtgacctggttgatgaagccaaaaagtttcaccttcgtccagagttgcgctcacagatgcagggtccgagaacacgcgcccggctgggagccaacgaggtgctgcttgttgtcggaggcttcgggtcccagcaatcaccaatcgatgtggtggaaaaatacgaccctaaaacacaagagtggagcttccttccatccatcactaggaagagacgctatgttgccagcgtaagtctccacgaccgtatttacgtgattggcggatatgacggccgaagccggctgagctctgtggagtgtttggactatacggccgatgaagacggtgtttggtattctgttgcccctatgaatgtcaggagaggccttgcaggagccacaacattgggggacatgatctatgtgagcggaggcttcgatgggagtaggcggcacacctccatggagcgatacgaccccaacatcgatcaatggtccatgcttggagacatgcaaacagcccgggaaggcgccggtctggttgttgctagcggcgtaatttattgcttaggggggtacgatgggctcaatatcctgaattctgtggagaaatacgaccctcacaccggccattggaccaacgtgaccccaatggccaccaagcgatctggcgctggagtggcccttctaaacgaccatatatacgtggtaggggggttcgacggaactgcccacctgagttcagtggaagcatataatattagaactgacagttggaccaccgtgacctcaatgaccacaccaagatgctatgtgggcgccaccgttctgagaggcaggctatatgcaatcgccggttacgacgggaacagcctcttgtcctctatagagtgttatgatccgattattgattcctgggaagtcgtcacatctatgggaacccagaggtgcgatgctggagtgtgcgtgctccgagagaaatag

SEQ ID NO: 209215 - DNA, 1707 bp, Artificial Sequence
  derived and/or modified sequence
atgggcggaattatggccccaaaagacataatgaccaacacacacgccaagagcattttgaactctatgaactccctgaggaagtccaacacactttgtgatgtgaccttgagggtcgaacagaaggacttcccagctcataggattgtactcgccgcttgcagtgattatttctgtgccatgttcacgtcagaactgagcgaaaagggcaagccttatgtggacattcagggtcttacggcttctacaatggaaatattgctggatttcgtgtataccgagactgtgcatgtgaccgttgaaaacgtccaggagcttttgccggctgcttgtctgttacaactgaagggagtgaaacaggcatgttgcgaattcctcgagagtcaactggatccctctaactgcctgggcatcagagacttcgcggaaacacacaactgcgtcgatcttatgcaggctgctgaagtgttcagtcaaaaacactttccagaggtggtgcagcacgaagagtttatactgctgtctcaaggagaagtcgagaagctgattaaatgtgacgagatccaggtggatagtgaggagcccgtttttgaggccgtgattaactgggtgaaacatgctaaaaaagaacgagaggagagtctgcctaatctgctgcagtacgtgcggatgcccttactgacccctcggtacatcacagatgtcattgacgcggagccgttcattaggtgcagtttgcaatgccgggacctggtggacgaagctaagaagtttcatctgaggcccgaactgcgcagtcagatgcagggcccaaggaccagggcaagacttggagctaatgaagtgctgctggtggtcgggggttttggctcacagcaatccccaattgacgtcgttgaaaagtacgaccctaagactcaagagtggagctttctccctagcatcactaggaagaggcgttacgtcgcaagtgtgagtctgcatgaccgaatttatgtgattgggggttacgatggtcgctcccgcctttcttctgttgagtgcctggactatacggctgacgaggatggcgtctggtattccgtggccccaatgaatgtgagacgtggtctggccggtgctacaactctcggcgacatgatttatgtctccggaggcttcgatggaagtaggagacacacaagcatggagaggtatgaccctaacattgatcagtggtcaatgctcggtgacatgcagaccgctcgtgagggcgctggtctggtggtggccagtggtgtgatttattgtttgggaggatacgatgggctgaatatcctaaatagcgtcgaaaaatatgacccccacacgggtcattggaccaacgtcactccgatggccacaaagcggtcaggggcaggcgtggccctgctgaatgaccatatatatgttgtcgggggtttcgatggcacagctcacctctcatcagtcgaagcgtacaatatcaggaccgactcatggacaactgtgacctccatgaccactcccagatgctacgttggtgcaactgtgctgcgcggtcgcctctatgcaattgctggatatgacggcaattccctgttaagttccatcgagtgctacgatccaatcatcgactcgtgggaagtggtgacgagtatggggacccaaaggtgtgacgccggtgtttgcgtcctccgcgaaaagtag

SEQ ID NO: 209216 - protein, 757 aa, Artificial Sequence
  derived and/or modified sequence
MTSGSVFFYILIFGKYFSHGGGQDVKCSLGYFPCGNITKCLPQLLHCNGVDDCGNQADEDNCGDNNGWSLQFDKYFASYYKMTSQYPFEAETPECLVGSVPVQCLCQGLELDCDETNLRAVPSVSSNVTAMSLQWNLIRKLPPDCFKNYHDLQKLYLQNNKITSISIYAFRGLNSLTKLYLSHNRITFLKPGVFEDLHRLEWLIIEDNHLSRISPPTFYGLNSLILLVLMNNVLTRLPDKPLCQHMPRLHWLDLEGNHIHNLRNLTFISCSNLTVLVMRKNKINHLNENTFAPLQKLDELDLGSNKIENLPPLIFKDLKELSQLNLSYNPIQKIQANQFDYLVKLKSLSLEGIEISNIQQRMFRPLMNLSHIYFKKFQYCGYAPHVRSCKPNTDGISSLENLLASIIQRVFVWVVSAVTCFGNIFVICMRPYIRSENKLYAMSIISLCCADCLMGIYLFVIGGFDLKFRGEYNKHAQLWMESTHCQLVGSLAILSTEVSVLLLTFLTLEKYICIVYPFRCVRPGKCRTITVLILIWITGFIVAFIPLSNKEFFKNYYGTNGVCFPLHSEDTESIGAQIYSVAIFLGINLAAFIIIVFSYGSMFYSVHQSAITATEIRNQVKKEMILAKRFFFIVFTDALCWIPIFVVKFLSLLQVEIPGTITSWVVIFILPINSALNPILYTLTTRPFKEMIHRFWYNYRQRKSMDSKGQKTYAPSFIWVEMWPLQEMPPELMKPDLFTYPCEMSLISQSTRLNSYS

SEQ ID NO: 209217 - protein, 157 aa, Artificial Sequence
  derived and/or modified sequence
MTSGSVFFYILIFGKYFSHGGGQDVKCSLGYFPCGNITKCLPQLLHCNGVDDCGNQADEDNCGDNNGWSLQFDKYFASYYKMTSQYPFEAETPECLVGSVPVQCLCQGLELDCDETNLRAVPSVSSNVTAMSLQWNLIRKLPPDCFKNYHDLQKLTL

SEQ ID NO: 209218 - DNA, 2274 bp, Artificial Sequence
  derived and/or modified sequence
atgaccagcggcagcgtgttcttctacatcctgatcttcggcaagtacttcagccacggcggcggccaggacgtgaagtgcagcctgggctacttcccctgcggcaacatcaccaagtgcctgccccagctgctgcactgcaacggcgtggacgactgcggcaaccaggccgacgaggacaactgcggcgacaacaacggctggagcctgcagttcgacaagtacttcgccagctactacaagatgaccagccagtaccccttcgaggccgagacccccgagtgcctggtgggcagcgtgcccgtgcagtgcctgtgccagggcctggagctggactgcgacgagaccaacctgagagccgtgcccagcgtgagcagcaacgtgaccgccatgagcctgcagtggaacctgatcagaaagctgccccccgactgcttcaagaactaccacgacctgcagaagctgtacctgcagaacaacaagatcaccagcatcagcatctacgccttcagaggcctgaacagcctgaccaagctgtacctgagccacaacagaatcaccttcctgaagcccggcgtgttcgaggacctgcacagactggagtggctgatcatcgaggacaaccacctgagcagaatcagcccccccaccttctacggcctgaacagcctgatcctgctggtgctgatgaacaacgtgctgaccagactgcccgacaagcccctgtgccagcacatgcccagactgcactggctggacctggagggcaaccacatccacaacctgagaaacctgaccttcatcagctgcagcaacctgaccgtgctggtgatgagaaagaacaagatcaaccacctgaacgagaacaccttcgcccccctgcagaagctggacgagctggacctgggcagcaacaagatcgagaacctgccccccctgatcttcaaggacctgaaggagctgagccagctgaacctgagctacaaccccatccagaagatccaggccaaccagttcgactacctggtgaagctgaagagcctgagcctggagggcatcgagatcagcaacatccagcagagaatgttcagacccctgatgaacctgagccacatctacttcaagaagttccagtactgcggctacgccccccacgtgagaagctgcaagcccaacaccgacggcatcagcagcctggagaacctgctggccagcatcatccagagagtgttcgtgtgggtggtgagcgccgtgacctgcttcggcaacatcttcgtgatctgcatgagaccctacatcagaagcgagaacaagctgtacgccatgagcatcatcagcctgtgctgcgccgactgcctgatgggcatctacctgttcgtgatcggcggcttcgacctgaagttcagaggcgagtacaacaagcacgcccagctgtggatggagagcacccactgccagctggtgggcagcctggccatcctgagcaccgaggtgagcgtgctgctgctgaccttcctgaccctggagaagtacatctgcatcgtgtaccccttcagatgcgtgagacccggcaagtgcagaaccatcaccgtgctgatcctgatctggatcaccggcttcatcgtggccttcatccccctgagcaacaaggagttcttcaagaactactacggcaccaacggcgtgtgcttccccctgcacagcgaggacaccgagagcatcggcgcccagatctacagcgtggccatcttcctgggcatcaacctggccgccttcatcatcatcgtgttcagctacggcagcatgttctacagcgtgcaccagagcgccatcaccgccaccgagatcagaaaccaggtgaagaaggagatgatcctggccaagagattcttcttcatcgtgttcaccgacgccctgtgctggatccccatcttcgtggtgaagttcctgagcctgctgcaggtggagatccccggcaccatcaccagctgggtggtgatcttcatcctgcccatcaacagcgccctgaaccccatcctgtacaccctgaccaccagacccttcaaggagatgatccacagattctggtacaactacagacagagaaagagcatggacagcaagggccagaagacctacgcccccagcttcatctgggtggagatgtggcccctgcaggagatgccccccgagctgatgaagcccgacctgttcacctacccctgcgagatgagcctgatcagccagagcaccagactgaacagctacagctag

SEQ ID NO: 209219 - DNA, 2274 bp, Artificial Sequence
  derived and/or modified sequence
atgacttcgggtagcgtgttcttttatatcctcatctttgggaagtatttctcgcatggcggagggcaagacgtgaagtgtagccttggatatttcccctgcggcaacatcaccaaatgcctgcctcagctcttgcactgtaacggcgtggacgattgcggcaaccaggccgacgaagacaattgtggtgacaataatggctggagtctccagtttgacaagtactttgccagctactacaaaatgacctcccagtatccttttgaagctgagacccctgaatgcctggtcggctccgtgccggtgcagtgtttgtgtcagggcctggagcttgattgtgacgagacaaatttaagggccgtgccttcagtgagcagcaacgtcaccgctatgtccctgcagtggaatttgattaggaagctgccacccgactgcttcaagaactatcacgacctgcaaaaactgtacctgcaaaataacaaaataacctccatctccatatatgcttttaggggactcaactccctaaccaagctgtatctgtcccacaaccgcataacttttctcaagcccggagtgttcgaggacttgcatcgtctggagtggctcatcattgaggataaccacctgtccagaataagccctcccactttctatggtctgaactccttgattcttctggtgctgatgaacaatgtcctcaccagattacccgataagccattgtgccaacacatgccccggcttcactggctggacttagagggtaatcacatccacaacctaaggaacttgacttttatttcttgcagcaacctcacagtgttagtgatgcggaaaaacaagatcaatcatctcaacgagaataccttcgcacccctacagaaactagacgaacttgatctcggaagtaataagatcgagaatctgcctccattgatatttaaggacctgaaggagctgtcccaattaaacttgagttataacccgattcagaagatacaggcgaatcagttcgactatttagtaaagcttaagagccttagcctcgaaggaatcgaaatatctaatatccagcagaggatgtttcggccactgatgaacctttctcatatttattttaaaaaatttcaatactgtgggtatgccccacacgtgagatcctgtaagcctaatacggacggcatctcttctctggagaatttattagcctcaattattcagagagttttcgtatgggtagtaagcgccgttacctgctttggcaatatctttgtgatttgtatgcggccttatatccgctctgagaacaagctgtacgccatgagcattataagtctctgctgcgccgactgtctgatgggaatttatctgttcgtgattggcgggttcgacctgaagtttcgcggagaatataataagcacgcccaactctggatggaatcaacccactgtcagttagtgggctcactggccatccttagcactgaggtgtccgtgctattgctaacattcctgactctggaaaagtacatctgcatcgtgtatccgtttcggtgcgttcgcccagggaaatgcagaaccataactgtcctcatcctgatctggataacaggtttcatagttgcctttattcccctctccaataaagaattttttaagaattattatggtaccaacggggtctgttttcctctgcactctgaagacacagagagcatcggcgctcagatctattcagtggctatattcctcggtattaacttggcagcattcattatcattgttttctcttacggctcaatgttttacagcgtgcatcagagtgctataacagctactgaaatccggaatcaggttaagaaagaaatgattctcgctaaaagatttttctttatcgtgtttacagatgctctttgttggattccaatcttcgtggtgaaatttctatctctgctgcaggtcgaaattccaggtactattacctcttgggtggttattttcattttgcccattaattcagccctgaacccaatcctgtacacactcaccacccggccattcaaagagatgattcaccggttctggtacaactacaggcagagaaagagtatggatagtaaaggacaaaagacctatgctccgagcttcatatgggtggagatgtggccactacaagaaatgcctccagaactgatgaaaccagacctttttacttatccctgtgaaatgtctctgatctcacagtcgactcggctgaactcctattcatag

SEQ ID NO: 209220 - DNA, 2274 bp, Artificial Sequence
  derived and/or modified sequence
atgaccagcggctctgtgttcttctacatcctgatctttgggaagtacttcagccatggaggcggccaggatgtgaagtgcagcctgggctacttcccctgtggcaacatcaccaagtgcctgccccagctgctgcactgcaatggagtggatgactgtggcaaccaggctgatgaggacaactgtggggacaacaacggctggagcctgcagtttgacaagtactttgccagctactacaagatgaccagccagtacccctttgaggccgagaccccagagtgcctggtgggctctgtgcctgtgcagtgcctgtgccagggcctggagctggactgtgatgagaccaacctgcgggctgtgcccagcgtgagcagcaatgtgacagccatgagcctgcagtggaacctgatcaggaagctgcccccagactgcttcaagaactaccatgacctgcagaagctgtacctgcagaacaacaagatcaccagcatcagcatctatgccttccggggcctgaacagcctgaccaagctgtacctgagccacaaccgcatcaccttcctgaagccaggagtgtttgaggacctgcaccggctggagtggctgatcatcgaggacaaccacctgagccgcatcagcccccccaccttctacggcctgaacagcctcatcctgctggtgctgatgaacaacgtgctgacccggctgcctgacaagcccctgtgccagcacatgccccggctgcactggctggacctggagggcaaccacatccacaacctgaggaacctgaccttcatcagctgcagcaacctgactgtgctggtgatgaggaagaacaagatcaaccacctgaatgaaaacacctttgcccccctgcagaagctggatgagctggacctgggcagcaacaagattgagaacctgcccccactcatcttcaaggacctgaaggagctgagccagctgaacctgagctacaaccccatccagaagatccaggccaaccagtttgactacctggtgaagctgaagagcctgagcctggagggcatcgagatcagcaacatccagcagaggatgttccggcccctgatgaacctgagccacatctacttcaagaagttccagtactgcggctacgcccctcatgtgcgcagctgcaagcccaacacagatggcatcagcagcctggagaacctgctggccagcatcatccagagggtgtttgtgtgggtggtgtctgctgtgacctgctttggaaacatctttgtgatctgcatgaggccctacatccgctctgagaacaagctgtatgccatgagcatcatcagcctgtgctgtgccgactgcctgatgggcatctacctgtttgtgattggaggctttgacctgaagttccggggggagtacaacaagcacgcccagctgtggatggagagcacccactgccagctggtgggcagcctggccatcctgagcacagaggtgtctgtgctgctgctgaccttcctgaccctggagaagtacatctgcatcgtgtaccccttccgctgtgtgcggcctggaaaatgtaggaccatcaccgtgctgatcctgatctggatcaccggcttcatcgtggccttcatccccctgagcaacaaggagttcttcaagaactactacggcaccaacggggtgtgcttccccctgcacagcgaggacacagagagcatcggggcccagatctacagcgtggccatcttcctgggcatcaacctggccgccttcatcatcatcgtgttctcctatggctccatgttctacagcgtgcaccagagcgccatcacagccacagagatccggaaccaggtgaagaaggagatgatcctggccaagcgcttcttcttcatcgtgttcacagatgccctgtgctggatccccatctttgtggtgaagttcctgagcctgctgcaggtggagatccctggcaccatcacctcctgggtggtgatcttcatcctgcccatcaacagcgccctgaaccccatcctgtacaccctgaccacccggcccttcaaggagatgatccaccgcttctggtacaactaccggcagaggaagtccatggacagcaagggccagaagacctacgcccccagcttcatctgggtggagatgtggcccctgcaggagatgcctcctgagctgatgaagccagacctcttcacctacccctgtgagatgagcctcatcagccagagcacccggctgaacagctacagctag

SEQ ID NO: 209221 - DNA, 2274 bp, Artificial Sequence
  derived and/or modified sequence
atgaccagcggcagcgtgttcttctacatcctgatcttcggcaagtacttctcacatgggggagggcaagatgttaagtgttccttagggtacttcccttgtggcaacattacgaagtgcctgccgcagcttttgcactgcaacggagtcgacgactgtggaaatcaagccgatgaggacaactgcggggacaataacggttggtcactgcagttcgacaagtacttcgcatcgtactataagatgaccagtcagtacccgttcgaggctgagactccagaatgtttagtgggatccgtgcccgtacaatgcctctgtcaggggctggagctggactgtgacgagaccaatctcagggctgttcccagcgtatcctcaaacgtgacggcaatgagtctgcaatggaatctgatccggaagctcccaccagactgttttaaaaactatcatgatctacaaaaactatatttacagaataacaaaattaccagtatttctatatatgcatttcggggactgaattccctcaccaagctgtatttgagccataacagaattaccttcttgaagcccggagtatttgaagacctgcacagactggagtggcttatcattgaggataatcacctctccagaatctcacctccaactttctacgggctcaattcactgatcctgctggttctcatgaacaacgtactgaccagactgcccgataagcccttatgtcagcacatgccccgactacactggctggacttagaagggaatcatatccataacctccgcaacctgacgttcatatcctgctctaacctcaccgtgctggtgatgagaaaaaataagatcaaccacctgaatgaaaatacgttcgctcctttgcagaaactggacgagctggatctcggctccaacaaaattgaaaacctcccaccattgatctttaaggatttaaaggagttgtcccagctgaatctcagctacaacccgatacagaaaatccaggcgaaccagttcgattatctggtcaagcttaagagcctgagccttgagggcatagaaatttccaatatccagcagcggatgtttaggcccctaatgaacctcagccacatctatttcaagaaatttcagtactgtggatatgccccacacgtccgctcttgtaagcctaacactgacggcatttccagtctagagaatctgctcgcttcaattattcagcgggtgtttgtgtgggtggtgagtgccgtgacctgcttcggaaatatcttcgttatctgtatgagaccgtacatccggtcagagaacaaactgtatgccatgtctataatcagcctgtgctgcgccgactgcctaatgggaatctacctctttgtgattggggggtttgatttaaaattcagaggagaatacaataagcacgcccagctgtggatggagtccacccactgtcaacttgtggggtccttggcgatcctaagcaccgaagtgtctgtgctcctgctgaccttcctcacattggagaaatatatatgcattgtgtatccattcaggtgcgtgagaccgggaaagtgccgcaccatcacagtgctcattttaatttggattacaggttttatcgtggcctttatccccttgagcaacaaggagtttttcaaaaactactatgggactaacggcgtgtgcttccccctgcatagcgaggatacggaaagtatcggggcacagatttattctgtggccatctttctaggcataaacctcgccgccttcataatcatcgtgttcagctacggttccatgttttattctgtacatcagtcagctatcaccgccacggaaatcaggaaccaagttaaaaaagaaatgatattggcaaaaagatttttctttatcgtgtttacggacgctctctgttggattccgatcttcgtggtcaagttcctgagtttgctgcaagtggagataccgggcaccattacatcatgggtagtgattttcatcctgccaatcaatagcgcattgaacccaattctctatacactcacgactagaccctttaaagagatgatacatcgattttggtacaattatcgtcagcgaaaatccatggactctaaaggccagaagacctacgccccttcttttatttgggttgagatgtggcccctgcaggaaatgcctcccgaactgatgaaaccagacctgttcacgtatccatgcgaaatgtccctgatctcacagagcacccggcttaacagctacagctag

SEQ ID NO: 209222 - DNA, 2274 bp, Artificial Sequence
  derived and/or modified sequence
atgactagcggaagtgtgtttttctacatcctgatatttggcaagtacttcagccacgggggaggacaggatgtcaaatgctcactcggttactttccctgcggcaatattaccaagtgtctgcctcaactgctgcactgcaacggcgtcgacgactgcggtaaccaggccgatgaggacaattgcggggacaataatgggtggagtttgcagtttgataagtatttcgccagttattacaagatgacctctcagtacccttttgaggcggagacgccggagtgtctcgtcggttccgtgcctgttcaatgcctctgccaggggctagagttagattgtgacgaaacaaatctgagggctgtgccttctgtcagctctaacgtgactgccatgtccctgcaatggaacttgattaggaagctgccccctgactgctttaagaattatcacgacttgcagaagctgtacttgcaaaataataagatcacctctatcagtatatatgcttttagggggttgaactctctgaccaaactgtatctgtcccacaatagaatcactttcctcaagccaggcgtctttgaggatctccatcgcctggaatggctcataattgaggacaaccatctgtcaaggatatcacctcctactttctacggcttgaattcacttattttgctagtgttaatgaataacgttcttaccaggctgccagataaacccctctgccaacatatgcccaggctgcactggctagatctggagggcaatcacatacataatttacggaatctgacttttatttcatgctccaatcttacagttctggtgatgaggaaaaataagatcaatcacctgaacgaaaatacctttgcccctcttcagaagctcgatgaactggaccttgggtccaataaaatcgaaaacctgccacctttaattttcaaggacttgaaagaactgtctcaactgaatttgagttacaatcctattcaaaaaatccaggctaatcagttcgattatttagtgaaattgaagtccttgtctttagaagggatcgagattagcaatatccagcagcgaatgtttaggcctctgatgaatctgtcccatatctatttcaagaagtttcagtattgcggttatgctccccatgtgcggtcatgtaagccaaacacagatgggatcagctccctagagaatttactggcctcaattatacagagggtgttcgtatgggtggtatccgcagtgacatgttttggaaatatttttgtaatctgcatgagaccatatattaggtctgagaacaaactctacgccatgtccattatttctctgtgctgcgccgactgccttatgggcatatatctattcgttattggcggatttgatttgaaatttcgcggagaatacaataagcacgctcaactgtggatggagagtactcattgccaactcgttggctctttagccattctcagcaccgaggtctccgtactgctgctgacgttcctcaccctggagaagtacatttgtatcgtttacccttttcgctgtgttagacctggaaagtgcaggacaatcaccgttctaatactaatttggataacaggattcattgtggccttcattcctctttctaacaaggagttctttaagaactactatggaactaatggagtgtgtttccccctgcattcagaagataccgagagcatcggagctcagatatactctgttgctatcttcctggggatcaacctggcggcttttataattatagtcttcagctatggttccatgttctactctgttcaccagtctgccattaccgccactgaaattcgaaaccaagtgaagaaggaaatgattctcgccaagcggttcttctttattgtttttaccgatgctctctgctggatccctatatttgtagtaaaattcttatctctgttgcaagtggaaattccagggactatcaccagctgggtcgttatctttatactcccaatcaatagtgccctgaaccccatcctatacactctgaccactcgcccattcaaggaaatgatacacagattttggtataactatcgacagagaaaatccatggattctaagggccagaagacatacgctccatcttttatatgggtcgaaatgtggccgctacaggagatgcctccagaactcatgaagccggatcttttcacctatccctgcgaaatgtccttaatctctcagtctactcgcctgaactcatacagctag

SEQ ID NO: 209223 - DNA, 3842 bp, Artificial Sequence
  derived and/or modified sequence
aaagaaggagattaggacatttagagaaggagggcggggaggagagatcctgagaatagaaaggaggaaagaaaaaaagaggaatggaaagagacagagaaaggaaatgggagtggaaggagggaggactgctttgtaactgctaagattgcagacagaaatagcacacaaccactgtgagctgtatgcgattcagaaaccaagaccaaattttgctcactttcattaatcagttgctcagatagaaggaaatgacatctggttctgtcttcttctacatcttaatttttggaaaatatttttctcatgggggtggacaggatgtcaagtgctcccttggctatttcccctgtgggaacatcacaaagtgcttgcctcagctcctgcactgtaacggtgtggacgactgcgggaatcaggccgatgaggacaactgtggagacaacaatggatggtctctgcaatttgacaaatattttgccagttactacaaaatgacttcccaatatccttttgaggcagaaacacctgaatgtttggtcggttctgtgccagtgcaatgtctttgccaaggtctggagcttgactgtgatgaaaccaatttacgagctgttccatcggtttcttcaaatgtgactgcaatgtcacttcagtggaacttaataagaaagcttcctcctgattgcttcaagaattatcatgatcttcagaagctgtacctgcaaaacaataagattacatccatctccatctatgctttcagaggactgaatagccttactaaactgtatctcagtcataacagaataaccttcctgaagccgggtgtttttgaagatcttcacagactagaatggctgataattgaagataatcacctcagtcgaatttccccaccaacattttatggactaaattctcttattctcttagtcctgatgaataacgtcctcacccgtttacctgataaacctctctgtcaacacatgccaagactacattggctggaccttgaaggcaaccatatccataatttaagaaatttgacttttatttcctgcagtaatttaactgttttagtgatgaggaaaaacaaaattaatcacttaaatgaaaatacttttgcacctctccagaaactggatgaattggatttaggaagtaataagattgaaaatcttccaccgcttatattcaaggacctgaaggagctgtcacaattgaatctttcctataatccaatccagaaaattcaagcaaaccaatttgattatcttgtcaaactcaagtctctcagcctagaagggattgaaatttcaaatatccaacaaaggatgtttagacctcttatgaatctctctcacatatattttaagaaattccagtactgtgggtatgcaccacatgttcgcagctgtaaaccaaacactgatggaatttcatctctagagaatctcttggcaagcattattcagagagtatttgtctgggttgtatctgcagttacctgctttggaaacatttttgtcatttgcatgcgaccttatatcaggtctgagaacaagctgtatgccatgtcaatcatttctctctgctgtgccgactgcttaatgggaatatatttattcgtgatcggaggctttgacctaaagtttcgtggagaatacaataagcatgcgcagctgtggatggagagtactcattgtcagcttgtaggatctttggccattctgtccacagaagtatcagttttactgttaacatttctgacattggaaaaatacatctgcattgtctatccttttagatgtgtgagacctggaaaatgcagaacaattacagttctgattctcatttggattactggttttatagtggctttcattccattgagcaataaggaatttttcaaaaactactatggcaccaatggagtatgcttccctcttcattcagaagatacagaaagtattggagcccagatttattcagtggcaatttttcttggtattaatttggccgcatttatcatcatagttttttcctatggaagcatgttttatagtgttcatcaaagtgccataacagcaactgaaatacggaatcaagttaaaaaagagatgatccttgccaaacgttttttctttatagtatttactgatgcattatgctggatacccatttttgtagtgaaatttctttcactgcttcaggtagaaataccaggtaccataacctcttgggtagtgatttttattctgcccattaacagtgctttgaacccaattctctatactctgaccacaagaccatttaaagaaatgattcatcggttttggtataactacagacaaagaaaatctatggacagcaaaggtcagaaaacatatgctccatcattcatctgggtggaaatgtggccactgcaggagatgccacctgagttaatgaagccggaccttttcacatacccctgtgaaatgtcactgatttctcaatcaacgagactcaattcctattcatgactgactctgaaattcatttcttcgcagagaatactgtgggggtgcttcatgagggatttactggtatgaaatgaataccacaaaattaatttataataatagctaagataaatattttacaaggacatgaggaaaaataaaaatgactaatgctcttacaaagggaagtaattatatcaataatgtatatatattagtagacattttgcataagaaattaagagaaatctacttcagtaacattcattcatttttctaacatgcatttattgagtacccactactatgtgcatagcattgcaatatagtcctggaagtagacagtgcagaacctttcaatctgtagatggtgtttaatgacaaaagactatacaaagtccatctgcagttcctagtttaaagtagagctttacctgtcatgtgcatcagcaagaatcataggcacttttaaataaaggtttaaagttttggaatactcagtgtatttgcatcatagaaaatgtctgactgtttgcaaaataatattctgttttaagaatccatcttacctctctttaagtttccatacacttgagagccaacacaacatatttattactaaaaagatgctttgctagaaactcaaaaacagcacttcttttggcacttcctgcccagttttctctttgctttaaatgaacatcatcatatggaattggaataggagagtatgagtacggcagagaagtggatcagaaaaactagaatgaggataaacatttacattagtggaaactcctgaaataaatccttgtattgtcagttaactgattttcaacaaggatgccaagacaaaaaggcttttcaacaaaccgtgctgttttaagaacagacctaagtggtttaattcacccactttagatgggtgaatgttatggtgtgtgaaatatctcagtaaagcagttaaaaggaaaaagagctggaatgcactgattcaggaacttaatttcaggaaggaaaggtctgtatgtacacatttcactttaagcagaaaatctttcttcaagaaatgactttactttctctttgcactgccagcacgtgagatactaactttttaactagttgttcttctctagtctctacgttattagaattttttgctttcataatgtgaaacctttaagcaggagaagaaaatgttttcagatagtttcaaatacaccaaaaatgtttgaaacacaaaaatactggaatcaaaccataatgcacttattgaatatatagttgtatagatttgttctgaaaataaattatctgaaatttaactattaaaaa

SEQ ID NO: 209224 - DNA, 3676 bp, Artificial Sequence
  derived and/or modified sequence
aatgacatctggttctgtcttcttctacatcttaatttttggaaaatatttttctcatgggggtggacaggatgtcaagtgctcccttggctatttcccctgtgggaacatcacaaagtgcttgcctcagctcctgcactgtaacggtgtggacgactgcgggaatcaggccgatgaggacaactgtggagacaacaatggatggtctctgcaatttgacaaatattttgccagttactacaaaatgacttcccaatatccttttgaggcagaaacacctgaatgtttggtcggttctgtgccagtgcaatgtctttgccaaggtctggagcttgactgtgatgaaaccaatttacgagctgttccatcggtttcttcaaatgtgactgcaatgtcacttcagtggaacttaataagaaagcttcctcctgattgcttcaagaattatcatgatcttcagaagctgacactctaaagaacaatggtgacctgcactcagaacatgaaggcagccttgaaatccttactttatcattcccgcaatctggggtacctgcaaaacaataagattacatccatctccatctatgctttcagaggactgaatagccttactaaactgtatctcagtcataacagaataaccttcctgaagccgggtgtttttgaagatcttcacagactagaatggctgataattgaagataatcacctcagtcgaatttccccaccaacattttatggactaaattctcttattctcttagtcctgatgaataacgtcctcacccgtttacctgataaacctctctgtcaacacatgccaagactacattggctggaccttgaaggcaaccatatccataatttaagaaatttgacttttatttcctgcagtaatttaactgttttagtgatgaggaaaaacaaaattaatcacttaaatgaaaatacttttgcacctctccagaaactggatgaattggatttaggaagtaataagattgaaaatcttccaccgcttatattcaaggacctgaaggagctgtcacaattgaatctttcctataatccaatccagaaaattcaagcaaaccaatttgattatcttgtcaaactcaagtctctcagcctagaagggattgaaatttcaaatatccaacaaaggatgtttagacctcttatgaatctctctcacatatattttaagaaattccagtactgtgggtatgcaccacatgttcgcagctgtaaaccaaacactgatggaatttcatctctagagaatctcttggcaagcattattcagagagtatttgtctgggttgtatctgcagttacctgctttggaaacatttttgtcatttgcatgcgaccttatatcaggtctgagaacaagctgtatgccatgtcaatcatttctctctgctgtgccgactgcttaatgggaatatatttattcgtgatcggaggctttgacctaaagtttcgtggagaatacaataagcatgcgcagctgtggatggagagtactcattgtcagcttgtaggatctttggccattctgtccacagaagtatcagttttactgttaacatttctgacattggaaaaatacatctgcattgtctatccttttagatgtgtgagacctggaaaatgcagaacaattacagttctgattctcatttggattactggttttatagtggctttcattccattgagcaataaggaatttttcaaaaactactatggcaccaatggagtatgcttccctcttcattcagaagatacagaaagtattggagcccagatttattcagtggcaatttttcttggtattaatttggccgcatttatcatcatagttttttcctatggaagcatgttttatagtgttcatcaaagtgccataacagcaactgaaatacggaatcaagttaaaaaagagatgatccttgccaaacgttttttctttatagtatttactgatgcattatgctggatacccatttttgtagtgaaatttctttcactgcttcaggtagaaataccaggtaccataacctcttgggtagtgatttttattctgcccattaacagtgctttgaacccaattctctatactctgaccacaagaccatttaaagaaatgattcatcggttttggtataactacagacaaagaaaatctatggacagcaaaggtcagaaaacatatgctccatcattcatctgggtggaaatgtggccactgcaggagatgccacctgagttaatgaagccggaccttttcacatacccctgtgaaatgtcactgatttctcaatcaacgagactcaattcctattcatgactgactctgaaattcatttcttcgcagagaatactgtgggggtgcttcatgagggatttactggtatgaaatgaataccacaaaattaatttataataatagctaagataaatattttacaaggacatgaggaaaaataaaaatgactaatgctcttacaaagggaagtaattatatcaataatgtatatatattagtagacattttgcataagaaattaagagaaatctacttcagtaacattcattcatttttctaacatgcatttattgagtacccactactatgtgcatagcattgcaatatagtcctggaagtagacagtgcagaacctttcaatctgtagatggtgtttaatgacaaaagactatacaaagtccatctgcagttcctagtttaaagtagagctttacctgtcatgtgcatcagcaagaatcataggcacttttaaataaaggtttaaagttttggaatactcagtgtatttgcatcatagaaaatgtctgactgtttgcaaaataatattctgttttaagaatccatcttacctctctttaagtttccatacacttgagagccaacacaacatatttattactaaaaagatgctttgctagaaactcaaaaacagcacttcttttggcacttcctgcccagttttctctttgctttaaatgaacatcatcatatggaattggaataggagagtatgagtacggcagagaagtggatcagaaaaactagaatgaggataaacatttacattagtggaaactcctgaaataaatccttgtattgtcagttaactgattttcaacaaggatgccaagacaaaaaggcttttcaacaaaccgtgctgttttaagaacagacctaagtggtttaattcacccactttagatgggtgaatgttatggtgtgtgaaatatctcagtaaagcagttaaaaggaaaaagagctggaatgcactgattcaggaacttaatttcaggaaggaaaggtctgtatgtacacatttcactttaagcagaaaatctttcttcaagaaatgactttactttctctttgcactgccagcacgtgagatactaactttttaactagttgttcttctctagtctctacgttattagaattttttgctttcataatgtgaaacctttaagcaggagaagaaaatgttttcagatagtttcaaatacaccaaaaatgtttgaaacacaaaaatactggaatcaaaccataatgcacttattgaatatatagttgtatagatttgttctgaaaataaattatctgaaatttaactattaaaaa

SEQ ID NO: 209225 - protein, 135 aa, Artificial Sequence
  derived and/or modified sequence
MRAFLRNQKYEDMHNIIHILQIRKLRHRLSNFPRLPGILAPETVLLPFCYKVFRKKEKVKRSQKATEFIDYSIEQSHHAILTPLQTHLTMKGSSMKCSSLSSEAILFTLTLQLTQTLGLECCLLYLSKTIHPQII

SEQ ID NO: 209226 - DNA, 408 bp, Artificial Sequence
  derived and/or modified sequence
atgcgcgcgttcctccggaaccagaagtacgaagacatgcacaatattatccacatattacagatcagaaagcttcgccacagactgagtaactttcccaggttgccgggcatcctggcccctgagacagtcctgctgccattctgttataaagtcttcaggaaaaaggaaaaggtgaaaagatctcagaaagccacagagtttatagactacagtattgaacagtcccatcatgcaatactcacacctcttcaaactcatttgacaatgaaaggctcctcaatgaagtgcagcagcttgagttcagaggccatcctgttcacactgaccctacaactgacgcagaccctgggcctagagtgttgcctgttgtacctgagtaagacgatacatccgcaaattatctag

SEQ ID NO: 209227 - DNA, 408 bp, Artificial Sequence
  derived and/or modified sequence
atgagggccttcctgaggaaccagaagtatgaggacatgcacaacatcatccacatcctgcagatcaggaagctgcggcaccggctgagcaacttcccccggctgcccggcatcctggcccctgagaccgtgctgctgcccttctgctacaaggtgttcaggaagaaggagaaggtgaagaggagccagaaggccacagagttcatcgactacagcattgagcagagccaccacgccatcctgacccccctgcagacccacctgaccatgaagggcagctccatgaagtgcagcagcctgagcagcgaggccatcctcttcaccctgaccctgcagctgacccagaccctgggcctggagtgctgcctgctgtacctgagcaagaccatccacccccagatcatctag

SEQ ID NO: 209228 - DNA, 408 bp, Artificial Sequence
  derived and/or modified sequence
atgcgggccttcctgcggaaccagaagtacgaggacatgcacaacattattcacatactgcagatcaggaaattgcgccaccgcctgagtaacttccctcggctgccaggcatcctggcgcctgaaaccgttttactgccattctgttacaaggttttccgcaaaaaggagaaggtgaagcgcagccagaaggcaacggagttcatcgactatagcattgagcagagccatcatgccatccttacacctctacagacccacttaactatgaagggctcatccatgaagtgttctagcctttctagcgaggccattttgtttacattgacactgcagcttacacagactctgggacttgagtgttgtctcctctatctatctaagaccattcaccctcagatcatctag

SEQ ID NO: 209229 - DNA, 408 bp, Artificial Sequence
  derived and/or modified sequence
atgcgggcatttctcaggaaccagaagtatgaggacatgcataatatcatacacatactccaaattcgaaaactgcgccataggctgtcgaacttccctagactgccagggattctggcacctgagacagttctcctgccattctgctacaaagtgtttagaaagaaagaaaaggtgaagaggagccagaaagcaacagaattcattgactattctatagaacaatctcaccatgcaatcttaactcctttgcagacacacctcacaatgaaaggcagtagtatgaagtgttcctcactcagctcagaggcaattttgtttacactcacactgcagctgacgcagaccctcgggctggagtgttgcctgctttacttgtccaaaaccattcatccacagattatctag

SEQ ID NO: 209230 - DNA, 2506 bp, Artificial Sequence
  derived and/or modified sequence
gaccttaaatatatcgaggtggctaattgatgtataataatttacaaaattattcttctatgctacagagctacaattcaatttacagtagtaaatatgagggccttcttaaggaaccagaaatatgaggatatgcacaatattattcacattttacagatcagaaaattgaggcacagattaagtaacttcccaaggctaccaggcattctagctccagaaactgtgctcttaccattctgctacaaggtatttcgaaaaaaagaaaaagtaaaaagaagtcaaaaggcaacagagttcattgattattccatagaacagtcacaccatgcaattctcacacccttgcagacacacttgaccatgaaaggttcctcaatgaaatgttcctcattatcttcagaagccatattattcacattgactttgcagttaactcagaccctaggtctggaatgctgtcttctctacttatccaaaactatacatccacagatcatataaactctcagccctgctgcaaagcctttccagaaaaataaaaatggttgaaaaggcaattctgctaccaatgactgtttaagcccagccaagtaactgaaccattccaacttcaatttacttatgaaaagaatttgatgatgtaggaggttatttcaattctaaaatacaaacccatgttgatctttctcaatcttgaactcatagattattatctattatctcaatttagtttgttatttatcctagtgggccattaaaaactaccacatgtgtttctgtctctccattagtcaataactaaactaacgagcaattagtaagccatgtgccagatgctccgctaggcaccagagggataaaaacaatacttatagtataccactaattttcgcttagtaactagtgaaatgttcaagtcatgcctgagtcaagagttgaggagacattacaatgtgtaatggaaaccaaggaaagtgaaactttggataagtggggactagtgtatttatatatttaattgatttctgactctatcattggcctccaaacacagattgtgtttttctttggttttgttttcttcactatgggatcttctgtgcccagcacagtgcctgacacatagaaaacaatcaaatatttgctgaataaatgattaaaaaatcagagaactttcccattctgtttggatctatagaacatccagagtaagtgatgagggcctctgcatttatatgcgcttaaattaagattatgtgagaaaagtttaaagacacttagtagagtgattttgaaatatagtaaacacttggaaatggtggtgctttaaaaagatattaatagataatatgaaaatctccatctcaaaaataatgcataaactatttaaaggaaaatcacatctccaggctttcaatgtttgttcattactttttcatatatttttaccatctgctgaaggcagtcatatcaaagggtaaagaaagatgggaggaaaactcagtaagaattatattagtctgtttgcaaagtagaaaaagattctcatcactcaaccttatgagcaggaagagggaaggctgtttgagaaccatttacttagcagaaccacatattttagacacttccctgcattaactgcacaaacaatatgtttgcaaacttgttagatcaacctccaacaacgacacattcaggagttaaatatttttcatcaaacattggatttttccttaacgctagagattgctacaaatcttctgaagggtctcaatggcttcaggctaagaagagatttctccctgttataagcagcaagacaaattagccatttcactctcaaacttcactaatgatcacattctttccaaaaggaactctagaagaccaaatgccccgagttaagaacatcaaaactaaccatctgaagaaacttcccaagtgtaagactctgccattaaaacattaccgagaggggactcaaacagtctttcttcctttgtcgtgtttcttgctcccagaccaaggcactgacgacagtactgatacataatttaaaagcacactcccttccactttgtaataccagaactctaattggacaccctgaagcttaggactaccagccatacaaatagtaaactctgtccacgattcactcatctgtgtattttctatagatgtttactaggcgtttgttatataaaaataccccggccaggcacggtggctcacgcctgtaatcccagcactttgggaggtgggtggatcacctgaggtcgggagttcgagaccagcctgaccagcatggtggaacccccatctctactaaaaacacaaaaaattagccgggcgtggtggcacatgcctgtaatcccagctactcaggaggctgaggcggagaattgcttgaacccggaaggtggaggttgcggtgagctgagattgcactattgcactccagcctgggcaacaggagtaaaactcccccccacccaaaaaa

SEQ ID NO: 209231 - DNA, 408 bp, Artificial Sequence
  derived and/or modified sequence
atgagagccttcctgagaaaccagaagtacgaggacatgcacaacatcatccacatcctgcagatcagaaagctgagacacagactgagcaacttccccagactgcccggcatcctggcccccgagaccgtgctgctgcccttctgctacaaggtgttcagaaagaaggagaaggtgaagagaagccagaaggccaccgagttcatcgactacagcatcgagcagagccaccacgccatcctgacccccctgcagacccacctgaccatgaagggcagcagcatgaagtgcagcagcctgagcagcgaggccatcctgttcaccctgaccctgcagctgacccagaccctgggcctggagtgctgcctgctgtacctgagcaagaccatccacccccagatcatctag

SEQ ID NO: 209232 - protein, 915 aa, Artificial Sequence
  derived and/or modified sequence
MGRPRLTLVCQVSIIISARDLSMNNLTELQPGLFHHLRFLEELRLSGNHLSHIPGQAFSGLYSLKILMLQNNQLGGIPAEALWELPSLQSLRLDANLISLVPERSFEGLSSLRHLWLDDNALTEIPVRALNNLPALQAMTLALNRISHIPDYAFQNLTSLVVLHLHNNRIQHLGTHSFEGLHNLETLDLNYNKLQEFPVAIRTLGRLQELGFHNNNIKAIPEKAFMGNPLLQTIHFYDNPIQFVGRSAFQYLPKLHTLSLNGAMDIQEFPDLKGTTSLEILTLTRAGIRLLPSGMCQQLPRLRVLELSHNQIEELPSLHRCQKLEEIGLQHNRIWEIGADTFSQLSSLQALDLSWNAIRSIHPEAFSTLHSLVKLDLTDNQLTTLPLAGLGGLMHLKLKGNLALSQAFSKDSFPKLRILEVPYAYQCCPYGMCASFFKASGQWEAEDLHLDDEESSKRPLGLLARQAENHYDQDLDELQLEMEDSKPHPSVQCSPTPGPFKPCEYLFESWGIRLAVWAIVLLSVLCNGLVLLTVFAGGPVPLPPVKFVVGAIAGANTLTGISCGLLASVDALTFGQFSEYGARWETGLGCRATGFLAVLGSEASVLLLTLAAVQCSVSVSCVRAYGKSPSLGSVRAGVLGCLALAGLAAALPLASVGEYGASPLCLPYAPPEGQPAALGFTVALVMMNSFCFLVVAGAYIKLYCDLPRGDFEAVWDCAMVRHVAWLIFADGLLYCPVAFLSFASMLGLFPVTPEAVKSVLLVVLPLPACLNPLLYLLFNPHFRDDLRRLRPRAGDSGPLAYAAAGELEKSSCDSTQALVAFSDVDLILEASEAGRPPGLETYGFPSVTLISCQQPGAPRLEGSHCVEPEGNHFGNPQPSMDGELLLRAEGSTPAGGGLSGGGGFQPSGLAFASHV

SEQ ID NO: 209233 - DNA, 2748 bp, Artificial Sequence
  derived and/or modified sequence
atgggccgtcctcgccttacccttgtgtgccaggttagtataataatctccgcacgagatctgtctatgaacaatctcaccgaattgcagccaggactgttccatcacctgagatttctggaagagctcaggctgtccggtaatcatctgtcacatatcccaggtcaagcgttcagcggactgtacagcctgaagattctaatgctccaaaacaatcagttgggtgggatccccgcagaagctctgtgggaactgccatcactgcagtctctgcggttggatgccaacctcatatccttggtgcccgaacgctcattcgaggggctctcgagtctccgccacctctggctggacgacaatgccctgaccgagattcccgttcgtgcactcaataacctgcctgcgctgcaagctatgacacttgctctaaaccgcattagtcatattcccgattacgccttccaaaatctgactagtcttgtcgtgctacacctgcacaacaaccgtattcagcaccttgggactcactctttcgagggcctgcataatttggagacgctcgatctgaactacaataaactccaggagttccctgtggcaattagaactttgggaagacttcaggaactcggtttccacaacaataacatcaaggccattcccgagaaggctttcatgggaaacccactgcttcagacgatccacttttacgacaatccaatccagttcgtgggtcgttctgcatttcagtatttgcctaaattgcacaccctgagcttgaatggtgcaatggatatccaggagttcccggacctgaaggggaccacttccctagagatccttactctcaccagggccggcattcggctgctgccatccggcatgtgccagcaattacctcggctgagagttctggagctgagccacaatcaaatcgaggaactaccttccctgcatcggtgtcagaagttagaggagattggcctgcagcacaatcggatttgggagatcggtgccgataccttctctcagctatctagtctgcaggcactggacctgtcctggaacgctattcggagcatccaccctgaggccttcagtaccctgcatagcctagtgaaactggacttaacagataaccaattgaccacgttacctctggcagggctaggagggctcatgcacctgaagttgaaaggcaatcttgccctgagtcaggctttcagcaaagactctttccctaaactgaggatcctcgaggttccctacgcatatcagtgttgcccatatggcatgtgtgccagtttttttaaagccagcggtcagtgggaggcagaggacttgcatttagacgatgaagagagtagtaaaaggcctttaggcctgctggctcggcaggccgagaatcactacgaccaggatcttgacgaattacagctcgaaatggaggactcaaagccgcatccatccgtgcaatgcagcccgacccctggccctttcaaaccttgcgagtatttatttgaatcctgggggatacgtttagccgtgtgggccatcgtactcctgtctgtgctgtgcaatggcctcgtgctgttaacggtgttcgcaggaggtcccgtgcctttgcctccagttaaattcgtagttggggcaatagcaggggccaacacattaaccggaattagctgtggcctgctggcttctgtagatgcactcacttttggacagttcagtgaatatggcgcaaggtgggagacggggctcggttgtcgggcgaccggctttctggctgtgctggggtctgaggcctccgtgctcctcctcactctggctgcagtacaatgttctgtgagcgtgagctgtgtaagagcttacggcaagagtccctccctgggcagtgtgcgtgctggagtgctgggctgtctggcactcgccggcctggccgcagcattacctctggccagtgtaggggaatacggcgcctctcctctgtgtcttccatacgccccaccggaaggacaacctgccgccctcggatttacagtcgctctggttatgatgaattccttctgcttcctggttgttgccggcgcctatatcaagctttattgtgatttaccacgcggcgactttgaagccgtgtgggattgtgccatggttaggcacgtcgcctggctcatctttgccgatggactgctgtattgtcctgttgctttcctttcctttgcatccatgttaggcttgttccctgtcacccccgaggcagtgaaatccgttctcctcgtggtgctgcctctgccggcatgcctaaacccattactctacttattgtttaatccccactttagagacgaccttaggcgccttaggcctagagctggcgattccggccccctagcctacgctgccgcaggcgagctcgaaaagagttcctgtgacagtacacaggcattggtcgcattcagtgatgtcgaccttatcttggaggccagcgaggcaggccgccctccaggccttgaaacatacggctttccttcagtaactcttatctcatgtcagcagcctggtgcccctagacttgaggggagtcactgtgtggaacccgaaggcaatcatttcggcaatccacagccctccatggacggcgagttgctcctgagggccgaggggtccacccctgctgggggcggccttagcgggggcggaggctttcagccgagtgggctcgcttttgcctcgcatgtgtag

SEQ ID NO: 209234 - DNA, 2748 bp, Artificial Sequence
  derived and/or modified sequence
atgggccggccccggctgaccctggtgtgccaggtgtccatcatcatcagcgcccgggacctgtccatgaacaacctgacagagctgcagcccggcctcttccaccacctgcgcttcctggaggagctgcggctgagcggcaaccacctgagccacatccctggccaggccttcagcggcctgtacagcctgaagatcctgatgctgcagaacaaccagctgggcggcatcccagctgaggccctgtgggagctgcccagcctgcagagcctgcggctggatgccaacctgatcagcctggtgcctgagaggagctttgagggcctgagcagcctgcggcacctgtggctggatgacaatgccctgacagagatccctgtgcgggccctgaacaacctgcctgccctgcaggccatgaccctggccctgaaccgcatcagccacatcccagactatgccttccagaacctgaccagcctggtggtgctgcacctgcacaacaaccgcatccagcacctgggcacccacagctttgagggcctgcacaacctggagaccctggacctgaactacaacaagctgcaggagttccctgtggccatccgcaccctgggccgcctgcaggagctgggcttccacaacaacaacatcaaggccatccctgagaaggccttcatgggcaaccccctgctgcagaccatccacttctatgacaaccccatccagtttgtgggccgcagcgccttccagtacctgcccaagctgcacaccctgagcctgaatggagccatggacatccaggagttcccagacctgaagggcaccaccagcctggagatcctgaccctgacccgggccggcatccggctgctgcccagcggcatgtgccagcagctgccccggctgcgggtgctggagctgagccacaaccagatcgaggagctgcccagcctgcaccgctgccagaagctggaggagatcggcctgcagcacaaccgcatctgggagattggagctgacaccttcagccagctgagcagcctgcaggccctggacctgtcctggaatgccatccgcagcatccaccctgaggccttcagcaccctgcacagcctggtgaagctggacctgacagacaaccagctgaccaccctgcccctggccggcctgggcggcctgatgcacctgaagctgaagggcaacctggccctgagccaggccttcagcaaggacagcttccccaagctgcgcatcctggaggtgccctatgcctaccagtgctgcccctacggcatgtgtgccagcttcttcaaggccagcggccagtgggaggccgaggacctgcacctggatgatgaggagagcagcaagaggcccctgggcctgctggcccggcaggccgagaaccactatgaccaggacctggatgagctgcagctggagatggaggacagcaagccccaccccagcgtgcagtgcagccccaccccaggccccttcaagccctgtgagtacctgtttgagagctggggcatccggctggccgtgtgggccatcgtgctgctgtctgtgctgtgcaatggcctggtgctgctgactgtgtttgctgggggccctgtgcccctgccccctgtgaagtttgtggtgggcgccatcgccggggccaacaccctgaccggcatcagctgtggcctgctggcctctgtggatgccctgaccttcggccagttctctgaatatggagcccgctgggagaccggcctgggctgccgggccaccggcttcctggccgtgctgggcagcgaggcctctgtgctgctgctgaccctggccgctgtgcagtgcagcgtgtctgtgtcctgtgtgcgggcctacggcaagagccccagcctgggctctgtgcgggccggcgtgctgggctgcctggccctggccggcctggccgccgccctgcccctggcctctgtgggggagtatggagccagccccctgtgcctgccctatgcccctcctgagggccagcctgctgccctgggcttcaccgtggccctggtgatgatgaacagcttctgcttcctggtggtggccggggcctacatcaagctgtactgtgacctgcccaggggggactttgaagctgtgtgggactgtgccatggtgcgccacgtggcctggctgatctttgctgatggcctgctgtactgccctgtggccttcctgagctttgcctccatgctgggcctcttccctgtgaccccagaggccgtgaagtctgtgctgctggtggtgctgcccctgcctgcctgcctgaaccccctgctgtacctgctcttcaacccccacttcagagatgacctgcggcggctgcggcccagggctggggacagcggccccctggcctatgctgctgctggggagctggagaagagcagctgtgacagcacccaggccctggtggccttcagtgatgtggacctgatcctggaggccagcgaggccggccggcccccaggcctggagacctacggcttccccagcgtgaccctcatcagctgccagcagcccggggccccccggctggagggcagccactgtgtggagcctgagggcaaccactttggaaacccccagcccagcatggatggagagctgctgctgcgggcagagggcagcaccccagctgggggcggcctgagcggcggcggcggcttccagcccagcggcctggcctttgccagccacgtgtag

SEQ ID NO: 209235 - DNA, 3406 bp, Artificial Sequence
  derived and/or modified sequence
gaacgcttgtgtctaactgatgctcctaatgcggaagcccctgaaaggcggttgtggtgcaaaggaaaacccacaggccaaggaatgggaagaccaaggttgacacttgtttgtcaagtgtcaataatcatctctgcccgggacctcagcatgaacaacctcacagagcttcagcctggcctcttccaccacctgcgcttcttggaggagctgcgtctctctgggaaccatctctcacacatcccaggacaagcattctctggtctctacagcctgaaaatcctgatgctgcagaacaatcagctgggaggaatccccgcagaggcgctgtgggagctgccgagcctgcagtcgctgcgcctagatgccaacctcatctccctggtcccggagaggagctttgaggggctgtcctccctccgccacctctggctggacgacaatgcactcacggagatccctgtcagggccctcaacaacctccctgccctgcaggccatgaccctggccctcaaccgcatcagccacatccccgactacgcgttccagaatctcaccagccttgtggtgctgcatttgcataacaaccgcatccagcatctggggacccacagcttcgaggggctgcacaatctggagacactagacctgaattataacaagctgcaggagttccctgtggccatccggaccctgggcagactgcaggaactggggttccataacaacaacatcaaggccatcccagaaaaggccttcatggggaaccctctgctacagacgatacacttttatgataacccaatccagtttgtgggaagatcggcattccagtacctgcctaaactccacacactatctctgaatggtgccatggacatccaggagtttccagatctcaaaggcaccaccagcctggagatcctgaccctgacccgcgcaggcatccggctgctcccatcggggatgtgccaacagctgcccaggctccgagtcctggaactgtctcacaatcaaattgaggagctgcccagcctgcacaggtgtcagaaattggaggaaatcggcctccaacacaaccgcatctgggaaattggagctgacaccttcagccagctgagctccctgcaagccctggatcttagctggaacgccatccggtccatccaccccgaggccttctccaccctgcactccctggtcaagctggacctgacagacaaccagctgaccacactgcccctggctggacttgggggcttgatgcatctgaagctcaaagggaaccttgctctctcccaggccttctccaaggacagtttcccaaaactgaggatcctggaggtgccttatgcctaccagtgctgtccctatgggatgtgtgccagcttcttcaaggcctctgggcagtgggaggctgaagaccttcaccttgatgatgaggagtcttcaaaaaggcccctgggcctccttgccagacaagcagagaaccactatgaccaggacctggatgagctccagctggagatggaggactcaaagccacaccccagtgtccagtgtagccctactccaggccccttcaagccctgtgagtacctctttgaaagctggggcatccgcctggccgtgtgggccatcgtgttgctctccgtgctctgcaatggactggtgctgctgaccgtgttcgctggcgggcctgtccccctgcccccggtcaagtttgtggtaggtgcgattgcaggcgccaacaccttgactggcatttcctgtggccttctagcctcagtcgatgccctgacctttggtcagttctctgagtacggagcccgctgggagacggggctaggctgccgggccactggcttcctggcagtacttgggtcggaggcatcggtgctgctgctcactctggccgcagtgcagtgcagcgtctccgtctcctgtgtccgggcctatgggaagtccccctccctgggcagcgttcgagcaggggtcctaggctgcctggcactggcagggctggccgccgcgctgcccctggcctcagtgggagaatacggggcctccccactctgcctgccctacgcgccacctgagggtcagccagcagccctgggcttcaccgtggccctggtgatgatgaactccttctgtttcctggtcgtggccggtgcctacatcaaactgtactgtgacctgccgcggggcgactttgaggccgtgtgggactgcgccatggtgaggcacgtggcctggctcatcttcgcagacgggctcctctactgtcccgtggccttcctcagctttgcctccatgctgggcctcttccctgtcacgcccgaggccgtcaagtctgtcctgctggtggtgctgcccctgcctgcctgcctcaacccactgctgtacctgctcttcaacccccacttccgggatgaccttcggcggcttcggccccgcgcaggggactcagggcccctagcctatgctgcggccggggagctggagaagagctcctgtgattctacccaggccctggtagccttctctgatgtggatctcattctggaagcttctgaagctgggcggccccctgggctggagacctatggcttcccctcagtgaccctcatctcctgtcagcagccaggggcccccaggctggagggcagccattgtgtagagccagaggggaaccactttgggaacccccaaccctccatggatggagaactgctgctgagggcagagggatctacgccagcaggtggaggcttgtcagggggtggcggctttcagccctctggcttggcctttgcttcacacgtgtaaatatccctccccattcttctcttcccctctcttccctttcctctctccccctcggtgaatgatggctgcttctaaaacaaatacaaccaaaactcagcagtgtgatctatagcaggatggcccagtccctggctccactgatcacctctctcctgtgaccatcaccaacgggtgcctcttggcctggctttcccttggccttcctcagcttcaccttgatactgggcctcttccttgtcatgtctgaagctgtggaccagagacctggacttttgtctgcttaagggaaatgagggaagtaaagacagtgaaggggtggagggttgatcagggcacagtggacagggagacctcacagagaaaggcctggaaggtgatttcccgtgtgactcatggataggatacaaaatgtgttccatgtaccattaatcttgacatatgccatgcataaagacttcctattaaaataagctttggaagagattacacatgatgtctttttcttagagattcacagtgcatgttagtgtaataaagagataagtcctacagtagtaaaatctattgaactttg

SEQ ID NO: 209236 - DNA, 3096 bp, Artificial Sequence
  derived and/or modified sequence
gaacgcttgtgtctaactgatgctcctaatgcggaagcccctgaaaggcggttgtggtgcaaaggaaaacccacaggccaaggaatgggaagaccaaggttgacacttgtttgtcaagtgtcaataatcatctctgcccgggacctcagcatgaacaacctcacagagcttcagcctggcctcttccaccacctgcgcttcttggaggagctgcgtctctctgggaaccatctctcacacatcccaggacaagcattctctggtctctacagcctgaaaatcctgatgctgcagaacaatcagctgggaggaatccccgcagaggcgctgtgggagctgccgagcctgcagtcgctgcgcctagatgccaacctcatctccctggtcccggagaggagctttgaggggctgtcctccctccgccacctctggctggacgacaatgcactcacggagatccctgtcagggccctcaacaacctccctgccctgcaggccatgaccctggccctcaaccgcatcagccacatccccgactacgcgttccagaatctcaccagccttgtggtgctagacctgaattataacaagctgcaggagttccctgtggccatccggaccctgggcagactgcaggaactatctctgaatggtgccatggacatccaggagtttccagatctcaaaggcaccaccagcctggagatcctgaccctgacccgcgcaggcatccggctgctcccatcggggatgtgccaacagctgcccaggctccgagtcctggaactgtctcacaatcaaattgaggagctgcccagcctgcacaggtgtcagaaattggaggaaatcggcctccaacacaaccgcatctgggaaattggagctgacaccttcagccagctgagctccctgcaagccctggatcttagctggaacgccatccggtccatccaccccgaggccttctccaccctgcactccctggtcaagctggacctgacagacaaccagctgaccacactgcccctggctggacttgggggcttgatgcatctgaagctcaaagggaaccttgctctctcccaggccttctccaaggacagtttcccaaaactgaggatcctggaggtgccttatgcctaccagtgctgtccctatgggatgtgtgccagcttcttcaaggcctctgggcagtgggaggctgaagaccttcaccttgatgatgaggagtcttcaaaaaggcccctgggcctccttgccagacaagcagagaaccactatgaccaggacctggatgagctccagctggagatggaggactcaaagccacaccccagtgtccagtgtagccctactccaggccccttcaagccctgtgagtacctctttgaaagctggggcatccgcctggccgtgtgggccatcgtgttgctctccgtgctctgcaatggactggtgctgctgaccgtgttcgctggcgggcctgtccccctgcccccggtcaagtttgtggtaggtgcgattgcaggcgccaacaccttgactggcatttcctgtggccttctagcctcagtcgatgccctgacctttggtcagttctctgagtacggagcccgctgggagacggggctaggctgccgggccactggcttcctggcagtacttgggtcggaggcatcggtgctgctgctcactctggccgcagtgcagtgcagcgtctccgtctcctgtgtccgggcctatgggaagtccccctccctgggcagcgttcgagcaggggtcctaggctgcctggcactggcagggctggccgccgcgctgcccctggcctcagtgggagaatacggggcctccccactctgcctgccctacgcgccacctgagggtcagccagcagccctgggcttcaccgtggccctggtgatgatgaactccttctgtttcctggtcgtggccggtgcctacatcaaactgtactgtgacctgccgcggggcgactttgaggccgtgtgggactgcgccatggtgaggcacgtggcctggctcatcttcgcagacgggctcctctactgtcccgtggccttcctcagctttgcctccatgctgggcctcttccctgtcacgcccgaggccgtcaagtctgtcctgctggtggtgctgcccctgcctgcctgcctcaacccactgctgtacctgctcttcaacccccacttccgggatgaccttcggcggcttcggccccgcgcaggggactcagggcccctagcctatgctgcggccggggagctggagaagagctcctgtgattctacccaggccctggtagccttctctgatgtggatctcattctggaagcttctgaagctgggcggccccctgggctggagacctatggcttcccctcagtgaccctcatctcctgtcagcagccaggggcccccaggctggagggcagccattgtgtagagccagaggggaaccactttgggaacccccaaccctccatggatggagaactgctgctgagggcagagggatctacgccagcaggtggaggcttgtcagggggtggcggctttcagccctctggcttggcctttgcttcacacgtgtaaatatccctccccattcttctcttcccctctcttccctttcctctctccccctcggtgaatgatggctgcttctaaaacaaatacaaccaaaactcagcagtgtgatctatagcaggatggcccagtccctggctccactgatcacctctctcctgtgaccatcaccaacgggtgcctcttggcctggctttcccttggccttcctcagcttcaccttgatactgggcctcttccttgtcatgtctgaagctgtggaccagagacctggacttttgtctgcttaagggaaatgagggaagtaaagacagtgaaggggtggagggttgatcagggcacagtggacagggagacctcacagagaaaggcctggaaggtgatttcccgtgtgactcatggataggatacaaaatgtgttccatgtaccattaatcttgacatatgccatgcataaagacttcctattaaaataagctttggaag

SEQ ID NO: 209237 - DNA, 2748 bp, Artificial Sequence
  derived and/or modified sequence
atgggccggccccggctgaccctggtgtgccaggtgagcatcatcatttccgcgcgcgatctatccatgaataacttgaccgaacttcagccaggcctcttccaccacctcagattcctggaggagctgcgcctgagcggaaaccacttgtcgcatattccgggacaggccttctccggcctctacagtctgaaaatcctgatgctgcagaacaatcagctgggcgggatacccgctgaagccctgtgggaattgccctccctgcagagcctgcgtttggatgcaaatttaataagcctggtccctgaacggtcgtttgaaggtctcagctcactcaggcacctttggctggacgataacgcccttacggaaataccagtgcgcgcactcaacaatctgcccgccctgcaggctatgacccttgcactcaaccggatctctcacatccctgactacgcctttcagaacctaacctcattagtggtcttgcacctgcacaacaacagaatccagcatctgggcactcacagcttcgaaggactacacaatttggaaaccctcgacttgaactacaacaaactccaggagttcccagttgcgatcagaaccttgggtaggctgcaggagttagggttccacaacaacaatatcaaggccatcccagaaaaggcgtttatgggtaacccccttctccaaactatacatttctacgacaatcctatacagtttgtgggccgctcagccttccagtacctgcctaagttgcacactctgagcctcaacggggccatggacattcaggagttcccggatttaaaggggacaacatcgcttgagattcttaccctgacacgagccggaataaggctgcttccatctggcatgtgtcagcagctgcctaggctgcgcgttctggaactctctcacaaccagatcgaggagctccccagcttgcaccgttgccagaagctggaggagatcggcctgcagcacaacaggatttgggagattggggccgatactttttcgcagctttcaagcctccaggctctcgacctttcctggaatgcgatccggtcaatacatccagaggccttctctaccctgcacagtctggtaaaattggacctaacggacaatcagcttacgacactgccactagctggcctgggcgggttaatgcacctgaagctgaagggtaatctcgctctatcccaggcctttagtaaagactcattcccaaagctgaggattcttgaagtgccttacgcctaccagtgttgcccgtatggaatgtgcgcctcattcttcaaagcctctgggcagtgggaagctgaggaccttcacttggacgacgaagaatcttcaaaaaggcctttgggtctgctggcacgccaggctgagaatcactatgaccaagaccttgatgagctccagctcgagatggaggacagtaaaccccatccctctgtgcaatgcagtcccacacctggaccttttaagccctgtgaatacctgtttgagagttggggaatccggcttgcagtgtgggcaattgtactgctgagcgttctctgcaacggcctggtcctgcttactgtctttgctggtggtcctgtacctctgccgccagtgaagttcgtggtgggagccatagcaggggccaacacccttaccggcatcagttgcggacttctggcttcagtggacgccctgacctttggccaattctctgagtacggcgctcgctgggagactggattgggatgccgggcaactggattcctggccgtcttgggctctgaggcctctgtgcttctgctgacgttagctgcagtacagtgctcggttagtgtttcttgcgtgcgcgcctatggtaagtcccctagtcttggaagcgtgcgggctggggttttaggctgtctggctctcgccggcctcgccgccgccctgccccttgcaagcgtgggggaatatggcgccagcccactatgtctgccatatgccccacctgaggggcagccggccgcactgggattcacggtggccctggtgatgatgaattccttttgtttcttggtggttgcgggtgcctacattaaactatactgtgacctaccccgcggcgactttgaagctgtctgggactgtgccatggttcggcacgtggcttggctgatattcgccgacggcctcctgtattgccccgtcgcctttctgagttttgcctccatgctcggcctcttccccgtaacgcccgaggcggtgaagtcagtcctcctcgtggtcttgccgctccctgcttgcctgaatccacttttgtacctgctgttcaaccctcatttcagggacgatctgaggcgtctgcgcccacgcgcgggggattcgggccctctcgcctatgcagctgccggggagctagagaagtccagctgtgatagtactcaggccctggtagctttctcagatgtcgacctgattcttgaagcctcagaggccggtcggcctcctggcctcgagacatacggcttcccaagtgtgacactgatttcctgtcaacaacccggcgccccccgactcgagggcagccactgtgtggaacccgaggggaatcacttcgggaacccccagcccagcatggatggagagctactgctgagggccgagggctcaactccagctgggggggggttgtctggaggcggaggctttcaaccaagtggccttgcattcgcgagtcacgtctag

SEQ ID NO: 209238 - DNA, 2748 bp, Artificial Sequence
  derived and/or modified sequence
atgggacggccaaggctcactctggtgtgccaggtttccattattattagtgccagggatttatctatgaacaacctgaccgaactccagccagggttgttccatcacctacgctttttggaggaactcaggttgagtggcaatcatctctcccacatcccaggccaggcctttagtggtctgtactcattaaagatcttaatgctccaaaacaaccagcttgggggtatccctgctgaagcactatgggaacttccctccctgcagtctctgcgtctcgacgcgaacctgattagtcttgttccggaacgcagctttgagggcttaagcagccttcggcatctttggctcgatgacaatgccctgaccgaaatccctgttagagcattgaacaatctcccggcactacaggccatgacgctggcactgaacaggataagccacatcccagactacgcattccagaatctaaccagcctggtcgtcctgcacctgcacaataatagaatccagcatctggggactcattcttttgagggcctccacaaccttgagacactggacttaaactataacaagctgcaggaatttcccgtagccattcgtacacttggcagattacaggagctcggctttcataacaacaacattaaagccattcccgagaaggcgttcatgggtaatcctctactacagacgatccacttttatgacaatccaattcagtttgttggacgatccgccttccagtatttgccgaagctgcatactctttcgttgaacggcgctatggatatccaggaatttcccgacctgaaggggactacgtctttggaaatcttgactctgacacgcgcaggcatccgcctgttgccctcgggtatgtgccagcagctgccccgtctgcgcgtgctggaactgtcgcacaaccagattgaagagcttccatccttacacagatgccagaagctagaagaaatcgggctacagcacaacagaatttgggagatcggggctgacactttctctcaactgtccagtctgcaagccctggatctgagctggaacgctatcaggagcatccatcccgaagctttcagcactctgcacagtctggtcaagctggacctcaccgataaccaacttaccacgctgccccttgcgggactgggcggtttgatgcatctgaaattaaagggtaacctagccctgtcccaggcgttcagtaaagactctttcccaaagctgaggatcctagaagtgccttacgcctaccaatgttgtccttacggaatgtgtgcctccttctttaaggccagtggtcagtgggaggcagaagacctgcatctagacgacgaggaaagctccaaacggcctctgggcctccttgcccgtcaagccgaaaatcactatgatcaggacttagacgaactgcaactggaaatggaggacagtaaaccccacccgtcagtgcagtgttccccaacgccaggccctttcaagccctgcgaatacctgttcgaaagctggggaatccggctggcagtatgggcaatcgttctcctgtccgtgctgtgtaacgggctcgtactactcaccgtcttcgcaggcggtcccgttccactgcctccagttaaattcgtcgtcggtgcaatcgcaggggcaaacacactgacagggatctcctgtggcctccttgcgtctgtagacgccctaacattcggtcagttctccgagtacggtgccagatgggaaacaggcttggggtgtcgcgcaacaggtttcctagcagtattggggtctgaggcaagcgtgttgctgcttacactcgccgctgtgcaatgctccgtatccgtgtcgtgtgtacgagcatatggtaaatcacctagcctcggctccgtcagagccggtgtgcttgggtgtctagctctggcaggcctagctgccgcactaccactggcgagcgtaggcgagtatggagctagccccctgtgcctgccgtacgcgccaccagagggacagccagctgcccttggctttactgtcgcactggtgatgatgaattcattctgtttccttgtggtcgccggagcgtacatcaagctttattgtgacctccccaggggagacttcgaggctgtttgggattgcgcaatggttaggcacgttgcttggttgatatttgcagacggacttttgtattgtccggtcgcatttctttcattcgctagcatgctgggcctattcccagtgaccccagaggctgtgaagtctgtcttgctggtggtgctacccctgccggcttgtctcaacccattattgtacttgctgtttaacccgcattttcgagacgatctgaggcgcctacgccctcgggcaggggattccgggccacttgcatatgccgctgcaggagaacttgaaaaatcttcatgcgactcaactcaagctcttgtggccttctcagatgtagacctgatcctcgaggcatctgaagcgggtaggcccccaggcctagagacctacggcttcccatccgtgacgttgattagttgccagcagccaggtgctccgagattagagggctcccattgcgtggaacccgagggcaaccatttcggcaatcctcaacctagcatggacggtgagcttctgctgcgggctgaaggcagcacgcctgcaggcggaggtctgagtggcggaggcggattccagccatccggactcgccttcgctagccatgtgtag

SEQ ID NO: 209239 - DNA, 2748 bp, Artificial Sequence
  derived and/or modified sequence
atgggcagacccagactgaccctggtgtgccaggtgagcatcatcatcagcgccagagacctgagcatgaacaacctgaccgagctgcagcccggcctgttccaccacctgagattcctggaggagctgagactgagcggcaaccacctgagccacatccccggccaggccttcagcggcctgtacagcctgaagatcctgatgctgcagaacaaccagctgggcggcatccccgccgaggccctgtgggagctgcccagcctgcagagcctgagactggacgccaacctgatcagcctggtgcccgagagaagcttcgagggcctgagcagcctgagacacctgtggctggacgacaacgccctgaccgagatccccgtgagagccctgaacaacctgcccgccctgcaggccatgaccctggccctgaacagaatcagccacatccccgactacgccttccagaacctgaccagcctggtggtgctgcacctgcacaacaacagaatccagcacctgggcacccacagcttcgagggcctgcacaacctggagaccctggacctgaactacaacaagctgcaggagttccccgtggccatcagaaccctgggcagactgcaggagctgggcttccacaacaacaacatcaaggccatccccgagaaggccttcatgggcaaccccctgctgcagaccatccacttctacgacaaccccatccagttcgtgggcagaagcgccttccagtacctgcccaagctgcacaccctgagcctgaacggcgccatggacatccaggagttccccgacctgaagggcaccaccagcctggagatcctgaccctgaccagagccggcatcagactgctgcccagcggcatgtgccagcagctgcccagactgagagtgctggagctgagccacaaccagatcgaggagctgcccagcctgcacagatgccagaagctggaggagatcggcctgcagcacaacagaatctgggagatcggcgccgacaccttcagccagctgagcagcctgcaggccctggacctgagctggaacgccatcagaagcatccaccccgaggccttcagcaccctgcacagcctggtgaagctggacctgaccgacaaccagctgaccaccctgcccctggccggcctgggcggcctgatgcacctgaagctgaagggcaacctggccctgagccaggccttcagcaaggacagcttccccaagctgagaatcctggaggtgccctacgcctaccagtgctgcccctacggcatgtgcgccagcttcttcaaggccagcggccagtgggaggccgaggacctgcacctggacgacgaggagagcagcaagagacccctgggcctgctggccagacaggccgagaaccactacgaccaggacctggacgagctgcagctggagatggaggacagcaagccccaccccagcgtgcagtgcagccccacccccggccccttcaagccctgcgagtacctgttcgagagctggggcatcagactggccgtgtgggccatcgtgctgctgagcgtgctgtgcaacggcctggtgctgctgaccgtgttcgccggcggccccgtgcccctgccccccgtgaagttcgtggtgggcgccatcgccggcgccaacaccctgaccggcatcagctgcggcctgctggccagcgtggacgccctgaccttcggccagttcagcgagtacggcgccagatgggagaccggcctgggctgcagagccaccggcttcctggccgtgctgggcagcgaggccagcgtgctgctgctgaccctggccgccgtgcagtgcagcgtgagcgtgagctgcgtgagagcctacggcaagagccccagcctgggcagcgtgagagccggcgtgctgggctgcctggccctggccggcctggccgccgccctgcccctggccagcgtgggcgagtacggcgccagccccctgtgcctgccctacgccccccccgagggccagcccgccgccctgggcttcaccgtggccctggtgatgatgaacagcttctgcttcctggtggtggccggcgcctacatcaagctgtactgcgacctgcccagaggcgacttcgaggccgtgtgggactgcgccatggtgagacacgtggcctggctgatcttcgccgacggcctgctgtactgccccgtggccttcctgagcttcgccagcatgctgggcctgttccccgtgacccccgaggccgtgaagagcgtgctgctggtggtgctgcccctgcccgcctgcctgaaccccctgctgtacctgctgttcaacccccacttcagagacgacctgagaagactgagacccagagccggcgacagcggccccctggcctacgccgccgccggcgagctggagaagagcagctgcgacagcacccaggccctggtggccttcagcgacgtggacctgatcctggaggccagcgaggccggcagaccccccggcctggagacctacggcttccccagcgtgaccctgatcagctgccagcagcccggcgcccccagactggagggcagccactgcgtggagcccgagggcaaccacttcggcaacccccagcccagcatggacggcgagctgctgctgagagccgagggcagcacccccgccggcggcggcctgagcggcggcggcggcttccagcccagcggcctggccttcgccagccacgtgtag

SEQ ID NO: 209240 - protein, 376 aa, Artificial Sequence
  derived and/or modified sequence
MGHQFLRGLLTLLLPPPPLYTRHRMLGPESVPPPKRSRSKLMAPPRIGTHNGTFHCDEALACALLRLLPEYRDAEIVRTRDPEKLASCDIVVDVGGEYDPRRHRYDHHQRSFTETMSSLSPGKPWQTKLSSAGLIYLHFGHKLLAQLLGTSEEDSMVGTLYDKMYENFVEEVDAVDNGISQWAEGEPRYALTTTLSARVARLNPTWNHPDQDTEAGFKRAMDLVQEEFLQRLDFYQHSWLPARALVEEALAQRFQVDPSGEIVELAKGACPWKEHLYHLESGLSPPVAIFFVIYTDQAGQWRIQCVPKEPHSFQSRLPLPEPWRGLRDEALDQVSGIPGCIFVHASGFTGGHHTREGALSMARATLAQRSYLPQIS

SEQ ID NO: 209241 - protein, 325 aa, Artificial Sequence
  derived and/or modified sequence
MGHQFLRGLLTLLLPPPPLYTRHRMLGPESVPPPKRSRSKLMAPPRIGTHNGTFHCDEALACALLRLLPEYRDAEIVRTRDPEKLASCDIVVDVGGEYDPRRHRYDHHQRSFTETMSSLSPGKPWQTKLSSAGLIYLHFGHKLLAQLLGTSEEDSMVGTLYDKAGFKRAMDLVQEEFLQRLDFYQHSWLPARALVEEALAQRFQVDPSGEIVELAKGACPWKEHLYHLESGLSPPVAIFFVIYTDQAGQWRIQCVPKEPHSFQSRLPLPEPWRGLRDEALDQVSGIPGCIFVHASGFTGGHHTREGALSMARATLAQRSYLPQIS

SEQ ID NO: 209242 - DNA, 1192 bp, Artificial Sequence
  derived and/or modified sequence
tggcgcttcctcttccgggtcggcgctcctgcctccctgcagggagctgcttatgggacaccaattcctgcgcggcctcttaacgctgctgctgccgccgccacccctgtatacccggcaccgcatgctcggtccagagtccgtcccgcccccaaaacgatcccgcagcaaactcatggcaccgccccgaatcgggacgcacaatggcaccttccactgcgacgaggcactggcatgcgcactgcttcgcctcctgccggagtaccgggatgcagagattgtgcggacccgggatcccgaaaaactcgcttcctgtgacatcgtggtggacgtggggggcgagtacgaccctcggagacaccgatatgaccatcaccagaggtctttcacagagaccatgagctccctgtcccctgggaagccgtggcagaccaagctgagcagtgcgggactcatctatctgcacttcgggcacaagctgctggcccagttgctgggcactagtgaagaggacagcatggtgggcaccctctatgacaagatgtatgagaactttgtggaggaggtggatgctgtggacaatgggatctcccagtgggcagagggggagcctcgatatgcactgaccactaccctgagtgcacgagttgctcgacttaatcctacctggaaccaccccgaccaagacactgaggcagggttcaagcgtgcaatggatctggttcaagaggagtttctgcagagattagatttctaccaacacagctggctgccagcccgggccttggtggaagaggcccttgcccagcgattccaggtggacccaagtggagagattgtggaactggcgaaaggtgcatgtccctggaaggagcatctctaccacctggaatctgggctgtcccctccagtggccatcttctttgttatctacactgaccaggctggacagtggcgaatacagtgtgtgcccaaggagccccactcattccaaagccggctgcccctgccagagccatggcggggtcttcgggacgaggccctggaccaggtcagtgggatccctggctgcatcttcgtccatgcaagcggcttcactggcggtcaccacacccgagagggtgccttgagcatggcccgtgccaccttggcccagcgctcatacctcccacaaatctcctagtctaataaa

SEQ ID NO: 209243 - DNA, 1010 bp, Artificial Sequence
  derived and/or modified sequence
gggagctgcttatgggacaccaattcctgcgcggcctcttaacgctgctgctgccgccgccacccctgtatacccggcaccgcatgctcggtccagagtccgtcccgcccccaaaacgatcccgcagcaaactcatggcaccgccccgaatcgggacgcacaatggcaccttccactgcgacgaggcactggcatgcgcactgcttcgcctcctgccggagtaccgggatgcagagattgtgcggacccgggatcccgaaaaactcgcttcctgtgacatcgtggtggacgtggggggcgagtacgaccctcggagacaccgatatgaccatcaccagaggtctttcacagagaccatgagctccctgtcccctgggaagccgtggcagaccaagctgagcagtgcgggactcatctatctgcacttcgggcacaagctgctggcccagttgctgggcactagtgaagaggacagcatggtgggcaccctctatgacaaggcagggttcaagcgtgcaatggatctggttcaagaggagtttctgcagagattagatttctaccaacacagctggctgccagcccgggccttggtggaagaggcccttgcccagcgattccaggtggacccaagtggagagattgtggaactggcgaaaggtgcatgtccctggaaggagcatctctaccacctggaatctgggctgtcccctccagtggccatcttctttgttatctacactgaccaggctggacagtggcgaatacagtgtgtgcccaaggagccccactcattccaaagccggctgcccctgccagagccatggcggggtcttcgggacgaggccctggaccaggtcagtgggatccctggctgcatcttcgtccatgcaagcggcttcactggcggtcaccacacccgagagggtgccttgagcatggcccgtgccaccttggcccagcgctcatacctcccacaaatctcctagtctaataaaaccttccatctc

SEQ ID NO: 209244 - DNA, 1131 bp, Artificial Sequence
  derived and/or modified sequence
atgggccaccagttcctgagaggcctgctgaccctgctgctgccccccccccccctgtacaccagacacagaatgctgggccccgagagcgtgcccccccccaagagaagcagaagcaagctgatggccccccccagaatcggcacccacaacggcaccttccactgcgacgaggccctggcctgcgccctgctgagactgctgcccgagtacagagacgccgagatcgtgagaaccagagaccccgagaagctggccagctgcgacatcgtggtggacgtgggcggcgagtacgaccccagaagacacagatacgaccaccaccagagaagcttcaccgagaccatgagcagcctgagccccggcaagccctggcagaccaagctgagcagcgccggcctgatctacctgcacttcggccacaagctgctggcccagctgctgggcaccagcgaggaggacagcatggtgggcaccctgtacgacaagatgtacgagaacttcgtggaggaggtggacgccgtggacaacggcatcagccagtgggccgagggcgagcccagatacgccctgaccaccaccctgagcgccagagtggccagactgaaccccacctggaaccaccccgaccaggacaccgaggccggcttcaagagagccatggacctggtgcaggaggagttcctgcagagactggacttctaccagcacagctggctgcccgccagagccctggtggaggaggccctggcccagagattccaggtggaccccagcggcgagatcgtggagctggccaagggcgcctgcccctggaaggagcacctgtaccacctggagagcggcctgagcccccccgtggccatcttcttcgtgatctacaccgaccaggccggccagtggagaatccagtgcgtgcccaaggagccccacagcttccagagcagactgcccctgcccgagccctggagaggcctgagagacgaggccctggaccaggtgagcggcatccccggctgcatcttcgtgcacgccagcggcttcaccggcggccaccacaccagagagggcgccctgagcatggccagagccaccctggcccagagaagctacctgccccagatcagctag

SEQ ID NO: 209245 - DNA, 978 bp, Artificial Sequence
  derived and/or modified sequence
atgggccaccagttcctgagaggcctgctgaccctgctgctgccccccccccccctgtacaccagacacagaatgctgggccccgagagcgtgcccccccccaagagaagcagaagcaagctgatggccccccccagaatcggcacccacaacggcaccttccactgcgacgaggccctggcctgcgccctgctgagactgctgcccgagtacagagacgccgagatcgtgagaaccagagaccccgagaagctggccagctgcgacatcgtggtggacgtgggcggcgagtacgaccccagaagacacagatacgaccaccaccagagaagcttcaccgagaccatgagcagcctgagccccggcaagccctggcagaccaagctgagcagcgccggcctgatctacctgcacttcggccacaagctgctggcccagctgctgggcaccagcgaggaggacagcatggtgggcaccctgtacgacaaggccggcttcaagagagccatggacctggtgcaggaggagttcctgcagagactggacttctaccagcacagctggctgcccgccagagccctggtggaggaggccctggcccagagattccaggtggaccccagcggcgagatcgtggagctggccaagggcgcctgcccctggaaggagcacctgtaccacctggagagcggcctgagcccccccgtggccatcttcttcgtgatctacaccgaccaggccggccagtggagaatccagtgcgtgcccaaggagccccacagcttccagagcagactgcccctgcccgagccctggagaggcctgagagacgaggccctggaccaggtgagcggcatccccggctgcatcttcgtgcacgccagcggcttcaccggcggccaccacaccagagagggcgccctgagcatggccagagccaccctggcccagagaagctacctgccccagatcagctag

SEQ ID NO: 209246 - DNA, 1131 bp, Artificial Sequence
  derived and/or modified sequence
atgggacatcagtttctccggggcctgttgacacttctgctaccccccccacctctgtacactagacaccgaatgctgggcccagagagcgttcctccccctaaaaggagtagaagcaagttgatggcgcccccccgcattggcacacacaacggcacctttcactgtgatgaggccctggcgtgcgctcttctgcgtctgctgcccgaataccgcgacgccgagatcgtgaggacaagggaccctgaaaagctagcctcatgtgatatcgtagtcgatgtcggcggcgaatacgaccccagacgacacaggtacgaccaccaccagagaagctttaccgaaacaatgtcatctctttctcccgggaaaccttggcagaccaagctcagcagcgccggactgatttacctccacttcggccataaactacttgcacagctcctcgggaccagtgaggaggactctatggtggggaccctctatgataaaatgtatgagaatttcgtcgaagaagttgacgcggtggacaacgggatttcacaatgggctgagggagagcctagatacgcccttaccactacactgtccgcccgcgtggcaaggcttaacccgacctggaaccatcctgaccaagacacagaagcaggctttaagcgggccatggatctggtccaggaggaatttttacagagactggatttctatcagcatagctggctcccagccagggctctagtggaggaagccctggctcagcgcttccaggtagatccttccggcgaaatcgttgagctggccaagggcgcctgtccatggaaggaacacttgtaccatctggaaagcggcctatcaccaccggtggcaatcttttttgtcatttataccgaccaggcaggccagtggcggatccaatgtgtacccaaagagccacactcgttccagtctaggctaccacttccagaaccctggcgcgggctgagagacgaggccctggatcaggtgtctggaattcccggatgtatctttgtacacgcttcgggctttaccggcggtcatcacaccagagagggagccctcagcatggcacgggcaactctagctcaacgttcgtatttgcctcagatttcatag

SEQ ID NO: 209247 - DNA, 978 bp, Artificial Sequence
  derived and/or modified sequence
atgggtcatcaatttcttagggggctcctgactcttcttctgcctccacctcctttgtacacacggcatcgcatgttgggtccggaatctgtgcccccccctaagaggtcccgtagtaagctgatggcacccccacgcatcggcacacacaatggcacttttcactgcgacgaggccttggcctgcgctctgctgcgcttactgccagagtaccgggatgcagagatcgtgaggactcgagaccccgaaaagctggctagttgcgatatcgtagtcgatgtggggggcgaatatgaccctaggcgacaccgatatgaccaccatcaacggtctttcacagaaacaatgtccagtttaagcccaggcaagccatggcaaaccaaactgagtagcgccggcctcatttacctccattttggccataagctcttagcccagctccttgggaccagcgaggaggattcaatggtcggaaccctgtatgataaggccggctttaagcgggcaatggatctcgtgcaggaggagttcctccagcggctggacttttaccagcactcgtggctgcctgcacgagcactcgtcgaggaggctttagcgcaacggtttcaagtcgacccgtccggagagatcgtcgagctggccaaaggggcatgcccatggaaggaacatctctatcacctcgaatctggcctgagcccccccgtagccattttctttgtcatatacactgatcaggcgggacaatggaggatccaatgtgtgcctaaggagccacattcttttcagtcgaggttacctctgcccgaaccttggagaggcctgcgggacgaggctctggaccaggtctccggaatccctggctgcatctttgtgcatgctagcggattcacaggcggacaccatactcgcgagggcgctttgagcatggctcgggctacacttgctcagagatcttacttgccacagatctcctag

SEQ ID NO: 209248 - DNA, 1131 bp, Artificial Sequence
  derived and/or modified sequence
atgggccaccagttcctgcggggcctgctgaccctgctgctgcccccaccacccctgtacaccaggcacaggatgctgggccctgagagcgtgcccccacccaagaggagccgcagcaagctgatggcccccccaagaattggcacccacaacggcaccttccactgtgatgaggccctggcctgtgccctgctgcggctgctgcctgagtacagagatgctgagatcgtgaggacccgggaccctgagaagctggccagctgtgacatcgtggtggatgtgggcggggagtatgaccccaggaggcacagatatgaccaccaccagaggagcttcacagagaccatgagcagcctgagccctgggaagccctggcagaccaagctgagcagcgctggcctcatctacctgcacttcggccacaagctgctggcccagctgctgggcaccagtgaagaagattccatggtgggcaccctgtatgacaagatgtatgagaactttgtggaggaggtggatgctgtggacaatggcatcagccagtgggccgagggggagcccaggtatgccctgaccaccaccctgagcgcccgggtggcccggctgaaccccacctggaaccacccagaccaggacacagaagctggcttcaagagggccatggacctggtgcaggaggagttcctgcagaggctggacttctaccagcacagctggctgcctgcccgggccctggtggaggaggccctggcccagcgcttccaggtggaccccagcggggagatcgtggagctggccaagggggcctgcccctggaaggagcacctgtaccacctggagagcggcctgagcccccctgtggccatcttctttgtgatctacacagaccaggccggccagtggaggatccagtgtgtgcccaaggagccccacagcttccagagccggctgcccctgcctgagccctggaggggcctgagagatgaggccctggaccaggtgtctggcatccctggctgcatctttgtgcacgccagcggcttcaccggcggccaccacacccgggagggcgccctgtccatggcccgggccaccctggcccagaggagctacctgccccagatctcctag

SEQ ID NO: 209249 - DNA, 978 bp, Artificial Sequence
  derived and/or modified sequence
atgggccaccagttcctgcggggcctgctgaccctgctgctgcccccaccacccctgtacaccaggcacaggatgctgggccctgagagcgtgcccccacccaagaggagccgcagcaagctgatggcccccccaagaattggcacccacaacggcaccttccactgtgatgaggccctggcctgtgccctgctgcggctgctgcctgagtacagagatgctgagatcgtgaggacccgggaccctgagaagctggccagctgtgacatcgtggtggatgtgggcggggagtatgaccccaggaggcacagatatgaccaccaccagaggagcttcacagagaccatgagcagcctgagccctgggaagccctggcagaccaagctgagcagcgctggcctcatctacctgcacttcggccacaagctgctggcccagctgctgggcaccagtgaagaagattccatggtgggcaccctgtatgacaaggccggcttcaagagggccatggacctggtgcaggaggagttcctgcagaggctggacttctaccagcacagctggctgcctgcccgggccctggtggaggaggccctggcccagcgcttccaggtggaccccagcggggagatcgtggagctggccaagggggcctgcccctggaaggagcacctgtaccacctggagagcggcctgagcccccctgtggccatcttcttcgtcatctacacagaccaggccggccagtggaggatccagtgtgtgcccaaggagccccacagcttccagagccggctgcccctgcctgagccctggaggggcctgagagatgaggccctggaccaggtgtctggcatccctggctgcatctttgtgcacgccagcggcttcaccggcggccaccacacccgggagggcgccctgtccatggcccgggccaccctggcccagaggagctacctgccccagatctcctag

SEQ ID NO: 209250 - DNA, 1131 bp, Artificial Sequence
  derived and/or modified sequence
atgggccaccagttcctgcggggcctgctgaccctgctgctgcccccgcctcccctttacaccaggcatcggatgttaggacctgagagtgtgccgccgcccaagcggtcccgcagcaaacttatggccccaccgcggatcggaacacacaacggcaccttccactgtgatgaggcccttgcttgcgccttgctccgattgttacccgagtatagggatgcagagatcgtgcggacacgggaccctgaaaagctcgccagttgcgacatcgtcgtggacgttggaggagaatatgaccccagaagacaccgctatgatcaccatcaaaggtcattcaccgagacaatgtctagcctatcaccggggaagccttggcaaacaaagctctccagtgctggcctgatctacctacattttggacacaaactgctcgcacaactgctcgggacctcagaagaggactccatggtcggtaccctctacgacaaaatgtacgagaactttgtggaagaagtcgatgctgtcgacaatgggatttcccagtgggccgaaggggaaccccggtacgccttaactacgacgctgtccgccagagttgcacgactcaacccaacgtggaatcatcctgaccaggataccgaggctgggtttaaaagggccatggacctggttcaggaagagtttttacaacgactcgacttctaccagcatagttggctaccagctagagccctcgtcgaggaagccttggctcagaggttccaagtggacccgagcggtgaaatcgtggaacttgctaaaggtgcttgtccctggaaagagcacctctaccacctggaatctggactgtcacctccagtcgctattttcttcgtgatttacacggaccaggcaggacagtggcgaattcagtgtgtcccaaaggagcctcactcatttcagtcaagattaccgctccctgagccatggcggggtctccgcgatgaagccttggatcaggtatcgggcatcccaggctgcatttttgtccacgcgagtggatttactggcggacaccacacgcgagagggcgccttatccatggctcgggcaactctcgcccagagaagttatttgccccagatctcatag

SEQ ID NO: 209251 - DNA, 978 bp, Artificial Sequence
  derived and/or modified sequence
atgggccaccagttcctgcggggcctgctgaccctgctgctgccccctcctccactctacacccgacatagaatgctcggacctgagagtgtccccccccccaagcgatcccgttccaaactgatggccccacctaggatcgggacccacaatggcacctttcactgcgatgaggctcttgcttgcgcccttttacggctgctgcccgaataccgggacgctgagatagtccggactcgggatcccgaaaagctagccagctgtgacatagtggtggatgtgggtggggaatatgatcctcggcgacaccggtatgatcaccatcagcggtcattcactgagaccatgagctcactcagtcccgggaagccttggcagactaaactgtcttctgccggcctgatctaccttcattttggccataaactcctggctcaactgctaggaaccagtgaagaagactctatggtgggaaccctgtacgacaaggctgggtttaagcgcgccatggatcttgtgcaggaagaattcctgcagcgactggatttttatcagcacagttggctgcccgcacgagctttggtggaggaggccttagcccagcggtttcaagtagacccctccggagagatagtggaattggccaaaggcgcctgcccttggaaggagcatctttaccatttagagtccggcctgtctcctcccgttgccatttttttcgtaatttatacagaccaggctggccagtggcggattcagtgcgtgcccaaagaaccccattctttccagtcaagattaccgctgcctgagccgtggagggggctgcgcgacgaggctctggatcaggtctctgggataccaggttgcatattcgtccatgcctccggcttcaccggggggcaccacacacgagaaggcgccctgagcatggctcgagccacccttgcgcagagatcatacctcccgcagatatcctag

SEQ ID NO: 209252 - DNA, 1131 bp, Artificial Sequence
  derived and/or modified sequence
atgggccaccagtttctgcgtggcttgttgactctgttgctgccccctccaccattgtacactaggcaccgtatgcttgggccagaatccgtcccccctccgaagcgaagcagaagcaaattaatggccccaccacggattgggactcacaatgggacatttcattgtgacgaggcactagcctgcgccctccttcgtctgctccccgagtaccgggatgccgaaatagtgaggacccgcgaccctgaaaagttggctagttgcgacattgtagtcgacgttgggggtgagtatgatcccagacgtcacaggtacgaccaccaccaacgctccttcacagaaacaatgtcctccctgtcgcctggaaaaccgtggcagactaaactcagctccgctggactgatttacctccacttcggtcataaactgctggcccagctcctcggtacaagcgaagaggattccatggtggggacactttacgacaaaatgtacgagaatttcgtagaggaggtagacgcggtggataatggcatttcccaatgggctgaaggcgaacctcgctatgctttgaccacaactctgtctgcgagagtggctagactaaaccctacgtggaaccaccccgatcaagacacggaggcaggattcaaacgcgctatggatcttgtgcaggaagaatttcttcagagactcgatttctaccaacatagttggctgcctgcacgcgctcttgttgaagaggcactcgctcagcgtttccaagtggatccttccggagaaattgtggaacttgcaaaaggagcgtgtccatggaaagagcacttataccatttagagagtggtttgtcaccacccgtcgctattttttttgtgatatacaccgaccaggcaggacaatggcgcatccagtgtgtgccaaaagagccacatagttttcagagccgactgcctctcccagagccctggcgcggtctgagggatgaggctttggaccaggtttcagggattccaggttgtatcttcgtgcacgcaagtggctttactggagggcatcatactagagagggcgctttatctatggcacgagccaccctcgcgcagagaagctacctgccccagattagttag

SEQ ID NO: 209253 - DNA, 978 bp, Artificial Sequence
  derived and/or modified sequence
atgggtcaccagttccttaggggcctgctgacactgcttctacctccccctccgctgtatacacggcataggatgcttggccctgagtccgtgcctccaccaaaacggagccgctctaaactgatggcacctccacgcataggaacacacaacggcaccttccactgcgatgaggctttagcttgcgcgctgctgaggttactgccggagtaccgagacgccgagattgtgcggacccgcgaccccgagaagctggctagctgcgatatcgtggtggatgtagggggagagtacgatcctagacggcaccgatacgaccaccatcagagatcctttacagaaacaatgagttcactcagccccggaaaaccttggcaaaccaagttaagcagcgcagggcttatttatctccacttcggccataagctcctcgctcaactgcttggcacatctgaggaggattcaatggtaggcacactctacgataaagctgggttcaaacgtgcaatggatctggtccaggaagaattcctgcagagactggatttttatcagcactcatggctgccagccagggcactggtcgaggaggccctcgcacagcggttccaggtagatccatcaggcgaaatcgtggagcttgcgaagggcgcatgtccctggaaggagcacctgtatcaccttgaatctggactttccccgccagtggccatattcttcgtcatctatacagaccaggctggccagtggcgcatccagtgcgtgcccaaagagccacacagctttcagtctcgactgcccttacccgagccctggcgcggtctcagagatgaggccctcgatcaagtcagcggaattcctggctgtattttcgtccatgctagcggattcaccgggggacatcacaccagagagggcgcactgtcaatggccagggccaccctcgcccagcgttcgtatttgccccagatctcttag

SEQ ID NO: 209254 - protein, 738 aa, Artificial Sequence
  derived and/or modified sequence
MAARPLPVSPARALLLALAGALLAPCEARGVSLWNQGRADEVVSASVGSGDLWIPVKSFDSKNHPEVLNIRLQRESKELIINLERNEGLIASSFTETHYLQDGTDVSLARNYTVILGHCYYHGHVRGYSDSAVSLSTCSGLRGLIVFENESYVLEPMKSATNRYKLFPAKKLKSVRGSCGSHHNTPNLAAKNVFPPPSQTWARRHKRETLKATKYVELVIVADNREFQRQGKDLEKVKQRLIEIANHVDKFYRPLNIRIVLVGVEVWNDMDKCSVSQDPFTSLHEFLDWRKMKLLPRKSHDNAQLVSGVYFQGTTIGMAPIMSMCTADQSGGIVMDHSDNPLGAAVTLAHELGHNFGMNHDTLDRGCSCQMAVEKGGCIMNASTGYPFPMVFSSCSRKDLETSLEKGMGVCLFNLPEVRESFGGQKCGNRFVEEGEECDCGEPEECMNRCCNATTCTLKPDAVCAHGLCCEDCQLKPAGTACRDSSNSCDLPEFCTGASPHCPANVYLHDGHSCQDVDGYCYNGICQTHEQQCVTLWGPGAKPAPGICFERVNSAGDPYGNCGKVSKSSFAKCEMRDAKCGKIQCQGGASRPVIGTNAVSIETNIPLQQGGRILCRGTHVYLGDDMPDPGLVLAGTKCADGKICLNRQCQNISVFGVHECAMQCHGRGVCNNRKNCHCEAHWAPPFCDKFGFGGSTDSGPIRQAEARQEAAESNRERGQGQEPVGSQEHASTASLTLI

SEQ ID NO: 209255 - DNA, 2217 bp, Artificial Sequence
  derived and/or modified sequence
atggctgccagaccactgcccgtgtcacctgctagggcgttgctgcttgccttggccggggcattattggccccctgtgaggccaggggtgtgagcctctggaaccagggcagagctgacgaagtggtcagtgcctctgtggggagcggtgacctgtggatcccagtcaagagcttcgatagcaagaaccatcccgaagtattgaatattagacttcaacgggagagtaaggagctgattatcaacttggagcgaaacgaggggctgatcgcatcctcctttacagagacccactatctgcaggatggcaccgatgtgtccctggcccgtaactacacagtgatcctagggcactgctactaccacggtcatgtacgcggttactctgattccgccgtgagcctgtccacatgttctggccttaggggactgatcgtgtttgaaaatgagtcatatgtactggagccaatgaaaagtgccaccaacagatataagcttttcccagccaagaaactcaagagcgttcgtgggtcatgtgggtctcaccacaatactcctaatctggccgccaagaacgtgtttcccccaccaagtcaaacttgggcacgtagacataagagagagaccctgaaagcaaccaaatatgtggaattggtgatagtggcagacaatcgggaatttcaaagacagggcaaagacctggaaaaggtcaaacaacgtctgatcgaaatagccaatcatgtcgataaattctaccgcccattgaatatacgcattgtgctggtgggagtggaggtgtggaacgacatggacaaatgtagcgtgagccaggatccatttactagcctgcatgagtttcttgactggagaaagatgaaactgctgccaaggaagtcacacgataatgctcagctggttagcggagtatattttcaaggcaccaccatcgggatggccccaatcatgagtatgtgtaccgccgaccagtctggaggaatagtgatggaccactcggacaaccccctaggcgccgctgtgacactcgcccacgagctaggacataacttcggtatgaatcacgatacattagataggggctgttcttgccaaatggccgtcgagaagggggggtgcatcatgaacgcatcaacaggatacccttttccaatggtgttctcctcctgctccagaaaggaccttgaaaccagtctggagaaaggaatgggggtctgtctgtttaatctgcccgaggttagagaatcatttgggggacagaagtgtggaaatagatttgttgaggaaggcgaagaatgtgactgcggggagccagaggagtgcatgaatcggtgttgcaacgccactacttgcacactcaagccagacgctgtgtgcgctcatggcctttgttgcgaagattgtcagctcaaacccgccggtaccgcttgcagggatagcagcaattcgtgtgacttgccagaattctgtaccggggcttctccccattgccccgccaatgtgtatctccatgacggccactcgtgccaagatgtcgacgggtattgctataatggcatatgtcagactcacgagcagcagtgcgtaacactgtggggacccggcgctaaacccgcccccggtatttgttttgagcgtgttaactctgcaggggacccatatggaaattgcggcaaagtcagcaagagctcattcgctaaatgtgaaatgcgcgacgccaaatgcggcaagattcagtgtcagggcggggcttccagacccgtgatcggcactaatgcagtgtcaatcgaaacaaacattcctttacagcagggcggccgcatcctttgtagggggacccacgtgtatttaggagatgatatgccggaccccggattggtccttgccggcacgaaatgtgccgatggcaaaatatgcctgaaccgccaatgccaaaacatttcagtttttggcgtgcacgagtgtgccatgcaatgccacggaagaggcgtttgcaataaccgcaagaactgtcattgcgaagcacattgggcgcctccattctgcgataaatttggctttgggggctcaacagattctggccccatcagacaagccgaggcacgacaagaggccgccgaatctaatcgcgagcgcggtcagggacaggagccagttggatcgcaagagcatgccagcaccgcttctctcacccttatctag

SEQ ID NO: 209256 - DNA, 2217 bp, Artificial Sequence
  derived and/or modified sequence
atggccgcccggcccctgcctgtgtccccagcccgggccctgctgctggccctggccggggccctgctggccccctgtgaggcccggggcgtgtccctgtggaaccagggccgggcagatgaggtggtgtctgcctctgtgggcagcggggacctgtggatccctgtgaagagctttgacagcaagaaccaccctgaggtgctgaacatccggctgcagcgggagagcaaggagctgatcatcaacctggagagaaatgaaggcctcatcgccagcagcttcacagagacccactacctgcaggacggcacagatgtgtccctggccaggaactacaccgtcatcctgggccactgctactaccacggccacgtgcggggctacagcgacagcgctgtgtccctgagcacctgcagcggcctgcggggcctgattgtgtttgaaaatgaaagctatgtgctggagcccatgaagagcgccaccaaccgctacaagctgtttcctgccaagaagctgaagtctgtgcggggcagctgtggcagccaccacaacacccccaacctggccgccaagaatgtgtttcctccacccagccagacctgggcccggcggcacaagcgggagaccctgaaggccaccaagtatgtggagctggtgattgtggccgacaaccgggagttccagaggcagggcaaggacctggagaaggtgaagcagaggctcatcgagatcgccaaccacgtggacaagttctaccggcccctgaacatcagaattgtgctggtgggcgtggaggtgtggaatgacatggacaagtgcagcgtgtcccaggaccccttcaccagcctgcacgagttcctggactggaggaagatgaagctgctgcccaggaagagccatgacaatgcccagctggtgtctggagtgtacttccagggcaccaccatcggcatggcccccatcatgtccatgtgcacagctgaccagagcggcggcatcgtgatggaccacagcgacaaccccctgggcgctgctgtgaccctggcccacgagctgggccacaactttggcatgaaccacgacaccctggaccggggctgcagctgccagatggctgtggagaagggcggctgcatcatgaatgccagcacaggctaccccttccccatggtgttcagcagctgcagcaggaaggacctggagaccagcctggagaagggcatgggcgtgtgcctcttcaacctgcctgaggtgcgggagagctttggaggccagaagtgtggcaacagatttgtggaggagggggaggagtgtgactgtggggagcctgaggagtgcatgaaccgctgctgcaatgccaccacctgcaccctgaagccagatgctgtgtgtgcccacggcctgtgctgtgaggactgccagctgaagccagctggaacagcctgccgggacagcagcaacagctgtgacctgcctgagttctgcaccggggccagcccccactgcccagccaacgtgtacctgcatgatggccacagctgccaggatgtggatggctactgctacaacggcatctgccagacccatgagcagcagtgtgtgaccctgtggggccctggggccaagccagcccctggcatctgctttgagcgggtgaacagcgctggggacccctacggcaactgtgggaaggtgtccaagagcagctttgccaagtgtgagatgagagatgccaagtgtgggaagatccagtgccagggcggggccagcaggcctgtgattggcaccaatgctgtgtccattgagaccaacatccccctgcagcagggcggccgcatcctgtgccggggcacccacgtgtacctgggagatgacatgccagaccccggcctggtgctggccggcaccaagtgtgctgatggcaagatctgcctgaaccggcagtgccagaacatctctgtgtttggagtgcatgaatgtgccatgcagtgccacggccggggcgtgtgcaacaacaggaagaactgccactgtgaggcccactgggccccacccttctgtgacaagtttggatttggaggcagcacagacagcggccccatccggcaggccgaggcccggcaggaggccgctgagagcaaccgggagcggggccagggccaggagcctgtgggcagccaggagcacgccagcacagccagcctgaccctcatctag

SEQ ID NO: 209257 - DNA, 2217 bp, Artificial Sequence
  derived and/or modified sequence
atggccgcccggcccctgcccgtgagccccgcccgggccctgctgctggccctcgccggggcccttctcgccccttgtgaggccaggggggtgagtctgtggaatcaagggagggctgacgaagtggtgagtgcctcagtgggtagtggtgatttgtggattcccgtgaaatccttcgattctaagaatcatcctgaggttctcaatatccggctgcaaagagagagtaaggagcttattattaacctggagcgtaatgagggtctgattgcgtcttccttcactgagacgcattacctgcaggatgggactgacgttagcttagcccgcaattacaccgtgatcctagggcactgttactaccacggccacgtgcggggttatagtgactctgcagtctccctctctacctgctctggacttcgtggcttaatcgtgtttgaaaatgaatcctacgtcctcgagccaatgaaatccgccaccaatcgttacaagctgtttcctgcgaaaaagttaaagtccgtgaggggctcctgtggcagccaccataacacacccaatctggcagccaaaaatgtgtttcctccaccctcccagacctgggcccgtcggcataagagagaaacgctcaaggctacaaaatacgttgaactcgtcatagttgcggacaaccgagagttccagcggcagggtaaggaccttgaaaaggttaaacagaggttgatcgaaatagctaaccacgtggacaagttctaccgacccctgaacatacgcatcgtactggttggggtggaggtctggaatgatatggacaagtgctcggtcagtcaggatcctttcacatctcttcacgaattcctggattggagaaaaatgaaactgctcccccggaagagccatgataatgcccagctggtttcaggggtatattttcagggcacaactatcggcatggcacctatcatgtcaatgtgcacggctgaccaatctggcggaatcgtcatggatcactcagataacccactgggggcagctgtcactctggcccatgagctcggccacaacttcggtatgaatcacgatacactagatcgggggtgttcttgtcagatggccgttgaaaaggggggttgtattatgaacgcctctactggatatccattccccatggtattctctagttgttcccggaaagacctggagacctccctggaaaaaggtatgggcgtctgcttattcaacttgcctgaggtccgagaatctttcgggggccagaaatgcggcaatcgttttgtggaggagggggaggaatgcgactgtggagaacccgaggaatgtatgaaccgttgttgtaacgccaccacctgtaccctgaagcccgacgccgtttgcgcacacggcctgtgttgcgaggactgtcaactgaagcccgccggaactgcttgtagagactccagtaattcctgtgaccttcctgagttctgtaccggtgcgagcccgcactgccctgcgaacgtctatctgcatgacggtcacagctgccaggacgtggatgggtactgctataatgggatctgccaaacacacgaacaacagtgcgtgacattgtggggtcccggagctaagcccgcccccgggatctgcttcgagcgagtcaattccgcaggggacccctacggcaattgtgggaaagtttcaaaatccagctttgcaaaatgcgagatgcgggacgccaagtgcggtaaaatccagtgtcaaggcggtgctagcaggcctgtgatcggaaccaacgccgtatccatcgagaccaacattcccctacaacagggaggccgcatcctgtgtcgcggcacacacgtatacctgggggacgatatgcctgatcccggtctcgtgttggcgggtacgaagtgtgctgatgggaagatctgtctcaaccggcagtgccagaacatctcggtcttcggcgtacatgagtgtgccatgcagtgtcacggacggggcgtgtgtaacaaccggaaaaactgccattgcgaagcacactgggcacctccgttctgcgataagttcggatttggggggagtactgattccggacctataaggcaggccgaagcccgccaggaagccgctgaaagtaacagggaaagaggacaggggcaggaacctgtcggcagccaggagcacgcgtctacagccagcctgacccttatctag

SEQ ID NO: 209258 - DNA, 2217 bp, Artificial Sequence
  derived and/or modified sequence
atggccgcacgaccgctgcctgtctctccagccagggcccttctccttgcgttggctggagcactcctggcaccctgtgaggccagaggtgtctctctttggaaccaagggcgagctgacgaagtggtgtccgcctctgtcgggagcggggatctgtggatccccgtgaaaagctttgactccaagaaccatccggaggtactgaacattagactgcagcgggagtccaaggagctgattataaacctggaacgcaacgaagggctcatagccagtagtttcacagagacacactaccttcaggacggaactgatgtctcacttgctagaaattataccgtgattctgggtcactgctattatcacggtcacgtgagaggctatagcgactccgctgtctctctcagtacatgttctgggctccgcggtcttatcgtgttcgaaaatgagtcatatgtgctggagcctatgaagtcagccaccaatagatataagcttttccccgctaaaaagcttaaaagcgtgagaggctcgtgcgggtcacaccataatactcccaatctagccgctaaaaatgtgttcccgcctccttcccagacctgggcccgacggcacaaaagagagaccctgaaagcgacgaaatatgtcgaacttgtgattgtggccgataatcgggagtttcagagacagggaaaggacctcgagaaagtcaagcagcgcctcatcgaaatcgcaaatcacgtggacaagttttatcgtcctttgaatatccgaattgtgttagtgggcgtggaagtgtggaacgacatggataagtgctcagtgtctcaggatccctttaccagcttgcacgagtttttggattggagaaagatgaaactgctccctcgcaaatctcatgataatgcacagctggtctccggagtctatttccagggtacaactattggcatggctcctatcatgtccatgtgcaccgcggaccagtcaggcggaatcgtgatggaccactctgacaaccctttgggtgccgctgttacgctagctcacgagctgggccacaactttgggatgaaccacgatacactcgacagaggctgttcgtgtcagatggcggtggagaaaggcggttgtataatgaacgccagcaccggataccctttccctatggtgttctcaagctgctcccgaaaagacttggagacgtcccttgaaaaaggaatgggagtctgtctattcaatctgcccgaggtaagggaatcttttggtggacaaaaatgtggaaatcgcttcgttgaggagggtgaagagtgcgactgcggggaaccagaagaatgcatgaatcgctgctgtaacgcaacgacgtgtacattaaagcccgacgccgtgtgtgctcacgggctgtgctgtgaagattgccagctaaagcccgctggcacagcctgccgggatagttcgaactcctgcgacctgcctgaattctgtaccggggcttcgccacattgcccggcaaacgtctatctgcacgacggccacagctgtcaggatgtggatggttactgttataacgggatctgccagacacatgaacagcagtgtgtcaccctatggggcccaggcgctaagccagcccctggcatttgtttcgagagggtcaacagcgcgggtgacccctatggcaactgcgggaaggtctcaaagtcttcattcgcaaaatgcgagatgcgagacgcaaagtgcgggaagatccagtgtcagggcggagcctctagacccgttattgggacaaatgctgtgtctattgaaaccaacatccctctccagcaggggggacggattttgtgtcgtgggacacacgtctatttgggcgacgatatgcctgatcccggattggttctggccggaacaaaatgcgcagacggcaaaatctgcctcaaccgtcagtgccaaaatatatccgtcttcggagtccacgaatgcgcgatgcagtgccacgggaggggggtctgcaacaaccggaagaattgtcattgcgaagcccattgggcccctcccttctgcgacaaatttgggtttggcggttcaactgattccgggccaatcagacaggccgaagccaggcaggaggctgccgaaagcaaccgggagagaggacagggccaggagcccgtggggtcccaggaacacgcttctacagcgtccctgacgttaatctag

SEQ ID NO: 209259 - DNA, 2217 bp, Artificial Sequence
  derived and/or modified sequence
atggccgccagacccctgcccgtgagccccgccagagccctgctgctggccctggccggcgccctgctggccccctgcgaggccagaggcgtgagcctgtggaaccagggcagagccgacgaggtggtgagcgccagcgtgggcagcggcgacctgtggatccccgtgaagagcttcgacagcaagaaccaccccgaggtgctgaacatcagactgcagagagagagcaaggagctgatcatcaacctggagagaaacgagggcctgatcgccagcagcttcaccgagacccactacctgcaggacggcaccgacgtgagcctggccagaaactacaccgtgatcctgggccactgctactaccacggccacgtgagaggctacagcgacagcgccgtgagcctgagcacctgcagcggcctgagaggcctgatcgtgttcgagaacgagagctacgtgctggagcccatgaagagcgccaccaacagatacaagctgttccccgccaagaagctgaagagcgtgagaggcagctgcggcagccaccacaacacccccaacctggccgccaagaacgtgttccccccccccagccagacctgggccagaagacacaagagagagaccctgaaggccaccaagtacgtggagctggtgatcgtggccgacaacagagagttccagagacagggcaaggacctggagaaggtgaagcagagactgatcgagatcgccaaccacgtggacaagttctacagacccctgaacatcagaatcgtgctggtgggcgtggaggtgtggaacgacatggacaagtgcagcgtgagccaggaccccttcaccagcctgcacgagttcctggactggagaaagatgaagctgctgcccagaaagagccacgacaacgcccagctggtgagcggcgtgtacttccagggcaccaccatcggcatggcccccatcatgagcatgtgcaccgccgaccagagcggcggcatcgtgatggaccacagcgacaaccccctgggcgccgccgtgaccctggcccacgagctgggccacaacttcggcatgaaccacgacaccctggacagaggctgcagctgccagatggccgtggagaagggcggctgcatcatgaacgccagcaccggctaccccttccccatggtgttcagcagctgcagcagaaaggacctggagaccagcctggagaagggcatgggcgtgtgcctgttcaacctgcccgaggtgagagagagcttcggcggccagaagtgcggcaacagattcgtggaggagggcgaggagtgcgactgcggcgagcccgaggagtgcatgaacagatgctgcaacgccaccacctgcaccctgaagcccgacgccgtgtgcgcccacggcctgtgctgcgaggactgccagctgaagcccgccggcaccgcctgcagagacagcagcaacagctgcgacctgcccgagttctgcaccggcgccagcccccactgccccgccaacgtgtacctgcacgacggccacagctgccaggacgtggacggctactgctacaacggcatctgccagacccacgagcagcagtgcgtgaccctgtggggccccggcgccaagcccgcccccggcatctgcttcgagagagtgaacagcgccggcgacccctacggcaactgcggcaaggtgagcaagagcagcttcgccaagtgcgagatgagagacgccaagtgcggcaagatccagtgccagggcggcgccagcagacccgtgatcggcaccaacgccgtgagcatcgagaccaacatccccctgcagcagggcggcagaatcctgtgcagaggcacccacgtgtacctgggcgacgacatgcccgaccccggcctggtgctggccggcaccaagtgcgccgacggcaagatctgcctgaacagacagtgccagaacatcagcgtgttcggcgtgcacgagtgcgccatgcagtgccacggcagaggcgtgtgcaacaacagaaagaactgccactgcgaggcccactgggccccccccttctgcgacaagttcggcttcggcggcagcaccgacagcggccccatcagacaggccgaggccagacaggaggccgccgagagcaacagagagagaggccagggccaggagcccgtgggcagccaggagcacgccagcaccgccagcctgaccctgatctag

SEQ ID NO: 209260 - DNA, 3313 bp, Artificial Sequence
  derived and/or modified sequence
cactaacgctcttcctagtccccgggccaactcggacagtttgctcatttattgcaacggtcaaggctggcttgtgccagaacggcgcgcgcgcgcgcacgcacgcacacacacggggggaaacttttttaaaaatgaaaggctagaagagctcagcggcggcgcgggcgctgcgcgagggctccggagctgactcgccgaggcaggaaatccctccggtcgcgacgcccggccccggctcggcgcccgcgtgggatggtgcagcgctcgccgccgggcccgagagctgctgcactgaaggccggcgacgatggcagcgcgcccgctgcccgtgtcccccgcccgcgccctcctgctcgccctggccggtgctctgctcgcgccctgcgaggcccgaggggtgagcttatggaaccaaggaagagctgatgaagttgtcagtgcctctgttgggagtggggacctctggatcccagtgaagagcttcgactccaagaatcatccagaagtgctgaatattcgactacaacgggaaagcaaagaactgatcataaatctggaaagaaatgaaggtctcattgccagcagtttcacggaaacccactatctgcaagacggtactgatgtctccctcgctcgaaattacacggtaattctgggtcactgttactaccatggacatgtacggggatattctgattcagcagtcagtctcagcacgtgttctggtctcaggggacttattgtgtttgaaaatgaaagctatgtcttagaaccaatgaaaagtgcaaccaacagatacaaactcttcccagcgaagaagctgaaaagcgtccggggatcatgtggatcacatcacaacacaccaaacctcgctgcaaagaatgtgtttccaccaccctctcagacatgggcaagaaggcataaaagagagaccctcaaggcaactaagtatgtggagctggtgatcgtggcagacaaccgagagtttcagaggcaaggaaaagatctggaaaaagttaagcagcgattaatagagattgctaatcacgttgacaagttttacagaccactgaacattcggatcgtgttggtaggcgtggaagtgtggaatgacatggacaaatgctctgtaagtcaggacccattcaccagcctccatgaatttctggactggaggaagatgaagcttctacctcgcaaatcccatgacaatgcgcagcttgtcagtggggtttatttccaagggaccaccatcggcatggccccaatcatgagcatgtgcacggcagaccagtctgggggaattgtcatggaccattcagacaatccccttggtgcagccgtgaccctggcacatgagctgggccacaatttcgggatgaatcatgacacactggacaggggctgtagctgtcaaatggcggttgagaaaggaggctgcatcatgaacgcttccaccgggtacccatttcccatggtgttcagcagttgcagcaggaaggacttggagaccagcctggagaaaggaatgggggtgtgcctgtttaacctgccggaagtcagggagtctttcgggggccagaagtgtgggaacagatttgtggaagaaggagaggagtgtgactgtggggagccagaggaatgtatgaatcgctgctgcaatgccaccacctgtaccctgaagccggacgctgtgtgcgcacatgggctgtgctgtgaagactgccagctgaagcctgcaggaacagcgtgcagggactccagcaactcctgtgacctcccagagttctgcacaggggccagccctcactgcccagccaacgtgtacctgcacgatgggcactcatgtcaggatgtggacggctactgctacaatggcatctgccagactcacgagcagcagtgtgtcacgctctggggaccaggtgctaaacctgcccctgggatctgctttgagagagtcaattctgcaggtgatccttatggcaactgtggcaaagtctcgaagagttcctttgccaaatgcgagatgagagatgctaaatgtggaaaaatccagtgtcaaggaggtgccagccggccagtcattggtaccaatgccgtttccatagaaacaaacatccccctgcagcaaggaggccggattctgtgccgggggacccacgtgtacttgggcgatgacatgccggacccagggcttgtgcttgcaggcacaaagtgtgcagatggaaaaatctgcctgaatcgtcaatgtcaaaatattagtgtctttggggttcacgagtgtgcaatgcagtgccacggcagaggggtgtgcaacaacaggaagaactgccactgcgaggcccactgggcacctcccttctgtgacaagtttggctttggaggaagcacagacagcggccccatccggcaagcagaagcaaggcaggaagctgcagagtccaacagggagcgcggccagggccaggagcccgtgggatcgcaggagcatgcgtctactgcctcactgacactcatctgagccctcccatgacatggagaccgtgaccagtgctgctgcagaggaggtcacgcgtccccaaggcctcctgtgactggcagcattgactctgtggctttgccatcgtttccatgacaacagacacaacacagttctcggggctcaggaggggaagtccagcctaccaggcacgtctgcagaaacagtgcaaggaagggcagcgacttcctggttgagcttctgctaaaacatggacatgcttcagtgctgctcctgagagagtagcaggttaccactctggcaggccccagccctgcagcaaggaggaagaggactcaaaagtctggcctttcactgagcctccacagcagtgggggagaagcaagggttgggcccagtgtcccctttccccagtgacacctcagccttggcagccctgatgactggtctctggctgcaacttaatgctctgatatggcttttagcatttattatatgaaaatagcagggttttagtttttaatttatcagagaccctgccacccattccatctccatccaagcaaactgaatggcaatgaaacaaactggagaagaaggtaggagaaagggcggtgaactctggctctttgctgtggacatgcgtgaccagcagtactcaggtttgagggtttgcagaaagccagggaacccacagagtcaccaacccttcatttaacaagtaagaatgttaaaaagtgaaaacaatgtaagagcctaactccatcccccgtggccattactgcataaaatagagtgcatttgaaa

SEQ ID NO: 209261 - protein, 316 aa, Artificial Sequence
  derived and/or modified sequence
MTMETQMSQNVCPRNLWLLQPLTVLLLLASADSQAAPPKAVLKLEPPWINVLQEDSVTLTCQGARSPESDSIQWFHNGNLIPTHTQPSYRFKANNNDSGEYTCQTGQTSLSDPVHLTVLSEWLVLQTPHLEFQEGETIMLRCHSWKDKPLVKVTFFQNGKSQKFSHLDPTFSIPQANHSHSGDYHCTGNIGYTLFSSKPVTITVQVPSMGSSSPMGIIVAVVIATAVAAIVAAVVALIYCRKKRISANSTDPVKAAQFEPPGRQMIAIRKRQLEETNNDYETADGGYMTLNPRAPTDDDKNIYLTLPPNDHVNSNN

SEQ ID NO: 209262 - DNA, 177 bp, Artificial Sequence
  derived and/or modified sequence
aattcgacagatccagtgaaagctgcgcaattcgagatgtcaaatcccagccatttgcttttttttctcccttgtcccttctctcctgtgtcttctctgttcgctttcgtaaatgcgaagcttaagtggcggctgggacttaaaactcccgagcagactaagccacccggcccatag

SEQ ID NO: 209263 - DNA, 177 bp, Artificial Sequence
  derived and/or modified sequence
aacagcacagatcctgtgaaggccgcccagtttgagatgagcaaccccagccacctgctcttcttcctgccctgccccttcagccctgtgagcagcctgtttgcctttgtgaatgccaagctgaagtggaggctgggcctgaagaccccagagcagaccaagcccccaggcccctag

SEQ ID NO: 209264 - DNA, 177 bp, Artificial Sequence
  derived and/or modified sequence
aacagcaccgaccccgtgaaggccgcccagttcgagatgagcaacccgagccacctcctcttctttctcccttgtcctttttctcccgtgagctctctcttcgctttcgttaatgccaaactgaagtggagactgggactgaaaacaccagagcagactaagcctcctggcccctag

SEQ ID NO: 209265 - DNA, 1399 bp, Artificial Sequence
  derived and/or modified sequence
gtctcttaaaacccactggacgttggcacagtgctgggatgactatggagacccaaatgtctcagaatgtatgtcccagaaacctgtggctgcttcaaccattgacagttttgctgctgctggcttctgcagacagtcaagctgctcccccaaaggctgtgctgaaacttgagcccccgtggatcaacgtgctccaggaggactctgtgactctgacatgccagggggctcgcagccctgagagcgactccattcagtggttccacaatgggaatctcattcccacccacacgcagcccagctacaggttcaaggccaacaacaatgacagcggggagtacacgtgccagactggccagaccagcctcagcgaccctgtgcatctgactgtgctttccgaatggctggtgctccagacccctcacctggagttccaggagggagaaaccatcatgctgaggtgccacagctggaaggacaagcctctggtcaaggtcacattcttccagaatggaaaatcccagaaattctcccatttggatcccaccttctccatcccacaagcaaaccacagtcacagtggtgattaccactgcacaggaaacataggctacacgctgttctcatccaagcctgtgaccatcactgtccaagtgcccagcatgggcagctcttcaccaatggggatcattgtggctgtggtcattgcgactgctgtagcagccattgttgctgctgtagtggccttgatctactgcaggaaaaagcggatttcagccaattccactgatcctgtgaaggctgcccaatttgagccacctggacgtcaaatgattgccatcagaaagagacaacttgaagaaaccaacaatgactatgaaacagctgacggcggctacatgactctgaaccccagggcacctactgacgatgataaaaacatctacctgactcttcctcccaacgaccatgtcaacagtaataactaaagagtaacgttatgccatgtggtcatactctcagcttgctgagtggatgacaaaaagaggggaattgttaaaggaaaatttaaatggagactggaaaaatcctgagcaaacaaaaccacctggcccttagaaatagctttaactttgcttaaactacaaacacaagcaaaacttcacggggtcatactacatacaagcataagcaaaacttaacttggatcatttctggtaaatgcttatgttagaaataagacaaccccagccaatcacaagcagcctactaacatataattaggtgactagggactttctaagaagatacctacccccaaaaaacaattatgtaattgaaaaccaaccgattgcctttattttgcttccacattttcccaataaatacttgcctgtga

SEQ ID NO: 209266 - DNA, 951 bp, Artificial Sequence
  derived and/or modified sequence
atgacaatggagacccaaatgtcgcagaacgtgtgtccacgtaacctgtggttgctgcaaccactgacagtgctcctgctgctcgcaagcgcggactcacaggccgcaccaccaaaagccgtgctgaagttggaaccgccatggattaacgtgttacaggaagattccgtcacactgacctgccaaggtgcccgttctcccgagtctgattcaatacaatggttccacaacgggaatctaatccccactcacacacagccgtcgtaccgcttcaaggctaataacaatgacagtggagagtatacttgccaaaccgggcagacatcactgagcgatcccgtccacctgaccgttctgtcggagtggctggtcctgcagaccccccacttagagtttcaggaaggcgaaactatcatgctgcggtgccattcttggaaagataagccactggtaaaggtcacgttctttcaaaatggtaaatcacagaagtttagccacctggacccaactttcagtatacctcaggccaaccacagccattctggcgactatcattgcacggggaacatcggctacactttgtttagctccaaacccgttaccatcactgtgcaggtgccaagtatgggttccagcagccctatgggcataatagtggcagtcgtgatcgctacagccgtggctgccatcgttgccgcagtagttgctctaatctattgtcgcaagaaaaggatttcagcaaactctaccgaccccgtgaaggcagcccagttcgagccccctggcaggcagatgattgccataagaaaaaggcaattggaggagaccaacaatgattacgaaacagccgatggcggctatatgactttgaatcctagggctccaacggatgacgataaaaacatatatctgaccttacctcccaacgaccatgtgaactcgaacaattag

SEQ ID NO: 209267 - DNA, 951 bp, Artificial Sequence
  derived and/or modified sequence
atgaccatggagacccagatgagccagaatgtgtgccccaggaacctgtggctgctgcagcccctgactgtgctgctgctgctggccagcgctgacagccaggccgccccacccaaggctgtgctgaagctggagcccccctggatcaacgtgctgcaggaggacagcgtgaccctgacctgccagggcgcccggagccctgagagtgacagcatccagtggttccacaatggaaacctgatccccacccacacccagcccagctaccgcttcaaggccaacaacaatgacagcggggagtacacctgccagacaggccagaccagcctgagtgaccctgtgcacctgactgtgctgtctgagtggctggtgctgcagaccccccacctggagttccaggagggggagaccatcatgctgcgctgccacagctggaaggacaagcccctggtgaaggtgaccttcttccagaatggcaagagccagaagttcagccacctggaccccaccttcagcatcccccaggccaaccacagccacagcggggactaccactgcaccggcaacatcggctacaccctcttcagcagcaagcctgtgaccatcaccgtgcaggtgcccagcatgggcagcagcagccccatgggcatcatcgtggccgtggtgattgccacagctgtggccgccatcgtggccgctgtggtggccctgatctactgcaggaagaagaggatcagcgccaacagcacagatcctgtgaaggccgcccagtttgagcccccaggccggcagatgattgccatcaggaagaggcagctggaggagaccaacaatgactatgaaacagcagatggcggctacatgaccctgaacccccgggcccccacagatgatgacaagaacatctacctgaccctgcccccaaatgaccacgtgaacagcaacaactag

SEQ ID NO: 209268 - DNA, 951 bp, Artificial Sequence
  derived and/or modified sequence
atgaccatggagacccagatgagccagaacgtgtgcccccggaacttatggctcctgcagcctcttacagtattgctcctgctggcttcagccgactctcaggcagctcccccaaaggcagtcttgaagctggagccaccatggattaatgtcttacaggaggactctgtaacactaacatgtcaaggagcaagatcaccagagagtgacagcatccaatggttccataatggtaacttaatcccaacccatactcagcctagctaccgcttcaaagcgaacaataacgatagcggggaatacacatgccagactggacagacatcccttagcgacccagtgcatctcacggtgctctccgaatggcttgtgctccagacaccacacctggaattccaggagggcgaaacaattatgcttcgctgtcactcttggaaagacaaacccctggtgaaggtgacgttcttccaaaatggcaagtcccagaagtttagccacctcgaccccacgttttccattcctcaggctaatcatagtcacagtggtgattatcattgtaccggcaacattgggtacaccctctttagttcaaagcccgttaccatcacagttcaggtaccctccatgggtagttcatctcccatgggaataatagtggccgtggtgattgccacagcggtagcggctatcgtggccgcggtggtagctctgatttactgccgaaagaaaagaatttcagcaaatagcactgatcccgtgaaagcagctcagttcgaaccacccgggagacagatgatcgccatcagaaaacgccagctggaagagacaaataatgattatgagaccgcagatgggggttacatgactttaaatcctcgggccccaacagatgacgataagaacatctatctgaccctccccccgaacgatcacgtgaatagcaacaattag

SEQ ID NO: 209269 - DNA, 951 bp, Artificial Sequence
  derived and/or modified sequence
atgacaatggaaacgcagatgtcccagaatgtgtgtcctcgcaacctctggctgctgcaaccactgacagtcctgctcctgctcgccagcgctgactctcaggccgctcctccaaaagccgtattaaaactcgagcccccatggataaacgtgctgcaagaagatagcgtgaccctcacatgtcagggggcaaggtcaccagagtcagatagcatccaatggtttcacaacggcaacctaatccccacccacacacagccgtcttatcgattcaaggccaataataatgattctggcgagtacacttgccaaactgggcagacttccttatcggatcccgtacatctgacagttctgagtgagtggttggtcctccagacccctcatctcgagttccaagagggggagaccataatgctacggtgtcactcatggaaagataagcctctcgttaaggttaccttctttcaaaatggaaagagtcagaagttctcacatcttgatcctactttctcaattccccaagccaatcactcacattctggggactatcattgcacaggcaacatcggatataccctgttctcatcaaagccagtgaccataaccgtccaggtgccctccatgggctcaagtagtcccatgggcatcatcgtcgccgtagttatagctactgccgtagcagctatcgttgccgctgtcgtggctctaatatactgtcggaagaagcggatcagcgcgaattctaccgaccccgtaaaagctgctcagttcgagccccctgggaggcagatgatcgcaattaggaaacgacagctcgaagaaacaaataatgattacgaaaccgccgatggaggctacatgacccttaaccccagggctccgaccgatgatgacaagaacatttatttaaccctgcctccaaacgatcacgtgaatagcaacaactag

SEQ ID NO: 209270 - DNA, 951 bp, Artificial Sequence
  derived and/or modified sequence
atgaccatggagacccagatgagccagaacgtgtgccccagaaacctgtggctgctgcagcccctgaccgtgctgctgctgctggccagcgccgacagccaggccgccccccccaaggccgtgctgaagctggagcccccctggatcaacgtgctgcaggaggacagcgtgaccctgacctgccagggcgccagaagccccgagagcgacagcatccagtggttccacaacggcaacctgatccccacccacacccagcccagctacagattcaaggccaacaacaacgacagcggcgagtacacctgccagaccggccagaccagcctgagcgaccccgtgcacctgaccgtgctgagcgagtggctggtgctgcagaccccccacctggagttccaggagggcgagaccatcatgctgagatgccacagctggaaggacaagcccctggtgaaggtgaccttcttccagaacggcaagagccagaagttcagccacctggaccccaccttcagcatcccccaggccaaccacagccacagcggcgactaccactgcaccggcaacatcggctacaccctgttcagcagcaagcccgtgaccatcaccgtgcaggtgcccagcatgggcagcagcagccccatgggcatcatcgtggccgtggtgatcgccaccgccgtggccgccatcgtggccgccgtggtggccctgatctactgcagaaagaagagaatcagcgccaacagcaccgaccccgtgaaggccgcccagttcgagccccccggcagacagatgatcgccatcagaaagagacagctggaggagaccaacaacgactacgagaccgccgacggcggctacatgaccctgaaccccagagcccccaccgacgacgacaagaacatctacctgaccctgccccccaacgaccacgtgaacagcaacaactag

SEQ ID NO: 209271 - protein, 343 aa, Artificial Sequence
  derived and/or modified sequence
MNIHRSTPITIARYGRSRNKTQDFEELSSIRSAEPSQSFSPNLGSPSPPETPNLSHCVSCIGKYLLLEPLEGDHVFRAVHLHSGEELVCKVFDISCYQESLAPCFCLSAHSNINQITEIILGETKAYVFFERSYGDMHSFVRTCKKLREEEAARLFYQIASAVAHCHDGGLVLRDLKLRKFIFKDEERTRVKLESLEDAYILRGDDDSLSDKHGCPAYVSPEILNTSGSYSGKAADVWSLGVMLYTMLVGRYPFHDIEPSSLFSKIRRGQFNIPETLSPKAKCLIRSILRREPSERLTSQEILDHPWFSTDFSVSNSAYGAKEVSDQLVPDVNMEENLDPFFN

SEQ ID NO: 209272 - DNA, 1032 bp, Artificial Sequence
  derived and/or modified sequence
atgaatatccataggagcacaccaatcacaatcgccaggtatgggagaagtcggaataagactcaagatttcgaggaactgtctagtattcggtccgcagagccatcacaaagcttctctcccaacctgggctctccttccccccccgaaacacccaacctgtcacattgcgtgagctgtatcggaaaatatcttctgctcgaacctttagaaggtgaccatgtgtttagggccgtacacctccattcaggagaggaactagtgtgtaaggtgttcgacatctcttgttaccaagaatcgttggctccgtgcttttgtcttagtgctcatagcaatataaatcagataacggaaattatattaggagaaacaaaggcctatgtgttcttcgagcggtcctatggcgatatgcattcattcgttcgcacgtgtaagaaactgcgcgaggaagaagctgccaggctgttttaccagatagcatcagccgttgcccactgccacgacggaggattagtgttaagggacctgaagcttagaaagtttattttcaaggatgaggagcggactagagtgaagctggagtccctggaggacgcctacattttgcgcggcgatgatgactcactatctgacaaacatggctgccccgcttatgtctctcctgaaatcttaaataccagtggcagctattctggtaaagccgccgatgtgtggtccctgggtgtgatgttgtatactatgttggtgggaagatacccatttcatgacatcgaaccgtccagtttgtttagcaaaattagaagagggcaatttaacattcctgagacactgagcccaaaggctaagtgtctgattaggtcaatactgcgacgggagccttctgagaggctgacctcacaggagattctcgaccacccttggttctccacggacttcagcgtctcaaattctgcatatggggcaaaggaagtgtcagaccagctggtccccgacgtcaatatggaagaaaacctcgatcctttcttcaactag

SEQ ID NO: 209273 - DNA, 4391 bp, Artificial Sequence
  derived and/or modified sequence
ggggggggcggaggctccgtggaaatgtgtcggtgacattgaatggggagaccgagcgcgagcgaggcgcgcgcgcgcacacgcgcactcacggccccgctcgctccgagatccccggccacgtaagtaactattaataccgcctcgccgggggatgcgggcgtgctgagcgcggggattggcctcgggcaccgtcggccgtcccctttaatttttaaatacacggtcccctcttttctctggggggggcaagcaagaaatcaaagaaggaggagacaagccgtcaattttctccaaaacaaaccccaccgggcaatttggtctcggggtagggggagacggggtgattgcaaattattccaggacgagatccagttctccagcgggaaaggggcaaaggaacgccgcgcgttggaagggccagggacgcagctccccttgcagcgcccgcaggacccccgcaagctcgtgccggcgaaatcggagaccgccgatctgtcctcgttctctcctgcacgtctggctgcattcggaggaagacctggggcgcgagcgagcggcgacagcatgagcctgtgctgacctccgcgcggcgggccgagcccagggctttgtcgcggtacctgcgcccagcccgcgccgcaactctgtgcccagcttttgcaatcttttgttggcagcgctgaccgcaccaagttaaatgctcccttgcaatttttcttttttttgtttgtttgtttaatttttggagagctcgcgatcttggaaaagcctcagacgccatctacagttaaaacgtaggtaactgccctctcccgcaccccccccttacacgccccccaccctttccaccaaaaaaagggggtgcagcgcggattctggctgccgtgcgtcgccagccggtagacccgtgcttgtttcctttctctttttgtttggcttctaacgcgttgggactgagtcgccgccgtgagctccccgaagactgcacaaactaccgcgggctcctccgccccgtctgcgattcggaagccggcctgggggtcgcgtcgggagccctggcgctgcagctccgcaccttagcagcccgggtactcatccagatccacgccggggacacacacacagagtaactaaaagtgcggcgattctgcacatcgccgactgctttggggtaacaaaaagacccgagttgcctgccgaccgaggacccccgggagccgggctcggagcagacgaggtatccggcggcgcccatttgggggcttctaactctttctccacgcagcccctcttctgtcccctcccctctcgctcccttttaaaatcagtggcaccgaggcgcctgcagccgcactcgccagcgactcatctctccagcgggtttttttttgtttgtcgtgtgcgatcctcacactcatgaacatacacaggtctacccccatcacaatagcgagatatgggagatcgcggaacaaaacccaggatttcgaagagttgtcgtctataaggtccgcggagcccagccagagtttcagcccgaacctcggctccccgagcccgcccgagactccgaacttgtcgcattgcgtttcttgtatcgggaaatacttattgttggaacctctggagggagaccacgtttttcgtgccgtgcatctgcacagcggagaggagctggtgtgcaaggtgtttgatatcagctgctaccaggaatccctggcaccgtgcttttgcctgtctgctcatagtaacatcaaccaaatcactgaaattatcctgggtgagaccaaagcctatgtgttctttgagcgaagctatggggacatgcattccttcgtccgcacctgcaagaagctgagagaggaggaggcagccagactgttctaccagattgcctcggcagtggcccactgccatgacggggggctggtgctgcgggacctcaagctgcggaaattcatctttaaggacgaagagaggactcgggtcaagctggaaagcctggaagacgcctacattctgcggggagatgatgattccctctccgacaagcatggctgcccggcttacgtaagcccagagatcttgaacaccagtggcagctactcgggcaaagcagccgacgtgtggagcctgggggtgatgctgtacaccatgttggtggggcggtaccctttccatgacattgaacccagctccctcttcagcaagatccggcgtggccagttcaacattccagagactctgtcgcccaaggccaagtgcctcatccgaagcattctgcgtcgggagccctcagagcggctgacctcgcaggaaattctggaccatccttggttttctacagattttagcgtctcgaattcagcatatggtgctaaggaagtgtctgaccagctggtgccggacgtcaacatggaagagaacttggaccctttctttaactgagctcatgccccacggagacttagcaggttccaggagtgagcgagggcagcggaaaggagttcttccgggggacacgaattgcctggctgagtagcaagaaagacacactcttaagtttcttggttcagagcaggaaaaccttcaaggagctgactgaccacgtagcatgggggcaagaggcgtgggatggggattggggtgagatggatgggagcccgctggagcttgtcttccctaacatagcctgggagaccaccccttgccacttgggccacttccgcctaccccacttttcattttgttccaaaatagttgcagatcctgacagaatcaaaactctctgcctcaaacacacatcctggcatcgcactgttagcatttaacttcttgttaggattcagggaaggaacagttggccaagaattttttttcttttaaacaagccaaccacctagctggtaattaatgaggttcacttaaaaaaaaaattcggtgcacacagactgacatgaaacctgggtgctacagtaaaagaaaacaaaagtccagtttgtgtctcttaatcgctcacttcaactcatttcttctaaataaactatttaatatcctggtcaggaaatgacatgttaatgctttgctccctgaagggggaaaaaatctgtcctttaacaagctattctgttttgtgtcaattggttcgtggcaggaagctattagaagtcaaacgtccagatgcattactgctatcttagtttaaagggggaaagaaaagggaagaagaaaggaaaagagaaatccaactcctttttcatgttttgcttttgaacaatgagggtttgtgtgacaggcattcctctttgctgagatgatagcaatggcctgagattttagcaagctcctggagtctgatgcttttgcagtactctgatcgcaactaaacatttgtctttgttttattagaaactagtgaaacaaagcaggttgtcccacatgtataaaatacagggcagctatttagttttctttacagagaatgatccttttaaggcttgtaaggccctctggtttggacaaaaaccctcagtagagacaagcgggaaggataattagctgaaagctatgatgatataaataaaaacagctctctatcccaatacgcacctttgtattttcaagaactcttctatttattaaggaaaatgtcacattgtgatgtattaagccagtacttcaattacgggttgacttgggatgacatattacatgctgtagttaacatttataattctttttccttgtttgagtatttctgtctctgaaataaccttttacttggcttttctagatagctttatttgatttcgagtggcaaaatgttttttattacggcttttctattgctgtatgatacagaactcttttggcataaatatttgtgttcccagtacctcacttgttcggatttgactgcctgtatatgttttgtgaaatggtcctgtttttgggtaggtgacacgtggactctagtatgtaaatgttacttgaatctgtgcttcataatagtgtgtggcatgtatgtgcagactcttggatgctttatgcctgcgcagcaggagccctgtcctcacgttcccaggagggcggcttcacccttcgtaaccaggagacaaggcggccatggatttgcccttgattctattttgctaatggaagatagaaaggagagaaggttttttttttttttaacattctgaagatggtgctgtgtcaagaaggaccttttttttcccctctcccctattttttaagtaccttggaggaggagaggttggtgacatgcatggtggggatctatggcctctggtgctttgtcctgtatttggtttaatgtttttgtcctaatctcttcaatcaataaaattgtgcgtatttaactaaaa

SEQ ID NO: 209274 - DNA, 1032 bp, Artificial Sequence
  derived and/or modified sequence
atgaacatccacaggagcacccccatcaccatcgcccgctatggccgcagcaggaacaagacccaggactttgaggagctgagcagcatccgctctgctgagcccagccagagcttcagccccaacctgggcagccccagccccccagagacccccaacctgagccactgtgtgtcctgcatcggcaagtacctgctgctggagcccctggagggggaccacgtgttccgggctgtgcacctgcacagcggggaggagctggtgtgcaaggtgtttgacatcagctgctaccaggagagcctggccccctgcttctgcctgagcgcccacagcaacatcaaccagatcacagagatcatcctgggggagaccaaggcctacgtgttctttgagaggagctatggagacatgcacagctttgtgaggacctgcaagaagctgcgggaggaggaggccgcccggctcttctaccagatcgccagcgctgtggcccactgccatgatggcggcctggtgctgcgggacctgaagctgaggaagttcatcttcaaggatgaggagaggaccagggtgaagctggagagcctggaggatgcctacatcctgcggggagatgatgacagcctgagtgacaagcacggctgcccagcctacgtgtccccagagatcctgaacaccagcggcagctacagcggcaaggctgctgatgtgtggagcctgggcgtgatgctgtacaccatgctggtgggccgctaccccttccatgacatcgagcccagcagcctcttcagcaagatcagaagaggccagttcaacatccctgagaccctgagccccaaggccaagtgcctgatccgcagcatcctgcggcgggagcccagcgagcggctgaccagccaggagatcctggaccacccctggttcagcacagacttctctgtgagcaacagcgcctatggagccaaggaggtgtctgaccagctggtgcctgatgtgaacatggaggagaacctggaccccttcttcaactag

SEQ ID NO: 209275 - DNA, 1032 bp, Artificial Sequence
  derived and/or modified sequence
atgaacatccaccggagcacccccatcaccatcgcccggtacggcagatctcgtaataagacccaggacttcgaggaactctcctccatccgcagcgctgagcctagccagtcattctcccccaacctgggaagcccttctccccccgagacacctaacctatcccattgcgtatcctgcatcggcaaataccttcttctggaacctctggagggcgaccacgttttcagggcagtccacctccatagcggcgaggaactagtctgcaaagtctttgacattagttgttaccaggagtccctggccccttgtttctgcctatcggcgcacagcaacattaaccagattactgagattatcctgggagagacgaaagcatatgtatttttcgagagaagttatggtgatatgcattctttcgtgcggacttgcaaaaagcttcgtgaggaagaggcagccagactgttctaccagattgcatcagccgttgctcattgtcacgacggaggcctggtgctgagagatttgaaactgaggaagttcatcttcaaagacgaggaacgtactcgagtcaaactggaaagcctggaagatgcttacattctccgaggagacgacgactccttgagcgataagcacggttgccctgcttacgtctcccccgagatcttaaacaccagtggttcttacagtgggaaagctgccgatgtctggtctctcggtgtcatgttgtacacaatgttagttggaaggtacccgtttcatgatatagagcccagttccctcttctccaagatccgacggggccaattcaacattcctgagacgctgtcaccgaaagccaaatgtctgatacgcagcatcttgcggagggaacccagtgaaagattgaccagccaagagattctcgatcatccatggtttagcaccgacttctccgttagcaacagcgcatacggtgctaaggaggtgtctgatcagcttgtgcccgatgtgaatatggaagaaaacctcgacccgttcttcaattag

SEQ ID NO: 209276 - DNA, 1032 bp, Artificial Sequence
  derived and/or modified sequence
atgaacatccacagaagcactcccatcacaattgcaagatatggcagaagtcgaaataagacccaggacttcgaagagctgtcctccataagaagtgccgaaccgtcgcagtccttctctcctaatctgggaagcccatctcccccagagacaccaaatctcagtcactgcgtgtcatgtattggtaagtatcttttgttagaacctttggagggagaccacgtgtttcgggctgtccatctgcattccggtgaggagcttgtgtgcaaggtcttcgacatctcttgctaccaggagtccctcgcgccttgtttttgtctcagtgctcactctaatattaaccagattacggagattatactaggtgagacaaaggcctacgtgtttttcgagaggtcctacggcgacatgcatagctttgttcgcacatgtaaaaaattacgggaggaggaagctgccaggctgttctaccagatagcgtccgcggtggctcattgccatgacggcggtctggtcttaagggatctcaagctccgcaaatttatcttcaaggatgaagaaagaactcgagtgaagcttgaatcacttgaagacgcctatatactccgcggtgacgatgattcactgagcgacaagcatggctgtcccgcatacgtcagcccagaaatactcaacaccagcggctcctactccggtaaggctgctgatgtttggtcactgggtgtgatgctgtacactatgttggtcggacgatacccctttcacgatatcgagccatcttcactgttttccaaaattcgcagggggcagtttaacatacccgagacactctcacccaaggccaagtgcttgatcagaagcatcctgcgaagggaaccttcagaacgactaacaagtcaggaaattctggaccacccctggttctccactgacttctctgtaagtaacagtgcttatggcgctaaagaagtgtccgaccaactggttccagatgtcaatatggaggagaatttggacccgtttttcaattag

SEQ ID NO: 209277 - DNA, 1032 bp, Artificial Sequence
  derived and/or modified sequence
atgaatatacaccgtagcaccccaatcactatcgctcggtacggtcgaagtcggaacaagacccaggatttcgaagaactatcaagtatcagaagcgctgaacctagccagtcattttccccgaacctcggatcaccttcacccccagagacaccgaacctgagccattgtgtgagttgcattggtaaatacctgctgttagaacctctggagggagatcacgtgtttcgtgcagtgcatctgcacagcggggaggagcttgtatgtaaggtcttcgacatctcgtgctaccaggaaagtctagccccctgcttctgtctgagcgcccattctaatatcaaccagattacagagataattcttggtgaaactaaagcatatgtctttttcgaacgttcctacggggacatgcactcatttgtccgcacatgtaaaaaactccgggaggaagaagctgcgcgactcttttatcaaattgcttccgccgtagcgcactgccacgacggtgggcttgttctacgtgatctgaagctgagaaagttcatctttaaagacgaggagagaacacgagtgaagctagagtcacttgaggatgcttatattttgagaggagacgacgactccttgtctgataaacacggttgccctgcatatgtttcaccggagattctgaacacctcgggcagctattccggcaaagctgcggacgtatggtctcttggagttatgctttataccatgctggtaggccggtacccttttcatgacattgagccctcctcgctgttttccaaaatccgacgagggcagttcaacatcccagagacactttctcctaaagctaaatgtctgattaggtctatcctgaggcgcgagccttccgagaggttaacatcacaggagattctggatcatccttggttcagcacggatttcagtgtatccaactcagcctatggcgcaaaagaagtgtccgaccagttggtgcccgacgttaatatggaagagaatttagacccatttttcaattag

SEQ ID NO: 209278 - DNA, 1032 bp, Artificial Sequence
  derived and/or modified sequence
atgaatatccatcgcagtacccccattaccattgccagatacggccgatctagaaacaagacccaggatttcgaagaactgtcaagtatccggagcgccgaaccatctcagtccttttcaccaaacctaggtagtccatcacctcctgaaactcctaacctgtcccactgcgtctcgtgcatcggcaaatatctgttgcttgagccactggagggggaccatgtctttagggcagtgcacttgcattccggcgaagaactggtatgtaaagtcttcgatattagctgctatcaagagtcactagccccctgcttctgtctgagcgcccattctaatatcaaccagattacagagataattcttggtgaaactaaagcatatgtctttttcgaacgttcctacggggacatgcactcatttgtccgcacatgtaaaaaactccgggaggaagaagctgcgcgactcttttatcaaattgcttccgccgtagcgcactgccacgacggtgggcttgttctacgtgatctgaagctgagaaagttcatctttaaagacgaggagagaacacgagtgaagctagagtcacttgaggatgcttatatcctgaggggtgacgatgactcactgagcgataagcacggttgtccagcctacgtcagccccgaaatcttgaatacatccggttcctactctggcaaggctgctgatgtttggagtctcggtgttatgctgtacactatgttagtgggccgttaccccttccatgatatcgagcctagtagtttgttctctaaaattcgacggggccaatttaacatccctgaaacattgtcgccaaaagctaagtgcctgatccgctccattctgagacgagaaccaagtgagagactaactagccaggaaattctggatcatccttggttctctaccgatttttctgttagtaattctgcatacggcgcaaaagaagtgagcgatcagcttgtccccgacgtgaatatggaggaaaatctggacccttttttcaattag

SEQ ID NO: 209279 - DNA, 1032 bp, Artificial Sequence
  derived and/or modified sequence
atgaacatccacagaagcacccccatcaccatcgccagatacggcagaagcagaaacaagacccaggacttcgaggagctgagcagcatcagaagcgccgagcccagccagagcttcagccccaacctgggcagccccagcccccccgagacccccaacctgagccactgcgtgagctgcatcggcaagtacctgctgctggagcccctggagggcgaccacgtgttcagagccgtgcacctgcacagcggcgaggagctggtgtgcaaggtgttcgacatcagctgctaccaggagagcctggccccctgcttctgcctgagcgcccacagcaacatcaaccagatcaccgagatcatcctgggcgagaccaaggcctacgtgttcttcgagagaagctacggcgacatgcacagcttcgtgagaacctgcaagaagctgagagaggaggaggccgccagactgttctaccagatcgccagcgccgtggcccactgccacgacggcggcctggtgctgagagacctgaagctgagaaagttcatcttcaaggacgaggagagaaccagagtgaagctggagagcctggaggacgcctacatcctgagaggcgacgacgacagcctgagcgacaagcacggctgccccgcctacgtgagccccgagatcctgaacaccagcggcagctacagcggcaaggccgccgacgtgtggagcctgggcgtgatgctgtacaccatgctggtgggcagataccccttccacgacatcgagcccagcagcctgttcagcaagatcagaagaggccagttcaacatccccgagaccctgagccccaaggccaagtgcctgatcagaagcatcctgagaagagagcccagcgagagactgaccagccaggagatcctggaccacccctggttcagcaccgacttcagcgtgagcaacagcgcctacggcgccaaggaggtgagcgaccagctggtgcccgacgtgaacatggaggagaacctggaccccttcttcaactag

SEQ ID NO: 209280 - RNA, 1032 nt, Artificial Sequence
  derived and/or modified sequence
augaauauacaccguagcaccccaaucacuaucgcucgguacggucgaagucggaacaagacccaggauuucgaagaacuaucaaguaucagaagcgcugaaccuagccagucauuuuccccgaaccucggaucaccuucacccccagagacaccgaaccugagccauugugugaguugcauugguaaauaccugcuguuagaaccucuggagggagaucacguguuucgugcagugcaucugcacagcggggaggagcuuguauguaaggucuucgacaucucgugcuaccaggaaagucuagcccccugcuucugucugagcgcccauucuaauaucaaccagauuacagagauaauucuuggugaaacuaaagcauaugucuuuuucgaacguuccuacggggacaugcacucauuuguccgcacauguaaaaaacuccgggaggaagaagcugcgcgacucuuuuaucaaauugcuuccgccguagcgcacugccacgacggugggcuuguucuacgugaucugaagcugagaaaguucaucuuuaaagacgaggagagaacacgagugaagcuagagucacuugaggaugcuuauauuuugagaggagacgacgacuccuugucugauaaacacgguugcccugcauauguuucaccggagauucugaacaccucgggcagcuauuccggcaaagcugcggacguauggucucuuggaguuaugcuuuauaccaugcugguaggccgguacccuuuucaugacauugagcccuccucgcuguuuuccaaaauccgacgagggcaguucaacaucccagagacacuuucuccuaaagcuaaaugucugauuaggucuauccugaggcgcgagccuuccgagagguuaacaucacaggagauucuggaucauccuugguucagcacggauuucaguguauccaacucagccuauggcgcaaaagaaguguccgaccaguuggugcccgacguuaauauggaagagaauuuagacccauuuuucaauuag

SEQ ID NO: 209281 - RNA, 1032 nt, Artificial Sequence
  derived and/or modified sequence
augaauauccaucgcaguacccccauuaccauugccagauacggccgaucuagaaacaagacccaggauuucgaagaacugucaaguauccggagcgccgaaccaucucaguccuuuucaccaaaccuagguaguccaucaccuccugaaacuccuaaccugucccacugcgucucgugcaucggcaaauaucuguugcuugagccacuggagggggaccaugucuuuagggcagugcacuugcauuccggcgaagaacugguauguaaagucuucgauauuagcugcuaucaagagucacuagcccccugcuucugucugagcgcccauucuaauaucaaccagauuacagagauaauucuuggugaaacuaaagcauaugucuuuuucgaacguuccuacggggacaugcacucauuuguccgcacauguaaaaaacuccgggaggaagaagcugcgcgacucuuuuaucaaauugcuuccgccguagcgcacugccacgacggugggcuuguucuacgugaucugaagcugagaaaguucaucuuuaaagacgaggagagaacacgagugaagcuagagucacuugaggaugcuuauauccugaggggugacgaugacucacugagcgauaagcacgguuguccagccuacgucagccccgaaaucuugaauacauccgguuccuacucuggcaaggcugcugauguuuggagucucgguguuaugcuguacacuauguuagugggccguuaccccuuccaugauaucgagccuaguaguuuguucucuaaaauucgacggggccaauuuaacaucccugaaacauugucgccaaaagcuaagugccugauccgcuccauucugagacgagaaccaagugagagacuaacuagccaggaaauucuggaucauccuugguucucuaccgauuuuucuguuaguaauucugcauacggcgcaaaagaagugagcgaucagcuuguccccgacgugaauauggaggaaaaucuggacccuuuuuucaauuag

SEQ ID NO: 209282 - protein, 766 aa, Artificial Sequence
  derived and/or modified sequence
MNVNQVAENLALSHQEELVDLPKNYPLSENEDEGDSDGERKHQKLLEAIISLDGKNRRKLAERSEASLKVSEFSVSSEGSGEKLGLADLLEPVKTSSSLATVKKQLNRVKSKKVVELPLNKEKIEQIHREVAFSKTSQVLSKWDPIILKNQQAEQLVFPLGKEQPAIAPIEHALSGWKARTPLEQEIFNLLHKNKQPVTDPLLTPMEKASLQAMSLEEAKMHRAELQRARALQSYYEAKARKEKKIKSKKYHKVVKKGKAKKALKEFEQLQKVNPTVALEEMEKIENARMMERMSLKHQNSGKWAKSKAIMAKYDLEARQAMQEQLAKNKELTQKLQVASESEEEEGGTEVEELLVPHVANEVQMNVDGPNPWMFRSCTSDTKEAATQEDPEQVPELAAHEVSASEAEERPVAEEEILLREFEERQSLRKRSELNQDAEPASSQETKDSSSQEVLSELRALSQKLKEKHQSRKQKASSEGTVPQVQREEPAPEEAEPLLLQRSERVQTLEELEELGKEDCFQNKELPRPVLEGQQSERTPNNRPDAPKEKKEKEQLINLQNFLTTQSPSVRSLAVPTIIEELEDEEERDQRQMIKEAFAGDDVIRDFLKEKREAVEASKPKDVDLTLPGWGEWGGVGLKPSAKKRRQFLIKAPEGPPRKDKNLPNVIISEKRNIHAAAHQVQVLPYPFTHHRQFERTIQTPIGSTWNTQRAFQKLTTPKVVTKPGHIIKPIKAEDVGYQSSSRSDLPVIQRNPKRITTRHNKEEKL

SEQ ID NO: 209283 - DNA, 2301 bp, Artificial Sequence
  derived and/or modified sequence
atgaacgtgaaccaggtggccgagaacctggccctgagccaccaggaggagctggtggacctgcccaagaactaccccctgagcgagaacgaggacgagggcgacagcgacggcgagagaaagcaccagaagctgctggaggccatcatcagcctggacggcaagaacagaagaaagctggccgagagaagcgaggccagcctgaaggtgagcgagttcagcgtgagcagcgagggcagcggcgagaagctgggcctggccgacctgctggagcccgtgaagaccagcagcagcctggccaccgtgaagaagcagctgaacagagtgaagagcaagaaggtggtggagctgcccctgaacaaggagaagatcgagcagatccacagagaggtggccttcagcaagaccagccaggtgctgagcaagtgggaccccatcatcctgaagaaccagcaggccgagcagctggtgttccccctgggcaaggagcagcccgccatcgcccccatcgagcacgccctgagcggctggaaggccagaacccccctggagcaggagatcttcaacctgctgcacaagaacaagcagcccgtgaccgaccccctgctgacccccatggagaaggccagcctgcaggccatgagcctggaggaggccaagatgcacagagccgagctgcagagagccagagccctgcagagctactacgaggccaaggccagaaaggagaagaagatcaagagcaagaagtaccacaaggtggtgaagaagggcaaggccaagaaggccctgaaggagttcgagcagctgcagaaggtgaaccccaccgtggccctggaggagatggagaagatcgagaacgccagaatgatggagagaatgagcctgaagcaccagaacagcggcaagtgggccaagagcaaggccatcatggccaagtacgacctggaggccagacaggccatgcaggagcagctggccaagaacaaggagctgacccagaagctgcaggtggccagcgagagcgaggaggaggagggcggcaccgaggtggaggagctgctggtgccccacgtggccaacgaggtgcagatgaacgtggacggccccaacccctggatgttcagaagctgcaccagcgacaccaaggaggccgccacccaggaggaccccgagcaggtgcccgagctggccgcccacgaggtgagcgccagcgaggccgaggagagacccgtggccgaggaggagatcctgctgagagagttcgaggagagacagagcctgagaaagagaagcgagctgaaccaggacgccgagcccgccagcagccaggagaccaaggacagcagcagccaggaggtgctgagcgagctgagagccctgagccagaagctgaaggagaagcaccagagcagaaagcagaaggccagcagcgagggcaccgtgccccaggtgcagagagaggagcccgcccccgaggaggccgagcccctgctgctgcagagaagcgagagagtgcagaccctggaggagctggaggagctgggcaaggaggactgcttccagaacaaggagctgcccagacccgtgctggagggccagcagagcgagagaacccccaacaacagacccgacgcccccaaggagaagaaggagaaggagcagctgatcaacctgcagaacttcctgaccacccagagccccagcgtgagaagcctggccgtgcccaccatcatcgaggagctggaggacgaggaggagagagaccagagacagatgatcaaggaggccttcgccggcgacgacgtgatcagagacttcctgaaggagaagagagaggccgtggaggccagcaagcccaaggacgtggacctgaccctgcccggctggggcgagtggggcggcgtgggcctgaagcccagcgccaagaagagaagacagttcctgatcaaggcccccgagggcccccccagaaaggacaagaacctgcccaacgtgatcatcagcgagaagagaaacatccacgccgccgcccaccaggtgcaggtgctgccctaccccttcacccaccacagacagttcgagagaaccatccagacccccatcggcagcacctggaacacccagagagccttccagaagctgaccacccccaaggtggtgaccaagcccggccacatcatcaagcccatcaaggccgaggacgtgggctaccagagcagcagcagaagcgacctgcccgtgatccagagaaaccccaagagaatcaccaccagacacaacaaggaggagaagctgtag

SEQ ID NO: 209284 - DNA, 2301 bp, Artificial Sequence
  derived and/or modified sequence
atgaatgtcaaccaggtcgccgaaaacctcgccttaagccaccaagaagaattggtggacctccctaaaaattaccctttgagcgaaaatgaggatgaaggtgatagtgacggtgaacgcaaacaccaaaaactccttgaggcgatcatcagcctggacggcaaaaacagaagaaaactggccgaacgaagcgaggcatcactgaaagtgagtgagtttagcgtgtcctccgaagggagtggagaaaagctaggcttggccgatttgctagagccagtgaagaccagcagcagcctggcgactgtgaagaaacagctgaatcgtgtgaagtcaaaaaaggtggtagagctaccccttaataaggaaaagatcgagcagattcatcgagaggttgccttctcaaaaacatcccaggttttatccaagtgggacccaatcatactgaaaaatcagcaggctgagcagctggtgttccctcttgggaaggaacaacccgccattgctcccattgaacatgcccttagtggctggaaggccagaactccactggagcaggaaatttttaacttgctgcataagaataagcagccagtcactgatccattattgacgcctatggaaaaagcttctcttcaggccatgtccctcgaggaagccaagatgcaccgcgcagagctgcagcgtgcacgcgcgctccagtcctattacgaagccaaggcccgcaaagagaaaaagatcaaatccaagaagtaccataaggtggttaagaagggtaaagccaaaaaggccctgaaggagttcgagcagttgcagaaagtgaatccgaccgtcgccctcgaagagatggaaaaaatcgaaaatgctcgtatgatggagaggatgtccttaaaacatcaaaactcaggtaagtgggcgaagtcaaaagccattatggcgaagtacgacctggaggcacggcaggctatgcaggaacagctcgcaaagaacaaggaactcacacagaaactgcaggttgcctctgagtcagaggaagaggagggaggcacggaggtggaagagctgcttgttcctcacgtcgcaaatgaggtgcagatgaacgtcgatggacctaatccctggatgtttagatcttgcacctctgatacgaaggaagcggcgacgcaggaggatcctgaacaggtgcctgaacttgccgctcatgaggtcagtgcttctgaagcggaagaacggcccgttgccgaggaggagatccttctgcgagagtttgaagagaggcaaagcttgcgaaaaagatcagaactcaaccaggatgctgagcccgcctcctcacaggagacgaaagatagcagttcacaagaggtcctatcagaactgagggccctgagtcagaagcttaaggaaaagcaccagtccagaaagcagaaagccagttctgaaggcacggtgccccaggttcaacgcgaagaacccgcacctgaggaggcggagccactcttgctccaaagatctgaacgcgtacagacccttgaagagctcgaggaactcggaaaagaggattgtttccagaataaggagctacccaggcccgtgcttgaagggcagcagagtgagagaacgcctaacaaccgtcctgacgcacctaaagagaagaaagagaaggagcagctaattaatcttcagaacttcctcaccacacagtcaccttctgtgcgatcacttgcggtgcccacaattattgaggagctggaggatgaggaggagcgcgaccagagacagatgataaaagaggctttcgcgggggatgatgtaattcgagattttttgaaagaaaagcgtgaagccgtggaagcatctaagccaaaagatgtggatttaactctgcccgggtggggagagtggggcggcgtgggtctcaaaccatccgcaaaaaagaggcgccagtttctcatcaaagcgccggaaggcccacctcgcaaggacaagaatctgccaaacgtgatcatttcggaaaagcggaacatacatgccgccgcacatcaggtgcaagtgcttccctacccttttacacatcatagacaatttgagaggactatccaaacccccataggtagtacttggaacactcaaagggcgttccaaaaactgaccactcccaaagtcgtgaccaaacccgggcatattatcaagcccataaaagcggaggacgttggctatcagtcttccagtaggagtgacctccctgtgattcaaagaaatcccaagaggatcacaacacgtcacaacaaagaagaaaaattgtag

SEQ ID NO: 209285 - DNA, 2301 bp, Artificial Sequence
  derived and/or modified sequence
atgaatgtgaaccaggtggccgagaacctggccctgagccaccaggaggagctggtggacctgcccaagaactaccccctgtctgaaaatgaagatgaaggagacagtgatggagagaggaagcaccagaagctgctggaggccatcatcagcctggatggcaagaacagaaggaagctggccgagaggtctgaggccagcctgaaggtgtctgagttctctgtgtcctctgagggcagcggggagaagctgggcctggccgacctgctggagcctgtgaagaccagcagcagcctggccaccgtgaagaagcagctgaacagagtgaagagcaagaaggtggtggagctgcccctgaacaaggagaagattgagcagatccaccgggaggtggccttcagcaagaccagccaggtgctgagcaagtgggaccccatcatcctgaagaaccagcaggccgagcagctggtgttccccctgggcaaggagcagcctgccatcgcccccatcgagcacgccctgagcggctggaaggcccggacccccctggagcaggagatcttcaacctgctgcacaagaacaagcagcctgtgacagaccccctgctgacccccatggagaaggccagcctgcaggccatgagcctggaggaggccaagatgcacagagctgagctgcagagggcccgggccctgcagagctactatgaggccaaggccaggaaggagaagaagatcaagagcaagaagtaccacaaggtggtgaagaagggcaaggccaagaaggccctgaaggagtttgagcagctgcagaaggtgaaccccaccgtggccctggaggagatggagaagattgaaaatgccaggatgatggagaggatgagcctgaagcaccagaacagcggcaagtgggccaagagcaaggccatcatggccaagtatgacctggaggcccggcaggccatgcaggagcagctggccaagaacaaggagctgacccagaagctgcaggtggccagcgagagcgaggaggaggagggcggcacagaggtggaggagctgctggtgccccacgtggccaatgaggtgcagatgaatgtggatggccccaacccctggatgttccgcagctgcaccagtgacaccaaggaggccgccacccaggaggaccctgagcaggtgcctgagctggccgcccacgaggtgtctgccagcgaggccgaggagaggcctgtggccgaggaggagatcctgctgcgggagtttgaggagcggcagagcctgaggaagaggtctgagctgaaccaggatgctgagcccgccagcagccaggagaccaaggacagcagcagccaggaggtgctgtctgagctgcgggccctgagccagaagctgaaggagaagcaccagagcaggaagcagaaggccagcagcgagggcaccgtgccccaggtgcagcgggaggagcccgcccctgaggaggccgagcccctgctgctgcagaggtctgagcgggtgcagaccctggaggagctggaggagctgggcaaggaggactgcttccagaacaaggagctgcccaggcctgtgctggagggccagcagagcgagaggacccccaacaacagaccagatgcccccaaggagaagaaggagaaggagcagctgatcaacctgcagaacttcctgaccacccagagccccagcgtgcgcagcctggccgtgcccaccatcatcgaggagctggaggatgaggaggagcgggaccagaggcagatgatcaaggaggcctttgctggagatgatgtgatccgggacttcctgaaggagaagcgggaggccgtggaggccagcaagcccaaggatgtggacctgaccctgcccggctggggcgagtggggcggcgtgggcctgaagcccagcgccaagaagaggcggcagttcctgatcaaggcccctgagggcccccccaggaaggacaagaacctgcccaacgtcatcatcagcgagaagaggaacatccacgccgccgcccaccaggtgcaggtgctgccctaccccttcacccaccaccggcagtttgagaggaccatccagacccccatcggcagcacctggaacacccagagggccttccagaagctgaccacccccaaggtggtgaccaagccaggccacatcatcaagcccatcaaggccgaggatgtgggctaccagagcagcagcagaagtgacctgcctgtgatccagaggaaccccaagaggatcaccaccaggcacaacaaggaggagaagctgtag

SEQ ID NO: 209286 - DNA, 2301 bp, Artificial Sequence
  derived and/or modified sequence
atgaacgtgaaccaggtggccgagaacctggccctgagccaccaggaagaattggtagatctgcctaaaaactaccccctgtccgaaaacgaagacgaaggcgatagtgatggtgagagaaaacatcagaagctgctagaggccattatttctctggatggcaaaaaccgacggaaactcgccgagcgaagcgaggcaagtctgaaggtgtcggaattttcagtgtcctccgaaggatcaggcgaaaagttgggcttggccgatctcctggaaccagtgaagaccagttccagcttggcgaccgtgaaaaagcagctgaatagggtcaaatccaagaaagttgtcgaattacctttgaacaaagaaaaaatcgaacagatccaccgggaggtcgctttttcaaaaacaagccaagtcctgtctaagtgggacccaatcatcctgaaaaaccaacaagccgagcagctcgtgttcccactcgggaaagagcagccagccatcgcccccattgaacatgcgctctcggggtggaaggcccgcacccctctggagcaggagattttcaatctcctgcataagaataagcaaccagtgacggatcctcttctgacccccatggagaaagcttccctgcaagccatgtccctggaggaagccaagatgcaccgggccgaactgcagcgggccagagcactgcaatcgtactacgaggcgaaagcgaggaaggagaaaaagattaaatcaaaaaaatatcataaggttgtgaaaaaaggtaaggccaaaaaggctctgaaagaatttgagcagctgcagaaagtaaatccaactgtcgcactcgaggagatggagaagattgagaatgctcggatgatggagcggatgagcctgaagcaccaaaatagcggaaagtgggcgaaaagcaaggcaattatggccaaatatgatcttgaggctcggcaggcaatgcaggagcagctggctaagaacaaggaattgacccagaagctgcaggtggccagtgagagcgaggaagaggagggggggaccgaggtagaagaactcctggtcccacacgtggccaatgaagtgcagatgaacgtggacggtccaaacccctggatgttcaggtcttgcacgagtgatacgaaagaggcggccacacaggaagaccccgaacaggtacctgagcttgcagcgcacgaggtctcagcatcagaagctgaagagcggcccgttgctgaagaggagatactcctccgcgagtttgaagaaaggcagtccctacgcaaacggagtgagttgaatcaagacgccgagcctgcgagtagccaggagaccaaagatagcagttcgcaggaagttttgtctgaactccgagcattgtcacagaaactgaaggaaaagcaccagtcgcgtaagcagaaggcttcgagtgagggaactgtgccgcaagtgcagagggaggaacccgcccctgaggaggccgagcctctgctgctacagcggtccgaaagagtccagacattggaggaacttgaggagttaggaaaggaagactgcttccagaacaaggagctgccgcggcccgtgctcgagggtcagcagtctgagcgcacccccaataatcggccggacgcccctaaggagaaaaaggagaaagagcaactgatcaacctgcagaacttccttaccacgcagtcgccctccgtgcggtcactcgctgtgccaactatcattgaagaactagaagacgaggaagaacgtgaccagcggcagatgattaaggaagccttcgccggggatgacgttatcagggactttctcaaagagaaacgcgaggcggtggaggcctcaaaaccaaaggatgtggatctcactttgcctggatggggcgagtggggaggagtgggtctgaagcccagcgcaaagaaacgcaggcagttcctgattaaggcccccgagggtcctccacgcaaggataaaaaccttccaaacgtcatcatctccgagaagagaaatatccacgccgcagcccaccaagtgcaggtcctgccttatccatttacccatcacaggcagttcgagcgcactatccagaccccaatcggcagtacatggaacacacagcgagctttccagaagctcacgaccccgaaggtggtcacaaagcccggacatatcattaagcctataaaagctgaggacgtgggataccagtcgagctccagatctgatttacctgtaatccagaggaacccaaagagaattaccactaggcacaataaggaggaaaagctatag

SEQ ID NO: 209287 - DNA, 2301 bp, Artificial Sequence
  derived and/or modified sequence
atgaatgtcaatcaggttgctgagaatctggccttgtcacatcaggaggaactcgtggatctgccaaaaaactatcctctgagtgaaaacgaagatgaaggcgatagcgatggagagagaaagcaccagaagcttctcgaggccatcataagcctggatggcaagaaccgcagaaagctcgccgaaaggtctgaagcctcccttaaggtttctgaattcagcgtgagtagcgaaggctctggtgaaaagttagggctggctgacctgctggagccagtgaagacgtcgagctcactggcaaccgtcaaaaagcagctgaatcgggttaagtcaaagaaagttgtggaactgccactgaataaagaaaagatcgaacagattcaccgggaggtagcgttctcaaagacctcacaggtactgtccaagtgggaccccattatcctgaaaaaccaacaggccgaacagttggtgttcccactaggaaaagagcagcccgcaatcgcacctattgaacacgccctgagcggatggaaggcacggactcctctggagcaggagatcttcaacctgctgcataagaataaacagccagtgaccgatcccctattgaccccgatggagaaagctagcctgcaggccatgagtctagaggaagccaaaatgcatcgcgctgaacttcagcgcgcacgggcactgcagagctattatgaggctaaggcaaggaaagaaaagaaaatcaaatcgaaaaaataccataaagtagttaagaaggggaaagccaagaaggcgcttaaggagtttgagcagctgcagaaagtgaaccccacagttgccctcgaggagatggaaaaaattgaaaacgcccgtatgatggagcggatgtctctgaagcaccagaatagcggcaaatgggctaagtccaaggccattatggcgaagtatgatctggaagccaggcaggctatgcaggagcaattagcgaagaacaaagagctcacgcagaagctgcaggtggcatctgagtctgaagaggaggaaggtggaacggaagtcgaggagctcctggtgccccacgtggccaacgaggtacagatgaatgtggacggcccaaatccatggatgttcaggagctgcacctcagacacaaaagaagctgctacgcaggaagatcccgaacaagtgcccgaacttgcagcacacgaggtgtctgcatcagaggctgaggaacgccctgttgccgaggaagagatcctcctgagggagttcgaagagagacaatcactgaggaagcgatccgaactgaatcaggatgctgagccagcgtcaagccaggagacaaaggatagtagctctcaggaggtgctgtcagaactcagggccctgtcacaaaaactcaaagaaaaacatcagagcagaaagcagaaagcaagctccgaagggacagtgcctcaggttcagagagaggagcccgcaccagaagaggccgagccccttctgctgcagcggtccgagagagtacagactttggaggagttagaggagctgggcaaggaagactgctttcagaacaaggaactcccacgccctgtcctggaaggacagcagtccgaacgcactcctaataaccgaccggatgccccaaaagagaaaaaagaaaaagagcagctcattaatctccagaatttcctcacaacacagagtccttctgtgcgtagtctagcagtgccaaccattatcgaggagcttgaagatgaggaggagagagaccagagacagatgattaaggaggcctttgcaggcgacgacgttattagagacttcttaaaggaaaagagggaggcagtggaagcttccaaaccaaaggatgtggatcttactttaccaggatggggggagtgggggggtgtgggcctgaaacccagcgcaaagaaacgccgacagtttctgattaaagctcctgagggtccaccgagaaaagacaagaatctgcccaatgtgattataagcgaaaagagaaacattcatgccgctgcgcaccaagtgcaggtgctgccctacccctttacgcaccaccgacagttcgaaagaacaattcagacaccaatcggaagcacctggaacactcagcgagcctttcaaaagctgacaaccccgaaggttgtgacgaaacctgggcatatcattaaacccatcaaagcagaagacgttggatatcagtcctcatccaggtccgatctccctgttatacagcgcaatccaaagaggatcacgacgcggcataataaggaggagaaattatag

SEQ ID NO: 209288 - DNA, 5494 bp, Artificial Sequence
  derived and/or modified sequence
gcctttgctaaattgctgaataagaagatggttgagtcacctccttcgcttaaacttgtcctcattggaggttgtcgtaacaaagatgatgaacttagggtaaaccaactgagaaggctgtctgaggatttaggagttcaagaatatgtggaatttaaaataaacattccatttgatgaattaaagaattatttgtctgaagcaacaattggtctgcataccatgtggaacgagcattttgggattggagttgtggagtgtatggcagctggcacaattatccttgcacacaattcggggggcccaaagcttgacattgtggttcctcacgaaggagatataactggctttctggctgagagtgaagaagactatgctgaaactatcgctcacattctttccatgtctgcagaaaagagactccaaatcagaaaaagtgctcgtgcatctgtaagcagattctctgatcaggaatttgaagtgacattcctatcatctgtggaaaagttatttaagtaatgccatatctgtaaaattaaagatattttatataaactggttaaacaccttcatatgtaaatatttttctaaattcaatctcatttgtcaaatcattttactttagaaaacagacaaaatttccttttagaataaaaggaagtgttgaaaagaaaatggatgactagccttcggcttccattcttggtatacatgagagaggctggctgctgagatgaatgtgaaccaggttgcagagaatctggctttgagccaccaggaagaactagtggatttgccaaaaaactaccccttgagtgaaaatgaagatgagggggacagtgatggagagagaaagcatcaaaagcttctggaagcaatcatttcccttgatggaaagaataggcggaaattggctgagaggtctgaggctagtctgaaagtgtcagagttcagtgtcagttctgaaggatcaggagaaaagctgggccttgcagatctgcttgagcccgttaaaacttcatcttctttggccactgtaaaaaagcaactgaatagagtcaaatcaaagaaggtggtggagttacctcttaacaaagaaaaaattgaacagatccacagagaagtagcattcagtaaaacctcacaggtcctctccaaatgggaccctatcatcctgaagaaccagcaggcagagcagctggtttttcccctggggaaggagcagccagccattgctcccattgaacatgcgctcagtggctggaaggcaagaactcccctggagcaggaaatttttaacctcctccataagaacaagcagccagtgacagatcctttactgactcccatggaaaaggcctctctccaagccatgagcctggaagaggcaaagatgcaccgagcagagcttcagagggctcgggctctgcagtcctactatgaggccaaggctcgaaaagagaagaaaatcaaaagtaaaaagtatcacaaagtcgtgaagaaaggaaaggccaagaaagccttaaaagagtttgagcagctacagaaggttaatccaactgtggcactggaagaaatggaaaaaattgaaaatgccagaatgatggaaagaatgagccttaagcaccaaaacagtgggaaatgggccaagtcaaaggcaattatggccaaatatgacctggaggctcgccaagctatgcaggaacagttggccaagaacaaagaactgacacagaaactccaggtagcctctgagagtgaggaagaggagggaggcacagaagtggaagaactccttgtccctcatgtagcgaatgaagtgcagatgaatgtggacggaccgaatccctggatgttcaggagctgcaccagtgacaccaaagaggctgcaacacaggaggaccctgagcaagtgccagagcttgcagctcatgaggtttctgcaagtgaggcagaagaaagaccagtggcagaggaagaaattttgttgagagaatttgaggaaaggcaatcccttagaaaaagatctgagctcaaccaggatgctgagccagcaagcagtcaagaaacaaaagattctagcagccaggaggtgctgtccgaattgagggcactatctcagaaattgaaggaaaaacatcagtccaggaagcaaaaagcaagttcagaggggactgttccccaggtccagagagaggaacctgccccagaagaagcggaacccctattgctacagaggtcagagagagtacaaactctggaagagctagaagagctgggaaaagaagattgttttcaaaataaggagcttcccagacctgtgttagaaggacagcagtcagagaggaccccaaataatcggcctgatgcccctaaggagaagaaagagaaggagcaactgatcaacctacagaacttcctgaccacacagtctccttccgtgaggtctttggcagttcccacaataatagaggagctggaagatgaagaggagagagaccaaaggcagatgataaaggaagcttttgctggggatgatgtcatcagagatttcttgaaagagaagagggaagctgtggaggcgagtaagccaaaggacgtggacctgacactacctggctggggcgagtggggtggtgtgggcctaaagcccagtgccaagaaaagacgccagtttctcattaaagcccctgagggtcctccaagaaaagataagaatttgccaaatgtgattatcagtgagaagcgcaacatccacgcagcagctcatcaggtacaagtgcttccatatccatttacccaccatcggcaatttgaaaggaccatccagacccctataggatccacatggaacacccagagggctttccaaaagctgactactcccaaggtcgtcaccaagccaggccatatcattaagcccataaaagcagaggatgtgggctaccagtcttcctcaaggtcagacctgcctgtcatacagaggaatccaaaacgaatcaccacacgtcacaataaagaagaaaaactgtaggttgtgtagctggagaagtgacagtcaggggccctgattccacttcctttggtccagttttactctgctacagggtggattccaaaactggctcagcacattgcatgtagttgagccacattttttaaaaaaagaaaatggatgaccattaattgactagcattttagaattgatcagacattagaacacagaaaaattctagtacatttaaattctaaacaatacagtggatgacccttttgaatatacctaatgatttccttaaaaaagaaattttaaacagacttgtttaatcgtgttctcaaagcatacagtcaagaggtgggactgactgatgctttataggtgtgtgtagggtggtagaggccaaggtgctgccagcaatcctttccatactaggtactggtgaaaattgtttttgtttatgctgtcagcacatttgtgtgggtctctcattgtcccttaacagtgccgcatctcagcctggaagtcagctttaagtcattcaagagaacctcaggctgtttttctgacagtgatgatatgatatacagatacatccacagggtatctattaccagcataatgcattgtaagatggcaaggtggcattttgaaagagcgctgggcaagcagttagcacatctgggcctaccttcagcttcttcatttacaaacttctgaccttttgacactaaagctgctcctttatctttctgagtctcagattcttcatctgtaatctggagttgttaattccagtccttactaccttttagagttggaatgagatggaaagtagatgaaactactttgaaaattacgacagttaagggctgggtgcggtgtctcacacctgtaatcccagcactttgggaggccgagatgggtggatcatgaggtcagcagttgagaccagcctgaacaacatggtgaaaccctgtctgtactaaaaatacaaaaaaattagctgggcctggtggcaggcacctgtaatcccagctacttgggagactgaggcaggagaattgcttgaaactggaaggcagaggttgcagtgagccaagattgtgccactgcactctagcctgggcaataagcaaaactccatctcaaaaaagaaaaaaaggaaaaagaaaattatgagagttacttaaaggtaacatcacatactaaatgtcttctataatcctatatttattaatgcattacaactctgtagattgttagttactaggccagtagctaggaattggtataaatttaatgcaccttctatcctgaataactagcatggaaaagtgaatatatgtgtgagcagatatggctataaagacctatagcttttgcactttatgcatatataatcaatcctttctagttcagtgaattgaccccatccacaggctgattcatctttgtgttaaggggcaaatgaaacggtatattatttctttgcagtctcctctcagtcattcatcaatgtggccagcttatctactcccaattatgttgttgatacatctccaagccatctgtcatcagatcaaaaagcagcaaacagagggtcagtcacaggatgttctgacacaccattgtaactttttgttagagatgatcccatttagaaaaagactggtagaaattggagtgaaaggaaccctacagattagcccagttctctcttattttcagctttacagacaagaacaatttaaatctaaagaatttagtagattccttcagtgtcacaaagctgtttcatgaaagaatcaagattataacctggatattctgactcctggcccagtgctttttcttactttgtagctacactttgaagtaagattcaaactgttatccactcaattgccttattcctgaggatgtagtgaaggaagaaaaagttttctggaattccgtaaattatattttaagcttatttcttcaaaattattttcatatatcacagatatatcattggaagatataatttgcatatatgttcattatcagtgttcctaatttggtattacatgtattctatttttttctgaatgatagcatgaaaagtgtcaaagtggtttgtccgctagcgtctgtctgcagaactttcaggatgactattaattcctctcagatgtcatttttgagtggtccaagcctgctgttttgaacccacagcagtggagatttgtattcttatttacagttgtgtactataaagtgtgtgttacataggttttgtgtaataattatttgtaaatattatttagatttgtatttagacatgatttatatctaatatagatacaaagtctgtgtctaaatattatttaaagaagtgatttttcattctcttggattctttccagtgtggtgccttttatatgcctcacatagtctccttgttctcctactaatattcccaagctccatatgccaattaaagaagaaac

SEQ ID NO: 209289 - DNA, 1404 bp, Artificial Sequence
  derived and/or modified sequence
gagttcgggggtcggcggaagatggcggccggcgaaaggagctggtgcctgtgcaagttgttgaggagttgtggagtgtatggcagctggcacaattatccttgcacacaattcggggggcccaaagcttgacattgtggttcctcacgaaggagatataactggctttctggctgagagtgaagaagactatgctgaaactatcgctcacattctttccatgtctgcagaaaagagactccaaatcagaaaaagtgctcgtgcatctgtaagcagattctctgatcaggaatttgaagtgacattcctatcatctgtggaaaagttatttaagtaatgccatatctgtaaaattaaagatattttatataaactggttaaacaccttcatatgtaaatatttttctaaattcaatctcatttgtcaaatcattttactttagaaaacagacaaaatttccttttagaataaaaggaagtgttgaaaagaaaatggatgactagccttcggcttccattcttggtatacatgagagaggctggctgctgagatgaatgtgaaccaggttgcagagaatctggctttgagccaccaggaagaactagtggatttgccaaaaaactaccccttgagtgaaaatgaagatgagggggacagtgatggagagagaaagcatcaaaagcttctggaagcaatcatttcccttgatggaaagaataggcggaaattggctgagaggtctgaggctagtctgaaagtgtcagagttcagtgtcagttctgaaggatcaggagaaaagctgggccttgcagatctgcttgagcccgttaaaacttcatcttctttggccactgtaaaaaagcaactgaatagagtcaaatcaaagaaggtggtggagttacctcttaacaaagaaaaaattgaacagatccacagagaagtagcattcagtaaaacctcacaggtcctctccaaatgggaccctatcatcctgaagaaccagcaggcagagcagctggtttttcccctggggaaggagcagccagccattgctcccattgaacatgcgctcagtggctggaaggcaagaactcccctggagcaggaaatttttaacctcctccataagaacaagcagccagtgacagatcctttactgactcccatggaaaaggcctctctccaagccatgagcctggaagaggcaaagatgcaccgagcagagcttcagagggctcgggctctgcagtcctactatgaggccaaggctcgaaaagagaagaaaatcaaaagtaaaaagtatcacaaagtcgtgaagaaaggaaaggccaagaaagccttaaaagagtttgagcagctacagaaggttaatccaactgtggcactggaagaaatggaaaaaa

SEQ ID NO: 209290 - protein, 414 aa, Artificial Sequence
  derived and/or modified sequence
MSGLDGGNKLPLAQTGGLAAPDHASGDPDRDQCQGLREETEATQVMANTGGGSLETVAEGGASQDPVDCGPALRVPVAGSRGGAATKAGQEDAPPSTKGLEAASAAEAADSSQKNGCQLGEPRGPAGQKALEACGAGGLGSQMIPGKKAKEVTTKKRAISAAVEKEGEAGAAMEEKKVVQKEKKVAGGVKEETRPRAPKINNCMDSLEAIDQELSNVNAQADRAFLQLERKFGRMRRLHMQRRSFIIQNIPGFWVTAFRNHPQLSPMISGQDEDMLRYMINLEVEELKHPRAGCKFKFIFQGNPYFRNEGLVKEYERRSSGRVVSLSTPIRWHRGQDPQAHIHRNREGNTIPSFFNWFSDHSLLEFDRIAEIIKGELWPNPLQYYLMGEGPRRGIRGPPRQPVESARSFRFQSG

SEQ ID NO: 209291 - DNA, 1245 bp, Artificial Sequence
  derived and/or modified sequence
atgagtgggttggatggaggaaacaaactcccattagcccagaccggtggcctagccgcaccggatcacgcctccggggaccccgatagggatcagtgtcagggcctgagagaggagacagaagccacccaggtcatggccaatacaggcggaggtagcctggaaacagtggctgaagggggcgcctcccaggatcctgtggattgcggccccgcactgcgtgtacccgtggctggaagtagggggggcgctgccactaaagccggacaggaagacgcgcccccatctacgaaaggcctggaagccgcctccgctgctgaggctgcagactcctcccagaaaaacggttgtcagttgggtgaaccccgaggtcccgctggccagaaggctcttgaagcatgtggggcggggggcctcggatctcagatgatacctggcaagaaggccaaggaagtgacgaccaaaaaaagagccatcagcgcggcggtggagaaggagggagaggccggcgccgcgatggaggagaaaaaggttgtccagaaggagaagaaagttgcaggtggtgtgaaggaagagaccagaccaagagctcctaagattaacaattgtatggattctctcgaagctattgaccaggagctgagcaatgtcaatgcccaagccgatagggcattcctccagcttgaacggaagttcggccggatgcgcagattgcatatgcagaggagaagttttatcatacagaacattcccggattttgggtaacagcctttcgcaaccacccccagttgagccctatgataagtggacaagacgaagatatgctccgttacatgattaatctggaggtggaagagctaaagcacccacgagccggatgcaagtttaaattcatcttccagggaaatccatacttccgaaatgaaggcctagttaaagaatatgagcgaaggtccagcggccgcgtggtctccttgtccacccctatccgatggcataggggccaggatcctcaagcccatatccaccggaatcgcgagggcaatacaattccaagcttcttcaactggttcagcgaccatagtctattggaatttgatcggatcgctgagatcataaagggagaactttggccaaatcccctgcagtactacctgatgggcgagggtccacggcgtggcatcagaggcccacctaggcaacctgttgaaagtgctagatcattccggttccagtcaggatag

SEQ ID NO: 209292 - DNA, 1245 bp, Artificial Sequence
  derived and/or modified sequence
atgagcggcctggatggcggcaacaagctgcccctggcccagacaggaggcctggccgccccagaccacgccagcggggaccctgaccgggaccagtgccagggcctgcgggaggagacagaggccacccaggtgatggccaacacaggaggcggcagcctggagaccgtggccgagggcggggccagccaggaccctgtggactgtggccctgccctgcgggtgcctgtggccggcagccggggcggggccgccaccaaggccggccaggaggatgccccacccagcaccaagggcctggaggccgccagcgctgctgaggccgctgacagcagccagaagaatggctgccagctgggggagccccggggccctgctggccagaaggccctggaggcctgtggggccggcggcctgggcagccagatgatccctgggaagaaggccaaggaggtgaccaccaagaagagggccatctctgctgctgtggagaaggagggggaggccggggccgccatggaggagaagaaggtggtgcagaaggagaagaaggtggccggcggcgtgaaggaggagacccggccccgggcccccaagatcaacaactgcatggacagcctggaggccatcgaccaggagctgagcaatgtgaatgcccaggccgaccgggccttcctgcagctggagaggaagtttggccgcatgaggcggctgcacatgcagaggaggagcttcatcatccagaacatccctggcttctgggtgacagccttcaggaaccacccccagctgagccccatgatcagcggccaggatgaggacatgctgcgctacatgatcaacctggaggtggaggagctgaagcacccccgggccggctgcaagttcaagttcatcttccagggcaacccctacttcagaaatgaaggcctggtgaaggagtatgaaagaagaagcagcggccgggtggtgtccctgagcacccccatccgctggcaccggggccaggacccccaggcccacatccacaggaaccgggagggcaacaccatccccagcttcttcaactggttcagtgaccacagcctgctggagtttgacagaattgctgagatcatcaagggggagctgtggcccaaccccctgcagtactacctgatgggagagggcccccggcggggcatccggggccccccccggcagcctgtggagagcgcccggagcttccgcttccagagcggctag

SEQ ID NO: 209293 - DNA, 1245 bp, Artificial Sequence
  derived and/or modified sequence
atgagcggcctggacggcggcaacaagctgcccctggcccagaccggaggactggctgcccctgaccacgccagcggagaccctgaccgggaccagtgtcaagggctcagggaggaaactgaggccacacaggtgatggcaaacacaggaggaggtagcctggaaacggttgctgagggaggcgcaagtcaagaccccgttgactgtggacccgcactgcgcgttcctgtcgccgggagtcggggaggggcggctaccaaggccggtcaagaggacgcgccaccttccacgaaaggtctggaggctgcaagtgccgcggaagccgccgactcttcacaaaagaatgggtgccagcttggagaaccccgtgggccagccggacagaaagcccttgaagcttgcggcgctggaggattgggatcccagatgattcctgggaaaaaagccaaggaggtgacaacgaagaagcgtgctattagtgccgccgtggaaaaagagggtgaggccggtgctgccatggaagaaaaaaaggttgttcagaaggagaagaaggtcgccggaggggtgaaggaagaaacccgtccgcgggcccccaagattaataattgcatggacagcctggaagcgatcgatcaggagctatccaatgtcaatgcccaagctgacagagcttttctgcagctagagcgcaaattcggcagaatgcgccgcctgcacatgcaacggcgttcatttataatccaaaatatccccggcttctgggtgacagcctttagaaatcatcctcaattgtcacctatgatcagcggacaggacgaagacatgttacggtatatgataaaccttgaggtggaggagctcaaacaccctagagctggttgtaagttcaaattcatttttcaggggaatccatacttccgcaacgagggactggtgaaagaatatgagagaaggagtagtggccgggtcgtctctctatccacacccatcaggtggcacaggggacaggatcctcaggcccacatccataggaaccgcgagggcaacacaatccctagcttctttaattggttcagtgaccactcactgctcgaattcgatagaatagccgaaattatcaagggcgaactgtggccaaaccccctacagtactacctaatgggcgaggggccccgtagaggaataagggggcctccccggcagcccgtagaaagcgcaaggagctttagattccaaagcggttag

SEQ ID NO: 209294 - DNA, 1245 bp, Artificial Sequence
  derived and/or modified sequence
atgtccggcctggacggtggaaataagctgccactggctcagacaggcggactggctgccccagatcatgcctccggcgatcctgaccgggaccagtgccagggactgcgcgaggaaactgaagcgacacaagtgatggctaatacgggcggtgggtccttagagacggttgcagagggaggcgcatcacaggaccccgttgattgtggtcccgcacttcgagtgcccgtcgcaggctcgcgcggaggcgctgccactaaggctggtcaggaagacgccccaccaagcacaaagggactcgaagcagcgagcgcagccgaagcagcggactcctcccagaaaaacggctgccagctcggcgagcctcgcggaccagctgggcagaaggcactcgaggcctgtggggcaggaggacttggttcacagatgattcccggtaaaaaggccaaggaggtgactactaagaagcgggctatttccgccgctgtggaaaaagagggtgaagctggagcagccatggaggagaagaaagtcgtgcagaaggaaaaaaaggtcgctggcggagttaaagaggagacgcgcccaagagccccaaagataaacaattgcatggacagccttgaagccatcgaccaagagttgtctaatgtgaatgcacaagccgatcgcgcatttctgcaattagagcgcaagtttgggaggatgcgtagattgcatatgcagagaaggtcttttataatccagaatatccccggtttttgggtgacagcatttcgtaatcatcctcaactctctcccatgattagcgggcaggacgaggatatgcttcgctacatgattaatttggaggttgaagagctgaagcatccacgcgctggatgcaaatttaaattcatcttccagggcaatccctatttcagaaacgagggcctcgtgaaggagtatgaaaggcgcagctctgggagagtggtttcattaagcacccccatcagatggcacagaggccaagacccacaggctcatatacacaggaatcgcgaggggaatacaattccgagcttttttaactggttcagcgatcattcccttcttgagtttgaccggatcgcagaaatcattaagggggagctttggccgaatccactgcagtactatctcatgggcgaagggccaagaagggggattagaggaccccctcggcagcccgtagagagcgccaggtcctttcggttccagtccggttag

SEQ ID NO: 209295 - DNA, 4111 bp, Artificial Sequence
  derived and/or modified sequence
ggaggggtggtgctagacgtttcgggcagagctcggccgctgcggaggacaaggaactctccctctcccactagtctgacttcttccaaaatgagcggcctggatgggggcaacaagctccctctcgcccaaaccggcggcctggctgctcccgaccatgcctcaggagatccggaccgagaccagtgccaagggctccgtgaagaaaccgaggcgacacaggtgatggcgaacacaggtgggggcagcctggagaccgttgcggaggggggtgcatcccaggatcctgtcgactgtggccccgcgctccgcgtcccagttgccgggagtcgcggcggtgcagcgaccaaagccgggcaggaggatgctccaccttctacgaaaggtctggaagcagcctctgccgccgaggctgctgacagcagccagaaaaatggctgtcagcttggagagccccgtggccctgctgggcagaaggctctagaagcctgtggcgcagggggcttggggtctcagatgataccggggaagaaggccaaggaagtgacgactaaaaaacgcgccatctcggcagcagtggaaaaggagggagaagcaggggcggcgatggaggaaaagaaggtagtgcagaaggaaaaaaaggtggcaggaggggtgaaagaggagacacggcccagggccccgaagatcaataactgcatggactcactggaggccatcgatcaagagttgtcaaacgtaaatgcccaggctgacagggccttccttcagcttgagcgcaagtttggccgcatgcgaaggctccacatgcagcgcagaagtttcattatccagaatatcccaggtttctgggttactgcctttcgaaaccacccccagctgtcacctatgatcagtggccaagatgaagacatgctgaggtacatgatcaatttggaggtggaggagcttaaacaccccagagcaggctgcaaattcaagttcatctttcagggcaacccctacttccgaaatgaggggcttgtcaaggaatatgaacgcagatcctctggccgggtggtgtctctttccactccaatccgctggcaccgaggccaagacccccaggctcatatccacagaaaccgggaagggaacactatccctagtttcttcaactggttttcagaccacagccttctagaattcgacagaattgcagagattatcaaaggagaactgtggcccaatcccctacaatactacctgatgggtgaagggccccgtagaggaattcgaggcccaccaaggcagccagtggagagcgccagatccttcaggttccagtctggctaatctctgtcctgtgagaagcttctgcacaagtttccttaccacctcctcttggacctatgcttggccaacagcatgcagtcttccatctgctttctcttcatactgtggattatcttttcctttggttctaaatcttcagtaatcggttgcaagattgttggcttacctgcctgtgccattcttcctctgggccttcatgcttttctgcattgtgttaacatgtttcaagtgcatggccttctacggcttctatgccaagcgtatgatactatagatatagtgtaccatactgcctttctttgcatggcttggaccctatctgtgaccatgctcttctcccaatttaagtggttctgtaccacaaagaatcttgatacattttcacaaataactgattgggcttcatactttatgctggctgtgtcctgatacccatgtacttatggtaagctatttgggtattaccactgcaagacaaaactgatatcttaacccggccatcaacccaaattggacattccagactaccaccaactggatcccagctgccttcctgggcttgtgccatccaccctactggttatctgatagaacaagctggtggctgatgggtgactgctaggcgtgactgaggtaatagatgaaaagtgttctatgttatcacattggttttcctgtacctttggttactctacgtcatgaccagctgctggtgagtatgaagcctgtgctatagcccacccctactcactctcaccttctggttgaactttgcttaggccaccattgtctgcctcatcaggaactatctgtagacgtagctcccagggagctcacagcaacaccccctaccaccaggatgggcagtaatatgtgacagagcccaaagcaaggctggaacgcagtcccttccagcttagtctttctgactcctagccaacaaaccatccttaatgtgagcaacttctttaggcatttcctcttttccccgcctgcacccactctgaacatgacaaaagttgccagagttggggcattgaggaagagatatttctggaatgtgagacttgttatgcctctgtctctttctctccctcctcctcccctctccctccccctctccctcccatcccttttcttccctttcactctgaagcagttttagcttattaacagaaaacaaaactggcaaagcaggctttttgtttaatttgctctttccctgattgtgttcagagagaaaggttatgattaaatgggctccagatctcttattgcccttattcctccaccccacttcttttagcaaggtctgaaagtttcaaagggagacctataggttaattgtttagttataggcagtgttaaattaggcagattttgacatatttatctttttaccccatccattctaccaaaacctgtgtatttcttgagtttttagtttgagaagctggaaagagagagaagggcctcacagtgatgggttcaggacgggtcaaaggcaaaggcctttgtgatgtgagcaaaggcaaccaaaacttagcctcactccacttttctaaagatggaaattcttttttgggccttggactgcttctagggtagcattttgtaggtcactcttctcctttgtactattttgtttctgccctgatgtcccttgggtctccatcctactgcctggctttcttggccctcatttctcagcttctgcatttccttccctgctcctaacaaatgaagaagcaggctgcagcctgcattgtggaagatctccagcctccttgtaggggataaggggatgtgcagcatctgtgtggattttcacggacaagttccagtaggtgggacagtgatgccgtcaaggcttagttatgatcatgtgtggtgataaagaccatccaccatcacccttttcccctttggttttgaaggccttgccctaagctacctgagggtttaggaggtctgaacacacacagtggagaggttaatctaggttgggaaactgagtaaaagtccagagcaggaatgagcctgctgtggcgtgggtttggaaaggctcacaggaaagaacctgcaggatcaggggtgggaggggaggcccctgaggtgctctccagggaagaggggctggggtttaaatagcatgcttggaggaagattttccttcaatttttcctaagtccttgaattcaccagtagatttttgtaaacaaaatgtaagtcgatgttttctctcaattatcctaggagtgacctttatatgtgtggaagattaatggtatatgctccttatgtcactgtttttgagtaaaatccatttcctttctctgtttcagcctatgacaaaattgatgtttacaggcctgctttttgcttataattgacaacatgtgcaaaaataccaaatttgtgtcctgtgcagtatgaagaattcagtgaatattcattaatgtattagcttgttttgctctctgttcatatatggctctattcttagaaatataatttgaatgtgatctttcaatagtctgaatattttacaaattatagctatgtcttgtgaaaataacctcaaaaagaaaaatacgactctgttgtcttacttgatatttcttgccctagtaatgtacttgacatttatgttcctaagcagtgtaagtaccagtagaatttctctgtcaaactcaatgatcatttagtacttttgtcttctcccatgtgcttgaaggaaaaataaagtgtcactaccgtatttcttgttttcatc

SEQ ID NO: 209296 - DNA, 1245 bp, Artificial Sequence
  derived and/or modified sequence
atgagcggcctggacggcggcaacaagctgcccctggcccagaccggcggcctggccgcccccgaccacgccagcggcgaccccgacagagaccagtgccagggcctgagagaggagaccgaggccacccaggtgatggccaacaccggcggcggcagcctggagaccgtggccgagggcggcgccagccaggaccccgtggactgcggccccgccctgagagtgcccgtggccggcagcagaggcggcgccgccaccaaggccggccaggaggacgccccccccagcaccaagggcctggaggccgccagcgccgccgaggccgccgacagcagccagaagaacggctgccagctgggcgagcccagaggccccgccggccagaaggccctggaggcctgcggcgccggcggcctgggcagccagatgatccccggcaagaaggccaaggaggtgaccaccaagaagagagccatcagcgccgccgtggagaaggagggcgaggccggcgccgccatggaggagaagaaggtggtgcagaaggagaagaaggtggccggcggcgtgaaggaggagaccagacccagagcccccaagatcaacaactgcatggacagcctggaggccatcgaccaggagctgagcaacgtgaacgcccaggccgacagagccttcctgcagctggagagaaagttcggcagaatgagaagactgcacatgcagagaagaagcttcatcatccagaacatccccggcttctgggtgaccgccttcagaaaccacccccagctgagccccatgatcagcggccaggacgaggacatgctgagatacatgatcaacctggaggtggaggagctgaagcaccccagagccggctgcaagttcaagttcatcttccagggcaacccctacttcagaaacgagggcctggtgaaggagtacgagagaagaagcagcggcagagtggtgagcctgagcacccccatcagatggcacagaggccaggacccccaggcccacatccacagaaacagagagggcaacaccatccccagcttcttcaactggttcagcgaccacagcctgctggagttcgacagaatcgccgagatcatcaagggcgagctgtggcccaaccccctgcagtactacctgatgggcgagggccccagaagaggcatcagaggcccccccagacagcccgtggagagcgccagaagcttcagattccagagcggctag

SEQ ID NO: 209297 - protein, 235 aa, Artificial Sequence
  derived and/or modified sequence
MGIGKSKINSCPLSLSWGKRHSVDTSPGYHESDSKKSEDLSLCNVAEHSNTTEGPTGKQEGAQSVEEMFEEEAEEEVFLKFVILHAEDDTDEALRVQNLLQDDFGIKPGIIFAEMPCGRQHLQNLDDAVNGSAWTILLLTENFLRDTWCNFQFYTSLMNSVNRQHKYNSVIPMRPLNNPLPRERTPFALQTINALEEESRGFPTQVERIFQESVYKTQQTIWKETRNMVQRQFIA

SEQ ID NO: 209298 - DNA, 708 bp, Artificial Sequence
  derived and/or modified sequence
atgggcatcggcaagagcaagatcaacagctgccccctgagcctgagctggggcaagagacacagcgtggacaccagccccggctaccacgagagcgacagcaagaagagcgaggacctgagcctgtgcaacgtggccgagcacagcaacaccaccgagggccccaccggcaagcaggagggcgcccagagcgtggaggagatgttcgaggaggaggccgaggaggaggtgttcctgaagttcgtgatcctgcacgccgaggacgacaccgacgaggccctgagagtgcagaacctgctgcaggacgacttcggcatcaagcccggcatcatcttcgccgagatgccctgcggcagacagcacctgcagaacctggacgacgccgtgaacggcagcgcctggaccatcctgctgctgaccgagaacttcctgagagacacctggtgcaacttccagttctacaccagcctgatgaacagcgtgaacagacagcacaagtacaacagcgtgatccccatgagacccctgaacaaccccctgcccagagagagaacccccttcgccctgcagaccatcaacgccctggaggaggagagcagaggcttccccacccaggtggagagaatcttccaggagagcgtgtacaagacccagcagaccatctggaaggagaccagaaacatggtgcagagacagttcatcgcctag

SEQ ID NO: 209299 - DNA, 708 bp, Artificial Sequence
  derived and/or modified sequence
atggggataggcaagtccaagatcaactcgtgcccattgtccctctcctggggaaagcgccattcagttgatacgtcaccaggttaccacgagtctgattcaaagaagtccgaagatctttccctgtgtaatgtagctgagcacagcaacaccaccgaggggcctactggaaagcaggaaggagcccagtctgtggaagagatgtttgaagaagaagcagaggaggaggtctttctcaagtttgtcattttgcacgcagaggatgacaccgacgaggctctccgggtgcagaatcttttacaagacgattttggcattaaacctggtataatcttcgcggagatgccttgcgggaggcaacatctacaaaatcttgacgatgccgtcaatggtagtgcctggacgatactcctcctcacagagaatttcctccgggatacttggtgcaacttccagttctacactagcctaatgaactccgtcaatcgtcagcataaatacaactctgtaatccccatgagacccctaaataacccgcttccaagggagaggactccttttgcacttcaaaccataaacgcgctcgaagaagagtctagaggattccccacccaagttgaaaggattttccaggagtccgtgtataaaacccagcaaacgatctggaaagagacccgaaatatggtgcagaggcagttcatcgcttag

SEQ ID NO: 209300 - DNA, 708 bp, Artificial Sequence
  derived and/or modified sequence
atgggcatcggcaagagcaagatcaacagctgccccctgagcctgtcctggggcaagaggcacagcgtggacaccagccctggctaccacgagagtgacagcaagaagtctgaggacctgagcctgtgcaatgtggccgagcacagcaacaccacagagggccccaccgggaagcaggagggcgcccagagcgtggaggagatgtttgaggaggaggccgaggaggaggtgttcctgaagtttgtgatcctgcacgcagaagatgacacagatgaggccctgcgggtgcagaacctgctgcaggatgactttggcatcaagccaggcatcatctttgctgagatgccctgtggccggcagcacctgcagaacctggatgatgctgtgaatggcagcgcctggaccatcctgctgctgacagagaacttcctgcgggacacctggtgcaacttccagttctacaccagcctgatgaacagcgtgaaccggcagcacaagtacaacagcgtcatccccatgaggcccctgaacaaccccctgccccgggagaggaccccatttgccctgcagaccatcaatgccctggaggaggagagccggggcttccccacccaggtggagcgcatcttccaggagagcgtgtacaagacccagcagaccatctggaaggagaccaggaacatggtgcagaggcagttcatcgcctag

SEQ ID NO: 209301 - DNA, 708 bp, Artificial Sequence
  derived and/or modified sequence
atgggcatcggcaagagcaagatcaacagctgccccctgagcctgtcatgggggaaacgacactccgtggatacctcccccgggtatcatgagagcgattcaaagaaatcggaggacctctccctttgcaatgtcgccgaacattccaataccaccgagggacccacaggaaagcaggagggggctcagagcgtggaagagatgtttgaagaggaggcagaagaggaggtctttcttaaattcgtaattctgcatgccgaggatgacaccgacgaggcgctccgggtgcaaaacctgcttcaggacgatttcgggattaagccaggaatcattttcgcggaaatgccctgtggtcgccagcatctccagaatttagacgatgcagtcaatggctctgcatggacaatattgctgctgaccgaaaacttcctcagagacacatggtgcaacttccaattctacacttcccttatgaactctgttaatcgtcagcataagtataactcagtaatccccatgaggccacttaacaacccactccctagagagagaaccccgttcgccctccaaacgattaacgctctcgaagaagagtcacgtggatttcctactcaggtggaaaggatttttcaggagtcagtttacaagactcagcagaccatctggaaagaaaccaggaatatggttcagcgccaatttattgcatag

SEQ ID NO: 209302 - DNA, 708 bp, Artificial Sequence
  derived and/or modified sequence
atggggatagggaagtcaaaaattaactcttgtccgcttagtctgagctgggggaagagacatagcgtcgatactagccctggctatcatgaaagtgattcaaaaaaatccgaagacctttccctgtgtaatgtcgctgagcactctaacaccaccgagggtccgaccgggaagcaagaaggagcccaatcagtggaggaaatgtttgaagaagaagccgaagaggaggtcttcctgaagttcgtgatactccatgcagaggatgacaccgatgaagccttaagggtgcaaaacctgttgcaggatgattttgggatcaagccaggcatcattttcgctgagatgccttgcgggaggcagcaccttcagaatctggacgacgcagtaaatggaagcgcttggaccattctgctcctcactgagaattttctccgcgatacctggtgtaacttccagttttacacctccttgatgaactccgtcaatcgtcagcacaagtataattccgtgatcccaatgagacccctgaacaaccctctgcctagagagagaactccatttgcccttcaaactattaatgcccttgaggaggaaagtaggggctttcctacacaggtcgagaggatctttcaggaaagcgtttacaagacacagcagacgatttggaaagagacaagaaatatggtgcaaaggcagttcatcgcctag

SEQ ID NO: 209303 - DNA, 3049 bp, Artificial Sequence
  derived and/or modified sequence
acattaacccctgactcacagctggaccgccccggcccgcagcgccacgtcccgggtggggcctgccacggcaaagcagcagtccggcctcgagcggcccctcgggggcggcggggtgggcgccaacagcagtcaggcctgacaagcggcgacctccaagggtgaggcctctgcgggcccccgactcacgcgcgtccgggctctgcaagcgcggtggggagcaggctgctgtggtcgcggggactgggttgcggcgcgccgcgtacgggacggccccaaactctcgacgcccggggcaagacgcccaccccctgggcgctctcgctgggccagaaaggaagacagaaaagccgcgggctgactgtggtggcgctcgcctgcagattgaaaagaaatgctgagaaatacataaagttttcctcttctgccttggatatttataatgggtatcgggaagtctaaaataaattcctgccctctttctctctcttggggtaaaaggcacagtgtggatacaagtccaggatatcatgagtcagattccaagaagtctgaagatctatccttgtgtaatgttgctgagcacagcaatacaacagaggggccaacaggaaagcaggagggagctcagagcgtggaagagatgtttgaagaagaagctgaagaagaggtgttcctcaaatttgtgatattgcatgcagaagatgacacagatgaagccctcagagtccagaatctgctacaagatgactttggtatcaaacccggaataatctttgctgagatgccatgtggcagacagcatttacagaatttagatgatgctgtaaatgggtctgcatggacaatcttattactgactgaaaactttttaagagatacttggtgtaatttccagttctatacgtccctaatgaactccgttaacaggcagcataaatacaactctgttatacccatgcggcccctgaacaatccccttccccgagaaaggactccctttgccctccaaaccatcaatgccttagaggaagaaagtcgtggatttcctacacaagtagaaagaatttttcaggagtctgtgtataagacacaacaaactatatggaaagagacaagaaatatggtacaaagacaatttattgcctgagatgaaacatataacatgtggctggctcttgttttgtaaaccaaatgattaatcttcacttgagaaagcagtttctaggaaatgtttaaataaaagagagtcttcaccttaaagaaacctatggagcacaagaaagataaatttctgcaggacagcctataaaattgtggtactttttgatgtttcagtaaacttgacattgtcagagtttcaaggacttttctttcacaattttcctagttcatggatatgaaaaaggaattctcaatccatattccttgtattgaaccttgaacaaaaacttgtatgacagacatttttaaaaatgtgacaacacttttattctctgaattttgatctcaaaggacacagaaaaaaaatggccccaggagatctgatcacacttcctcctgaggcacctctcatggatgttgcaataagcattcgggtactatcacccagaaatatgaattgccagaatagaacatttagcatgttaagcgttgatgcatataaaatcagaaatagatgtgagaatggtggaactttttaaaagaacccagtcaaatgtattttctgctgaaatctgcatatttggaggcatttcccaccaccgattcacagcccatttgatagtgtggtagttagggacttcgtggagtggtgttcagacgtcccctggggcttaaatctcttcatattagtcatcatttgtaactatggctttatttgcagagcttctaaaaggcgtataactgtgtgagtggccagatattcactttttaaatcaaaaacctctcttatggaagctttaaaagtttccgtcacacacaattctcttctcaggaagtatttctcatttaggtcttcaaagtagcctgactgtgtgcatgtgtgtgtgtgataggttatttataaagactttggatagaaggagatgtattttattacctcctattctagagccccatgctcctaacaagccagagaggccccaaacaggattgtttctttcctccacagcccttctgcccatctgagattgagggagcatcgtccacttgagatcagggatggggtggagaatgggtcatgtcatgtaatgagaaaagccctcttcgggatcatgagacttggttctagtccaatttctgccactgaggatgaatgtaactgtgggcaaactatttaccctcctttatctgtgaaatgaaagggttgaattgatggatctctaaaggcttttgtcctctatgaggatgtgaaaaactagggaccacaaaagggaacaagcaaaaaagtttggattcgataaagtgatatgtaatagttgcagaaggctttatatatgcttataatgaaaagatattttttgtatattgacagcataatttatttttaatgctgtcattacacttaaagtcacaggaaaaaaatatacatgcttactcaggctttcttaaaaataaatttttatagagatccttgagtaaagacattttgcttaatttcttttttcttattccccacttgtatatcccctaccagtaccgggatctgcacacatctttttgcagttacctcttcatagccatgaaccaaaacgttctatgaggagcatgcaagtaagtcaagcctcctattctgttagtacttattagaggaggagatggttttcattgcatagtgacattttcttagccttaacgttctgatagtagcttactactcacttctctttttcagttttcataataagtattcatttttttgccataatgcttcctgtaaagccaattttatatactaataaaacatgaactgcccactcttcatgcctgccaaacttggggcaattgatgctaaatggtatttttaaaataaatgtttttattcttt

SEQ ID NO: 209304 - protein, 318 aa, Artificial Sequence
  derived and/or modified sequence
MEQYTANSNSSTEQIVVQAGQIQQQVQGQPLMVQVSGGQLITSTGQPIMVQAVPGGQGQTIMQVPVSGTQGLQQIQLVPPGQIQIQGGQAVQVQGQQGQTQQIIIQQPQTAVTAGQTQTQQQIAVQGQQVAQTAEGQTIVYQPVNADGTILQQVTVPVSGMITIPAASLAGAQIVQTGANTNTTSSGQGTVTVTLPVAGNVVNSGGMVMMVPGAGSVPAIQRIPLPGAEMLEEEPLYVNAKQYHRILKRRQARAKLEAEGKIPKERRKYLHESRHRHAMARKRGEGGRFFSPKEKDSPHMQDPNQADEEAMTQIIRVS

SEQ ID NO: 209305 - DNA, 6236 bp, Artificial Sequence
  derived and/or modified sequence
cattttgctaggcagcggcagtggcggcggcagcggcggctggagcctctgattgggtttcggagtccggtactggagccaatcagcgcgggcagcgaaccgggggagcgaggcacggagtgtacctcacagccttctaggatctccagagtggacaggaatctcacttggagggaccatggagcagtatacagcaaacagcaatagttcgacagagcagattgttgtccaggcaggacagattcagcagcagcagcagggtggtgtcactgctgtgcagttgcagactgaggcccaggtggcatccgcctcaggccagcaagtccagaccctccaggtagtccaagggcagccattaatggtgcaggtcagtggaggccagctaatcacatcaactggccaacccatcatggtccaggctgtccctggtggacaaggtcaaaccatcatgcaagtacctgtttctggaacacagggtttgcagcaaatacagttggtcccacctggacagatccagatccagggtggacaggctgtgcaggtgcagggccagcagggccagacccagcagatcatcatccagcagccccagacggctgtcactgctggccagactcagacacagcagcagattgctgtccagggacagcaagtggcacagactgctgaagggcagaccatcgtctatcaaccagttaatgcagatggcaccattctccagcaagttacagtccctgtttcaggcatgatcactatcccagcagccagtttggcaggagcacagattgttcaaacaggagccaataccaacacaaccagcagtgggcaagggactgtcactgtgacactaccagtggcaggcaatgtggtcaattcaggagggatggtcatgatggttcctggggctggctctgtgcctgctatccaaagaatccctctacctggagcagagatgcttgaagaagagcctctctacgtgaatgccaaacaataccaccgtattcttaagaggaggcaagcccgagctaaactagaggcagaagggaaaattccaaaggagagaaggaaatacctgcatgagtctcggcaccgtcatgccatggcacggaagcgtggtgaaggtggacgatttttctctccaaaggaaaaggatagtccccatatgcaggatccaaaccaagccgatgaagaagcaatgacacagatcatccgagtgtcctaaccccacgccatgtgatggagctgatcaaggtcatgtttctcactgttccaggaaattgatcaactcttccaatgggacattgatgatcacattctgccctttactacaggacagaaaccacttagtttttaataagtggctcagtattacaattgcagcgatgcctggcaaattgaagttgcaagcctttgtcttactctttcagtcaggacctatttcagactgttgatgacattgacatttcatggattcggatgatgcaaggagacacatgccaccccagcagtacacaaagcacttaccttgactggtgaagtcagccagccatctcagcagggaagaacaaccttctcaaccaaaactgcaatcaggaaagcagcagcccactccttcccatggaatctagacagcatttatccctctggtgggggaatctcacactgactaactgaatggacgctttgtattcagagatggcttccaggcaaggaagttctatcttgtgatacggaaacaataaattcctgagatacattcttccaatctgtggtaataataagaattcctctctgcccagatggtaggttgatatttctggactctagccaagaaaaagctaattctggggatagaatgataaaagactcaagcactaaaaatatacattgccgaatctctttttctagctttgaaaagttgtggcctgcttgtccctctgttgactggtcatctggaccatcgtacttgctgtggctacttctaagacaatgtagagggttattaaaccttgaaactgcctttcctaagtagagaacaagactattcaacaacttctttgctgaagcactgaggagatttgtaatactcctaaaggaagggccaaactagagattttcaatcatagactttgtgacagcatttggggaactaaaagattcatgtgtttcagcctagtgggagagagtgggggagaggaagagagagagagagcatgtatacccgtatgttatcatagagcacgattctccagtggatggatacctggaatggatcattaagatgaagagagtaattcacatttactctagaacctttaacaagcactgaaaggaagaagcctgagatttgatccttgacaatttctggaaagcactggtcagtcacactgtcctggacagagtccaagttacccactaaagcttgaggtggatgttggcttcactcctgcagcacaatgctggccctagaaagcgagcattttcattcttcccatggcagctgattctttggtgccagttttcatgttttctccataggccttgtgcagaaaggttttctcattgcatccatactgtgagaataaactgcagactgaaagaaacatgcctgcagggtcaggaactgggccactgttcccagaacgggttgtgcctcagaaatctatttctcttttagatgttgaaccctgagagaactaagatgatatttcagaagagttggctgccttctctggaaacaaggaaaacccaataattccgaggaacattgggggttaaataccaagaataaaaattggttcttctttgacttcagcttaactgtattaagacagaaattaagccctctaaaaacaccacaaagagagatgattgtaatgatagaaatagaggtacagagctatgcaaaggaaacaggaagtgaaatattcctagtcccagggatctggtaatcgctcctggcttccagatgtcaaaggactgatcctttggtaagctcactagaaacttctagctctacaagagtttgggatattaatgttattcagtaagtcccaagtttttcagagaatagattactaacaatgaggaatttatattccttggttaatttaggagtctaagatgcagagttcagaaagaaattactcagacctaactttgagtgcttaagctgccaacagttagaagatgctatttatttgtgtctgtaagtttgtacatagtaatgccagccttgttgctgaattttttatttggggggagatgactttgaattttgtttgaaatgcttcagttgtcattttgtcattgcatttcaaatagctcatgacccttttcttgtggtcactttggcacaccatagtagcccacaaagtgggggcagggtattgacatttggattttttctttgatactagttcttttattcatttttatttgtgactgtagtgataactttacagatggagaaagagtgaatggatgaatgaataattggtttaatgcctagttatgcaacttgagtgcttttttttttttttgcaggataattttaagtgtatatattttaactgcactggtacattgaacatgtcagtgtcgatgccactggaccaacagagcattttgtggctatagggtgcctgataataatgtcttgatttttctttgggattcaactatatcgaaggtttttcccccagcagtatgggggcgtacaggtgatcgatcattaatgtcattgcaattgttattttttaaaataaatttataaaaataaccgaaaagtaatgtgacttttgaggaatctgcaactcctgggttctagtttgtgtttccagtgttgaaattttgatctcccccgacaagacttgtctgcatggacggtgtctctgtaaacagtatcaaacttgtaatgtctgagcctcttagctttatctccccttaatttcttcccttttggcccttccaccctgttgaggagattttttctgtcacctgcaggctgatcatacatttgatgctactactgaaagtgtttatcaaaatgtgatgaagtaattccatgaggaaaattagccgttatcacaaaaacagccttaagtattgtagaatttcaggtagtgaagatgtactatttacgttttgttagattttgttttggcagaagaccaaaacaaaagtacttttctgattgttaaaaatccacagcatgctcaccttgttactgttttaccttacggtcgctgggaatctaagcaacaaagactagaagcctccgatatgccattatcaacacacaagagacaaacagcccgaggaagcactcaatgatgagagcagtagacctgccctggcagatgagagaggagaaactctccacaatgaaggaaaagcactgacagtatttgatagctttagtcaaactgtgcttgagtttggcttagatttatgccagtggaacctgtccttaccaaattcagagatgacccaagattctactctgtggtatgagggaaagacctctcgatatttatctcacaccaacggctttatcgtaggagcgtcttcgcctcccccgtttccagtagaaaagacagctttgctcctttgaaagcgcagaccgccgcacctccagccccttctccccggggaagtaggccccgctaagaatgtgggaaggtggtggggcggcgactgaagtcgcttccgattggcgttgtcccaaggaagcctgcgcggattgatcggcggcaggcctccaatagagcctgctaggcggattggctgctacgcggctgggccctgtttccggtacctaggcgggcagccatggtgaccggcgagcggcatgcgacgccgcctctgtggcctgtggaggcccgcttggcggcgctgcttcccgacctactggtctttcggaagcctcggggatgggaacccgagctcgccacggcccagggcgtcctcctaggcgtccatgtgacgggtgagggcgacggccggcacttgcacttaagtctcctggcctgcgggagaggcggccgttgggtctaagcccctggaggcctcgacggttacaggcctagcctcccgcgagctaaggcacagtttaacttcgtgctgcggcttccttaggaaactttgagtatcttcgttttagcgtgggaggacatcttttgggatgaaccggctcagtccttgagctcaccccaaagatgatgaaattgaaactcagaggaaaggatttttacaggaccacgccccgggctttgaacccgtttttcccaaccccgagcattttctattaagcgttctgtttcaattattttattcgttcagttaattcgttcttggcgtcataagtatatgcccgccgttgttctggccgtagctatctagcagccactccgcgagtcgttcatttaacaaatacttactctgtgtcagggatatgaagatgggtaataccaggtgcctgtcctcactgtgtgagtggttctctagccagacatgaggagggatcctattgtttcccatagctaggcagcctaagagagtaggggaaagagctggctccagatgaaaagggcaccatctccagctcttggaagcagagagggtggtcctttggattcccagtggcagcagcaaccaacctggcccttagtagtttctaagttacaccatgttaatggataaaggaattactcagcttgaagggatctgtttcctttacactggcctgatgtgtggggagaaaggggccaaaaagtttaggatttggagttaacatcgtaatttctgctttgttggtcagggtttacagcattaatggacaggttcaccctgacctacaagtcggaacgtgacatggacaaactggcccatatcttcagttattacattagtgacatcgtggagcgtgagtgatcattgtagggtaacaaggtgtggtgctgggctcctgggggtttataaaagaagggggccagaagtactttaaaacaggtaccaaagggtcattcctttagcatcattcatctttggtttcttcaagttgccactgaaaagctagacctttgcctattatctgctaatctacccagtctcacattctattgactcattgttcaaagggggggcaggaggagctaatttcctttgcacatttgtattttatttcaaaataaagtattctcttctaacaataacgtaaaaaaaaaaaaaaaaaa

SEQ ID NO: 209306 - DNA, 1044 bp, Artificial Sequence
  derived and/or modified sequence
atggagcaatatactgccaattctaacagcagtaccgaacagatcgtggtgcaagccggccagatacagcagcagcagcaggggggagtgactgccgttcaattgcagacggaggcgcaagtcgcatccgcgtctggacagcaagtgcagaccctccaggtggtccagggtcagccactgatggtgcaggtttctgggggccagctgataactagtacagggcagcccatcatggtccaagcggtgcccggtgggcagggccagactatcatgcaggtcccggtcagcggcacacagggccttcagcagatacagctcgtcccacccggccagattcaaattcagggaggacaggcagtgcaggttcaggggcaacaagggcagacacagcaaattatcatccaacaaccacagacagccgttaccgccgggcagacccaaacgcagcagcagattgcagtccagggccagcaagtcgctcagaccgccgagggacagactatcgtgtaccaacccgtcaacgccgacggcacaattctgcaacaggtcaccgtgccagtctcaggcatgatcactattcctgccgcttctctagcaggcgcgcagatagtccaaacaggtgccaacaccaacacaaccagcagtggacagggaacagtcacggtcacccttcccgttgctggcaacgtggtcaacagcggaggaatggtgatgatggttcctggagcgggtagtgtgccagccattcagcggattccactgcctggcgccgaaatgctggaggaagagcctctctatgtcaatgccaaacaatatcatcgcatccttaagagaaggcaggcccgcgctaaactagaggcagagggcaaaatccccaaggaaagaagaaaatacttacacgaatctaggcatagacacgctatggctagaaagaggggcgaaggaggtaggtttttttcccctaaggaaaaggatagccctcacatgcaggaccctaatcaggccgatgaggaggctatgacacagataattcgagtgagttag

SEQ ID NO: 209307 - DNA, 957 bp, Artificial Sequence
  derived and/or modified sequence
atggaacagtacacagctaacagcaactcaagcaccgagcagatcgtggttcaggctggacaaatccagcagcaggtgcaggggcaaccattgatggtgcaggtctccgggggacaactgatcacctccacaggccagcccatcatggttcaggcagtgcctggtggccagggccagaccataatgcaggtacccgtgagcggtacacagggactacaacaaatacagctggtgccccctggccagatccagattcaggggggccaggctgtccaggtgcaggggcagcagggacagacccaacagatcattattcagcaacctcagaccgctgtaacagcgggccagacacagacacagcagcaaatcgctgttcagggacagcaggtcgcccagaccgccgaagggcagaccattgtgtaccagcctgtgaacgcggatggcacgatcctccagcaggtgactgttccggtcagtggcatgatcactatccctgcagcctcgcttgccggcgcccagatcgtccagactggggctaatactaataccacaagcagtggccaaggaacagtgactgtgacacttcctgtcgccggcaacgtggttaattctggcgggatggtcatgatggttccaggggcaggctcagtccccgcgatacagcgcatcccactccctggagcagaaatgttagaggaggagcctctctatgtcaacgctaagcagtaccatcgcatactgaagagaagacaggcacgcgctaaactggaggcggagggtaaaatcccaaaagagcgtaggaaatatctgcacgaaagccggcatcgccacgctatggcacgcaagcgcggggaagggggacggttcttctccccgaaagaaaaggactcaccccacatgcaggatcccaatcaggctgacgaggaagcaatgacgcagattatccgagtgagttag

SEQ ID NO: 209308 - DNA, 1044 bp, Artificial Sequence
  derived and/or modified sequence
atggagcagtacacagccaacagcaacagcagcacagagcagatcgtggtgcaggccggccagatccagcagcagcagcagggcggcgtgacagctgtgcagctgcagacagaggcccaggtggccagcgccagcggccagcaggtgcagaccctgcaggtggtgcagggccagcccctgatggtgcaggtgtctgggggccagctgatcaccagcacaggccagcccatcatggtgcaggccgtgcctgggggccagggccagaccatcatgcaggtgcctgtgtctggcacccagggcctgcagcagatccagctggtgcccccaggccagatccagatccagggcggccaggccgtgcaggtgcagggccagcagggccagacccagcagatcatcatccagcagccccagacagctgtgacagctggccagacccagacccagcagcagattgctgtgcagggccagcaggtggcccagacagctgagggccagaccatcgtgtaccagcctgtgaatgctgatggcaccatcctgcagcaggtgacagtgcctgtgtctggcatgatcaccatcccagctgccagcctggccggggcccagatcgtgcagacaggagccaacaccaacaccaccagcagcggccagggcaccgtgacagtgaccctgcctgtggccggaaatgtggtgaacagcggcggcatggtgatgatggtgcctggagctggctctgtgcctgccatccagaggatccccctgcctggagctgagatgctggaggaggagcccctgtatgtgaatgccaagcagtaccaccgcatcctgaagaggcggcaggcccgggccaagctggaggccgagggcaagatccccaaggagaggaggaagtacctgcacgagagccgccacagacatgccatggccaggaagagaggagagggcggccgcttcttcagccccaaggagaaggacagcccccacatgcaggaccccaaccaggctgatgaggaggccatgacccagatcatccgggtgtcctag

SEQ ID NO: 209309 - DNA, 957 bp, Artificial Sequence
  derived and/or modified sequence
atggagcagtacacagccaacagcaacagcagcacagagcagatcgtggtgcaggccggccagatccagcagcaggtgcagggccagcccctgatggtgcaggtgtctgggggccagctgatcaccagcacaggccagcccatcatggtgcaggccgtgcctgggggccagggccagaccatcatgcaggtgcctgtgtctggcacccagggcctgcagcagatccagctggtgcccccaggccagatccagatccagggcggccaggccgtgcaggtgcagggccagcagggccagacccagcagatcatcatccagcagccccagacagctgtgacagctggccagacccagacccagcagcagattgctgtgcagggccagcaggtggcccagacagctgagggccagaccatcgtgtaccagcctgtgaatgctgatggcaccatcctgcagcaggtgacagtgcctgtgtctggcatgatcaccatcccagctgccagcctggccggggcccagatcgtgcagacaggagccaacaccaacaccaccagcagcggccagggcaccgtgacagtgaccctgcctgtggccggaaatgtggtgaacagcggcggcatggtgatgatggtgcctggggccggctctgtgcctgccatccagaggatccccctgcccggggctgagatgctggaggaggagcccctgtatgtgaatgccaagcagtaccaccgcatcctgaagaggcggcaggcccgggccaagctggaggccgagggcaagatccccaaggagaggaggaagtacctgcacgagagccgccacagacatgccatggccaggaagagaggagagggcggccgcttcttcagccccaaggagaaggacagcccccacatgcaggaccccaaccaggctgatgaggaggccatgacccagatcatccgggtgtcctag

SEQ ID NO: 209310 - DNA, 1044 bp, Artificial Sequence
  derived and/or modified sequence
atggagcagtacaccgccaacagcaacagcagcaccgagcagatcgtagtgcaggccggtcagattcagcagcaacagcaagggggagtaaccgcggttcagttgcaaaccgaggctcaggtggcttccgcctcagggcagcaggtgcaaaccctccaggtagttcaggggcagccattaatggtccaggtctctggtggacagctgataacatccacagggcagcccataatggttcaggccgttcccggcgggcagggtcagaccatcatgcaggtgcccgtgagcggaactcaggggctgcagcaaattcagctggtgccgcctggtcagatacagattcagggaggccaggccgtgcaggtgcaagggcagcagggtcagacacagcagataataatacagcagccacaaacggcagtaacggccggacagacacagactcagcagcagatcgctgtacaaggccagcaggtcgcccagaccgctgaagggcaaacaatcgtttaccaacctgttaatgccgatggcacaatactacagcaagtgacggttccagtctccggaatgatcaccattcccgcagcttctctggccggcgctcaaatagtgcaaactggcgccaacaccaacacgacaagtagcgggcaggggacagtgacggtgacacttcctgtggcaggcaatgtcgtgaatagcggaggaatggttatgatggtgcccggagctggctccgttcccgccatccagaggataccactgcccggcgccgagatgctggaggaggaacccttgtatgtgaatgccaaacagtaccataggatcctgaagcggcgacaggctcgggccaaactggaagcagaaggcaagatacccaaagagcgccggaaatacctccacgagtcacggcacaggcatgctatggctcggaaaaggggcgagggggggagatttttttcccccaaagagaaggacagtccgcacatgcaagatccaaatcaagcagatgaggaagccatgacccagattatacgagtgtcttag

SEQ ID NO: 209311 - DNA, 957 bp, Artificial Sequence
  derived and/or modified sequence
atggagcagtacaccgccaacagcaacagcagcaccgagcagatcgtcgtgcaggcagggcagatccagcagcaggttcaagggcagcccctgatggtacaggtctccggaggtcagctgattacatcgacgggccaacctatcatggtccaggctgttccaggcggtcagggacaaaccatcatgcaggtgcctgtatccgggacccaggggcttcagcaaatacagctggtacccccaggtcagattcagatccaaggcggccaagccgtccaggtccaggggcaacaggggcagacacagcagattattatccaacagccccaaaccgccgtgacagctgggcaaacacagacccagcaacagattgccgtccagggacagcaggtggctcaaaccgctgaaggacaaactatcgtctatcagcccgttaatgccgacgggactattctccagcaagtgacagttcctgtgtccgggatgattaccattcctgccgcgtcgctcgccggcgctcagattgtgcagacgggggccaatactaacactacttcctctgggcagggcactgttaccgtcacactgccagtggccggaaacgtcgtgaattctgggggcatggtcatgatggtcccaggcgcaggcagcgtgcccgctatccaacgcatccctcttcccggagccgaaatgctggaggaggagcccctttacgtcaacgcaaaacagtaccataggatcctcaagagacgccaagctcgggccaaactcgaagcggaaggcaaaattccaaaggagcgccgcaaatatctgcacgagagtaggcacaggcacgctatggctaggaaacgcggagaaggggggagattcttctcaccaaaggaaaaggatagcccccacatgcaggatcctaatcaagccgatgaggaggctatgactcaaattatcagagtgagctag

SEQ ID NO: 209312 - DNA, 3811 bp, Artificial Sequence
  derived and/or modified sequence
gattcccctttgttcgggttcgccattttgctaggcagcggcagtggcggcggcagcggcggctggagcctctgattgggtttcggagtccggtactggagccaatcagcgcgggcagcgaaccgggggagcgaggcacggagtgtacctcacagccttctaggatctccagagtggacaggaatctcacttggagggaccatggagcagtatacagcaaacagcaatagttcgacagagcagattgttgtccaggcaggacagattcagcagcagcagcagggtggtgtcactgctgtgcagttgcagactgaggcccaggtggcatccgcctcaggccagcaagtccagaccctccaggtagtccaagggcagccattaatggtgcaggtcagtggaggccagctaatcacatcaactggccaacccatcatggtccaggctgtccctggtggacaaggtcaaaccatcatgcaagtacctgtttctggaacacagggtttgcagcaaatacagttggtcccacctggacagatccagatccagggtggacaggctgtgcaggtgcagggccagcagggccagacccagcagatcatcatccagcagccccagacggctgtcactgctggccagactcagacacagcagcagattgctgtccagggacagcaagtggcacagactgctgaagggcagaccatcgtctatcaaccagttaatgcagatggcaccattctccagcaagttacagtccctgtttcaggcatgatcactatcccagcagccagtttggcaggagcacagattgttcaaacaggagccaataccaacacaaccagcagtgggcaagggactgtcactgtgacactaccagtggcaggcaatgtggtcaattcaggagggatggtcatgatggttcctggggctggctctgtgcctgctatccaaagaatccctctacctggagcagagatgcttgaagaagagcctctctacgtgaatgccaaacaataccaccgtattcttaagaggaggcaagcccgagctaaactagaggcagaagggaaaattccaaaggagagaaggaaatacctgcatgagtctcggcaccgtcatgccatggcacggaagcgtggtgaaggtggacgatttttctctccaaaggaaaaggatagtccccatatgcaggatccaaaccaagccgatgaagaagcaatgacacagatcatccgagtgtcctaaccccacgccatgtgatggagctgatcaaggtcatgtttctcactgttccaggaaattgatcaactcttccaatgggacattgatgatcacattctgccctttactacaggacagaaaccacttagtttttaataagtggctcagtattacaattgcagcgatgcctggcaaattgaagttgcaagcctttgtcttactctttcagtcaggacctatttcagactgttgatgacattgacatttcatggattcggatgatgcaaggagacacatgccaccccagcagtacacaaagcacttaccttgactggtgaagtcagccagccatctcagcagggaagaacaaccttctcaaccaaaactgcaatcaggaaagcagcagcccactccttcccatggaatctagacagcatttatccctctggtgggggaatctcacactgactaactgaatggacgctttgtattcagagatggcttccaggcaaggaagttctatcttgtgatacggaaacaataaattcctgagatacattcttccaatctgtggtaataataagaattcctctctgcccagatggtaggttgatatttctggactctagccaagaaaaagctaattctggggatagaatgataaaagactcaagcactaaaaatatacattgccgaatctctttttctagctttgaaaagttgtggcctgcttgtccctctgttgactggtcatctggaccatcgtacttgctgtggctacttctaagacaatgtagagggttattaaaccttgaaactgcctttcctaagtagagaacaagactattcaacaacttctttgctgaagcactgaggagatttgtaatactcctaaaggaagggccaaactagagattttcaatcatagactttgtgacagcatttggggaactaaaagattcatgtgtttcagcctagtgggagagagtgggggagaggaagagagagagagagcatgtatacccgtatgttatcatagagcacgattctccagtggatggatacctggaatggatcattaagatgaagagagtaattcacatttactctagaacctttaacaagcactgaaaggaagaagcctgagatttgatccttgacaatttctggaaagcactggtcagtcacactgtcctggacagagtccaagttacccactaaagcttgaggtggatgttggcttcactcctgcagcacaatgctggccctagaaagcgagcattttcattcttcccatggcagctgattctttggtgccagttttcatgttttctccataggccttgtgcagaaaggttttctcattgcatccatactgtgagaataaactgcagactgaaagaaacatgcctgcagggtcaggaactgggccactgttcccagaacgggttgtgcctcagaaatctatttctcttttagatgttgaaccctgagagaactaagatgatatttcagaagagttggctgccttctctggaaacaaggaaaacccaataattccgaggaacattgggggttaaataccaagaataaaaattggttcttctttgacttcagcttaactgtattaagacagaaattaagccctctaaaaacaccacaaagagagatgattgtaatgatagaaatagaggtacagagctatgcaaaggaaacaggaagtgaaatattcctagtcccagggatctggtaatcgctcctggcttccagatgtcaaaggactgatcctttggtaagctcactagaaacttctagctctacaagagtttgggatattaatgttattcagtaagtcccaagtttttcagagaatagattactaacaatgaggaatttatattccttggttaatttaggagtctaagatgcagagttcagaaagaaattactcagacctaactttgagtgcttaagctgccaacagttagaagatgctatttatttgtgtctgtaagtttgtacatagtaatgccagccttgttgctgaattttttatttggggggagatgactttgaattttgtttgaaatgcttcagttgtcattttgtcattgcatttcaaatagctcatgacccttttcttgtggtcactttggcacaccatagtagcccacaaagtgggggcagggtattgacatttggattttttctttgatactagttcttttattcatttttatttgtgactgtagtgataactttacagatggagaaagagtgaatggatgaatgaataattggtttaatgcctagttatgcaacttgagtgcttttttttttttttgcaggataattttaagtgtatatattttaactgcactggtacattgaacatgtcagtgtcgatgccactggaccaacagagcattttgtggctatagggtgcctgataataatgtcttgatttttctttgggattcaactatatcgaaggtttttcccccagcagtatgggggcgtacaggtgatcgatcattaatgtcattgcaattgttattttttaaaataaatttataaaaataaccgaaaa

SEQ ID NO: 209313 - DNA, 1660 bp, Artificial Sequence
  derived and/or modified sequence
cggcagtggcggcggcagcggcggctggagcctctgattgggtttcggagtccggtactggagccaatcagcgcgggcagcgaaccgggggagcgaggcacggagtgtacctcacagccttctaggatctccagagtggacaggaatctcacttggagggaccatggagcagtatacagcaaacagcaatagttcgacagagcagattgttgtccaggcaggacagattcagcagcaggtccaagggcagccattaatggtgcaggtcagtggaggccagctaatcacatcaactggccaacccatcatggtccaggctgtccctggtggacaaggtcaaaccatcatgcaagtacctgtttctggaacacagggtttgcagcaaatacagttggtcccacctggacagatccagatccagggtggacaggctgtgcaggtgcagggccagcagggccagacccagcagatcatcatccagcagccccagacggctgtcactgctggccagactcagacacagcagcagattgctgtccagggacagcaagtggcacagactgctgaagggcagaccatcgtctatcaaccagttaatgcagatggcaccattctccagcaagttacagtccctgtttcaggcatgatcactatcccagcagccagtttggcaggagcacagattgttcaaacaggagccaataccaacacaaccagcagtgggcaagggactgtcactgtgacactaccagtggcaggcaatgtggtcaattcaggagggatggtcatgatggttcctggggctggctctgtgcctgctatccaaagaatccctctacctggagcagagatgcttgaagaagagcctctctacgtgaatgccaaacaataccaccgtattcttaagaggaggcaagcccgagctaaactagaggcagaagggaaaattccaaaggagagaaggaaatacctgcatgagtctcggcaccgtcatgccatggcacggaagcgtggtgaaggtggacgatttttctctccaaaggaaaaggatagtccccatatgcaggatccaaaccaagccgatgaagaagcaatgacacagatcatccgagtgtcctaaccccacgccatgtgatggagctgatcaaggtcatgtttctcactgttccaggaaattgatcaactcttccaatgggacattgatgatcacattctgccctttactacaggacagaaaccacttagtttttaataagtggctcagtattacaattgcagcgatgcctggcaaattgaagttgcaagcctttgtcttactctttcagtcaggacctatttcagactgttgatgacattgacatttcatggattcggatgatgcaaggagacacatgccaccccagcagtacacaaagcacttaccttgactggtgaagtcagccagccatctcagcagggaagaacaaccttctcaaccaaaactgcaatcaggaaagcagcagcccactccttcccatggaatctagacagcatttatccctctggtgggggaatctcacactgactaactgaatggacgctttgtattcagagatggcttccaggcaaggaagttctatcttgtgatacggaaacaataaattcctgagatacattcttc

SEQ ID NO: 209314 - DNA, 1044 bp, Artificial Sequence
  derived and/or modified sequence
atggagcagtacacagcaaactccaactcctccacagaacaaattgtggtccaagccggacagatccaacagcagcagcagggtggagtgacggctgtgcagcttcagacagaggcccaggtggctagcgcctcaggacaacaggtgcagaccctgcaggtcgtgcaagggcagccactcatggtgcaggttagtggcggacagctgattacctctaccggacagccaatcatggtgcaggctgtgcctggcggacagggccagaccatcatgcaggtgccagtttccggtacccaagggctgcagcagattcagctggtgccaccagggcagatccagatacagggaggccaggctgtgcaagtgcagggacagcagggccagacccagcagattatcatccaacagccacagaccgcagtgaccgcaggacagactcagacacagcagcagatagcagtacagggtcaacaagtcgcccagacggcggagggccagacaatcgtttaccagccagtgaacgccgatggcactatcttacagcaggtgacagttccggtgtcaggcatgatcaccatacctgctgcgtcactggcaggtgcacagatcgtgcaaaccggcgctaatacaaatacaacctcctctggccaaggcaccgtaaccgtgactctgcctgtggcagggaacgtcgtcaattctgggggtatggttatgatggtgcctggagctggatccgtgccagccatccaacggatccccctaccaggggctgagatgctggaggaggagcccctgtacgtgaacgctaagcaataccacaggatcctcaagagaagacaggcccgagcgaagcttgaagccgagggcaagatccccaaggaacgcagaaagtacctccacgaaagtagacaccgtcatgccatggccagaaagaggggagagggaggtcgatttttcagtccaaaggaaaaggacagccctcacatgcaggatcctaatcaagccgacgaagaagcaatgactcagatcattcgggtctcttag

SEQ ID NO: 209315 - DNA, 957 bp, Artificial Sequence
  derived and/or modified sequence
atggaacagtatacagccaattctaattcaagcacggagcagattgtggtgcaggcaggtcaaatccagcagcaggtccaaggtcagccgttgatggtgcaagtgtctggcggacaactcatcacttccacaggacagcctatcatggtccaggctgtgcccggaggacaggggcagaccattatgcaggtgcctgtgtcaggaactcagggcctacagcaaatccagcttgtgccccctggacaaattcagatccaggggggtcaggcagtccaggtacaggggcagcagggccaaacccaacagatcatcatccagcagcctcagactgccgtcactgcgggtcagacacaaacccagcagcagattgccgtgcagggacagcaggtcgcccagactgcagagggccagaccatcgtataccagcctgtgaacgcagacggtacaatccttcagcaggtgaccgtccccgtgagcggtatgatcactatccccgctgcttcccttgccggtgcccagattgtgcaaacgggcgctaacaccaacacaactagttccggtcagggcactgtgaccgtgaccctccccgtcgcaggaaatgttgtgaattcgggtgggatggtgatgatggtgcctggcgctgggtctgtgcctgccatacagaggatacctctcccgggtgccgaaatgctagaggaggagcccttatatgtgaatgccaaacaataccatcggattctcaagcgcagacaagcccgagcaaaactcgaggcagagggcaagattcccaaggagcgcaggaagtatttgcacgagtcaaggcacaggcacgctatggctaggaagagaggcgaggggggacgctttttcagccccaaggagaaagatagtccccacatgcaggatccgaatcaagcagacgaggaggcgatgacacagatcatcagagtgagttag

SEQ ID NO: 209316 - DNA, 1044 bp, Artificial Sequence
  derived and/or modified sequence
atggagcagtacaccgccaacagcaacagcagcaccgagcagatcgtggtgcaggccggccagatccagcagcagcagcagggcggcgtgaccgccgtgcagctgcagaccgaggcccaggtggccagcgccagcggccagcaggtgcagaccctgcaggtggtgcagggccagcccctgatggtgcaggtgagcggcggccagctgatcaccagcaccggccagcccatcatggtgcaggccgtgcccggcggccagggccagaccatcatgcaggtgcccgtgagcggcacccagggcctgcagcagatccagctggtgccccccggccagatccagatccagggcggccaggccgtgcaggtgcagggccagcagggccagacccagcagatcatcatccagcagccccagaccgccgtgaccgccggccagacccagacccagcagcagatcgccgtgcagggccagcaggtggcccagaccgccgagggccagaccatcgtgtaccagcccgtgaacgccgacggcaccatcctgcagcaggtgaccgtgcccgtgagcggcatgatcaccatccccgccgccagcctggccggcgcccagatcgtgcagaccggcgccaacaccaacaccaccagcagcggccagggcaccgtgaccgtgaccctgcccgtggccggcaacgtggtgaacagcggcggcatggtgatgatggtgcccggcgccggcagcgtgcccgccatccagagaatccccctgcccggcgccgagatgctggaggaggagcccctgtacgtgaacgccaagcagtaccacagaatcctgaagagaagacaggccagagccaagctggaggccgagggcaagatccccaaggagagaagaaagtacctgcacgagagcagacacagacacgccatggccagaaagagaggcgagggcggcagattcttcagccccaaggagaaggacagcccccacatgcaggaccccaaccaggccgacgaggaggccatgacccagatcatcagagtgagctag

SEQ ID NO: 209317 - DNA, 957 bp, Artificial Sequence
  derived and/or modified sequence
atggagcagtacaccgccaacagcaacagcagcaccgagcagatcgtggtgcaggccggccagatccagcagcaggtgcagggccagcccctgatggtgcaggtgagcggcggccagctgatcaccagcaccggccagcccatcatggtgcaggccgtgcccggcggccagggccagaccatcatgcaggtgcccgtgagcggcacccagggcctgcagcagatccagctggtgccccccggccagatccagatccagggcggccaggccgtgcaggtgcagggccagcagggccagacccagcagatcatcatccagcagccccagaccgccgtgaccgccggccagacccagacccagcagcagatcgccgtgcagggccagcaggtggcccagaccgccgagggccagaccatcgtgtaccagcccgtgaacgccgacggcaccatcctgcagcaggtgaccgtgcccgtgagcggcatgatcaccatccccgccgccagcctggccggcgcccagatcgtgcagaccggcgccaacaccaacaccaccagcagcggccagggcaccgtgaccgtgaccctgcccgtggccggcaacgtggtgaacagcggcggcatggtgatgatggtgcccggcgccggcagcgtgcccgccatccagagaatccccctgcccggcgccgagatgctggaggaggagcccctgtacgtgaacgccaagcagtaccacagaatcctgaagagaagacaggccagagccaagctggaggccgagggcaagatccccaaggagagaagaaagtacctgcacgagagcagacacagacacgccatggccagaaagagaggcgagggcggcagattcttcagccccaaggagaaggacagcccccacatgcaggaccccaaccaggccgacgaggaggccatgacccagatcatcagagtgagctag

SEQ ID NO: 209318 - protein, 270 aa, Artificial Sequence
  derived and/or modified sequence
MSPHPTALLGLVLCLAQTIHTQEEDLPRPSISAEPGTVIPLGSHVTFVCRGPVGVQTFRLERESRSTYNDTEDVSQASPSESEARFRIDSVSEGNAGPYRCIYYKPPKWSEQSDYLELLVKGPTQRPSDNSHNEHAPASQGLKAEHLYILIGVSVVFLFCLLLLVLFCLHRQNQIKQGPPRSKDEEQKPQQRPDLAVDVLERTADKATVNGLPEKDRETDTSALAAGSSQEVTYAQLDHWALTQRTARAVSPQSTKPMAESITYAAVARH

SEQ ID NO: 209319 - DNA, 813 bp, Artificial Sequence
  derived and/or modified sequence
atgagtcctcacccaacagccctgttaggtctagtgctatgcttggcacagacaatccacacacaggaggaggatctcccaagaccgtccatcagtgccgagcctggcacagtgatacctctgggatcccacgtgacttttgtttgtcgcgggcccgtgggggtgcaaaccttccgtctggaacgggagtcacgtagcacttacaacgacactgaagatgtctctcaggcttcaccgagtgaatcggaggctcggtttaggattgatagcgtcagtgagggcaacgccggaccctataggtgtatatattataagccacccaaatggtcagaacagtcagactatttggagctgctcgtcaagggtccaactcagagaccaagcgataattctcacaatgaacatgctcccgccagccagggcttgaaagccgagcacctctacattttgattggcgtgagcgtggtgttcctcttttgtctgctgctcctcgtacttttttgcttgcacaggcaaaaccagataaagcagggccccccccgatctaaagatgaggaacagaagccacagcaacgtccagacttggcagttgacgtgttagaaagaacagcagacaaggctaccgtcaatgggctacctgagaaagatcgtgagaccgatacatccgccctggccgccggaagctcccaggaggttacatatgcgcagttagaccattgggccctgacccaacgtaccgcgcgagctgtttcaccacagtctactaaacctatggctgagagtataacctatgcagcggtggctaggcattag

SEQ ID NO: 209320 - DNA, 813 bp, Artificial Sequence
  derived and/or modified sequence
atgagcccccaccccacagccctgctgggcctggtgctgtgcctggcccagaccatccacacccaggaggaggacctgccccggcccagcatctctgctgagcccggcaccgtcatccccctgggcagccacgtgacctttgtgtgccggggccctgtgggcgtgcagaccttccggctggagcgggagagccgcagcacctacaatgacacagaagatgtgtcccaggccagccccagcgagagcgaggcccgcttcagaattgacagcgtgtctgagggcaatgccggcccctaccgctgcatctactacaagccacccaagtggagcgagcagagcgactacctggagctgctggtgaagggccccacccagaggcccagcgacaacagccacaatgaacatgccccagccagccagggcctgaaggccgagcacctgtacatcctgattggagtgtctgtggtgttcctgttctgcctgctgctgctggtgctcttctgcctgcaccggcagaaccagatcaagcagggccccccaagaagcaaggatgaggagcagaagccccagcagaggccagacctggccgtggatgtgctggagaggacagctgacaaggccaccgtgaatggcctgcctgagaaggaccgggagacagacaccagcgccctggccgccggcagcagccaggaggtgacctacgcccagctggaccactgggccctgacccagaggacagcccgggctgtgagcccccagagcaccaagcccatggccgagagcatcacctatgctgctgtggcccggcactag

SEQ ID NO: 209321 - DNA, 1467 bp, Artificial Sequence
  derived and/or modified sequence
gcagagttctgtccttgcattggtgcgcctcaggccaggctgcactgctgggacctgggccatgtctccccaccccaccgccctcctgggcctagtgctctgcctggcccagaccatccacacgcaggaggaagatctgcccagaccctccatctcggctgagccaggcaccgtgatccccctggggagccatgtgactttcgtgtgccggggcccggttggggttcaaacattccgcctggagagggagagtagatccacatacaatgatactgaagatgtgtctcaagctagtccatctgagtcagaggccagattccgcattgactcagtaagtgaaggaaatgccgggccttatcgctgcatctattataagccccctaaatggtctgagcagagtgactacctggagctgctggtgaaaggacccacgcagaggccgtcggacaacagtcacaatgagcatgcacctgcttcccaaggcctgaaagctgagcatctgtatattctcatcggggtctcagtggtcttcctcttctgtctcctcctcctggtcctcttctgcctccatcgccagaatcagataaagcaggggccccccagaagcaaggacgaggagcagaagccacagcagaggcctgacctggctgttgatgttctagagaggacagcagacaaggccacagtcaatggacttcctgagaaggacagagagacggacacctcggccctggctgcagggagttcccaggaggtgacgtatgctcagctggaccactgggccctcacacagaggacagcccgggctgtgtccccacagtccacaaagcccatggccgagtccatcacgtatgcagccgttgccagacactgaccccatacccacctggcctctgcacctgagggtagaaagtcactctaggaaaagcctgaagcagccatttggaaggcttcctgttggattcctcttcatctagaaagccagccaggcagctgtcctggagacaagagctggagactggaggtttctaaccagcatccagaaggttcgttagccaggtggtcccttctacaatcgagcagctccttggacagactgtttctcagttatttccagagacccagctacagttccctggctgtttctagagacccagctttattcacctgactgtttccagagacccagctaaagtcacctgcctgttctaaaggcccagctacagccaatcagccgatttcctgagcagtgatgccacctccaagcttgtcctaggtgtctgctgtgaacctccagtgaccccagagactttgctgtaattatctgccctgctgaccctaaagaccttcctagaagtcaagagctagccttgagactgtgctatacacacacagctgagagccaagcccagttctctgggttgtgctttactccacgcatcaataaataattttgaaggcctcaca

SEQ ID NO: 209322 - DNA, 813 bp, Artificial Sequence
  derived and/or modified sequence
atgagcccccaccccaccgccctgctgggcctggtgctgtgcctggctcagaccatccacactcaggaagaggatctgccacgccctagcatttcagcggagccaggtactgtcattccactgggttctcacgtgacatttgtctgtaggggacccgtgggcgtccagacattcaggctggagcgagagtctcggagtacatacaatgatacagaggacgtttctcaggcatctccctccgaatctgaagctaggttccggatcgactcggtgagcgaggggaatgccggaccctataggtgcatatactacaaaccacctaagtggtctgagcagtctgattacttagaactgttggtgaaggggcctacgcagcggccaagtgacaactctcacaacgagcacgcccctgcaagccaaggactaaaggccgaacatctttatatactgattggggtgtcggttgtttttttgttctgccttctcttgctcgtgcttttctgcctacatagacagaaccagatcaagcaggggcctccccggagcaaggacgaagaacaaaagccccaacagcgccctgatttggccgtagacgtgctcgagagaacagccgataaggcgaccgtcaacggcttaccagaaaaggaccgagagaccgacacctccgcccttgctgctggcagtagtcaagaagtgacctacgcccagctcgatcactgggccctcacgcagcgcactgcccgcgctgtgtccccgcaatctactaaacccatggccgagagcatcacatatgccgcagttgccaggcattag

SEQ ID NO: 209323 - DNA, 813 bp, Artificial Sequence
  derived and/or modified sequence
atgtcaccccatccgacagctctgctcggtctggtgctctgtctcgctcagaccatccatacccaggaggaggacctccctagaccctccatctccgccgaacccggaactgtcattccactcggtagtcatgttacctttgtctgtagagggccagtgggcgtccaaacctttagactggaacgggaatcacgcagcacatataacgatacagaagacgtctcacaggccagcccgtctgagtcggaggcccgatttcggatcgacagcgtgagtgagggcaatgccggaccttataggtgtatttactataagccccctaaatggtccgagcagagcgactatttggagctgctcgtgaaaggacccacgcagcgaccctctgacaattctcataatgagcacgctccagcgtcacagggcttgaaggcagagcatctctatattctgattggcgtgtctgttgtttttctgttttgcctgctgttattggtgcttttctgtctccaccgacaaaaccagattaagcaagggcctcccaggtccaaagatgaggagcagaagccccagcaaagacctgatttagcagtcgacgtcctcgagcggactgccgataaagcaacagtgaacgggctcccagagaaggatcgcgaaacagacacctcagcccttgccgctggttcttctcaggaggtgacatacgctcagctggatcattgggccctgacacagagaacagccagggcggtgtctcctcagtcgacgaaaccaatggcagagagcatcacatatgcggctgtggcacggcactag

SEQ ID NO: 209324 - DNA, 813 bp, Artificial Sequence
  derived and/or modified sequence
atgagcccccaccccaccgccctgctgggcctggtgctgtgcctggcccagaccatccacacccaggaggaggacctgcccagacccagcatcagcgccgagcccggcaccgtgatccccctgggcagccacgtgaccttcgtgtgcagaggccccgtgggcgtgcagaccttcagactggagagagagagcagaagcacctacaacgacaccgaggacgtgagccaggccagccccagcgagagcgaggccagattcagaatcgacagcgtgagcgagggcaacgccggcccctacagatgcatctactacaagccccccaagtggagcgagcagagcgactacctggagctgctggtgaagggccccacccagagacccagcgacaacagccacaacgagcacgcccccgccagccagggcctgaaggccgagcacctgtacatcctgatcggcgtgagcgtggtgttcctgttctgcctgctgctgctggtgctgttctgcctgcacagacagaaccagatcaagcagggcccccccagaagcaaggacgaggagcagaagccccagcagagacccgacctggccgtggacgtgctggagagaaccgccgacaaggccaccgtgaacggcctgcccgagaaggacagagagaccgacaccagcgccctggccgccggcagcagccaggaggtgacctacgcccagctggaccactgggccctgacccagagaaccgccagagccgtgagcccccagagcaccaagcccatggccgagagcatcacctacgccgccgtggccagacactag

SEQ ID NO: 209325 - protein, 110 aa, Artificial Sequence
  derived and/or modified sequence
MPKRSCPFADVAPLQLKVRVSQRELSRGVCAERYSQEVFDPSGVASIACSSCVRAVDGKAVCGQCERALCGQCVRTCWGCGSVACTLCGLVDCSDMYEKVLCTSCAMFET

SEQ ID NO: 209326 - DNA, 333 bp, Artificial Sequence
  derived and/or modified sequence
atgcccaagagaagctgccccttcgccgacgtggcccccctgcagctgaaggtgagagtgagccagagagagctgagcagaggcgtgtgcgccgagagatacagccaggaggtgttcgaccccagcggcgtggccagcatcgcctgcagcagctgcgtgagagccgtggacggcaaggccgtgtgcggccagtgcgagagagccctgtgcggccagtgcgtgagaacctgctggggctgcggcagcgtggcctgcaccctgtgcggcctggtggactgcagcgacatgtacgagaaggtgctgtgcaccagctgcgccatgttcgagacctag

SEQ ID NO: 209327 - DNA, 550 bp, Artificial Sequence
  derived and/or modified sequence
gggctggcggccggggagctgcgtagctcccggccccgcggccatgcccaagcggagctgccccttcgcggacgtggccccgctacagctcaaggtccgcgtgagccagagggagttgagccgcggcgtgtgcgccgagcgctactcgcaggaggtcttcgacccatctggggtagcgtccattgcctgttcctcatgcgtgcgagccgtggatgggaaggcggtctgcggtcagtgtgagcgagccctgtgcgggcagtgtgtgcgcacctgctggggctgcggctccgtggcctgtaccctgtgtggcctcgtggactgcagtgacatgtacgagaaagtgctgtgcaccagctgtgccatgttcgagacctgaggctggctcaagccggctgccttcaccgggagccacgccgtgcatggcagccttccctggacgagcgctcggtgttcacactgaactgtggggtcgacgggaggggtgccttttacatgttctattttgtatcctaatgacagaatgaataaacctctttatatttgcacaaga

SEQ ID NO: 209328 - DNA, 333 bp, Artificial Sequence
  derived and/or modified sequence
atgcccaagcggtcctgccctttcgcagatgtggcccctcttcagctcaaggtccgagtgagtcagcgtgagctgtctcgaggagtgtgcgccgagagatacagccaggaggtgttcgatccctctggtgtcgcttctatcgcatgctcttcatgcgtacgggctgtcgacggcaaggccgtgtgtggccaatgcgagagagccctctgtggccagtgcgtcaggacctgttggggctgcggttccgtcgcttgcaccctatgcggtttggtggactgctccgacatgtacgagaaggttctgtgtactagttgtgcgatgttcgagacctag

SEQ ID NO: 209329 - DNA, 333 bp, Artificial Sequence
  derived and/or modified sequence
atgcccaagaggagctgcccctttgctgatgtggcccccctgcagctgaaggtgcgggtgtcccagcgggagctgagccggggcgtgtgtgccgagcgctacagccaggaggtgtttgaccccagcggcgtggccagcatcgcctgcagcagctgtgtgcgggctgtggatggcaaggctgtgtgtggccagtgtgagcgggccctgtgtggccagtgtgtgaggacctgctggggctgcggctctgtggcctgcaccctgtgtggcctggtggactgcagcgacatgtatgagaaggtgctgtgcaccagctgtgccatgtttgagacctag

SEQ ID NO: 209330 - DNA, 333 bp, Artificial Sequence
  derived and/or modified sequence
atgcccaagcggagctgccccttcgccgacgtggcccccctgcagcttaaagtgcgcgtgtcacagcgggaactctctaggggggtgtgcgcagagagatactctcaggaagtttttgacccatctggcgttgcatccatcgcctgttcctcatgtgtcagagcagttgacggtaaggctgtctgtgggcaatgtgaaagagcactctgtgggcaatgcgtgcggacctgctggggctgcggatcagttgcctgtaccctgtgcggcctagtggactgcagtgatatgtacgaaaaagttctgtgcacatcatgcgcaatgttcgagacctag

SEQ ID NO: 209331 - DNA, 333 bp, Artificial Sequence
  derived and/or modified sequence
atgccgaagcgctcctgtccatttgcagacgttgccccacttcagttaaaggttcgtgtgtctcagagagagctatctcggggtgtgtgcgcggagcgttactcccaagaagtgttcgatcctagcggcgttgctagcatcgcttgctctagttgtgtgcgggctgtggacggaaaagccgtttgtggacagtgcgagagggccctctgcggccaatgcgtacgcacatgctggggatgcggatcagtggcgtgcacgctttgtggtcttgtcgattgctctgacatgtacgaaaaggtcctctgcaccagttgtgcaatgttcgaaacatag

SEQ ID NO: 209332 - protein, 899 aa, Artificial Sequence [sequence omitted]

SEQ ID NO: 209333 - protein, 899 aa, Artificial Sequence
  derived and/or modified sequence
MQAAVAVSVPFLLLCVLGTCPPARCGQAGDASLMELEKRKENRFVERQSIVPLRLIYRSGGEDESRHDALDTRVRGDLGGPQLTHVDQASFQVDAFGTSFILDVVLNHDLLSSEYIERHIEHGGKTVEVKGGEHCYYQGHIRGNPDSFVALSTCHGLHGMFYDGNHTYLIEPEENDTTQEDFHFHSVYKSRLFEFSLDDLPSEFQQVNITPSKFILKPRPKRSKRQLRRYPRNVEEETKYIELMIVNDHLMFKKHRLSVVHTNTYAKSVVNMADLIYKDQLKTRIVLVAMETWATDNKFAISENPLITLREFMKYRRDFIKEKSDAVHLFSGSQFESSRSGAAYIGGICSLLKGGGVNEFGKTDLMAVTLAQSLAHNIGIISDKRKLASGECKCEDTWSGCIMGDTGYYLPKKFTQCNIEEYHDFLNSGGGACLFNKPSKLLDPPECGNGFIETGEECDCGTPAECVLEGAECCKKCTLTQDSQCSDGLCCKKCKFQPMGTVCREAVNDCDIRETCSGNSSQCAPNIHKMDGYSCDGVQGICFGGRCKTRDRQCKYIWGQKVTASDKYCYEKLNIEGTEKGNCGKDKDTWIQCNKRDVLCGYLLCTNIGNIPRLGELDGEITSTLVVQQGRTLNCSGGHVKLEEDVDLGYVEDGTPCGPQMMCLEHRCLPVASFNFSTCLSSKEGTICSGNGVCSNELKCVCNRHWIGSDCNTYFPHNDDAKTGITLSGNGVAGTNIIIGIIAGTILVLALILGITAWGYKNYREQRSNGLSHSWSERIPDTKHISDICENGRPRSNSWQGNLGGNKKKIRGKRFRPRSNSTEYLNPWFKRDYNVAKWVEDVNKNTEGPYFRTLSPAKSPSSSTGSIASSRKYPYPMPPLPDEDKKVNRQSARLWETSI

SEQ ID NO: 209334 - DNA, 2700 bp, Artificial Sequence
  derived and/or modified sequence
atgcaggccgccgtcgcggtgtcggtccccttcctcctgctttgcgtgctcgggacctgtcctcctgccagatgcggacaagctggtgacgccagtttgatggaactcgagaaacgcaaggagaaccgcttcgtcgaacgccagtccatagtgcctttgaggctcatctatcgaagcgggggcgaagatgaatccaggcatgacgccctggacacccgggttagaggcgatctgggggggccgcagctgacacacgtggaccaggccagcttccaggttgatgctttcggcacctccttcattctggacgttgtcctgaatcacgatctgctatcaagcgagtacatcgagaggcatatcgagcacggcgggaagacagtggaggtgaaaggcggagaacattgttactatcaggggcacatccgcggcaacccagactcgttcgtggccctgtcgacttgtcatggcctgcatgggatgttctatgacggtaaccacacttaccttatcgagccagaggagaacgacaccacacaagaagatttccactttcactcagtctataagtcaaggcttttcgaattttccttggacgacctcccaagtgagttccaacaggtcaatattactccttccaagtttattctcaagccacgacccaaacgctcaaaacgtcagctgcgccgctacccccgcaatgtggaggaggaaactaaatatattgaacttatgattgtcaacgatcacttgatgttcaaaaaacacaggctcagtgtggtacatacgaacacctacgctaaaagcgtggttaatatggctgacctaatctataaagaccagctgaagactcgcatcgtcctcgtggcaatggaaacctgggcaactgacaataagtttgccatatcagaaaaccccctaatcaccttaagggagtttatgaaatatagacgtgacttcatcaaagaaaagtctgatgccgtgcacctgtttagcgggtcacagtttgagtcttcgcggagcggcgccgcatacattggcgggatttgtagcctgctcaaagggggaggggtgaatgagttcggcaagaccgacctgatggccgtgactctcgctcaaagcctcgcgcataacattggtatcattagcgataaacggaaactggcgagtggagagtgtaagtgcgaggacacatggtctggctgtatcatgggagataccggatactacctgccaaagaagttcacacaatgtaatatagaggagtaccacgattttctgaatagcggcggcggcgcttgcctgttcaataagcccagcaagctcctcgacccgcctgaatgtggtaatggcttcattgagaccggggaggagtgtgactgtgggactcctgcagagtgcgtgttggagggagctgagtgctgtaaaaagtgcactcttacacaggacagccagtgttcggacggactgtgttgcaagaagtgcaagttccagccgatgggcacggtgtgtcgggaagctgttaacgattgcgacattcgggaaacgtgcagcggaaattcttcacagtgcgctcctaatatccataagatggacgggtactcatgcgacggtgtgcaaggaatctgcttcggtggaaggtgcaagactagggaccggcagtgtaagtacatatgggggcaaaaggtcactgcatcagacaagtactgctacgaaaagctgaacattgaaggcaccgaaaaaggcaattgtgggaaagacaaggatacctggattcagtgtaacaagagagatgttctgtgtggttacctcctgtgcactaacatcgggaatatccccagactcggcgaactggatggagagatcacaagtacgctcgttgtacagcaggggcgtactctcaactgtagcggaggacacgtcaagttagaggaggacgtggacttgggctatgttgaagacggtaccccttgcggtccccagatgatgtgtttggaacaccgttgtctccccgtggctagcttcaatttcagtacttgtctgtcctcgaaagagggcaccatctgtagcggaaatggcgtctgctctaacgaactgaagtgcgtctgtaacagacattggatcggaagcgactgcaatacctatttccctcacaatgacgatgcgaaaactggcattactctgtctgggaacggtgttgccgggacaaatataataataggcataatcgccggcaccatcctggtgctcgccctaattctcggcatcacggcctggggctataacaatatcttcaattttcggtccaatgggctgtcccattcctggtccgagcgcatccctgacactaaacacatttcagacatttgtgagaatggccgccctaggagcaatagttggcagggcaaccttgggggtaataagaaaaagattaggggtaaacgttttaggccacgctctaatagcaccgagtatttgaatccatggtttaagagggactataacgtggcaaagtgggtagaagatgtgaacaagaatacagaaggtccatattttaggactctttctcctgcaaagtctcctagttccagcactggatctatcgctagcagccgcaagtacccctacccgatgccaccactccctgacgaagataagaaggtgaacaggcaatcagcgcggttatgggagacatctatttag

SEQ ID NO: 209335 - DNA, 2700 bp, Artificial Sequence
  derived and/or modified sequence
atgcaagcggccgttgccgtgtcagtgccctttctgcttttgtgcgtcttggggacttgtccgcctgcccgatgcgggcaggcgggcgatgcatccctgatggaactcgagaagaggaaagaaaataggttcgtcgagaggcagtccatcgtgccccttcgactcatctaccgctctgggggcgaggacgagagtcgccacgacgccttagacacccgggttagaggggatctcggcgggccacagctcactcatgtggaccaggcttctttccaggttgacgcattcgggacttcatttatcctggacgtggtgctcaatcacgacttactctcgtctgaatatatagaacgccacatagaacacggagggaaaactgtggaagtgaagggcggggaacactgctactatcagggccacataagagggaaccctgacagtttcgtggcactcagtacgtgccacgggttgcacggcatgttttatgacggaaatcacacctaccttatcgaacctgaggagaacgataccacccaagaagattttcatttccattcggtctataagtcccgcctcttcgaattctcgctggatgacctgccctccgagtttcagcaggtgaatattacacccagtaaatttatactcaagccaagacccaaacggtctaaaaggcagttgcgtaggtatcctagaaacgttgaagaagaaacaaagtatattgaactgatgatcgtgaacgaccatttgatgtttaagaagcatcgcttaagtgtggtacacacaaacacatacgcgaagtcagttgtgaacatggctgacttgatctataaggatcagctcaagacgcgcatcgtcctggtcgcgatggaaacttgggcgaccgataataaattcgcaatatcggagaacccactaatcactctccgggagttcatgaaatatcgccgcgatttcataaaagaaaagtctgatgcggtgcacctcttctccggcagccagtttgaatcctccagatcaggcgccgcttatatcggcggtatctgttccctcctgaagggtggcggcgtgaatgagttcggaaaaaccgaccttatggccgtcactctggcccagtccctagcccacaacatcgggatcatatcagataagcgtaagcttgctagtggagaatgcaagtgtgaagatacatggtcagggtgcataatgggagacactggatattacttacctaaaaaattcacgcaatgcaacatcgaggaatatcatgatttcctgaattcagggggcggagcctgcttgtttaacaaaccgtccaagctgctcgacccgcccgagtgtggaaacggctttattgagacgggcgaagagtgtgattgtggaacaccggctgaatgtgtgctcgaaggagccgaatgttgcaagaagtgcacacttacacaggactcccaatgctccgatggtttatgttgcaagaagtgtaagttccagcctatggggaccgtgtgcagagaggcggtcaacgactgtgacattcgcgagacttgctccgggaattctagccaatgcgcacccaatatccataaaatggatggatactcttgcgacggcgtgcaaggtatatgttttgggggacgctgcaagaccagagatcgccagtgtaagtacatttggggccaaaaagttaccgcctctgacaaatattgttatgagaaattgaacatagagggcactgagaaggggaactgtggcaaggataaagacacttggattcagtgcaataagagagatgtcttgtgtggctacctgctctgtaccaacatcggcaacatcccaaggctcggagagcttgacggggagatcacaagcacactcgttgtgcagcaaggtagaacactgaactgctctggcggccatgtgaaactcgaagaagacgtggacctgggttacgtagaggacggaacgccatgcggcccccagatgatgtgtctggaacaccgctgtctgcccgtggctagcttcaacttttcaacgtgtctgtcttccaaggagggcaccatctgttctggaaacggagtttgcagcaatgagctcaagtgtgtatgcaacagacattggatcggctcagactgtaacacctattttccgcacaatgatgacgcaaaaaccggcattacactgtcaggtaacggtgtggcaggaactaatattatcattgggataatagctggaaccattctggtcctggccctcatcttaggtatcactgcatgggggtacaaaaattatagagagcagcgcagcaacgggctgagccatagctggtctgagcggattccagacacaaagcatatctcagatatatgcgaaaacgggcgtccccgtagcaactcttggcaagggaatctgggaggtaacaaaaagaagattcggggaaaaaggtttcgcccgagatccaattctacggaatatctgaatccctggtttaagcgggattataacgtggctaaatgggtcgaggacgttaataaaaatacggaaggcccctatttccgaaccctgtcaccagctaaatctccttcctcgtcaacagggtctatcgcaagctctaggaaatacccctaccccatgccgcccctgcccgacgaggacaagaaagtaaatagacagtctgcacgtctctgggagacatccatttag

SEQ ID NO: 209336 - DNA, 2700 bp, Artificial Sequence
  derived and/or modified sequence
atgcaggccgctgtggccgtgtctgtgcccttcctgctgctgtgtgtgctgggcacctgccccccagcccgctgtggccaggccggagatgccagcctgatggagctggagaagaggaaagaaaatagatttgtggagcggcagagcatcgtgcccctgcggctcatctacagaagtggaggagaagatgagagcagacatgatgccctggacaccagggtgcggggggacctgggcggcccccagctgacccacgtggaccaggccagcttccaggtggatgccttcggcaccagcttcatcctggatgtggtgctgaaccacgacctgctgagcagcgagtacatcgagcggcacatcgagcacggcggcaagacagtggaggtgaagggcggggagcactgctactaccagggccacatccggggcaacccagacagctttgtggccctgagcacctgccacggcctgcacggcatgttttatgatggcaaccacacctacctgattgagcctgaggagaatgacaccacccaggaggacttccacttccacagcgtgtacaagagccggctgtttgagttcagcctggatgacctgcccagcgagttccagcaggtgaacatcacccccagcaagttcatcctgaagccccggcccaagaggagcaagaggcagctgcggcgctaccccagaaatgtggaggaggagaccaagtacatcgagctgatgattgtgaatgaccacctgatgttcaagaagcaccggctgtctgtggtgcacaccaacacctacgccaagtctgtggtgaacatggctgacctgatctacaaggaccagctgaagaccagaattgtgctggtggccatggagacctgggccacagacaacaagtttgccatcagcgagaaccccctcatcaccctgcgggagttcatgaagtaccgccgggacttcatcaaggagaagagtgatgctgtgcacctgttcagcggcagccagtttgagagcagccgcagcggggccgcctacatcggcggcatctgcagcctgctgaagggcggcggcgtgaatgaatttgggaagacagacctgatggctgtgaccctggcccagagcctggcccacaacatcggcatcatcagtgacaagaggaagctggccagcggagaatgtaaatgtgaggacacctggagcggctgcatcatgggagacaccggctactacctgcccaagaagttcacccagtgcaacatcgaggagtaccatgacttcctgaacagcggcggcggggcctgcctcttcaacaagcccagcaagctgctggaccccccagaatgtggaaatggcttcatcgagaccggggaggagtgtgactgtggcaccccagcagaatgtgtgctggagggcgctgagtgctgcaagaagtgcaccctgacccaggacagccagtgcagtgatggcctgtgctgcaagaagtgcaagttccagcccatgggcaccgtgtgccgggaggccgtgaatgactgtgacatccgggagacctgcagcggcaacagcagccagtgtgcccccaacatccacaagatggatggctacagctgtgatggagtgcagggcatctgctttggaggccgctgcaagacccgggaccggcagtgcaagtacatctggggccagaaggtgacagccagtgacaagtactgctatgagaagctgaacatcgagggcacagagaagggcaactgtgggaaggacaaggacacctggatccagtgcaacaagagagatgtgctgtgtggctacctgctgtgcaccaacatcggcaacatcccccggctgggggagctggatggagagatcaccagcaccctggtggtgcagcagggccgcaccctgaactgcagcggcggccacgtgaagctggaggaggatgtggacctgggctacgtggaggatggcaccccctgtggcccccagatgatgtgcctggagcaccgctgcctgcctgtggccagcttcaacttcagcacctgcctgagcagcaaggagggcaccatctgcagcggaaatggagtgtgcagcaatgagctgaagtgtgtgtgcaacagacactggattggaagtgactgcaacacctacttcccccacaatgatgatgccaagacaggcatcaccctgtctggaaatggagtggccggcaccaacatcatcatcggcatcatcgccggcaccatcctggtgctggccctgatcctgggcatcacagcctggggctacaacaacatcttcaacttccgcagcaatggcctgagccacagctggagcgagcgcatcccagacaccaagcacatcagtgacatctgtgaaaatggccggcccaggagcaacagctggcagggcaacctgggcggcaacaagaagaagatccggggcaagcgcttccggcccaggagcaacagcacagagtacctgaacccctggttcaagagggactacaacgtggccaagtgggtggaggatgtgaacaagaacacagagggcccctacttccgcaccctgagccctgccaagagccccagcagcagcacaggcagcatcgccagcagcaggaagtacccctaccccatgccacccctgcctgatgaggacaagaaggtgaaccggcagagcgcccggctgtgggagaccagcatctag

SEQ ID NO: 209337 - DNA, 2700 bp, Artificial Sequence
  derived and/or modified sequence
atgcaggccgctgtggccgtgtctgtgcccttcctgctgctgtgtgtgctgggcacctgccccccagcccgctgtggccaggccggagatgccagcctgatggagctggagaagaggaaagaaaatagatttgtggagcggcagagcatcgtgcccctgcggctcatctacagaagtggaggagaagatgagagcagacatgatgccctggacaccagggtgcggggggacctgggcggcccccagctgacccacgtggaccaggccagcttccaggtggatgccttcggcaccagcttcatcctggatgtggtgctgaaccacgacctgctgagcagcgagtacatcgagcggcacatcgagcacggcggcaagacagtggaggtgaagggcggggagcactgctactaccagggccacatccggggcaacccagacagctttgtggccctgagcacctgccacggcctgcacggcatgttttatgatggcaaccacacctacctgattgagcctgaggagaatgacaccacccaggaggacttccacttccacagcgtgtacaagagccggctgtttgagttcagcctggatgacctgcccagcgagttccagcaggtgaacatcacccccagcaagttcatcctgaagccccggcccaagaggagcaagaggcagctgcggcgctaccccagaaatgtggaggaggagaccaagtacatcgagctgatgattgtgaatgaccacctgatgttcaagaagcaccggctgtctgtggtgcacaccaacacctacgccaagtctgtggtgaacatggctgacctgatctacaaggaccagctgaagaccagaattgtgctggtggccatggagacctgggccacagacaacaagtttgccatcagcgagaaccccctcatcaccctgcgggagttcatgaagtaccgccgggacttcatcaaggagaagagtgatgctgtgcacctgttcagcggcagccagtttgagagcagccgcagcggggccgcctacatcggcggcatctgcagcctgctgaagggcggcggcgtgaatgaatttgggaagacagacctgatggctgtgaccctggcccagagcctggcccacaacatcggcatcatcagtgacaagaggaagctggccagcggagaatgtaaatgtgaggacacctggagcggctgcatcatgggagacaccggctactacctgcccaagaagttcacccagtgcaacatcgaggagtaccatgacttcctgaacagcggcggcggggcctgcctcttcaacaagcccagcaagctgctggaccccccagaatgtggaaatggcttcatcgagaccggggaggagtgtgactgtggcaccccagcagaatgtgtgctggagggcgctgagtgctgcaagaagtgcaccctgacccaggacagccagtgcagtgatggcctgtgctgcaagaagtgcaagttccagcccatgggcaccgtgtgccgggaggccgtgaatgactgtgacatccgggagacctgcagcggcaacagcagccagtgtgcccccaacatccacaagatggatggctacagctgtgatggagtgcagggcatctgctttggaggccgctgcaagacccgggaccggcagtgcaagtacatctggggccagaaggtgacagccagtgacaagtactgctatgagaagctgaacatcgagggcacagagaagggcaactgtgggaaggacaaggacacctggatccagtgcaacaagagagatgtgctgtgtggctacctgctgtgcaccaacatcggcaacatcccccggctgggggagctggatggagagatcaccagcaccctggtggtgcagcagggccgcaccctgaactgcagcggcggccacgtgaagctggaggaggatgtggacctgggctacgtggaggatggcaccccctgtggcccccagatgatgtgcctggagcaccgctgcctgcctgtggccagcttcaacttcagcacctgcctgagcagcaaggagggcaccatctgcagcggaaatggagtgtgcagcaatgagctgaagtgtgtgtgcaacagacactggattggaagtgactgcaacacctacttcccccacaatgatgatgccaagacaggcatcaccctgtctggaaatggagtggccggcaccaacatcatcatcggcatcatcgccggcaccatcctggtgctggccctgatcctgggcatcacagcctggggctacaagaactaccgggagcagaggagcaatggcctgagccacagctggagcgagcgcatcccagacaccaagcacatcagtgacatctgtgaaaatggccggcccaggagcaacagctggcagggcaacctgggcggcaacaagaagaagatccggggcaagcgcttccggcccaggagcaacagcacagagtacctgaacccctggttcaagagggactacaacgtggccaagtgggtggaggatgtgaacaagaacacagagggcccctacttccgcaccctgagccctgccaagagccccagcagcagcacaggcagcatcgccagcagcaggaagtacccctaccccatgccacccctgcctgatgaggacaagaaggtgaaccggcagagcgcccggctgtgggagaccagcatctag

SEQ ID NO: 209338 - DNA, 2700 bp, Artificial Sequence
  derived and/or modified sequence
atgcaggccgccgtggccgtgagcgtgcccttcctgctgctgtgcgtcctgggaacctgtccccccgccaggtgcgggcaagccggtgacgccagcctgatggaattggaaaaacgcaaggagaatcgattcgtcgaaagacagtccatcgtccccctgcgtctcatctaccggagcgggggagaagacgaatcgcggcacgatgccctcgatacacgagtacgaggcgatctgggggggccacaattgacacatgtcgatcaggcaagtttccaggtggatgcttttggaacctcattcatcctggacgtagtgctgaatcacgaccttctcagctccgaatacattgagcgtcatatagaacacgggggcaagactgttgaggtgaagggaggagagcattgttactaccagggacatattaggggcaaccccgacagctttgtggctcttagcacttgccacggattgcacggaatgttctacgatggtaatcatacgtacctgattgagccagaagaaaatgatacaacacaggaggacttccacttccattccgtgtacaagtctagattgtttgagttttccttggacgacctccctagcgagtttcagcaggttaacatcactccttctaaatttatcctgaagccacgacccaagaggtcgaaaagacaactgagaaggtacccacggaacgttgaggaagagaccaagtatatcgaactgatgatcgtaaatgaccatctcatgttcaaaaagcaccgcctgagcgttgttcacacaaatacctacgctaagtccgtcgtgaacatggccgacttaatctataaggaccaactgaagacccgtatagtgctagttgccatggaaacttgggccactgacaacaaatttgccattagtgagaatcctctgatcacgttgcgcgagtttatgaagtaccggcgtgatttcatcaaagaaaaaagcgatgcagtacatttattctctggcagccagttcgagtctagccgctctggcgccgcctatatcggtgggatctgctctctgctcaaaggagggggcgtcaacgaatttggcaagactgatctgatggcagttaccctggcgcaatccctggcccacaacattgggatcataagtgacaaacgaaagctagcctcaggagagtgtaaatgcgaggatacttggagtggttgcataatgggggatacaggatactatctcccgaaaaagttcacccagtgcaacattgaggaatatcacgactttcttaacagcgggggcggtgcctgcctgttcaacaaaccctctaaactgttggatcctccagagtgcggaaatggtttcatcgagacaggcgaggaatgcgactgcgggacccccgcagagtgtgtccttgagggcgctgagtgttgcaaaaagtgtaccctgacccaggactcccagtgctcagatggcctgtgctgcaaaaagtgtaagtttcaacccatgggcactgtgtgccgggaggccgttaatgattgcgacatcagggaaacatgctcaggcaattcgagccagtgcgcgccgaacatccataagatggacggatactcctgcgacggagtgcagggaatctgctttggcggccgttgcaaaacccgtgacaggcagtgtaagtacatttggggacagaaggtgactgccagcgacaaatactgttatgaaaagctgaatatcgaggggaccgagaaaggaaattgtgggaaggataaagatacctggattcaatgtaacaagcgagatgtcctttgcggctatttgctgtgtactaatattggaaatatccccagactgggcgagttagacggcgagatcacctctactcttgtcgtgcaacaggggcgtaccttgaattgcagtgggggccacgtgaaactggaggaggatgtggatctagggtatgtagaagatgggactccgtgtggcccccagatgatgtgcctggagcataggtgccttcccgtggcttcttttaacttttctacgtgcttgtcaagcaaggaaggcactatatgctctggaaatggagtttgcagtaacgaactgaagtgcgtatgtaacagacactggatcggcagtgattgcaatacatacttcccccacaacgatgatgccaaaacaggcatcaccctgtcaggcaatggagtagctggcacaaatattatcattgggataatcgctggcacaattctggttttagctctgatcctagggattactgcttgggggtacaacaatatcttcaattttagaagtaatggtctttcccatagctggtccgagagaattccagatacaaagcacattagtgacatttgtgagaatgggcgtccccgcagtaattcttggcagggcaacctgggcggtaacaaaaagaagatccgggggaaacgatttcggccaaggtcaaattccaccgaatacctgaatccgtggttcaaaagagattataatgtagctaaatgggtggaggatgtgaacaagaatactgaaggcccctattttagaaccttatcgcccgcaaagagtccgtcctccagcaccggcagtatcgcaagttcaaggaagtatccctaccctatgccaccactgcccgacgaagataaaaaggtcaatcgccagtcagccagactctgggagacatctatatag

SEQ ID NO: 209339 - DNA, 2700 bp, Artificial Sequence
  derived and/or modified sequence
atgcaggccgccgtggccgtgagcgtgcccttcctgctgctgtgcgtcctaggaacctgcccccccgccagatgtgggcaggcaggtgacgcgagcctcatggagctggagaagcgtaaggaaaaccgctttgttgaacgccagagcatagttcctctccgcctgatctacaggtcagggggggaggatgaatcaaggcacgacgcattagacacgagagttcgaggggacctgggtggaccacagctgacgcacgtggaccaggctagctttcaggtggatgcatttgggacgtcttttatcttggacgttgtgctgaatcatgacctactctcctccgagtacatcgagcgccacatagagcacggtggcaaaactgtcgaggtcaaaggaggagaacactgctattatcagggtcacatcagggggaacccagatagtttcgttgccctgtctacatgtcacgggctgcacggtatgttttacgacgggaaccacacctacctgatagagcctgaagagaatgatactacacaggaggactttcactttcactccgtgtataagtctaggttattcgaattttctttagacgatctgcccagtgaatttcaacaggtgaacataactccatccaagtttattctgaaacctaggcccaagagaagcaagcgtcagttgcgcagataccctaggaacgttgaggaagagaccaagtacattgagctcatgatcgtgaacgaccatcttatgtttaagaaacatcggctttctgtggtgcacacaaacacttacgccaaatcagtggttaatatggcagacctcatttacaaagaccagctcaagacccgcatcgtgctcgtggccatggagacatgggcgaccgataacaaatttgctatttccgaaaaccctctcatcactctccgtgaattcatgaagtaccgcagggattttatcaaggaaaagtccgatgctgtccacttattctctgggtcacagttcgaaagcagccgctctggagcagcctacattgggggaatctgtagtcttctcaagggcggtggcgtcaacgaattcggaaagaccgatcttatggccgtcacgctcgctcaatctctggcccacaatattgggattatttccgataagaggaaactcgcttccggggagtgcaaatgtgaggacacctggagtggatgcataatgggtgacactggctactacttgccaaaaaagtttacccagtgtaacatcgaggaataccatgattttctgaacagtggcgggggtgcgtgcctgttcaataagccttctaaactgcttgaccccccagagtgcggcaatggattcatagagacaggagaggaatgtgactgcggtaccccagcggaatgtgttttagaaggggcggaatgctgcaaaaaatgtacactgacacaagattcccaatgctccgacggactgtgttgcaagaagtgtaagtttcaacccatgggcacagtctgcagagaggccgtaaacgactgcgatattcgcgaaacttgctcaggaaattcgtcacagtgcgcccctaacatccacaagatggacggttattcctgcgacggggttcaaggtatctgcttcggtggtaggtgtaaaacaagggatagacagtgtaaatacatctggggccaaaaagtcaccgccagcgataaatactgctacgaaaagctcaacattgaggggactgaaaagggcaattgtgggaaggacaaggacacctggatacaatgcaacaagcgcgacgtgctctgtggctatctgttatgtacaaatataggtaatatcccgcgtctaggggagctggatggcgagattacatccaccctggtggtacagcaaggccgcacactcaactgctctgggggacacgttaagctcgaagaggatgtggacctcggatatgtcgaggatggtaccccttgcggaccccagatgatgtgcctcgaacatagatgtctccccgtagctagcttcaatttttccacctgtctgagctctaaggaagggacaatttgcagtggcaatggcgtttgttcaaacgagctcaagtgcgtgtgcaacagacactggataggttcagactgcaatacttattttccgcacaatgacgatgccaaaaccgggattaccttgtctgggaacggcgtggccgggacaaacatcatcattggaatcatcgccggcactattctggttttggccctcattctggggatcacagcttggggttacaagaactatcgggaacaaagaagtaacgggctgtcccattcctggtcggagcgcattcccgataccaagcatattagcgacatatgtgaaaacggtagaccacgcagcaactcttggcagggcaacctcggtgggaataaaaaaaagattaggggaaaacgatttagacctcgttcaaactctacagaatacctaaacccatggtttaagcgagattataatgtggcaaagtgggtggaggacgtgaataagaataccgagggaccgtatttcagaaccctcagcccggccaagtctccatcatccagcactggcagtatcgcttcatccagaaagtatccttaccctatgccccccctgcccgacgaggataaaaaggtcaacagacagtctgccaggctctgggagacctctatctag

SEQ ID NO: 209340 - DNA, 2700 bp, Artificial Sequence
  derived and/or modified sequence
atgcaggctgctgtggccgtgtccgtcccttttttattgttatgcgtactgggtacgtgcccaccagcgaggtgtggccaggccggagacgcttcgcttatggaactggagaagagaaaggagaacaggtttgtggagcgtcagtcaatcgtccctctcagattaatttatcggtccggaggtgaggacgagtcaaggcacgatgctttggacacacgcgtgaggggcgacttggggggaccgcagctgactcacgtggaccaggcaagctttcaggtggacgctttcgggacttccttcatcctagacgttgtcctgaatcatgacctacttagctctgaatatattgaacgccatatcgagcacggaggcaagactgtggaagtgaaaggaggagaacattgctactaccaggggcacattagaggaaaccctgacagtttcgtagcactgtccacctgtcatggcctgcatggaatgttttatgatggcaaccacacctacttgatcgagccggaggaaaacgacaccacccaggaggactttcactttcactccgtatataaaagccggctgtttgagttttcccttgacgatcttccctcagagttccaacaagttaatataacaccttcgaaatttatcctcaaacctagacctaagcgctcaaaacgccagttgcggaggtatcctcggaatgtggaagaggagactaaatatattgagcttatgattgtgaacgatcacctcatgtttaagaagcacagactgtctgtggtgcatacaaacacttacgctaaatccgtggttaacatggccgatttaatctataaggaccagttgaagactaggatagttctggtcgccatggaaacatgggccacagacaacaaatttgccatttcagagaaccccttgatcaccttgcgcgagtttatgaaataccgcagggactttattaaggaaaagtcggatgctgtacacttgttctcggggtcacagtttgaatcttcacgctccggcgctgcctacataggcggtatttgtagtttactgaagggcggtggcgtgaacgagttcggcaagactgatctcatggctgtaacactggcccagagccttgcccacaacataggcataatctctgataagagaaagctggcctccggggaatgtaagtgtgaggacacctggagcggctgtattatgggtgacactgggtactacctgcctaaaaaattcactcagtgcaacattgaggaataccatgactttctgaactccggaggcggagcctgcctgttcaacaagcctagcaaactcttggaccccccagagtgcggcaacggatttatcgaaacaggcgaagagtgtgactgcggcaccccagcagaatgtgtcctggaaggggcagagtgctgtaaaaaatgtacactgacccaggacagccagtgctccgacgggctctgttgcaaaaaatgcaaatttcaacccatggggacagtatgccgagaggctgttaacgactgtgacatacgggaaacatgcagtgggaatagtagtcagtgcgctcccaatatccacaaaatggatggttattcttgcgacggcgtgcagggaatttgttttggcggaagatgtaagacccgcgatcgacagtgcaagtacatttggggccaaaaggttacggctagcgacaagtactgctacgagaagctaaatatcgaaggaaccgagaaaggcaactgcggcaaagacaaagatacgtggattcagtgtaataagcgagatgtgctgtgcggctatctgctttgcaccaatattggcaacattccaaggttgggtgagttggacggcgaaatcacttccaccctggtcgtgcagcaggggagaacccttaattgcagcggcggtcacgtgaagctagaagaagacgtagacctgggctatgtcgaggatggaacgccgtgcggaccgcaaatgatgtgtttggaacacagatgcctccctgtggcctcctttaatttttccacatgtctgagttcaaaagagggtacaatttgctctgggaatggagtgtgcagcaatgaactcaaatgcgtgtgcaatcgtcactggatcgggtccgattgcaacacctattttccacacaatgacgacgccaaaaccgggattacgctctcaggcaacggcgtcgctggcacgaacatcattattgggatcattgccggaaccattctggtgcttgcccttatcctcgggataaccgcatggggctataataacatctttaactttcgcagcaatggcctgagccatagctggagtgaacggattccagatactaaacatatttccgatatttgcgagaatggccgtcccagatctaactcctggcagggaaacctgggaggcaacaaaaaaaagataagaggtaaaaggttccgacctaggagtaattctaccgagtatctgaatccctggtttaagagagactataacgtcgcaaaatgggtggaggatgttaacaagaatacagagggtccatatttcaggacactcagtcctgccaaaagcccatctagcagcactggtagtattgccagcagccggaagtacccctaccccatgccgcctctcccagatgaagacaaaaaggttaacagacagtcagctagactttgggaaacttccatctag

SEQ ID NO: 209341 - DNA, 2700 bp, Artificial Sequence
  derived and/or modified sequence
atgcaggcagctgttgccgtgagcgtaccgttcttacttttgtgtgtgttgggaacttgccccccagctcggtgtgggcaggcgggtgatgcttcgttaatggagctcgaaaagcgaaaagagaaccggttcgtggagcgccagagtattgtacccctgcgtctcatatatcggtctggcggtgaagacgaatcgcgccatgatgccctcgacactcgggtgcggggagatttaggcggacctcaacttacccatgtcgatcaggcatcattccaagtagacgcgtttgggacctccttcattctggatgtcgtgctgaaccatgatctcctatcctccgagtacatagaacgacatattgagcatgggggaaagacagttgaagtgaaaggaggggagcactgctactatcagggccacatccggggtaaccccgactcctttgttgcactcagcacgtgtcatgggttgcatggcatgttctacgacggaaaccacacctaccttatcgagccagaagaaaacgacactacccaggaggatttccacttccacagcgtatacaagtcacgactctttgaattctccctggacgatctccccagtgaattccagcaggtaaacatcacaccctccaaatttattctaaagccccgacccaagaggagtaagcgccagctgcggaggtacccccgtaacgtggaagaagagacaaagtatattgagctgatgatcgtgaatgatcacttgatgtttaaaaaacaccgcctatcggtcgtccacacgaacacctacgccaaaagcgttgtgaatatggctgatttaatttacaaggaccagctgaagactcgcatagtgctggtggcaatggagacttgggcaacggataataagtttgcgattagcgaaaacccactgatcacactgagggagtttatgaaatatagaagggacttcatcaaggagaaatcagatgccgttcacctcttctccggtagccagtttgaatcctcccgatccggcgcagcttatattggagggatttgttccctgttaaagggcggaggcgttaatgagtttgggaaaacagacctgatggccgtgaccctggctcagagtctcgcacacaacattgggattatctcagataaaagaaagcttgcctccggagaatgtaagtgtgaagacacatggtccggatgcataatgggggatacgggctactatttgcctaaaaaatttacccaatgtaatatcgaggaataccacgacttcttgaattccggtgggggtgcctgcctttttaacaagccaagcaaacttctggatcctccagagtgtggcaacggcttcattgagacaggcgaagagtgtgattgcggtactccggctgaatgcgtgcttgagggagcggaatgctgcaaaaagtgcactcttacccaggactcacagtgctcggatggcctgtgctgcaagaaatgcaaattccagccaatggggactgtttgtagagaagctgtgaatgattgcgacattagggagacctgttctgggaatagcagtcagtgtgcccctaatatccacaagatggacggctactcctgtgatggcgtgcaagggatttgcttcggcggtagatgcaaaacacgggaccgccagtgcaaatacatatggggacagaaagtgaccgcgtctgacaagtattgttatgaaaagcttaatatcgagggcaccgagaaagggaattgtggtaaggacaaggacacttggatccaatgcaataaacgggatgttttatgtggctaccttctgtgcacaaacattggcaacatcccacgcctcggagaactcgacggagaaattacaagtaccctcgttgtgcagcagggaagaaccctgaattgtagcgggggacacgtcaagctggaggaagacgtggaccttgggtacgtggaggatggtactccctgcggaccacagatgatgtgcttggagcacaggtgtctgcccgtggcctcatttaacttttctacctgcctttcctccaaggaagggacaatttgcagcggtaatggcgtatgctccaacgaattgaagtgcgtgtgcaatcgccactggattggtagcgactgcaatacctattttcctcacaacgacgatgccaagacaggtatcacactcagtgggaacggggtggctggcaccaatatcataatcggaatcatcgcaggaactatcctggtcctagccttaattctaggcattaccgcatgggggtataaaaattatagggaacagcggagcaatggacttagccattcatggtctgagcggataccagatactaagcatattagtgatatatgtgaaaacggccgtcctcggtcgaactcatggcagggaaacctcgggggaaacaagaagaagattcggggaaaacggtttcggcctcggagtaattctaccgagtatttgaatccttggtttaagcgcgattataacgtggcaaaatgggtggaagatgtgaacaaaaacactgaaggcccttatttccggacacttagccccgcaaaatccccctcctcctccacaggctccattgctagtagtcgcaagtatccatatccaatgccacctctcccagatgaggacaaaaaagtcaatcgacaatccgctcgcctgtgggaaacctctatttag

SEQ ID NO: 209342 - DNA, 2700 bp, Artificial Sequence
  derived and/or modified sequence
atgcaggccgccgtggccgtgagcgtgcccttcctgctgctgtgcgtgctgggcacctgcccccccgccagatgcggccaggccggcgacgccagcctgatggagctggagaagagaaaggagaacagattcgtggagagacagagcatcgtgcccctgagactgatctacagaagcggcggcgaggacgagagcagacacgacgccctggacaccagagtgagaggcgacctgggcggcccccagctgacccacgtggaccaggccagcttccaggtggacgccttcggcaccagcttcatcctggacgtggtgctgaaccacgacctgctgagcagcgagtacatcgagagacacatcgagcacggcggcaagaccgtggaggtgaagggcggcgagcactgctactaccagggccacatcagaggcaaccccgacagcttcgtggccctgagcacctgccacggcctgcacggcatgttctacgacggcaaccacacctacctgatcgagcccgaggagaacgacaccacccaggaggacttccacttccacagcgtgtacaagagcagactgttcgagttcagcctggacgacctgcccagcgagttccagcaggtgaacatcacccccagcaagttcatcctgaagcccagacccaagagaagcaagagacagctgagaagataccccagaaacgtggaggaggagaccaagtacatcgagctgatgatcgtgaacgaccacctgatgttcaagaagcacagactgagcgtggtgcacaccaacacctacgccaagagcgtggtgaacatggccgacctgatctacaaggaccagctgaagaccagaatcgtgctggtggccatggagacctgggccaccgacaacaagttcgccatcagcgagaaccccctgatcaccctgagagagttcatgaagtacagaagagacttcatcaaggagaagagcgacgccgtgcacctgttcagcggcagccagttcgagagcagcagaagcggcgccgcctacatcggcggcatctgcagcctgctgaagggcggcggcgtgaacgagttcggcaagaccgacctgatggccgtgaccctggcccagagcctggcccacaacatcggcatcatcagcgacaagagaaagctggccagcggcgagtgcaagtgcgaggacacctggagcggctgcatcatgggcgacaccggctactacctgcccaagaagttcacccagtgcaacatcgaggagtaccacgacttcctgaacagcggcggcggcgcctgcctgttcaacaagcccagcaagctgctggacccccccgagtgcggcaacggcttcatcgagaccggcgaggagtgcgactgcggcacccccgccgagtgcgtgctggagggcgccgagtgctgcaagaagtgcaccctgacccaggacagccagtgcagcgacggcctgtgctgcaagaagtgcaagttccagcccatgggcaccgtgtgcagagaggccgtgaacgactgcgacatcagagagacctgcagcggcaacagcagccagtgcgcccccaacatccacaagatggacggctacagctgcgacggcgtgcagggcatctgcttcggcggcagatgcaagaccagagacagacagtgcaagtacatctggggccagaaggtgaccgccagcgacaagtactgctacgagaagctgaacatcgagggcaccgagaagggcaactgcggcaaggacaaggacacctggatccagtgcaacaagagagacgtgctgtgcggctacctgctgtgcaccaacatcggcaacatccccagactgggcgagctggacggcgagatcaccagcaccctggtggtgcagcagggcagaaccctgaactgcagcggcggccacgtgaagctggaggaggacgtggacctgggctacgtggaggacggcaccccctgcggcccccagatgatgtgcctggagcacagatgcctgcccgtggccagcttcaacttcagcacctgcctgagcagcaaggagggcaccatctgcagcggcaacggcgtgtgcagcaacgagctgaagtgcgtgtgcaacagacactggatcggcagcgactgcaacacctacttcccccacaacgacgacgccaagaccggcatcaccctgagcggcaacggcgtggccggcaccaacatcatcatcggcatcatcgccggcaccatcctggtgctggccctgatcctgggcatcaccgcctggggctacaacaacatcttcaacttcagaagcaacggcctgagccacagctggagcgagagaatccccgacaccaagcacatcagcgacatctgcgagaacggcagacccagaagcaacagctggcagggcaacctgggcggcaacaagaagaagatcagaggcaagagattcagacccagaagcaacagcaccgagtacctgaacccctggttcaagagagactacaacgtggccaagtgggtggaggacgtgaacaagaacaccgagggcccctacttcagaaccctgagccccgccaagagccccagcagcagcaccggcagcatcgccagcagcagaaagtacccctaccccatgccccccctgcccgacgaggacaagaaggtgaacagacagagcgccagactgtgggagaccagcatctag

SEQ ID NO: 209343 - DNA, 2700 bp, Artificial Sequence
  derived and/or modified sequence
atgcaggccgccgtggccgtgagcgtgcccttcctgctgctgtgcgtgctgggcacctgcccccccgccagatgcggccaggccggcgacgccagcctgatggagctggagaagagaaaggagaacagattcgtggagagacagagcatcgtgcccctgagactgatctacagaagcggcggcgaggacgagagcagacacgacgccctggacaccagagtgagaggcgacctgggcggcccccagctgacccacgtggaccaggccagcttccaggtggacgccttcggcaccagcttcatcctggacgtggtgctgaaccacgacctgctgagcagcgagtacatcgagagacacatcgagcacggcggcaagaccgtggaggtgaagggcggcgagcactgctactaccagggccacatcagaggcaaccccgacagcttcgtggccctgagcacctgccacggcctgcacggcatgttctacgacggcaaccacacctacctgatcgagcccgaggagaacgacaccacccaggaggacttccacttccacagcgtgtacaagagcagactgttcgagttcagcctggacgacctgcccagcgagttccagcaggtgaacatcacccccagcaagttcatcctgaagcccagacccaagagaagcaagagacagctgagaagataccccagaaacgtggaggaggagaccaagtacatcgagctgatgatcgtgaacgaccacctgatgttcaagaagcacagactgagcgtggtgcacaccaacacctacgccaagagcgtggtgaacatggccgacctgatctacaaggaccagctgaagaccagaatcgtgctggtggccatggagacctgggccaccgacaacaagttcgccatcagcgagaaccccctgatcaccctgagagagttcatgaagtacagaagagacttcatcaaggagaagagcgacgccgtgcacctgttcagcggcagccagttcgagagcagcagaagcggcgccgcctacatcggcggcatctgcagcctgctgaagggcggcggcgtgaacgagttcggcaagaccgacctgatggccgtgaccctggcccagagcctggcccacaacatcggcatcatcagcgacaagagaaagctggccagcggcgagtgcaagtgcgaggacacctggagcggctgcatcatgggcgacaccggctactacctgcccaagaagttcacccagtgcaacatcgaggagtaccacgacttcctgaacagcggcggcggcgcctgcctgttcaacaagcccagcaagctgctggacccccccgagtgcggcaacggcttcatcgagaccggcgaggagtgcgactgcggcacccccgccgagtgcgtgctggagggcgccgagtgctgcaagaagtgcaccctgacccaggacagccagtgcagcgacggcctgtgctgcaagaagtgcaagttccagcccatgggcaccgtgtgcagagaggccgtgaacgactgcgacatcagagagacctgcagcggcaacagcagccagtgcgcccccaacatccacaagatggacggctacagctgcgacggcgtgcagggcatctgcttcggcggcagatgcaagaccagagacagacagtgcaagtacatctggggccagaaggtgaccgccagcgacaagtactgctacgagaagctgaacatcgagggcaccgagaagggcaactgcggcaaggacaaggacacctggatccagtgcaacaagagagacgtgctgtgcggctacctgctgtgcaccaacatcggcaacatccccagactgggcgagctggacggcgagatcaccagcaccctggtggtgcagcagggcagaaccctgaactgcagcggcggccacgtgaagctggaggaggacgtggacctgggctacgtggaggacggcaccccctgcggcccccagatgatgtgcctggagcacagatgcctgcccgtggccagcttcaacttcagcacctgcctgagcagcaaggagggcaccatctgcagcggcaacggcgtgtgcagcaacgagctgaagtgcgtgtgcaacagacactggatcggcagcgactgcaacacctacttcccccacaacgacgacgccaagaccggcatcaccctgagcggcaacggcgtggccggcaccaacatcatcatcggcatcatcgccggcaccatcctggtgctggccctgatcctgggcatcaccgcctggggctacaagaactacagagagcagagaagcaacggcctgagccacagctggagcgagagaatccccgacaccaagcacatcagcgacatctgcgagaacggcagacccagaagcaacagctggcagggcaacctgggcggcaacaagaagaagatcagaggcaagagattcagacccagaagcaacagcaccgagtacctgaacccctggttcaagagagactacaacgtggccaagtgggtggaggacgtgaacaagaacaccgagggcccctacttcagaaccctgagccccgccaagagccccagcagcagcaccggcagcatcgccagcagcagaaagtacccctaccccatgccccccctgcccgacgaggacaagaaggtgaacagacagagcgccagactgtgggagaccagcatctag

SEQ ID NO: 209344 - DNA, 3420 bp, Artificial Sequence
  derived and/or modified sequence
gcggagcgagggaaacggactcggcggcgccggcatgaggagctgagcgtctcgggcgaggcgggctgacggcagcaccatgcaggcggcagtggctgtgtccgtgcccttcttgctgctctgtgtcctggggacctgccctccggcgcgctgcggccaggcaggagacgcctcattgatggagctagagaagaggaaggaaaaccgcttcgtggagcgccagagcatcgtgccactgcgcctcatctaccgctcgggcggcgaagacgaaagtcggcacgacgcgctcgacacgcgggtgcggggcgacctcggtggcccgcagttgactcatgttgaccaagcaagcttccaggttgatgcctttggaacgtcattcattctcgatgtcgtgctaaatcatgatttgctgtcctctgaatacatagagagacacattgaacatggaggcaagactgtggaagttaaaggaggagagcactgttactaccagggccatatccgaggaaaccctgactcatttgttgcattgtcaacatgccacggacttcatgggatgttctatgacgggaaccacacatatctcattgagccagaagaaaatgacactactcaagaggatttccattttcattcagtttacaaatccagactgtttgaattttccttggatgatcttccatctgaatttcagcaagtaaacattactccatcaaaatttattttgaagccaagaccaaaaaggagtaaacggcagcttcgtcgatatcctcgtaatgtagaagaagaaaccaaatacattgaactgatgattgtgaatgatcaccttatgtttaaaaaacatcggctttccgttgtacataccaatacctatgcgaaatctgtggtgaacatggcagatttaatatataaagaccaacttaagaccaggatagtattggttgctatggaaacctgggcgactgacaacaagtttgccatatctgaaaatccattgatcaccctacgtgagtttatgaaatacaggagggattttatcaaagagaaaagtgatgcagttcaccttttttcgggaagtcaatttgagagtagccggagcggggcagcttatattggtgggatttgctcgttgctgaaaggaggaggcgtgaatgaatttgggaaaactgatttaatggctgttacacttgcccagtcattagcccataatattggtattatctcagacaaaagaaagttagcaagtggtgaatgtaaatgcgaggacacgtggtccgggtgcataatgggagacactggctattatcttcctaaaaagttcacccagtgtaatattgaagagtatcatgacttcctgaatagtggaggtggtgcctgccttttcaacaaaccttctaagcttcttgatcctcctgagtgtggcaatggcttcattgaaactggagaggagtgtgattgtggaaccccggccgaatgtgtccttgaaggagcagagtgttgtaagaaatgcaccttgactcaagactctcaatgcagtgacggtctttgctgtaaaaagtgcaagtttcagcctatgggcactgtgtgccgagaagcagtaaatgattgtgatattcgtgaaacgtgctcaggaaattcaagccagtgtgcccctaatattcataaaatggatggatattcatgtgatggtgttcagggaatttgctttggaggaagatgcaaaaccagagatagacaatgcaaatacatttgggggcaaaaggtgacagcatcagacaaatattgctatgagaaactgaatattgaagggacggagaagggtaactgtgggaaagacaaagacacatggatacagtgcaacaaacgggatgtgctttgtggttaccttttgtgtaccaatattggcaatatcccaaggcttggagaactcgatggtgaaatcacatctactttagttgtgcagcaaggaagaacattaaactgcagtggtgggcatgttaagcttgaagaagatgtagatcttggctatgtggaagatgggacaccttgtggtccccaaatgatgtgcttagaacacaggtgtcttcctgtggcttctttcaactttagtacttgcttgagcagtaaagaaggcactatttgctcaggaaatggagtttgcagtaatgagctgaagtgtgtgtgtaacagacactggataggttctgattgcaacacttacttccctcacaatgatgatgcaaagactggtatcactctgtctggcaatggtgttgctggcaccaatatcataataggcataattgctggcaccattttagtgctggccctcatattaggaataactgcgtggggttataacaatattttcaatttcaggtcaaatgggctctctcattcttggagtgaaaggattccagacacaaaacatatttcagacatctgtgaaaatgggcgacctcgaagtaactcttggcaaggtaacctgggaggcaacaaaaagaaaatcagaggcaaaagatttagacctcggtctaattcaactgagtatttaaacccatggttcaaaagagactataatgtagctaagtgggtagaagatgtgaataaaaacactgaaggaccatactttaggactttatctcctgccaagtctccttcttcatcaactgggtctattgcctccagcagaaaatacccttacccaatgcctccacttcctgatgaggacaagaaagtgaaccgacaaagtgccaggctatgggagacatccatttaagatcaactgtttacatgtgatacatcgaaaactgtttacttcaacttttatagaaacccaggctcatggaatcactgcaaatctatctgctcttcagacaatacgaagaccctctgagatgctacagaggagaggaagcggagtttcacatctggttaccattttctttttgtcattggcttaggatttaactaaccatgaaaagaactactgaaatattacactataacatggaacaataaaggtactggtatgttaatggataatccgcatgacagataatatgtagaaatattcataaagttaactcacatgacccaaatgtagcaagtttcctaaggtacaatagtggattcagaacttgacgttctgaggcacatcctcactgtaaacagtaatgctatatgcatgaagcttctgtttattgttttccatatttaaggaaacaacatcccataatagaaatgagcatgcagggctaaggcatataggatttttctgcaggactttaaagctttgaaaggccaatatcccataggctaactttaaacatgtatttttatttttgttttgttttttacttttcatatttatattagcatacaaggacaattgtatatatgtaacatttttaaaatttt

SEQ ID NO: 209345 - DNA, 9144 bp, Artificial Sequence
  derived and/or modified sequence
catgaggagctgagcgtctcgggcgaggcgggctgacggcagcaccatgcaggcggcagtggctgtgtccgtgcccttcttgctgctctgtgtcctggggacctgccctccggcgcgctgcggccaggcaggagacgcctcattgatggagctagagaagaggaaggaaaaccgcttcgtggagcgccagagcatcgtgccactgcgcctcatctaccgctcgggcggcgaagacgaaagtcggcacgacgcgctcgacacgcgggtgcggggcgacctcggtggcccgcagttgactcatgttgaccaagcaagcttccaggttgatgcctttggaacgtcattcattctcgatgtcgtgctaaatcatgatttgctgtcctctgaatacatagagagacacattgaacatggaggcaagactgtggaagttaaaggaggagagcactgttactaccagggccatatccgaggaaaccctgactcatttgttgcattgtcaacatgccacggacttcatgggatgttctatgacgggaaccacacatatctcattgagccagaagaaaatgacactactcaagaggatttccattttcattcagtttacaaatccagactgtttgaattttccttggatgatcttccatctgaatttcagcaagtaaacattactccatcaaaatttattttgaagccaagaccaaaaaggagtaaacggcagcttcgtcgatatcctcgtaatgtagaagaagaaaccaaatacattgaactgatgattgtgaatgatcaccttatgtttaaaaaacatcggctttccgttgtacataccaatacctatgcgaaatctgtggtgaacatggcagatttaatatataaagaccaacttaagaccaggatagtattggttgctatggaaacctgggcgactgacaacaagtttgccatatctgaaaatccattgatcaccctacgtgagtttatgaaatacaggagggattttatcaaagagaaaagtgatgcagttcaccttttttcgggaagtcaatttgagagtagccggagcggggcagcttatattggtgggatttgctcgttgctgaaaggaggaggcgtgaatgaatttgggaaaactgatttaatggctgttacacttgcccagtcattagcccataatattggtattatctcagacaaaagaaagttagcaagtggtgaatgtaaatgcgaggacacgtggtccgggtgcataatgggagacactggctattatcttcctaaaaagttcacccagtgtaatattgaagagtatcatgacttcctgaatagtggaggtggtgcctgccttttcaacaaaccttctaagcttcttgatcctcctgagtgtggcaatggcttcattgaaactggagaggagtgtgattgtggaaccccggccgaatgtgtccttgaaggagcagagtgttgtaagaaatgcaccttgactcaagactctcaatgcagtgacggtctttgctgtaaaaagtgcaagtttcagcctatgggcactgtgtgccgagaagcagtaaatgattgtgatattcgtgaaacgtgctcaggaaattcaagccagtgtgcccctaatattcataaaatggatggatattcatgtgatggtgttcagggaatttgctttggaggaagatgcaaaaccagagatagacaatgcaaatacatttgggggcaaaaggtgacagcatcagacaaatattgctatgagaaactgaatattgaagggacggagaagggtaactgtgggaaagacaaagacacatggatacagtgcaacaaacgggatgtgctttgtggttaccttttgtgtaccaatattggcaatatcccaaggcttggagaactcgatggtgaaatcacatctactttagttgtgcagcaaggaagaacattaaactgcagtggtgggcatgttaagcttgaagaagatgtagatcttggctatgtggaagatgggacaccttgtggtccccaaatgatgtgcttagaacacaggtgtcttcctgtggcttctttcaactttagtacttgcttgagcagtaaagaaggcactatttgctcaggaaatggagtttgcagtaatgagctgaagtgtgtgtgtaacagacactggataggttctgattgcaacacttacttccctcacaatgatgatgcaaagactggtatcactctgtctggcaatggtgttgctggcaccaatatcataataggcataattgctggcaccattttagtgctggccctcatattaggaataactgcgtggggttataaaaactatcgagaacagaggtcaaatgggctctctcattcttggagtgaaaggattccagacacaaaacatatttcagacatctgtgaaaatgggcgacctcgaagtaactcttggcaaggtaacctgggaggcaacaaaaagaaaatcagaggcaaaagatttagacctcggtctaattcaactgagtatttaaacccatggttcaaaagagactataatgtagctaagtgggtagaagatgtgaataaaaacactgaaggaccatactttaggactttatctcctgccaagtctccttcttcatcaactgggtctattgcctccagcagaaaatacccttacccaatgcctccacttcctgatgaggacaagaaagtgaaccgacaaagtgccaggctatgggagacatccatttaagatcaactgtttacatgtgatacatcgaaaactgtttacttcaacttttatagaaacccaggctcatggaatcactgcaaatctatctgctcttcagacaatacgaagaccctctgagatgctacagaggagaggaagcggagtttcacatctggttaccattttctttttgtcattggcttaggatttaactaaccatgaaaagaactactgaaatattacactataacatggaacaataaaggtactggtatgttaatggataatccgcatgacagataatatgtagaaatattcataaagttaactcacatgacccaaatgtagcaagtttcctaaggtacaatagtggattcagaacttgacgttctgaggcacatcctcactgtaaacagtaatgctatatgcatgaagcttctgtttattgttttccatatttaaggaaacaacatcccataatagaaatgagcatgcagggctaaggcatataggatttttctgcaggactttaaagctttgaaaggccaatatcccataggctaactttaaacatgtatttttatttttgttttgttttttacttttcatatttatattagcatacaaggacaattgtatatatgtaacatttttaaaattttaaaaaaatgcagctgttacacacaagtgtattttgccaaatgcctaaaaattccgtcacaatcacatcatcgtcatccatccagtgatcttcaaagactataagcaggtaatgtaaatatagtggtcaatgctgtaaatgtgtctctccataattcgtatttgtccaaaacatgtgatatccctttaacctgtgcacagtctggaggcagttttattgagtgagtagttgagtgagagaacaaaatgcccagcaaaacttctggcctccacagtttgctgatgcaggagcccactctgctgccgatgggctgctccctggaaatcatctatcccatccgtccatcccatctcatcccagtgagccagcccctcagcagtgtgtgctgctgagattaagcaagtgcaccaaagacacatgagacaacgtactgccagtgagctggtagcttctggtttgccaatactctaaccctttgtggcctgaagttttgttccttggcaaaactttgtagtcacccttatctgtgaaatgaatgacttgttttaacaaaaacaactttgacactgttgattaagaatatttgtcatcactgggatgtgaatcccaacaagtcattctgcactgactctgaagcaagatgacggaagattctactgtttgagttgagcagcttcaaccattcataaagggttaagttagatctaaaccacagagatgcagcatctgcgaagttacactaacagctggtgggggaaagaatctgatgctttgaaacatatatttttaatccataggaaaataagattctattttaaaagacccttctttaaaaccaaagtttgatagctgttataatggcagatctgtcattccaaaagaaagctagctaccctagtgaggctggagattgatgggctcaatcacatggtctgctctgaagtatacttctgatttcctcatttgctgtgtgttcttaagaggaatggaatctgcagacaggttttcagatatactctcttaaatttgatcctctcccatagtatccatggacaaaatccatatcatcttcatatgtaatcaatttgattacatatcatgcccaaactgaagggccgagttagaaggcagcattttatactgtgtgtttatgtcttctgtaatggacctctcttttgaaagtctttgaaatgtttggaaagcaatttaatgatccaaaattacataatgtaaaacagcatttttcatgacaggaagggatgtgattgttgatatgaccataaagcgatccatcaggccaaggtttgggtgagtgttgggcagtgttgccacatagctcaagccaagaacagaagggcagacagattgaaagatgtagcaaataaagtgactttttaccaagatcactgtaacgtgcactgaatgtttcctggtactgagtgtacaaaaggctaatgctataaggtttattttgactataaaagagtttatagatttgaatataaggtgcctcatgtaaatatgcttcctagttacaggtacacaaactctaatttgaaagaatccacaaatggctagctgagaagttaacagatctctatcattcgtctgtgtgtctttcttccctcacctatttttacatgaaattattatttcaaatgaaaatcatgatcatgtgccttttgggagacatggtttctctagaggtatatagtttgtaattacccgccttggtaataaccttcctgtggaactgactaaaaatttttgttttatttgtagagattatgatttgaggtatacagtaactttaatgttctattcttggaatctactctatctcccatgtttaaacattcttagagccatttgtgggattcattgacaaatttatagtctcaagggagagtttcaagaagtatctatatgtatactcatggttggggttctagaggcattacatctaaatatttatgacttttcatccaccgaggtaggtagcattaaatatacaagcacagcattatttctctttaaatatctattttggagagaaactttgaggccgtatcacagtttatatcatgcaactaatatttatatttcccaatccactacaaaatcattgctaagcagaagagagcagttatttggcctttatgttccattgtatgcctttttcccctcttccagttttatgcattgataagactacagattggcaccctgctgcctgagaagttccatttatccatagtcattgcagtgcagtaaaccctgatttaaaggaacatttaagtctctccagtaagtgtgaacaggaaggcatgggatagaagagagtccttatggagtggactggccacatgaactgtcctccagccactctttatttagatgggaagtggcatggtcctctgaacgctgcaggctggaaatgatccccagggcacatgcaatctgtggaaaggaatacatcggacagtgcaacatggtgagggctttcaatttgctgtggttgctgtatttttaacaagacacccggagcttcgattaggaataacctatcattagagttgttcctttaaaaaatgttgatgaataaagcaaatgtgggtttaaaatgccaacttatttttcactttgatattggtgctttattaagtgataccatagtttctctctcttttccctgttactttaaaaagaattttaaaattgtgtttgtatataaggtcagtctggcatagaatttctgaaagtaacattaataggatttctaaagaagttgtcagaaagacaaaattggatattctctgcactttcagagaaggactatttatgtttgaatttcataacaggcttacatttcttttctattgattcccttgcatatctacataatttaatcctgtctattgtcccagatctcttgtggctactttacctgttaccttttttgggattttgttctttatgttttacagttaccttcggaccagaagatatatggtatttttattcacttttttcagtgttttaaaataaggtttgttcatttattcattttatccattcatttcctattgtcgtatagttctaaccatatatatagtactttaaatattttcttatgttattatttaacacaataataaattcttatctaaagaaaagattattttactttattttacttaaaggaaagagaatttattggcaggatattgagtagcttgtagagtatatggaaggggagagccaagttaggaactggcaggagcgaggagggacaagacagctgcctgcacagtctgataggacacatctggctgctgccactggatgcccacatgggcagcgtgttgtaaatatcaccctaccagttggtaagttggcatgaattttccatgaaacacttgactgccatttgcagcatcatatctactttttatgcacctaattatatttttcctttcacttttatgtttttttctaaaactgccacctaaatacctttccactccgttaaatgtatggagtcaagataaatttctcattcttgctctacagtttaagatgtataagaagtaaacacttccgtggaatagggcttaatttggggctcaaatgttttgttttcctcctgagatgtttttgaatggataagactactctggttttggatgcagcaacttttctcctggcatggaagaactaaggactttgataaacagtttcccattgatagtataatataatgaggggcccagtctgctcttgtgaaaattggctgagcggcagcagcccatcccagctgtgtgtgagtagccccgctgttaaaagtacacctgctgggaattgttggcacatgctcatagcatatgctctgtgggggaggtgcttttaattccaagaggagcttttctcccacatctgcggatgcagaacaaagatgcagcaggactttagaaaacaggagtgtttctactgacattttattcattgctttgttagtcccgcaaatggagcaacttctggttgtttgtaagcagaaaaacaaaacattcaaaaccaaaaacctaattagtacttttgtcctttatatccctaggatgctctagggagtagaggtggcaggcatctttatcttcacccactggcacattagcagcttatgcaacttaggaagtcactgggagatgagtcctaaaagcctgaatttcaggatggggaggagataagaagcagagaactttgggagaccatggggcatttagtcctggcatagacacagaatggatattcacaggaagattcctgaggccagatatgcaggagagcacacattgtcacaaggggtgtggtgggaagagaggtgctggatgcctaagacagacttctgtgcttggcagattgactgagtgttgactctgaatactttgtggtccagtccataataggccagtcactcctgcctgatgcatccctgttgcactgttcataaaacctgtatcatatggggaagcttcaaggctggcaggcttttcatcaagtaatcatcattccatgttcctacgtatccttgaaatcaaaaccaggcaatatgtgtgtttttggttttgttttacaaaaaggcatacaatgagacgaattcttaagataatgcacatacagaatcatcaataaagtttcaaagagtttatgaagaaaaggtattttcctttcttgtaaaaaatgttatatatatataatattctgatctgcattcaccttagggcttagcctcttattttatgaattttcaggctgtgatttgtgttggatggctaagctctaaaataatgcaaatagccccaatctttaaatatagcggtgctaagttgaacaagtaacacaatacagaaaatgctgatatgaatacttagtaataatacaaaagttcctgctaaattatatatgtgtatcactgcctgactagaaaccccacttttcttttctaatccagcacaaaatcaaactctgattctacaaccagtctttttaaagggcaaaaatgactcaacacctttgttttgtatggaaaacttttttttttacactaactgcaaaactgctttaaaaaaaggcttattcaggatagataagcatgtactccttttttaacttgctggaagacttgcccctccaaactagcacccccaaaagacaacttctttcagaaacggggtgttttacctaaacatagtagcttacatgttagccagcagtaggtcggcactagtgttttccacggttatcacctttgacaggtgatgtgcatctatagatagtggaagccaccccatgaggaggtgttaatagcagcatggtttcacttttggtaatcaggtaatcatgtgtatatacttagattcgcattattttaacatttctctgctactctgcacttcaggttcgttaagctattttaataattactggggttatggcaaacaccaatggaaatgtatatggcaactgctttcctgagcaagtgtgatttgttttatggctgttcaagttataaaattgttcttacattgtaggtaaacaaaatcttgatgtttttaaaggtcactgtaacttaaggttcaaatttctggcacagttttattagtattcacttcggaagctaataagataccatggttttctatgttactcccattgtaacattagtaaagtgactttcaataaaagatttatgttattttga

SEQ ID NO: 209346 - protein, 906 aa, Artificial Sequence
  derived and/or modified sequence
MQAAVAVSVPFLLLCVLGTCPPARCGQAGDASLMELEKRKENRFVERQSIVPLRLIYRSGGEDESRHDALDTRVRGDLGGPQLTHVDQASFQVDAFGTSFILDVVLNHDLLSSEYIERHIEHGGKTVEVKGGEHCYYQGHIRGNPDSFVALSTCHGLHGMFYDGNHTYLIEPEENDTTQEDFHFHSVYKSRLFEFSLDDLPSEFQQVNITPSKFILKPRPKRSKRQLRRYPRNVEEETKYIELMIVNDHLMFKKHRLSVVHTNTYAKSVVNMADLIYKDQLKTRIVLVAMETWATDNKFAISENPLITLREFMKYRRDFIKEKSDAVHLFSGSQFESSRSGAAYIGGICSLLKGGGVNEFGKTDLMAVTLAQSLAHNIGIISDKRKLASGECKCEDTWSGCIMGDTGYYLPKKFTQCNIEEYHDFLNSGGGACLFNKPSKLLDPPECGNGFIETGEECDCGTPAECVLEGAECCKKCTLTQDSQCSDGLCCKKCKFQPMGTVCREAVNDCDIRETCSGNSSQCAPNIHKMDGYSCDGVQGICFGGRCKTRDRQCKYIWGQKVTASDKYCYEKLNIEGTEKGNCGKDKDTWIQCNKRDVLCGYLLCTNIGNIPRLGELDGEITSTLVVQQGRTLNCSGGHVKLEEDVDLGYVEDGTPCGPQMMCLEHRCLPVASFNFSTCLSSKEGTICSGNGVCSNELKCVCNRHWIGSDCNTYFPHNDDAKTGITLSGNGVAGTNIIIGIIAGTILVLALILGITAWGYKNYREQRQLPQGDYVKKPGDGDSFYSDIPPGVSTNSASSSKKRSNGLSHSWSERIPDTKHISDICENGRPRSNSWQGNLGGNKKKIRGKRFRPRSNSTETLSPAKSPSSSTGSIASSRKYPYPMPPLPDEDKKVNRQSARLWETSI

SEQ ID NO: 209347 - DNA, 2721 bp, Artificial Sequence
  derived and/or modified sequence
atgcaggcagctgtcgctgtgtccgtgcccttcctgctgctatgtgttcttggaacatgccccccagcccgatgtggacaagccggcgatgcctctctcatggagctggaaaagcggaaggaaaatcgcttcgtggaacgacaatcaattgtgcctctgcgtctaatatatcgcagcggcggcgaggacgaaagtcgccatgacgccctcgatactcgggtccgcggggatttggggggaccccaactcacccacgtggaccaagcaagctttcaggtggatgcgtttggtaccagcttcatcctggatgtagtcctgaatcatgatttgctaagtagtgaatacatagaaaggcacattgaacatggtggtaagaccgtcgaggtgaaggggggagagcactgttactatcagggccatattagaggaaatccagattcttttgtagccctcagtacctgtcatggtttgcatgggatgttttacgatgggaatcatacttatctgattgagcccgaggaaaatgacacaacccaagaggattttcacttccattccgtctacaaatcccgcctttttgaattcagcttagacgacctgccctcagagtttcagcaggtcaacattacccccagcaagtttatattaaaaccacggccaaagcggtcaaaaagacagctgaggcggtacccccggaacgtggaggaggagactaaatacatcgagttaatgattgtaaacgaccacctcatgttcaaaaagcatcgcctgtcagtggtgcacacaaacacatacgccaagagtgtggttaacatggcagatctcatctacaaagatcagctgaaaacccggatcgtcctggtggctatggagacctgggcgacagataataaatttgccatttccgagaaccccctgataacactgcgcgagttcatgaagtatcgacgggatttcataaaggaaaaatctgatgctgtgcatcttttcagcggcagccagtttgagtctagcaggagtggcgccgcatatatcggcggcatatgctctctgttgaagggggggggtgtcaacgaattcgggaaaaccgatctaatggcagtgacgctggcgcaatcccttgctcacaacatcggaatcatcagcgacaagagaaaactggcatcaggggaatgcaagtgcgaggatacttggagtggttgtatcatgggggacactggctactatcttccgaagaagtttacccagtgtaacatcgaagagtaccatgacttcctcaatagcggtggcggcgcttgtctctttaacaagccgtctaagttgctggaccccccagagtgtggaaatgggttcatcgaaactggcgaagaatgcgactgcggaaccccagcggagtgcgttcttgagggcgcggagtgttgcaaaaaatgcactctgacccaggatagccaatgtagtgacggtttgtgttgtaagaaatgcaaatttcagccaatggggaccgtctgccgcgaagctgtgaacgattgcgatatccgagagacatgtagcgggaactcttctcagtgcgcccctaacatccacaagatggatggttactcctgcgacggagtacagggcatttgtttcggtggccgatgtaaaactagggatagacaatgcaaatacatctggggccagaaggtgacagcctcagacaagtactgttatgagaagctgaacatcgagggcaccgaaaaggggaactgcggcaaggataaagacacatggattcaatgtaataaaagggacgtcctctgtggatatctcctctgtaccaatatcgggaatattccccgcctgggagagctggacggcgaaataacaagcactctggtcgtgcagcagggacgcaccttaaactgttctggagggcacgtgaagctagaggaagatgttgatctggggtacgtggaggacggaaccccttgtggtccacagatgatgtgcttggaacatcgctgtctgccagttgcaagctttaacttcagcacatgtctttcctccaaagagggcactatctgtagcgggaatggcgtctgttccaacgagctgaaatgtgtgtgcaatcgacattggatcggcagcgattgcaacacatactttccacataatgacgacgccaaaacaggcattactctctccggcaatggagtggctggaacgaacattatcatcggcataatcgcaggaactattctggtcctcgccctcatcctcggcattaccgcttgggggtacaaaaactatagggaacagcgacagctcccccagggcgattatgtcaagaaacctggcgatggagattcattttactctgatattccgccaggagtctctaccaattcagcatccagcagcaagaaaaggtctaacggtctcagtcacagctggtctgaaaggatccccgacacaaaacatatttcggacatctgcgaaaatgggaggccaaggtcaaatagctggcaggggaatctcgggggtaataagaagaagatacggggcaagaggtttagaccgaggtcaaacagtacggaaaccctgtcacccgcgaagtcgccttcctctagcacaggaagcatcgcatcatcgcggaaatacccctacccgatgcctcccctgccagacgaagataagaaggtaaataggcagtccgccaggctttgggagacctcgatttag

SEQ ID NO: 209348 - DNA, 2721 bp, Artificial Sequence
  derived and/or modified sequence
atgcaggccgctgtggccgtgtctgtgcccttcctgctgctgtgtgtgctgggcacctgccccccagcccgctgtggccaggccggagatgccagcctgatggagctggagaagaggaaagaaaatagatttgtggagcggcagagcatcgtgcccctgcggctcatctacagaagtggaggagaagatgagagcagacatgatgccctggacaccagggtgcggggggacctgggcggcccccagctgacccacgtggaccaggccagcttccaggtggatgccttcggcaccagcttcatcctggatgtggtgctgaaccacgacctgctgagcagcgagtacatcgagcggcacatcgagcacggcggcaagacagtggaggtgaagggcggggagcactgctactaccagggccacatccggggcaacccagacagctttgtggccctgagcacctgccacggcctgcacggcatgttttatgatggcaaccacacctacctgattgagcctgaggagaatgacaccacccaggaggacttccacttccacagcgtgtacaagagccggctgtttgagttcagcctggatgacctgcccagcgagttccagcaggtgaacatcacccccagcaagttcatcctgaagccccggcccaagaggagcaagaggcagctgcggcgctaccccagaaatgtggaggaggagaccaagtacatcgagctgatgattgtgaatgaccacctgatgttcaagaagcaccggctgtctgtggtgcacaccaacacctacgccaagtctgtggtgaacatggctgacctgatctacaaggaccagctgaagaccagaattgtgctggtggccatggagacctgggccacagacaacaagtttgccatcagcgagaaccccctcatcaccctgcgggagttcatgaagtaccgccgggacttcatcaaggagaagagtgatgctgtgcacctgttcagcggcagccagtttgagagcagccgcagcggggccgcctacatcggcggcatctgcagcctgctgaagggcggcggcgtgaatgaatttgggaagacagacctgatggctgtgaccctggcccagagcctggcccacaacatcggcatcatcagtgacaagaggaagctggccagcggagaatgtaaatgtgaggacacctggagcggctgcatcatgggagacaccggctactacctgcccaagaagttcacccagtgcaacatcgaggagtaccatgacttcctgaacagcggcggcggggcctgcctcttcaacaagcccagcaagctgctggaccccccagaatgtggaaatggcttcatcgagaccggggaggagtgtgactgtggcaccccagcagaatgtgtgctggagggcgctgagtgctgcaagaagtgcaccctgacccaggacagccagtgcagtgatggcctgtgctgcaagaagtgcaagttccagcccatgggcaccgtgtgccgggaggccgtgaatgactgtgacatccgggagacctgcagcggcaacagcagccagtgtgcccccaacatccacaagatggatggctacagctgtgatggagtgcagggcatctgctttggaggccgctgcaagacccgggaccggcagtgcaagtacatctggggccagaaggtgacagccagtgacaagtactgctatgagaagctgaacatcgagggcacagagaagggcaactgtgggaaggacaaggacacctggatccagtgcaacaagagagatgtgctgtgtggctacctgctgtgcaccaacatcggcaacatcccccggctgggggagctggatggagagatcaccagcaccctggtggtgcagcagggccgcaccctgaactgcagcggcggccacgtgaagctggaggaggatgtggacctgggctacgtggaggatggcaccccctgtggcccccagatgatgtgcctggagcaccgctgcctgcctgtggccagcttcaacttcagcacctgcctgagcagcaaggagggcaccatctgcagcggaaatggagtgtgcagcaatgagctgaagtgtgtgtgcaacagacactggattggaagtgactgcaacacctacttcccccacaatgatgatgccaagacaggcatcaccctgtctggaaatggagtggccggcaccaacatcatcatcggcatcatcgccggcaccatcctggtgctggccctgatcctgggcatcacagcctggggctacaagaactaccgggagcagaggcagctgccccagggcgactatgtgaagaagccaggagatggagacagcttctacagcgacatccccccaggagtgtccaccaacagcgccagcagcagcaagaagaggagcaatggcctgagccacagctggagcgagcgcatcccagacaccaagcacatcagtgacatctgtgaaaatggccggcccaggagcaacagctggcagggcaacctgggcggcaacaagaagaagatccggggcaagcgcttccggcccaggagcaacagcacagagaccctgagccctgccaagagccccagcagcagcacaggcagcatcgccagcagcaggaagtacccctaccccatgccacccctgcctgatgaggacaagaaggtgaaccggcagagcgcccggctgtgggagaccagcatctag

SEQ ID NO: 209349 - DNA, 2721 bp, Artificial Sequence
  derived and/or modified sequence
atgcaggccgccgtggccgtgagcgtgcccttcctgctgctgtgcgtgctggggacttgcccacccgcacggtgtgggcaagccggggacgcttccctgatggagctggaaaaacggaaagagaaccgattcgtggagaggcaaagcatcgtccccctgaggttgatctaccgaagtggcggagaagacgagtcgcgccatgacgccctcgacacaagagtaagaggcgacctgggcggtccccagctgacacacgtcgaccaagcatcatttcaagttgacgccttcgggacatcttttatcctggatgtggtccttaatcatgatctgctcagttcagagtacatcgaacggcacattgagcacggcgggaagacggtggaggtgaaagggggagaacattgctactaccagggccacattcgcgggaatccagattctttcgttgctctgtcgacgtgccacggcttacatggtatgttttatgacggcaaccacacttacttaattgaacctgaagagaatgacacgacacaggaagacttccactttcactctgtctacaaatccagactcttcgagttctctcttgatgacttaccctctgaattccaacaggtgaacattaccccctcaaagttcatcttgaagcccaggccaaaacgcagcaaacgacagttgcgaaggtatccacggaacgtggaggaagaaaccaagtacattgagcttatgatcgtgaatgatcacctcatgttcaagaagcatcgcctgtccgtcgtacatactaatacttacgccaagtcagttgtgaacatggcagacttgatatataaagaccagcttaagactcgtatagtactggttgccatggagacatgggccacagacaacaaattcgcaatcagtgagaacccactcatcacccttagagaattcatgaagtaccggagggatttcatcaaggagaagtccgatgccgtccatttgtttagtggctcgcaatttgagtcatcgagatctggcgccgcatacatcggcggcatatgctcgctgctgaaggggggcggagttaatgagttcggtaaaacagacctgatggccgtcacacttgcccagagtctggcccataatattggtattatctccgataagcggaagcttgcgtctggcgagtgcaagtgtgaagatacgtggtcaggatgtatcatgggtgacaccggatactatctgcccaaaaaattcactcaatgcaacatcgaggagtatcacgacttcctgaacagcggcggtggcgcctgcctgtttaataaaccctcgaagttacttgacccaccagagtgtggtaatggatttatcgagaccggcgaagagtgcgattgcggcaccccggcagaatgcgtgttagagggagccgagtgctgtaaaaaatgcaccctcactcaggacagccaatgctccgatggactgtgttgcaaaaaatgtaagttccagccaatgggcacggtctgtcgtgaagccgttaatgactgcgatatccgggagacctgttctggcaacagcagccagtgcgctccaaacatccacaagatggatggctacagttgcgatggtgtacaggggatctgctttgggggtaggtgtaaaacacgtgatagacagtgcaaatacatttgggggcagaaggtgacagcttcggacaagtactgctacgaaaaacttaatatcgaaggcacagaaaagggcaactgcggaaaagacaaggacacgtggatccagtgcaataaacgggacgtgttatgtggctacttactttgcacaaatatcggaaatattccccgactgggtgagctggacggggaaatcacgagtaccctggtcgtccagcagggacgtacgctcaactgctccggtggccacgttaaactggaggaagatgtggacttaggatacgtcgaggacggcacgccatgtgggccgcagatgatgtgccttgagcaccgatgcctcccggttgcaagcttcaatttcagcacctgcctgagtagcaaagagggaacaatctgtagtgggaacggcgtatgttccaacgaactgaaatgtgtctgcaataggcattggatcggttcggattgcaatacctacttccctcacaacgacgatgccaagaccggaattaccctttccggaaacggtgtggccgggaccaatattatcatcggcatcatcgccggtactatcctcgtgctggctctgatccttggcataaccgcctggggatacaaaaattaccgcgagcagcggcagctgcctcagggagattatgttaaaaaacctggagacggcgactctttttactcagacataccaccaggtgtatctacaaatagtgcaagctccagtaaaaagcgttcaaatggcttaagccatagctggagcgagcgcatccccgatacaaaacatatcagtgacatctgcgaaaacggacggcccagatccaattcctggcagggcaacttgggaggtaataagaagaaaatacggggcaagcgattcagaccgcgaagcaactcaacagaaacccttagtcccgccaaatcaccctcctctagtacaggctccatcgccagcagccgtaaatacccttatcccatgccccctctgccagacgaagacaaaaaagtgaataggcagtctgctcggctgtgggagaccagtatttag

SEQ ID NO: 209350 - DNA, 2721 bp, Artificial Sequence
  derived and/or modified sequence
atgcaggcagccgtcgctgtatccgttccattcctgctgctgtgcgtgttgggtacttgtcccccagcacgttgcggacaggcgggtgacgcatcactaatggagctagagaagcgtaaagagaatcggtttgtagaaaggcagtccattgtgccactccggctaatctataggagtggcggagaagacgaatcacggcacgacgcactcgacacacgcgtgcgcggtgatctgggcggaccccagctcactcacgtggaccaggcttctttccaagtagatgcctttgggactagttttattctggatgttgtgctgaaccatgatcttctgagctctgaatatattgagagacacatcgaacacggcggaaagaccgtcgaagtgaagggaggggagcattgctactaccagggacacatcagaggaaatcctgactcattcgtggctctgagtacgtgccatggactccatgggatgttctatgatgggaatcacacctacctcattgaacctgaagagaacgatacaacccaggaggattttcattttcactcagtgtataagagcaggctgtttgagttttctctggacgatctgcctagcgagttccagcaggtcaatattacaccgagcaagtttattctcaagccacgacccaagcgctccaagaggcaactgcggaggtatcctagaaatgttgaggaagagaccaagtacattgagctgatgattgtaaatgaccaccttatgttcaagaaacaccgtctgagtgtagtgcatacgaacacctacgccaagtctgtagtaaacatggcagatctcatttacaaggaccagctgaagacccggatcgtgctggtggctatggagacatgggcgacggataacaagttcgccatctcggagaatcccctgatcactctccgggaattcatgaagtatagacgagactttatcaaagagaagtccgatgccgttcacctatttagtgggtcccaatttgagagctccaggtcaggcgcagcctatatcggcggtatttgtagtttactcaaaggcggaggagttaacgagttcgggaaaaccgaccttatggccgtcaccctggctcaaagcctagctcacaatatcgggatcatctcggataaacggaagcttgcgagtggagaatgtaaatgcgaggacacctggtcaggttgcattatgggagatactgggtattacttgcctaaaaagttcacccagtgcaatattgaggaataccatgacttccttaattccggcggaggcgcatgcctctttaacaagccttccaagctgttagacccaccagagtgcgggaatggcttcattgagacgggcgaagagtgtgactgtggcacaccggcagaatgcgtattggaaggagccgagtgctgtaaaaagtgcacactgacacaggattcccagtgttctgacggcttatgctgtaaaaagtgcaaattccagcccatggggaccgtgtgccgggaagctgtcaatgattgcgacatacgcgaaacatgtagtggaaactcctcccagtgtgccccaaatatccacaagatggatggatactcttgcgatggcgtccaaggtatatgctttggaggcagatgcaaaacaagagatcgacagtgcaagtacatatggggtcagaaggtcacagcctccgataagtattgttacgagaagttgaacatagaaggtacagagaagggcaactgcgggaaagacaaggacacctggatccaatgtaacaagcgcgacgttctgtgtggctacctgctgtgtaccaacattggaaatatccccaggctgggggagctggacggagaaataacctccactctggtggtgcagcagggcaggactctgaactgttctggaggacacgtcaagctggaggaggacgtagatctcggctatgtggaggacggaacgccttgcgggcctcaaatgatgtgcttggaacaccgctgccttccagtggctagtttcaatttctctacgtgcctcagctccaaggagggtacaatatgcagcggcaacggagtttgcagcaatgagcttaaatgcgtgtgtaaccgtcactggatcggctccgattgcaatacctattttcctcataatgatgatgctaagactggcatcacactcagtgggaacggcgtggcgggtacaaacatcatcattgggataattgctggcacgattttagttctggctcttatcctgggcatcactgcctggggctataaaaactacagggaacagcgacagttgcctcagggagattatgtgaagaagcctggcgacggcgattcattctacagcgatattcctccgggagtgagtacaaattcagcctccagctccaaaaagcgtagcaatgggctgtcgcactcctggagtgagcgcatcccagataccaaacacatctccgacatctgcgagaatgggcgtccacgaagtaacagctggcaggggaacttgggcggtaataagaagaagatccgtggcaagagattcaggccgaggtcaaacagcacagaaaccctgtcccccgctaagagcccttcaagcagcaccggcagcatagcctcgtctaggaagtatccctatcccatgccgccacttcctgatgaggacaaaaaagttaaccgccagtcagctagactgtgggaaacttcaatctag

SEQ ID NO: 209351 - DNA, 2721 bp, Artificial Sequence
  derived and/or modified sequence
atgcaggccgccgtggccgtgagcgtgcccttcctgctgctgtgcgtgctgggcacctgcccccccgccagatgcggccaggccggcgacgccagcctgatggagctggagaagagaaaggagaacagattcgtggagagacagagcatcgtgcccctgagactgatctacagaagcggcggcgaggacgagagcagacacgacgccctggacaccagagtgagaggcgacctgggcggcccccagctgacccacgtggaccaggccagcttccaggtggacgccttcggcaccagcttcatcctggacgtggtgctgaaccacgacctgctgagcagcgagtacatcgagagacacatcgagcacggcggcaagaccgtggaggtgaagggcggcgagcactgctactaccagggccacatcagaggcaaccccgacagcttcgtggccctgagcacctgccacggcctgcacggcatgttctacgacggcaaccacacctacctgatcgagcccgaggagaacgacaccacccaggaggacttccacttccacagcgtgtacaagagcagactgttcgagttcagcctggacgacctgcccagcgagttccagcaggtgaacatcacccccagcaagttcatcctgaagcccagacccaagagaagcaagagacagctgagaagataccccagaaacgtggaggaggagaccaagtacatcgagctgatgatcgtgaacgaccacctgatgttcaagaagcacagactgagcgtggtgcacaccaacacctacgccaagagcgtggtgaacatggccgacctgatctacaaggaccagctgaagaccagaatcgtgctggtggccatggagacctgggccaccgacaacaagttcgccatcagcgagaaccccctgatcaccctgagagagttcatgaagtacagaagagacttcatcaaggagaagagcgacgccgtgcacctgttcagcggcagccagttcgagagcagcagaagcggcgccgcctacatcggcggcatctgcagcctgctgaagggcggcggcgtgaacgagttcggcaagaccgacctgatggccgtgaccctggcccagagcctggcccacaacatcggcatcatcagcgacaagagaaagctggccagcggcgagtgcaagtgcgaggacacctggagcggctgcatcatgggcgacaccggctactacctgcccaagaagttcacccagtgcaacatcgaggagtaccacgacttcctgaacagcggcggcggcgcctgcctgttcaacaagcccagcaagctgctggacccccccgagtgcggcaacggcttcatcgagaccggcgaggagtgcgactgcggcacccccgccgagtgcgtgctggagggcgccgagtgctgcaagaagtgcaccctgacccaggacagccagtgcagcgacggcctgtgctgcaagaagtgcaagttccagcccatgggcaccgtgtgcagagaggccgtgaacgactgcgacatcagagagacctgcagcggcaacagcagccagtgcgcccccaacatccacaagatggacggctacagctgcgacggcgtgcagggcatctgcttcggcggcagatgcaagaccagagacagacagtgcaagtacatctggggccagaaggtgaccgccagcgacaagtactgctacgagaagctgaacatcgagggcaccgagaagggcaactgcggcaaggacaaggacacctggatccagtgcaacaagagagacgtgctgtgcggctacctgctgtgcaccaacatcggcaacatccccagactgggcgagctggacggcgagatcaccagcaccctggtggtgcagcagggcagaaccctgaactgcagcggcggccacgtgaagctggaggaggacgtggacctgggctacgtggaggacggcaccccctgcggcccccagatgatgtgcctggagcacagatgcctgcccgtggccagcttcaacttcagcacctgcctgagcagcaaggagggcaccatctgcagcggcaacggcgtgtgcagcaacgagctgaagtgcgtgtgcaacagacactggatcggcagcgactgcaacacctacttcccccacaacgacgacgccaagaccggcatcaccctgagcggcaacggcgtggccggcaccaacatcatcatcggcatcatcgccggcaccatcctggtgctggccctgatcctgggcatcaccgcctggggctacaagaactacagagagcagagacagctgccccagggcgactacgtgaagaagcccggcgacggcgacagcttctacagcgacatcccccccggcgtgagcaccaacagcgccagcagcagcaagaagagaagcaacggcctgagccacagctggagcgagagaatccccgacaccaagcacatcagcgacatctgcgagaacggcagacccagaagcaacagctggcagggcaacctgggcggcaacaagaagaagatcagaggcaagagattcagacccagaagcaacagcaccgagaccctgagccccgccaagagccccagcagcagcaccggcagcatcgccagcagcagaaagtacccctaccccatgccccccctgcccgacgaggacaagaaggtgaacagacagagcgccagactgtgggagaccagcatctag

SEQ ID NO: 209352 - DNA, 2891 bp, Artificial Sequence
  derived and/or modified sequence
gcggagcgagggaaacggactcggcggcgccggcatgaggagctgagcgtctcgggcgaggcgggctgacggcagcaccatgcaggcggcagtggctgtgtccgtgcccttcttgctgctctgtgtcctggggacctgccctccggcgcgctgcggccaggcaggagacgcctcattgatggagctagagaagaggaaggaaaaccgcttcgtggagcgccagagcatcgtgccactgcgcctcatctaccgctcgggcggcgaagacgaaagtcggcacgacgcgctcgacacgcgggtgcggggcgacctcggtggcccgcagttgactcatgttgaccaagcaagcttccaggttgatgcctttggaacgtcattcattctcgatgtcgtgctaaatcatgatttgctgtcctctgaatacatagagagacacattgaacatggaggcaagactgtggaagttaaaggaggagagcactgttactaccagggccatatccgaggaaaccctgactcatttgttgcattgtcaacatgccacggacttcatgggatgttctatgacgggaaccacacatatctcattgagccagaagaaaatgacactactcaagaggatttccattttcattcagtttacaaatccagactgtttgaattttccttggatgatcttccatctgaatttcagcaagtaaacattactccatcaaaatttattttgaagccaagaccaaaaaggagtaaacggcagcttcgtcgatatcctcgtaatgtagaagaagaaaccaaatacattgaactgatgattgtgaatgatcaccttatgtttaaaaaacatcggctttccgttgtacataccaatacctatgcgaaatctgtggtgaacatggcagatttaatatataaagaccaacttaagaccaggatagtattggttgctatggaaacctgggcgactgacaacaagtttgccatatctgaaaatccattgatcaccctacgtgagtttatgaaatacaggagggattttatcaaagagaaaagtgatgcagttcaccttttttcgggaagtcaatttgagagtagccggagcggggcagcttatattggtgggatttgctcgttgctgaaaggaggaggcgtgaatgaatttgggaaaactgatttaatggctgttacacttgcccagtcattagcccataatattggtattatctcagacaaaagaaagttagcaagtggtgaatgtaaatgcgaggacacgtggtccgggtgcataatgggagacactggctattatcttcctaaaaagttcacccagtgtaatattgaagagtatcatgacttcctgaatagtggaggtggtgcctgccttttcaacaaaccttctaagcttcttgatcctcctgagtgtggcaatggcttcattgaaactggagaggagtgtgattgtggaaccccggccgaatgtgtccttgaaggagcagagtgttgtaagaaatgcaccttgactcaagactctcaatgcagtgacggtctttgctgtaaaaagtgcaagtttcagcctatgggcactgtgtgccgagaagcagtaaatgattgtgatattcgtgaaacgtgctcaggaaattcaagccagtgtgcccctaatattcataaaatggatggatattcatgtgatggtgttcagggaatttgctttggaggaagatgcaaaaccagagatagacaatgcaaatacatttgggggcaaaaggtgacagcatcagacaaatattgctatgagaaactgaatattgaagggacggagaagggtaactgtgggaaagacaaagacacatggatacagtgcaacaaacgggatgtgctttgtggttaccttttgtgtaccaatattggcaatatcccaaggcttggagaactcgatggtgaaatcacatctactttagttgtgcagcaaggaagaacattaaactgcagtggtgggcatgttaagcttgaagaagatgtagatcttggctatgtggaagatgggacaccttgtggtccccaaatgatgtgcttagaacacaggtgtcttcctgtggcttctttcaactttagtacttgcttgagcagtaaagaaggcactatttgctcaggaaatggagtttgcagtaatgagctgaagtgtgtgtgtaacagacactggataggttctgattgcaacacttacttccctcacaatgatgatgcaaagactggtatcactctgtctggcaatggtgttgctggcaccaatatcataataggcataattgctggcaccattttagtgctggccctcatattaggaataactgcgtggggttataaaaactatcgagaacagagacagttaccccagggagattatgtaaaaaagcctggagatggtgactctttttatagcgacattcctcccggagtcagcacaaactcagcatctagttctaagaagaggtcaaatgggctctctcattcttggagtgaaaggattccagacacaaaacatatttcagacatctgtgaaaatgggcgacctcgaagtaactcttggcaaggtaacctgggaggcaacaaaaagaaaatcagaggcaaaagatttagacctcggtctaattcaactgagactttatctcctgccaagtctccttcttcatcaactgggtctattgcctccagcagaaaatacccttacccaatgcctccacttcctgatgaggacaagaaagtgaaccgacaaagtgccaggctatgggagacatccatttaagatcaactgtttacatgtgatacatcgaaaactgtttacttcaacttttatagaaacccaggctcatggaatcactgcaaatctatctgct

SEQ ID NO: 209353 - protein, 614 aa, Artificial Sequence
  derived and/or modified sequence
MTTLDSNNNTGGVITYIGSSGSSPSRTSPESLYSDNSNGSFQSLTQGCPTYFPPSPTGSLTQDPARSFGSIPPSLSDDGSPSSSSSSSSSSSSFYNGSPPGSLQVAMEDSSRVSPSKSTSNITKLNGMVLLCKVCGDVASGFHYGVHACEGCKGFFRRSIQQNIQYKRCLKNENCSIVRINRNRCQQCRFKKCLSVGMSRDAVRFGRIPKREKQRMLAEMQSAMNLANNQLSSQCPLETSPTQHPTPGPMGPSPPPAPVPSPLVGFSQFPQQLTPPRSPSPEPTVEDVISQVARAHREIFTYAHDKLGSSPGNFNANHASGSPPATTPHRWENQGCPPAPNDNNTLAAQRHNEALNGLRQAPSSYPPTWPPGPAHHSCHQSNSNGHRLCPTHVYAAPEGKAPANSPRQGNSKNVLLACPMNMYPHGRSGRTVQEIWEDFSMSFTPAVREVVEFAKHIPGFRDLSQHDQVTLLKAGTFEVLMVRFASLFNVKDQTVMFLSRTTYSLQELGAMGMGDLLSAMFDFSEKLNSLALTEEELGLFTAVVLVSADRSGMENSASVEQLQETLLRALRALVLKNRPLETSRFTKLLLKLPDLRTLNNMHSEKLLSFRVDAQ

SEQ ID NO: 209354 - DNA, 1845 bp, Artificial Sequence
  derived and/or modified sequence
atgaccactctagactcaaataataataccggaggggtgatcacatacatcggtagctccgggtcatctccgtcacgtacatcacccgagagcctgtattcagataactccaatggttcctttcagtccctgacccaggggtgtcccacttattttcctccttcacccaccggcagcctcacgcaggacccggccaggtcgttcggctcaattccgcctagcttgtcagatgatgggagccccagcagcagttccagtagctccagctcatcttctagcttttataatggttcacctccaggctcccttcaggtggctatggaagactcttcaagagtgtctccgtccaagtccacatctaatatcactaaattgaacgggatggttctgctctgtaaggtatgcggcgacgttgcgtcaggatttcactacggcgtgcacgcttgcgagggatgtaaagggttcttcaggcgatctatccagcagaacatccagtacaagcgctgtcttaaaaacgagaactgttccatagtgcggatcaacagaaatagatgccagcagtgcaggttcaagaaatgcctgagtgtagggatgtcacgggatgccgtgcgtttcggccggatacctaagcgggagaagcagcggatgctggccgaaatgcaatcagcaatgaatctggcaaataaccagctgtcatctcagtgcccactggaaacaagtcctacacagcaccccactccaggacctatgggtccatcgcctcccccagcccccgtaccttcccctctggtcggattttctcaatttccacagcagttaactccgcctaggtcacctagcccggaaccaactgtggaggatgtgattagtcaagtagctagggctcaccgcgagatctttacctacgctcacgataaattgggctcatcacctggtaatttcaacgcaaaccatgcctcaggttccccccctgccaccacaccccacaggtgggagaatcaaggttgccctcctgcgcctaatgataacaatacactggccgcccagagacacaatgaagcactaaacggtctgagacaagccccttcttcatatccccccacgtggccacctggccctgcacatcatagctgccaccagtcaaactccaacggccatagattatgccctacccacgtttacgccgcccccgagggcaaagcccctgccaattctcccagacaaggcaattccaagaacgtgctgctggcttgtccaatgaatatgtacccgcacggtcggagtggtagaaccgttcaagaaatatgggaggacttctctatgagcttcacgcctgccgttagagaagtcgtggaatttgcgaaacatattcccggtttcagagatctcagccagcacgatcaagtgaccctccttaaggccggcacgttcgaggtgctcatggtcagattcgcctctctgttcaatgtaaaggaccagaccgtgatgttcctgagcaggacaacttatagtctgcaggaactgggagccatgggaatgggcgatctgctttctgctatgtttgacttctctgagaagctgaattccctggccctcaccgaagaggagctaggtctgtttacagcagtagtcctagtgagcgcggatagatctggaatggagaactccgcatcagtggaacagctgcaagaaacccttctgcgcgcactgagggccctggttctcaagaatcgccccttggagacaagtagattcacaaaattattgctgaagcttcctgatctgcggacattgaacaacatgcatagcgagaaactcctctccttccgcgttgacgcccagtag

SEQ ID NO: 209355 - DNA, 1845 bp, Artificial Sequence
  derived and/or modified sequence
atgaccaccctggacagcaacaacaacacaggaggagtcatcacctacatcggcagcagcggcagcagccccagcaggaccagccctgagagcctgtacagcgacaacagcaatggcagcttccagagcctgacccagggctgccccacctacttcccccccagccccaccggcagcctgacccaggaccctgcccggagctttggcagcatcccccccagcctgagtgatgatggcagccccagcagcagcagcagcagcagcagcagcagcagcagcttctacaacggcagccccccaggcagcctgcaggtggccatggaggacagcagccgggtgagccccagcaagagcaccagcaacatcaccaagctgaatggcatggtgctgctgtgcaaggtgtgtggagatgtggccagcggcttccactacggcgtgcacgcctgtgagggctgcaagggcttcttcagaagaagcatccagcagaacatccagtacaagcgctgcctgaagaatgaaaactgcagcatcgtgcgcatcaacagaaaccgctgccagcagtgccgcttcaagaagtgcctgtctgtgggcatgagcagagatgctgtgcgcttcggccgcatccccaagcgggagaagcagaggatgctggccgagatgcagagcgccatgaacctggccaacaaccagctgagcagccagtgccccctggagaccagccccacccagcaccccaccccaggccccatgggccccagccccccaccagcccctgtgcccagccccctggtgggcttcagccagttcccccagcagctgaccccacccaggagccccagccctgagcccaccgtggaggatgtgatcagccaggtggcccgggcccaccgggagatcttcacctacgcccatgacaagctgggcagcagccctggcaacttcaatgccaaccacgccagcggcagccccccagccaccaccccccaccgctgggagaaccagggctgccccccagccccaaatgacaacaacaccctggccgcccagaggcacaatgaggccctgaatggcctgcggcaggcccccagcagctacccacccacctggcccccaggccctgcccaccacagctgccaccagagcaacagcaatggccaccggctgtgccccacccacgtgtatgctgcccctgagggcaaggccccagccaacagcccccggcagggcaacagcaagaatgtgctgctggcctgccccatgaacatgtacccccacggccgcagcggccgcacagtgcaggagatctgggaggacttctccatgtccttcaccccagctgtgcgggaggtggtggagtttgccaagcacatccctggcttccgggacctgagccagcacgaccaggtgaccctgctgaaggccggcacctttgaggtgctgatggtgcgctttgccagcctcttcaacgtgaaggaccagacagtgatgttcctgagcaggaccacctacagcctgcaggagctgggcgccatgggcatgggagacctgctgagcgccatgtttgacttcagcgagaagctgaacagcctggccctgacagaggaggagctgggcctcttcaccgctgtggtgctggtgtctgctgacagaagtggcatggagaacagcgcctctgtggagcagctgcaggagaccctgctgcgggccctgcgggccctggtgctgaagaaccggcccctggagaccagccgcttcaccaagctgctgctgaagctgcctgacctgcggaccctgaacaacatgcacagcgagaagctgctgtccttccgggtggatgcccagtag

SEQ ID NO: 209356 - DNA, 1845 bp, Artificial Sequence
  derived and/or modified sequence
atgaccaccctggacagcaacaacaacaccggcggcgtgatcacctatatcggttcttctggctcctctccatcacggacatcgcccgagagcctttatagtgacaacagcaacggatcttttcagtcgctaactcagggttgccccacctactttccccctagccccaccggatccctgacgcaggatcccgccagatccttcggatccatcccgcccagtctgtcagacgatggatccccaagcagctcctcatcctcttcgagtagctctagcagcttttataatggctcccccccaggctccttgcaggtggctatggaggactcctccagggtgtccccatctaaatctacatcaaacattacgaagctaaacggcatggtcttgctttgcaaggtgtgtggtgatgttgctagcggcttccactacggagtgcacgcctgcgaaggatgtaaaggattctttaggcggtcaattcaacagaatattcaatacaagagatgcctcaaaaacgagaattgcagcattgtgcggattaacaggaaccgctgccagcagtgtagatttaagaaatgcctttctgttggcatgtctcgcgatgccgtgcgctttggcaggatcccaaaaagagagaagcagagaatgctggccgagatgcagagcgccatgaacctcgctaacaatcagctctcatcacagtgcccactggaaacctccccaacccagcaccccacacctggaccaatgggaccctcgcccccccccgcacctgtgccctctcccttagtggggtttagtcagtttcctcagcagctgacacctccaagaagcccgagtccagagcctactgtagaggatgtgatctctcaggtcgcacgagcccatcgggaaatttttacctacgctcacgataagctaggctcaagccccggtaattttaacgccaatcatgcctccggctcccctcctgctactaccccacaccggtgggaaaatcagggttgccctcccgcccccaatgacaataacacattggccgcccagcggcataatgaagctctaaatggcctgcgtcaagcaccaagttcataccctccaacgtggcctccgggtccggcccaccacagctgccatcaaagcaattcaaacggacataggttatgtccaacacacgtttacgctgcccccgaaggtaaagccccagcgaacagtccccgacaggggaacagtaaaaatgtcctgttagcttgccctatgaacatgtacccccacggaagatcagggcgtaccgttcaggaaatctgggaagatttcagcatgtcttttaccccagcagtcagggaggtcgtggaattcgctaagcatattccaggctttagagatctcagccagcacgaccaggttactctgctgaaagcgggtacattcgaggtcctgatggttcggttcgccagcttgttcaatgttaaggatcagacagtcatgttcctatccaggactacatattctctacaagaactgggagctatggggatgggtgacctgctaagcgcaatgtttgatttcagcgaaaaactgaattccttggccctaaccgaggaggagctcggcctgttcactgcggttgtgctggtgtctgccgatcgtagcgggatggaaaattcagcatctgtggagcagctccaggagaccttgctccgggctctgagggcactggtgctaaaaaataggccgctagagacctcccggtttacaaagttactcctgaaacttccagacctgcggacgcttaataatatgcacagcgagaaactgctgagcttcagggttgatgctcaatag

SEQ ID NO: 209357 - DNA, 2772 bp, Artificial Sequence
  derived and/or modified sequence
gggcacgaggcgctccctgggatcacatggtacctgctccagtgccgcgtgcggcccgggaaccctgggctgctggcgcctgcgcagagccctctgtcccagggaaaggctcgggcaaaaggcggctgagattggcagagtgaaatattactgccgagggaacgtagcagggcacacgtctcgcctctttgcgactcggtgccccgtttctccccatcacctacttacttcctggttgcaacctctcttcctctgggacttttgcaccgggagctccagattcgccaccccgcagcgctgcggagccggcaggcagaggcaccccgtacactgcagagacccgaccctccttgctaccttctagccagaactactgcaggctgattccccctacacactctctctgctcttcccatgcaaagcagaactccgttgcctcaacgtccaacccttctgcagggctgcagtccggccaccccaagaccttgctgcagggtgcttcggatcctgatcgtgagtcgcggggtccactccccgcccttagccagtgcccagggggcaacagcggcgatcgcaacctctagtttgagtcaaggtccagtttgaatgaccgctctcagctggtgaagacatgacgaccctggactccaacaacaacacaggtggcgtcatcacctacattggctccagtggctcctccccaagccgcaccagccctgaatccctctatagtgacaactccaatggcagcttccagtccctgacccaaggctgtcccacctacttcccaccatcccccactggctccctcacccaagacccggctcgctcctttgggagcattccacccagcctgagtgatgacggctccccttcttcctcatcttcctcgtcgtcatcctcctcctccttctataatgggagcccccctgggagtctacaagtggccatggaggacagcagccgagtgtcccccagcaagagcaccagcaacatcaccaagctgaatggcatggtgttactgtgtaaagtgtgtggggacgttgcctcgggcttccactacggtgtgcacgcctgcgagggctgcaagggctttttccgtcggagcatccagcagaacatccagtacaaaaggtgtctgaagaatgagaattgctccatcgtccgcatcaatcgcaaccgctgccagcaatgtcgcttcaagaagtgtctctctgtgggcatgtctcgagacgctgtgcgttttgggcgcatccccaaacgagagaagcagcggatgcttgctgagatgcagagtgccatgaacctggccaacaaccagttgagcagccagtgcccgctggagacttcacccacccagcaccccaccccaggccccatgggcccctcgccaccccctgctccggtcccctcacccctggtgggcttctcccagtttccacaacagctgacgcctcccagatccccaagccctgagcccacagtggaggatgtgatatcccaggtggcccgggcccatcgagagatcttcacctacgcccatgacaagctgggcagctcacctggcaacttcaatgccaaccatgcatcaggtagccctccagccaccaccccacatcgctgggaaaatcagggctgcccacctgcccccaatgacaacaacaccttggctgcccagcgtcataacgaggccctaaatggtctgcgccaggctccctcctcctaccctcccacctggcctcctggccctgcacaccacagctgccaccagtccaacagcaacgggcaccgtctatgccccacccacgtgtatgcagccccagaaggcaaggcacctgccaacagtccccggcagggcaactcaaagaatgttctgctggcatgtcctatgaacatgtacccgcatggacgcagtgggcgaacggtgcaggagatctgggaggatttctccatgagcttcacgcccgctgtgcgggaggtggtagagtttgccaaacacatcccgggcttccgtgacctttctcagcatgaccaagtcaccctgcttaaggctggcacctttgaggtgctgatggtgcgctttgcttcgttgttcaacgtgaaggaccagacagtgatgttcctaagccgcaccacctacagcctgcaggagcttggtgccatgggcatgggagacctgctcagtgccatgttcgacttcagcgagaagctcaactccctggcgcttaccgaggaggagctgggcctcttcaccgcggtggtgcttgtctctgcagaccgctcgggcatggagaattccgcttcggtggagcagctccaggagacgctgctgcgggctcttcgggctctggtgctgaagaaccggcccttggagacttcccgcttcaccaagctgctgctcaagctgccggacctgcggaccctgaacaacatgcattccgagaagctgctgtccttccgggtggacgcccagtgacccgcccggccggccttctgccgctgcccccttgtacagaatcgaactctgcacttctctctcctttacgagacgaaaaggaaaagcaaaccagaatcttatttatattgttataaaatattccaagatgagcctctggccccctgagccttcttgtaaatacctgcctccctcccccatcaccgaacttcccctcctcccctatttaaaccactctgtctcccccacaaccctcccctggccctctgatttgttctgttcctgtctcaaatccaatagttcacagctgagctggc

SEQ ID NO: 209358 - DNA, 1845 bp, Artificial Sequence
  derived and/or modified sequence
atgactacacttgattctaataataataccgggggagtcatcacttatattgggtcctccgggtcttcgcccagccggactagtcccgagagcctgtatagcgacaatagcaacggcagctttcagtccctgacccaaggatgtccaacttacttcccgccaagtcccacaggctctttaactcaggacccagccagaagtttcgggtcaatacccccttcactatctgacgatggctctccttcctccagttcatcctctagctcaagtagctcatcattttacaacggatcacctcctggctccctccaagtggccatggaggactccagccgggtgtctccttctaagtctacttccaatattacaaaactcaatggcatggtgctgctatgcaaggtgtgtggcgatgtggcttccggttttcattatggtgtccacgcctgcgaaggctgcaagggcttcttccgccgaagcatccaacaaaatatacaatacaaaaggtgtctgaagaatgagaactgtagtatagtgcgcataaacagaaatcggtgccagcagtgccgctttaagaaatgcctgtcagtaggaatgtctcgcgatgctgtgcgattcgggagaattccaaaacgcgaaaaacagcgtatgctggccgagatgcagagcgcaatgaacctggccaacaaccagctcagctcgcagtgccccttagaaacttcgcccacacagcatccaacgccgggtcctatgggtcccagcccaccacctgccccagttcccagccctcttgtaggattttctcagtttccccagcagcttacccctcccaggagccccagtccggagcccacagtggaggatgtgataagccaggtagcaagggctcatcgggagatcttcacctacgctcacgacaagctggggagctcccctggaaattttaacgcaaaccacgcttcaggctcaccacccgctacaacaccacatcggtgggaaaatcagggctgccccccagcacctaacgacaataatactttggccgcacagaggcacaatgaagcgctgaatggactccgacaagcgccaagttcatatccccctacatggccccctggccctgcccaccactcttgtcatcaaagcaatagtaacggacatcgtctttgcccaacccatgtttatgccgcacccgaaggcaaggcacccgctaacagcccaagacagggtaactcgaagaacgtattgctggcttgcccgatgaatatgtatcctcacgggaggtcaggaaggactgtgcaggaaatttgggaagatttttcgatgtcatttactcccgctgtgcgagaggttgtagagtttgcaaagcatatacccggatttagggatctgtcccagcatgatcaggtgacattacttaaggcaggcacattcgaagtgctgatggtccggtttgccagcttattcaacgtcaaagatcagaccgtgatgttcctgagtagaacgacatatagtctgcaagaacttggtgccatgggtatgggtgacttgctgtccgctatgttcgatttctcggagaagctcaacagtctcgccctgacagaagaagaactgggtcttttcactgccgtagtgctggtctctgctgacagatcaggcatggaaaacagtgcctccgtggagcagttgcaagaaactctgttgagagccttgcgcgctttggtcttgaaaaacaggcctctggagacatcccggttcactaaactgctgcttaagctgccggaccttcgcactttgaacaatatgcacagcgagaaattgctcagttttagagttgacgcccagtag

SEQ ID NO: 209359 - DNA, 1845 bp, Artificial Sequence
  derived and/or modified sequence
atgaccaccctggacagcaacaacaacaccggcggcgtgatcacctacatcggcagcagcggcagcagccccagcagaaccagccccgagagcctgtacagcgacaacagcaacggcagcttccagagcctgacccagggctgccccacctacttcccccccagccccaccggcagcctgacccaggaccccgccagaagcttcggcagcatcccccccagcctgagcgacgacggcagccccagcagcagcagcagcagcagcagcagcagcagcagcttctacaacggcagcccccccggcagcctgcaggtggccatggaggacagcagcagagtgagccccagcaagagcaccagcaacatcaccaagctgaacggcatggtgctgctgtgcaaggtgtgcggcgacgtggccagcggcttccactacggcgtgcacgcctgcgagggctgcaagggcttcttcagaagaagcatccagcagaacatccagtacaagagatgcctgaagaacgagaactgcagcatcgtgagaatcaacagaaacagatgccagcagtgcagattcaagaagtgcctgagcgtgggcatgagcagagacgccgtgagattcggcagaatccccaagagagagaagcagagaatgctggccgagatgcagagcgccatgaacctggccaacaaccagctgagcagccagtgccccctggagaccagccccacccagcaccccacccccggccccatgggccccagccccccccccgcccccgtgcccagccccctggtgggcttcagccagttcccccagcagctgaccccccccagaagccccagccccgagcccaccgtggaggacgtgatcagccaggtggccagagcccacagagagatcttcacctacgcccacgacaagctgggcagcagccccggcaacttcaacgccaaccacgccagcggcagcccccccgccaccaccccccacagatgggagaaccagggctgcccccccgcccccaacgacaacaacaccctggccgcccagagacacaacgaggccctgaacggcctgagacaggcccccagcagctacccccccacctggccccccggccccgcccaccacagctgccaccagagcaacagcaacggccacagactgtgccccacccacgtgtacgccgcccccgagggcaaggcccccgccaacagccccagacagggcaacagcaagaacgtgctgctggcctgccccatgaacatgtacccccacggcagaagcggcagaaccgtgcaggagatctgggaggacttcagcatgagcttcacccccgccgtgagagaggtggtggagttcgccaagcacatccccggcttcagagacctgagccagcacgaccaggtgaccctgctgaaggccggcaccttcgaggtgctgatggtgagattcgccagcctgttcaacgtgaaggaccagaccgtgatgttcctgagcagaaccacctacagcctgcaggagctgggcgccatgggcatgggcgacctgctgagcgccatgttcgacttcagcgagaagctgaacagcctggccctgaccgaggaggagctgggcctgttcaccgccgtggtgctggtgagcgccgacagaagcggcatggagaacagcgccagcgtggagcagctgcaggagaccctgctgagagccctgagagccctggtgctgaagaacagacccctggagaccagcagattcaccaagctgctgctgaagctgcccgacctgagaaccctgaacaacatgcacagcgagaagctgctgagcttcagagtggacgcccagtag

SEQ ID NO: 209360 - protein, 445 aa, Artificial Sequence
  derived and/or modified sequence
MGGVGEPGPREGPAQPGAPLPTFCWEQIRAHDQPGDKWLVIERRVYDISRWAQRHPGGSRLIGHHGAEDATDAFRAFHQDLNFVRKFLQPLLIGELAPEEPSQDGPLNAQLVEDFRALHQAAEDMKLFDASPTFFAFLLGHILAMEVLAWLLIYLLGPGWVPSALAAFILAISQAQSWCLQHDLGHASIFKKSWWNHVAQKFVMGQLKGFSAHWWNFRHFQHHAKPNIFHKDPDVTVAPVFLLGESSVEYGKKKRRYLPYNQQHLYFFLIGPPLLTLVNFEVENLAYMLVCMQWADLLWAASFYARFFLSYLPFYGVPGVLLFFVAVRVLESHWFVWITQMNHIPKEIGHEKHRDWVSSQLAATCNVEPSLFTNWFSGHLNFQIEHHLFPRMPRHNYSRVAPLVKSLCAKHGLSYEVKPFLTALVDIVRSLKKSGDIWLDAYLHQ

SEQ ID NO: 209361 - DNA, 1779 bp, Artificial Sequence
  derived and/or modified sequence
cgcacgctcgctcgtacggcggccgcggcggcagggcggggccggagcagcgggcggcggcggaggcggcgcccgggagcgctcttcgcttccctcggggtcttgctcggacctcggccaccgcctgggatccccaggactcgtgcgtgcagcatgggcggcgtcggggagccgggaccgcgggagggacccgcgcagccgggggcgccgctgcccaccttctgctgggagcagatccgcgcgcacgaccagcccggcgacaagtggctggtcatcgagcgccgcgtctacgacatcagccgctgggcacagcggcacccagggggcagccgcctcatcggccaccacggcgctgaggacgccacggatgccttccgtgccttccatcaagatctcaattttgtgcgcaagttcctacagcccctgttgattggagagctggctccggaagaacccagccaggatggacccctgaatgcgcagctggtcgaggacttccgagccctgcaccaggcagccgaggacatgaagctgtttgatgccagtcccaccttctttgctttcctactgggccacatcctggccatggaggtgctggcctggctccttatctacctcctgggtcctggctgggtgcccagtgccctggccgccttcatcctggccatctctcaggctcagtcctggtgtctgcagcatgacctgggccatgcctccatcttcaagaagtcctggtggaaccacgtggcccagaagttcgtgatggggcagctaaagggcttctccgcccactggtggaacttccgccacttccagcaccacgccaagcccaacatcttccacaaagacccagacgtgacggtggcgcccgtcttcctcctgggggagtcatccgtcgagtatggcaagaagaaacgcagatacctaccctacaaccagcagcacctgtacttcttcctgatcggcccgccgctgctcaccctggtgaactttgaagtggaaaatctggcgtacatgctggtgtgcatgcagtgggcggatttgctctgggccgccagcttctatgcccgcttcttcttatcctacctccccttctacggcgtccctggggtgctgctcttctttgttgctgtcagggtcctggaaagccactggttcgtgtggatcacacagatgaaccacatccccaaggagatcggccacgagaagcaccgggactgggtcagctctcagctggcagccacctgcaacgtggagccctcacttttcaccaactggttcagcgggcacctcaacttccagatcgagcaccacctcttccccaggatgccgagacacaactacagccgggtggccccgctggtcaagtcgctgtgtgccaagcacggcctcagctacgaagtgaagcccttcctcaccgcgctggtggacatcgtcaggtccctgaagaagtctggtgacatctggctggacgcctacctccatcagtgaaggcaacacccaggcgggcagagaagggctcagggcaccagcaaccaagccagcccccggcgggatcgataccctcacccctccactggccagcctgggggtgccctgcctgccctcctggtactgttgtcttcccctcggccccctcacatgtgtattcagcagccctatggccttggctctgggcctgatgggacaggggtagagggaaggtgagcatagcacattttcctagagcgagaattgggggaaagctgttatttttatattaaaatacattcagatgta

SEQ ID NO: 209362 - DNA, 1834 bp, Artificial Sequence
  derived and/or modified sequence
gctcttcgcttccctcggggtcttgctcggacctcggccaccgcctgggatccccaggactcgtgcgtgcagcatgggcggcgtcggggagccgggaccgcgggagggacccgcgcagccgggggcgccgctgcccaccttctgctgggagcagatccgcgcgcacgaccagcccggcgacaagtggctggtcatcgagcgccgcgtctacgacatcagccgctgggcacagcggcacccagggggcagccgcctcatcggccaccacggcgctgaggacgccacggatgccttccgtgccttccatcaagatctcaattttgtgcgcaagttcctacagcccctgttgattggagagctggctccggaagaacccagccaggatggacccctgaatgcgcagctggtcgaggacttccgagccctgcaccaggcagccgaggacatgaagctgtttgatgccagtcccaccttctttgctttcctactgggccacatcctggccatggaggtgctggcctggctccttatctacctcctgggtcctggctgggtgcccagtgccctggccgccttcatcctggccatctctcaggctcagtcctggtgtctgcagcatgacctgggccatgcctccatcttcaagaagtcctggtggaaccacgtggcccagaagttcgtgatggggcagctaaagggcttctccgcccactggtggaacttccgccacttccagcaccacgccaagcccaacatcttccacaaagacccagacgtgacggtggcgcccgtcttcctcctgggggagtcatccgtcgagtatggcaagaagaaacgcagatacctaccctacaaccagcagcacctgtacttcttcctgatcggcccgccgctgctcaccctggtgaactttgaagtggaaaatctggcgtacatgctggtgtgcatgcagtgggcggatttgctctgggccgccagcttctatgcccgcttcttcttatcctacctccccttctacggcgtccctggggtgctgctcttctttgttgctgtcaggtatggcagggagtggcgaggtcacacacaggcgacaggtgacccccactgcagccccccaccagagcttcccttttcccgtctgcagaatggggccagtggtactgcctccctggcttgctggtggaatcacataaacacaagcgtggcaggagcccagggtcggtgggtttagggagcgtggcctggcttgtaagtggcccggtgggtgtcggagctgctctggactcagcctcacagtggacactgctccattcagattctttaaacactggcaagggggcgatggccacaatcctattgtacagataaggaagtcaaggccacttggggacagctgctctccagcctccactcagggtgcctaagtggtgagctggacctagggcagtgcccgagcctccccacagggtcctggaaagccactggttcgtgtggatcacacagatgaaccacatccccaaggagatcggccacgagaagcaccgggactgggtcagctctcagctggcagccacctgcaacgtggagccctcacttttcaccaactggttcagcgggcacctcaacttccagatcgagcaccacctcttccccaggatgccgagacacaactacagccgggtggccccgctggtcaagtcgctgtgtgccaagcacggcctcagctacgaagtgaagcccttcctcaccgcgctggtggacatcgtcaggtccctgaagaagtctggtgacatctggctggacgcctacctccatcagtgaaggcaacacccag

SEQ ID NO: 209363 - DNA, 1338 bp, Artificial Sequence
  derived and/or modified sequence
atgggcggcgtcggggagccaggtccgagagagggacccgcacaacccggcgcccctttgcccactttttgttgggaacagatcagggcccacgaccagcccggcgataaatggctggtgatcgagagacgcgtgtacgacatctctcgctgggcacagcgtcaccctggcggttcacgcctcattgggcaccacggggccgaagatgcaactgacgcattcagggcattccatcaggacttgaacttcgtgcgcaagttcctgcaaccgctcctcatcggcgaactggcccccgaagaaccctcccaggacggaccactgaacgcccaactggtggaagacttccgggctctgcatcaagccgctgaggacatgaagcttttcgacgccagcccaacatttttcgcatttctactcggacacatactcgcaatggaggtcttagcctggttgctaatctatctgctcgggccgggttgggtgccatctgcgctggccgcattcatcctggcaatttcccaagctcaaagctggtgtttacagcacgacttggggcacgcctcaatctttaagaaatcttggtggaaccacgtggctcaaaaattcgtaatgggccaacttaaaggattctccgctcactggtggaacttccgtcactttcaacatcacgccaaacccaatattttccacaaagatccggatgtgaccgttgcgcccgttttcctccttggcgaatcatcagttgagtacggtaaaaagaagcgaaggtacctgccttataaccaacaacatctatatttctttctgatcgggcccccattgctgacgctggtcaacttcgaggtagaaaacttggcctatatgcttgtgtgcatgcagtgggccgacctactttgggccgctagtttctatgcacggttcttcttgagttacttgcccttttatggcgttccaggagtcctcctgttctttgttgcggttagggtgctcgagtcccattggttcgtatggatcactcagatgaaccatataccaaaggaaatcggtcatgagaagcacagagattgggtctctagccaactggccgctacgtgcaacgtggagcccagtctctttacaaattggttctcagggcacctgaattttcaaatagaacatcacctatttcccaggatgcctaggcacaattattctagggtggcccctctcgtcaaaagcctatgtgccaaacatggcctgtcctacgaagttaagcccttcctgacagctctcgtggatattgtccgctccttaaagaagtcaggagacatctggctggatgcctacctccaccagtag

SEQ ID NO: 209364 - DNA, 1158 bp, Artificial Sequence
  derived and/or modified sequence
atgggtggcgtcggtgaacccggaccacgggaaggccccgctcagcccggagcgccattgccaactttttgttgggagcagatccgcgcccatgatcagcctggagacaagtggctggtgatagaaaggagagtgtacgacatatccagatgggcccagcgtcaccctggcggatcaaggttgattgggcaccatggggcggaagacgccactgacgcttttcgggcctttcatcaagacctgaacttcgtccgtaagtttctgcaacctcttcttattggggaactcgcacccgaggaaccctcccaggatggtccactgaacgctcaattggtggaggacttcagagccctgcaccaggccgccgaagacatgaaacttttcgacgcatcgcctacatttttcgctttcctgctgggccacattctggccatggaagtgctggcatggctgctgatctatcttctggggccaggctgggtaccttctgctctggctgccttcattctggctatatcccaagcccagagctggtgtctgcagcacgatctcggccacgcttcaattttcaagaagagctggtggaaccacgtagcccagaaattcgtaatggggcaattaaagggcttcagcgcccactggtggaactttcgccactttcagcaccacgcaaagcctaacatattccacaaggaccccgacgtcacagttgccccagtgtttctacttggcgaatcttcagttgagtatggaaagaagaagcggcgctacttgccttacaatcagcagcatctctactttttcctcataggtcctcctctgctcacactggttaattttgaggtcgagaacctggcttacatgctcgtgtgcatgcagtgggccgatctgttgtgggcagcaagcttttatgcccgtttttttctgtcatatctgccattctacggcgtgcccggtgttctgctgtttttcgtagcagtcaggtacggacgcgaatggagaggtcatacccaggctaccggggatccccattgtagccccccacccgaattgccctttagtaggctccagaacggagcctccggcaccgcttctttggcatgctggtggaatcacattaacacatccgttgccggcgctcagggacgttgggtctag

SEQ ID NO: 209365 - DNA, 1338 bp, Artificial Sequence
  derived and/or modified sequence
atgggcggcgtgggggagcccggcccccgggagggccctgcccagcccggggcccccctgcccaccttctgctgggagcagatccgggcccatgaccagcccggggacaagtggctggtgattgaaagaagagtgtatgacatcagccgctgggcccagaggcaccctgggggcagccgcctcatcggccaccacggggctgaagatgccacagatgccttccgggccttccaccaggacctgaactttgtgaggaagttcctgcagcccctgctgattggagagctggcccctgaggagcccagccaggacggccccctgaatgcccagctggtggaggacttccgggccctgcaccaggccgctgaggacatgaagctgtttgatgccagccccaccttctttgccttcctgctgggccacatcctggccatggaggtgctggcctggctgctgatctacctgctgggccctggctgggtgcccagcgccctggccgccttcatcctggccatcagccaggcccagagctggtgcctgcagcacgacctgggccacgccagcatcttcaagaagtcctggtggaaccacgtggcccagaagtttgtgatgggccagctgaagggcttcagcgcccactggtggaacttccgccacttccagcaccacgccaagcccaacatcttccacaaggaccctgatgtgacagtggcccctgtgttcctgctgggggagagctctgtggagtatggcaagaagaagaggcgctacctgccctacaaccagcagcacctgtacttcttcctgattggcccccccctgctgaccctggtgaactttgaggtggagaacctggcctacatgctggtgtgcatgcagtgggccgacctgctgtgggccgccagcttctacgcccgcttcttcctgagctacctgcccttctatggagtgcctggggtgctgctcttctttgtggccgtgcgggtgctggagagccactggtttgtgtggatcacccagatgaaccacatccccaaggagatcggccacgagaagcaccgggactgggtgagcagccagctggccgccacctgcaatgtggagcccagcctcttcaccaactggttcagcggccacctgaacttccagatcgagcaccacctgttccccaggatgcccaggcacaactacagccgggtggcccccctggtgaagagcctgtgtgccaagcacggcctgtcctatgaggtgaagcccttcctgacagccctggtggacatcgtgcgcagcctgaagaagagcggggacatctggctggatgcctacctgcaccagtag

SEQ ID NO: 209366 - DNA, 1158 bp, Artificial Sequence
  derived and/or modified sequence
atgggcggcgtgggggagcccggcccccgggagggccctgcccagcccggggcccccctgcccaccttctgctgggagcagatccgggcccatgaccagcccggggacaagtggctggtgattgaaagaagagtgtatgacatcagccgctgggcccagaggcaccctgggggcagccgcctcatcggccaccacggggctgaagatgccacagatgccttccgggccttccaccaggacctgaactttgtgaggaagttcctgcagcccctgctgattggagagctggcccctgaggagcccagccaggacggccccctgaatgcccagctggtggaggacttccgggccctgcaccaggccgctgaggacatgaagctgtttgatgccagccccaccttctttgccttcctgctgggccacatcctggccatggaggtgctggcctggctgctgatctacctgctgggccctggctgggtgcccagcgccctggccgccttcatcctggccatcagccaggcccagagctggtgcctgcagcacgacctgggccacgccagcatcttcaagaagtcctggtggaaccacgtggcccagaagtttgtgatgggccagctgaagggcttcagcgcccactggtggaacttccgccacttccagcaccacgccaagcccaacatcttccacaaggaccctgatgtgacagtggcccctgtgttcctgctgggggagagctctgtggagtatggcaagaagaagaggcgctacctgccctacaaccagcagcacctgtacttcttcctgattggcccccccctgctgaccctggtgaactttgaggtggagaacctggcctacatgctggtgtgcatgcagtgggccgacctgctgtgggccgccagcttctacgcccgcttcttcctgagctacctgcccttctatggagtgcctggggtgctgctcttctttgtggccgtgcgctatggccgggagtggaggggccacacccaggccaccggggacccccactgcagccccccacctgagctgcccttcagccggctgcagaatggagccagcggcacagccagcctggcctgctggtggaaccacatcaacacctctgtggccggggcccagggccgctgggtgtag

SEQ ID NO: 209367 - DNA, 1338 bp, Artificial Sequence
  derived and/or modified sequence
atgggcggcgtgggcgagcccggcccccgggagggccccgcccagcccggggccccactgcctaccttctgctgggagcaaattagagctcacgatcagcccggcgacaagtggttggtgattgagaggcgtgtatacgacatatctagatgggctcagaggcacccagggggttctaggctcatcggccatcacggcgccgaggacgcaaccgatgcctttcgagctttccaccaggacctgaactttgtccgcaagttcctgcagcccctacttatcggagaattggcaccagaagaaccatctcaggacggccccttaaacgcacagctggtggaggactttcgggctttgcatcaagccgctgaggacatgaaactgtttgacgcttccccaacattcttcgcattcttactcggccacatcttggccatggaggtgctggcatggctgttgatttatttactgggccctggttgggtgccatccgccttggccgccttcatcctcgccatctcacaggctcagagctggtgccttcagcacgatttgggacacgccagtatatttaaaaaaagttggtggaatcacgttgcccagaaatttgttatgggacagttgaagggcttttctgctcactggtggaactttagacactttcaacatcacgccaagcctaatatctttcacaaggacccggatgtcacagttgcccccgtgtttctactgggcgaaagtagcgtggaatacggaaaaaaaaagcggcgctatctaccatacaaccagcagcacctgtacttcttcctgatcggacccccccttctgaccttggtcaattttgaagtggagaatcttgcttacatgctcgtctgcatgcaatgggccgatctattgtgggccgcgtctttctatgcccgtttcttcttgtcctatctcccattttatggcgttcctggagtcttgctcttttttgtggctgtaagagtgctagagagccattggtttgtctggatcactcagatgaaccacatccccaaggagattggacacgagaaacacagggattgggtgtcatcgcagctcgccgccacctgcaatgtcgagccatctttattcaccaactggttttctggacatctcaacttccagatcgaacaccacctgttcccccggatgccgcgccacaattactcacgagttgcccccttggtgaagtccctgtgtgccaaacacggtctctcttatgaggttaagccctttctgactgctctggtggacatcgtaaggagcctgaaaaaatcaggcgacatttggctggacgcttacctccatcagtag

SEQ ID NO: 209368 - DNA, 1158 bp, Artificial Sequence
  derived and/or modified sequence
atgggcggcgtgggcgagcccggcccccgggagggccccgcccagccgggggctccactccctacattttgctgggagcagatcagagcccacgaccaacccggggacaagtggttagtgattgaacggcgagtgtatgacatatctcggtgggcccaacgtcacccaggtgggtctagattgattggacaccacggcgcagaggacgcaaccgacgccttcagggcgtttcaccaagatctcaatttcgtgcgaaagtttcttcagcctctattgatcggtgagctggccccggaagagccgtcccaagacggccccttgaatgcccaactcgttgaagatttccgggcgcttcaccaggctgctgaggacatgaagttgtttgatgcgtcccctacgttcttcgcattccttcttgggcatatcttagctatggaggtgctggcctggttgctaatttatttgttggggcccgggtgggttcccagcgctttggccgcattcattctcgccataagtcaggcgcagtcttggtgtcttcaacacgacttgggtcacgccagtatcttcaaaaaatcatggtggaaccatgtggcacagaagtttgtgatgggacagcttaaaggattctccgcgcactggtggaactttaggcatttccagcatcacgctaagcccaatattttccacaaagacccagacgtgacggtcgccccagtttttctgctgggtgagagcagcgtagagtacggaaagaaaaagagacggtacctgccctacaatcagcagcacctgtacttctttctgatcggtccgccgttgctcactttagtgaactttgaggtagaaaacctggcttacatgcttgtctgcatgcagtgggccgatcttctctgggcagcatcattctacgcccgatttttcctctcatacttgcctttttatggtgtgcctggagtgctcctttttttcgttgctgtgcgctacgggcgtgagtggcgggggcatacccaagcaactggagatccgcactgcagcccccctcccgagttaccattttctagactccagaatggcgcaagcgggaccgcttcccttgcgtgctggtggaaccatattaacactagcgtggcaggcgctcaggggagatgggtgtag

SEQ ID NO: 209369 - DNA, 1338 bp, Artificial Sequence
  derived and/or modified sequence
atgggaggagtgggcgaacctgggccaagggaaggacctgcccagcccggtgctcccctccctaccttctgctgggagcaaattcgggctcacgaccagccaggtgacaagtggctggttattgagcgacgggtgtatgacattagcagatgggcccagcgccatccaggaggttcccgccttattgggcatcatggcgctgaagacgcaactgatgctttcagagcatttcaccaggatctcaattttgttcgtaagtttctgcaaccactgttaatcggtgagctggccccagaagagccgtctcaggacggaccactcaacgctcagctcgttgaggattttcgggctctacaccaagccgcagaggatatgaaactgtttgatgcttcaccaacattctttgcatttctcctgggtcacatcttggctatggaggtccttgcttggcttttgatctacttgctgggcccaggctgggtaccgagcgctttggccgcatttatcttggctatctcccaggctcagagctggtgtctgcaacatgacctggggcacgcctccattttcaaaaagtcctggtggaaccatgtggcgcagaaattcgttatgggtcaattgaaaggatttagcgcacattggtggaacttcagacacttccagcatcacgccaagcctaatattttccataaggatcccgacgttacagtggcccctgtattcctattaggcgagagctccgttgaatatggtaagaagaagcgtcgttacctgccctacaaccaacaacacctctacttctttctgataggccctcccttgctgactcttgttaatttcgaagtggagaatttggcctatatgctggtgtgcatgcaatgggccgacctcctgtgggccgcaagcttctacgcgagattcttcttgagctaccttcccttctacggtgttcccggagtgctacttttcttcgttgccgtgcgcgtcttggagtctcattggtttgtttggataacccagatgaatcacattccaaaggagattggccatgagaagcaccgcgattgggtctcctcccaactcgcagccacctgtaatgtagaaccgagcctgttcacgaactggttttcaggtcatctgaatttccaaatcgagcaccacctatttcctcggatgccaaggcacaattattccagggtggccccactggtcaaaagcctttgcgccaaacacgggttaagctatgaggtgaagccttttctcaccgcgctggtagacatcgtgagatcactaaaaaagtctggggatatctggctggatgcataccttcatcaatag

SEQ ID NO: 209370 - DNA, 1158 bp, Artificial Sequence
  derived and/or modified sequence
atgggaggggtgggtgaacctggccctcgggaaggcccagctcagccaggggctcctcttcctacgttctgttgggagcagatccgagcccacgaccagcccggtgataagtggctggttattgaaagaagggtttatgacatttcaaggtgggcccaaagacaccctgggggatcccggttaatcggccatcatggagcggaagatgcgactgacgcattccgagcttttcaccaagatctcaacttcgtcagaaaatttctacaaccactgctgatcggcgagctcgcacccgaggagccctctcaggatggccctctgaacgcccaacttgtggaagactttagagcattgcatcaggcggctgaggacatgaagttattcgacgcatctcccactttcttcgccttcctgttgggtcacatcctggcgatggaagtgcttgcctggttgctgatctaccttcttggcccaggttgggttccaagtgctttggcagcctttatcctggccatctcccaagcccagagctggtgcctccagcatgacctcgggcacgctagcatcttcaagaagtcctggtggaaccacgttgcacagaagttcgttatgggccagctaaagggatttagcgcgcactggtggaactttaggcatttccaacaccacgcaaagcccaacatatttcataaggaccccgacgtaactgtcgcccctgtctttctgctgggcgaatcatcagtggagtacggaaaaaagaaaaggcgatatcttccatacaatcagcagcacctctatttctttctcattggccctccattgctcactctagttaatttcgaggttgaaaatctagcctatatgctggtgtgtatgcagtgggccgacctcctctgggcagcgagtttttacgccagattctttctgagttacctaccattctacggcgttccaggtgtgctgctattcttcgttgccgttagatacggcagagaatggcgcggacacacacaggctacaggggatcctcattgctctccccctcctgagttacctttctcccggctgcaaaatggcgcttccgggacggcgtcattggcctgttggtggaaccacatcaatacaagcgtggcgggagcacagggacggtgggtctag

SEQ ID NO: 209371 - DNA, 1338 bp, Artificial Sequence
  derived and/or modified sequence
atgggcggcgtgggcgagcccggccccagagagggccccgcccagcccggcgcccccctgcccaccttctgctgggagcagatcagagcccacgaccagcccggcgacaagtggctggtgatcgagagaagagtgtacgacatcagcagatgggcccagagacaccccggcggcagcagactgatcggccaccacggcgccgaggacgccaccgacgccttcagagccttccaccaggacctgaacttcgtgagaaagttcctgcagcccctgctgatcggcgagctggcccccgaggagcccagccaggacggccccctgaacgcccagctggtggaggacttcagagccctgcaccaggccgccgaggacatgaagctgttcgacgccagccccaccttcttcgccttcctgctgggccacatcctggccatggaggtgctggcctggctgctgatctacctgctgggccccggctgggtgcccagcgccctggccgccttcatcctggccatcagccaggcccagagctggtgcctgcagcacgacctgggccacgccagcatcttcaagaagagctggtggaaccacgtggcccagaagttcgtgatgggccagctgaagggcttcagcgcccactggtggaacttcagacacttccagcaccacgccaagcccaacatcttccacaaggaccccgacgtgaccgtggcccccgtgttcctgctgggcgagagcagcgtggagtacggcaagaagaagagaagatacctgccctacaaccagcagcacctgtacttcttcctgatcggcccccccctgctgaccctggtgaacttcgaggtggagaacctggcctacatgctggtgtgcatgcagtgggccgacctgctgtgggccgccagcttctacgccagattcttcctgagctacctgcccttctacggcgtgcccggcgtgctgctgttcttcgtggccgtgagagtgctggagagccactggttcgtgtggatcacccagatgaaccacatccccaaggagatcggccacgagaagcacagagactgggtgagcagccagctggccgccacctgcaacgtggagcccagcctgttcaccaactggttcagcggccacctgaacttccagatcgagcaccacctgttccccagaatgcccagacacaactacagcagagtggcccccctggtgaagagcctgtgcgccaagcacggcctgagctacgaggtgaagcccttcctgaccgccctggtggacatcgtgagaagcctgaagaagagcggcgacatctggctggacgcctacctgcaccagtag

SEQ ID NO: 209372 - DNA, 1158 bp, Artificial Sequence
  derived and/or modified sequence
atgggcggcgtgggcgagcccggccccagagagggccccgcccagcccggcgcccccctgcccaccttctgctgggagcagatcagagcccacgaccagcccggcgacaagtggctggtgatcgagagaagagtgtacgacatcagcagatgggcccagagacaccccggcggcagcagactgatcggccaccacggcgccgaggacgccaccgacgccttcagagccttccaccaggacctgaacttcgtgagaaagttcctgcagcccctgctgatcggcgagctggcccccgaggagcccagccaggacggccccctgaacgcccagctggtggaggacttcagagccctgcaccaggccgccgaggacatgaagctgttcgacgccagccccaccttcttcgccttcctgctgggccacatcctggccatggaggtgctggcctggctgctgatctacctgctgggccccggctgggtgcccagcgccctggccgccttcatcctggccatcagccaggcccagagctggtgcctgcagcacgacctgggccacgccagcatcttcaagaagagctggtggaaccacgtggcccagaagttcgtgatgggccagctgaagggcttcagcgcccactggtggaacttcagacacttccagcaccacgccaagcccaacatcttccacaaggaccccgacgtgaccgtggcccccgtgttcctgctgggcgagagcagcgtggagtacggcaagaagaagagaagatacctgccctacaaccagcagcacctgtacttcttcctgatcggcccccccctgctgaccctggtgaacttcgaggtggagaacctggcctacatgctggtgtgcatgcagtgggccgacctgctgtgggccgccagcttctacgccagattcttcctgagctacctgcccttctacggcgtgcccggcgtgctgctgttcttcgtggccgtgagatacggcagagagtggagaggccacacccaggccaccggcgacccccactgcagccccccccccgagctgcccttcagcagactgcagaacggcgccagcggcaccgccagcctggcctgctggtggaaccacatcaacaccagcgtggccggcgcccagggcagatgggtgtag

SEQ ID NO: 209373 - protein, 147 aa, Artificial Sequence
  derived and/or modified sequence
MGTPASVVSEPPPWQAPIEARGRKQASANIFQDAELLQIQALFQRSGDQLAEERAQIIWECAGDHRVAEALKRLRRKRPPRQKPLGHSLHHCSRLRILEPHSALANPQSATETASSEQYLHSRKKSARIRRNWRKSGPTSYLHQIRH

SEQ ID NO: 209374 - DNA, 444 bp, Artificial Sequence
  derived and/or modified sequence
atgggcacccccgccagcgtggtgagcgagccccccccctggcaggcccccatcgaggccagaggcagaaagcaggccagcgccaacatcttccaggacgccgagctgctgcagatccaggccctgttccagagaagcggcgaccagctggccgaggagagagcccagatcatctgggagtgcgccggcgaccacagagtggccgaggccctgaagagactgagaagaaagagaccccccagacagaagcccctgggccacagcctgcaccactgcagcagactgagaatcctggagccccacagcgccctggccaacccccagagcgccaccgagaccgccagcagcgagcagtacctgcacagcagaaagaagagcgccagaatcagaagaaactggagaaagagcggccccaccagctacctgcaccagatcagacactag

SEQ ID NO: 209375 - DNA, 444 bp, Artificial Sequence
  derived and/or modified sequence
atgggaacccctgcctctgtcgtctccgaacctccaccttggcaggcacctattgaagcccgagggaggaagcaggctagcgctaacatctttcaggacgcggagctgctgcagatacaggcgttatttcaacgctcgggagatcagttggccgaggaaagggctcagattatctgggagtgtgccggcgatcatcgcgtcgccgaagcactcaagcggctgcggagaaaaaggccccccagacagaaaccacttggtcactccctccaccattgttccaggctccgaatcctggaacctcactctgccctggccaatcctcaaagcgcaaccgagactgcatcttccgaacagtatctgcattctcggaagaagagcgcgaggattagacgaaattggcgaaagtccggacctacttcttacctgcatcagattaggcactag

SEQ ID NO: 209376 - DNA, 444 bp, Artificial Sequence
  derived and/or modified sequence
atgggcaccccagcctctgtggtgtctgagcccccaccctggcaggcccccatcgaggcccggggcaggaagcaggccagcgccaacatcttccaggatgctgagctgctgcagatccaggccctcttccagaggtctggggaccagctggccgaggagcgggcccagatcatctgggagtgtgccggggaccaccgggtggccgaggccctgaagaggctgcggaggaagaggcctccccggcagaagcccctgggccacagcctgcaccactgcagccggctgcgcatcctggagccccacagcgccctggccaacccccagagcgccacagaaacagccagcagcgagcagtacctgcacagcaggaagaagagcgcccgcatcagaagaaactggaggaagagcggccccaccagctacctgcaccagatccgccactag

SEQ ID NO: 209377 - DNA, 444 bp, Artificial Sequence
  derived and/or modified sequence
atgggcacccccgccagcgtggtgagcgagccccccccctggcaggcccccatcgaagctcggggaagaaaacaagcttctgccaacatttttcaggacgctgagcttctccagattcaggctctttttcagcggtcaggagaccagttagccgaagagagggcacaaattatttgggagtgtgccggtgatcatcgggtggcggaagccttgaagcgactgcggcggaaaaggccccctcgtcagaaacccctgggccattcccttcatcattgttcgaggttaagaatcctggaacctcattcagcgctggcaaacccccagagtgccactgagacagcttcatccgaacagtaccttcacagtcgcaaaaagtcagcgcgcatcagaaggaattggcggaaatccggacccactagctacctacatcaaatccgccactag

SEQ ID NO: 209378 - DNA, 1457 bp, Artificial Sequence
  derived and/or modified sequence
tggacacgccccctccctgtctcccaccgatgattggcgcacggaactccgccttgggtttggaaggctcgcctgggagctcatacctggctagggccgaggattggctgttccggggctagggagcgctttctcccgggaaccgcggctgtgacccaagtggcccggaccagtttggggctgcgtgcggcctgcctcaagcaaccaggtacgtaggtcggcggcccagctcggcgctgcggtgggagccggagggcgacagtcagagccggggtgccagcgggacgcgaccgccagatccacttaggaccccgtcgttctgcgaagcggccacgtctgagtcccggggcctcctcgtgctgcagatgtcgccttaggacctcggccaggataccctctgccatgctcttgtgctgcccgtgatcaccgactggcccttgtaagcaccttcgcagagctgcgcctgccctttctgaaggctgtggaagaggttggagtgggcgcatcttagcttgccccatccccatttgaggtctgtcggagctgcccttcagtgtgagcatccacaatgggtaccccagcctcggtggtcagtgagccacccccttggcaggccccgattgaggcccggggccgcaagcaggcctcggccaacatcttccaggacgccgagctgctgcagatccaagccctgtttcaacgcagcggggaccagctggccgaggaacgggcacagatcatctgggaatgtgcaggggaccaccgtgtggctgaggccctcaagaggctgcgcaggaagaggcccccaaggcagaaacccctgggccactcgctacaccactgcagccgcctcagaatcctggagccccactctgcactggccaacccacagagtgccacagagacagcctccagtgagcagtatctgcactctaggaagaaaagtgccaggatccgccggaactggaggaagtcaggccccacaagctacctccaccagatcagacactgatccagggaaagagccaggaatggcagtgtcttccctcttgccaaaaggcctggggaggtgaaggaagagagactttaggcaagcagcccaaaggggtaaatgaaagcaagaggctgctgccactgacctgctccattcagaacaagactggatgcttctgttgagctctccattatgtgggacccattcctcaccaaaatgaggagagacagtgactgttcctgccacagtccttcccagtctaacactattcctgggctgcatgatattcccctgggagcaaagtgacaggcacttagatgcagcatttcaccactcatgctactaatcatctacctgctactactgtaaaccatggttccagcagcctgttccacacccccacaccatcaggatagcacagggaaactgtagtttaagtggcaaataaaaacatttgcatcaa

SEQ ID NO: 209379 - DNA, 444 bp, Artificial Sequence
  derived and/or modified sequence
atggggacccccgctagcgtcgtgtcggagcctcccccatggcaggcacctatcgaggccagaggcaggaagcaagccagtgccaatatttttcaggacgctgaactgctgcaaattcaggcccttttccagcgctccggagaccagctggccgaggagcgtgcacagattatatgggagtgtgctggggatcacagagtggcggaagcccttaagcggttacggagaaagcgccctcctcggcagaagcccttggggcacagcctccaccactgttcacggctacgcattttggagcctcattcagcactcgccaatccccagtcagcaacagagactgcgagctccgagcagtacctccacagccgcaagaaatctgcacgaattcggcgaaattggcgtaaaagcgggccaacaagctacttgcatcagatcaggcattag

SEQ ID NO: 209380 - protein, 2214 aa, Artificial Sequence
  derived and/or modified sequence
MKRKERIARRLEGIENDTQPILLQSCTGLVTHRLLEEDTPRYMRASDPASPHIGRSNEEEETSDSSLEKQTRSKYCTETSGVHGDSPYGSGTMDTHSLESKAERIARYKAERRRQLAEKYGLTLDPEADSEYLSRYTKSRKEPDAVEKRGGKSDKQEESSRDASSLYPGTETMGLRTCAGESKDYALHVGDGSSDPEVLLNIENQRRGQELSATRQAHDLSPAAESSSTFSFSGRDSSFTEVPRSPKHAHSSSLQQAASRSPSFGDPQLSPEARPSTGKPKHEWFLQKDSEGDTPSLINWPSRVKVREKLVKEESARNSPELASESVTQRRHQPAPVHYVSFQSEHSAFDRVPSKAAGSTRQPIRGYVQPADTGHTAKLVTPETPENASECSWVASATQNVPKPPSLTVLEGDGRDSPVLHVCESKAEEEEGEGEGEEKEEDVCFTEALEQSKKTLLALEGDGLVRSPEDPSRNEDFGKPAVSTVTLEHQKELENVAQPPQAPHQPTERTGRSEMVLYIQSEPVSQDAKPTGHNREASKKRKVRTRSLSDFTGPPQLQALKYKDPASRRELELPSSKTEGPYGEISMLDTKVSVAQLRSAFLASANACRRPELKSRVERSAEGPGLPTGVERERGSRKPRRYFSPGESRKTSERFRTQPITSAERKESDRCTSHSETPTVDDEEKVDERAKLSVAAKRLLFREMEKSFDEQNVPKRRSRNTAVEQRLRRLQDRSLTQPITTEEVVIAATEPIPASCSGGTHPVMARLPSPTVARSAVQPARLQASAHQKALAKDQTNEGKELAEQGEPDSSTLSLAEKLALFNKLSQPVSKAISTRNRIDTRQRRMNARYQTQPVTLGEVEQVQSGKLIPFSPAVNTSVSTVASTVAPMYAGDLRTKPPLDHNASATDYKFSSSIENSDSPVRSILKSQAWQPLVEGSENKGMLREYGETESKRALTGRDSGMEKYGSFEEAEASYPILNRAREGDSHKESKYAVPRRGSLERANPPITHLGDEPKEFSMAKMNAQGNLDLRDRLPFEEKVEVENVMKRKFSLRAAEFGEPTSEQTGTAAGKTIAQTTAPVSWKPQDSSEQPQEKLCKNPCAMFAAGEIKTPTGEGLLDSPSKTMSIKERLALLKKSGEEDWRNRLSRRQEGGKAPASSLHTQEAGRSLIKKRVTESRESQMTIEERKQLITVREEAWKTRGRGAANDSTQFTVAGRMVKKGLASPTAITPVASPICGKTRGTTPVSKPLEDIEARPDMQLESDLKLDRLETFLRRLNNKVGGMHETVLTVTGKSVKEVMKPDDDETFAKFYRSVDYNMPRSPVEMDEDFDVIFDPYAPKLTSSVAEHKRAVRPKRRVQASKNPLKMLAAREDLLQEYTEQRLNVAFMESKRMKVEKMSSNSNFSEVTLAGLASKENFSNVSLRSVNLTEQNSNNSAVPYKRLMLLQIKGRRHVQTRLVEPRASALNSGDCFLLLSPHCCFLWVGEFANVIEKAKASELATLIQTKRELGCRATYIQTIEEGINTHTHAAKDFWKLLGGQTSYQSAGDPKEDELYEAAIIETNCIYRLMDDKLVPDDDYWGKIPKCSLLQPKEVLVFDFGSEVYVWHGKEVTLAQRKIAFQLAKHLWNGTFDYENCDINPLDPGECNPLIPRKGQGRPDWAIFGRLTEHNETILFKEKFLDWTELKRSNEKNPGELAQHKEDPRTDVKAYDVTRMVSMPQTTAGTILDGVNVGRGYGLVEGHDRRQFEITSVSVDVWHILEFDYSRLPKQSIGQFHEGDAYVVKWKFMVSTAVGSRQKGEHSVRAAGKEKCVYFFWQGRHSTVSEKGTSALMTVELDEERGAQVQVLQGKEPPCFLQCFQGGMVVHSGRREEEEENVQSEWRLYCVRGEVPVEGNLLEVACHCSSLRSRTSMVVLNVNKALIYLWHGCKAQAHTKEVGRTAANKIKEQCPLEAGLHSSSKVTIHECDEGSEPLGFWDALGRRDRKAYDCMLQDPGSFNFAPRLFILSSSSGDFAATEFVYPARAPSVVSSMPFLQEDLYSAPQPALFLVDNHHEVYLWQGWWPIENKITGSARIRWASDRKSAMETVLQYCKGKNLKKPAPKSYLIHAGLEPLTFTNMFPSWEHREDIAEITEMDTEVSNQITLVEDVLAKLCKTIYPLADLLARPLPEGVDPLKLEIYLTDEDFEFALDMTRDEYNALPAWKQVNLKKAKGLF

SEQ ID NO: 209381 - protein, 585 aa, Artificial Sequence
  derived and/or modified sequence
MNSSDVSSLKHPSSLASPTAITPVASPICGKTRGTTPVSKPLEDIEARPDMQLESDLKLDRLETFLRRLNNKVGGMHETVLTVTGKSVKEVMKPDDDETFAKFYRSVDYNMPRSPVEMDEDFDVIFDPYAPKLTSSVAEHKRAVRPKRRVQASKNPLKMLAAREDLLQEYTEQRLNVAFMESKRMKVEKMSSNSNFSEVTLAGLASKENFSNVSLRSVNLTEQNSNNSAVPYKRLMLLQIKGRRHVQTRLVEPRASALNSGDCFLLLSPHCCFLWVGEFANVIEKAKASELATLIQTKRELGCRATYIQTIEEGINTHTHAAKDFWKLLGGQTSYQSAGDPKEDELYEAAIIETNCIYRLMDDKLVPDDDYWGKIPKCSLLQPKEVLVFDFGSEVYVWHGKEVTLAQRKIAFQLAKHLWNGTFDYENCDINPLDPGECNPLIPRKGQGRPDWAIFGRLTEHNETILFKEKFLDWTELKRSNEKNPGELAQHKEDPRTDVKAYDVTRMVSMPQTTAGTILDGVNVGRGYGLVEGHDRRQFEITSVSVDVWHILEFDYSRLPKQSIGQFHEGDAYVVKWKFMVSTAG

SEQ ID NO: 209382 - DNA, 6645 bp, Artificial Sequence
  derived and/or modified sequence
atgaagagaaaggagagaatcgccagaagactggagggcatcgagaacgacacccagcccatcctgctgcagagctgcaccggcctggtgacccacagactgctggaggaggacacccccagatacatgagagccagcgaccccgccagcccccacatcggcagaagcaacgaggaggaggagaccagcgacagcagcctggagaagcagaccagaagcaagtactgcaccgagaccagcggcgtgcacggcgacagcccctacggcagcggcaccatggacacccacagcctggagagcaaggccgagagaatcgccagatacaaggccgagagaagaagacagctggccgagaagtacggcctgaccctggaccccgaggccgacagcgagtacctgagcagatacaccaagagcagaaaggagcccgacgccgtggagaagagaggcggcaagagcgacaagcaggaggagagcagcagagacgccagcagcctgtaccccggcaccgagaccatgggcctgagaacctgcgccggcgagagcaaggactacgccctgcacgtgggcgacggcagcagcgaccccgaggtgctgctgaacatcgagaaccagagaagaggccaggagctgagcgccaccagacaggcccacgacctgagccccgccgccgagagcagcagcaccttcagcttcagcggcagagacagcagcttcaccgaggtgcccagaagccccaagcacgcccacagcagcagcctgcagcaggccgccagcagaagccccagcttcggcgacccccagctgagccccgaggccagacccagcaccggcaagcccaagcacgagtggttcctgcagaaggacagcgagggcgacacccccagcctgatcaactggcccagcagagtgaaggtgagagagaagctggtgaaggaggagagcgccagaaacagccccgagctggccagcgagagcgtgacccagagaagacaccagcccgcccccgtgcactacgtgagcttccagagcgagcacagcgccttcgacagagtgcccagcaaggccgccggcagcaccagacagcccatcagaggctacgtgcagcccgccgacaccggccacaccgccaagctggtgacccccgagacccccgagaacgccagcgagtgcagctgggtggccagcgccacccagaacgtgcccaagccccccagcctgaccgtgctggagggcgacggcagagacagccccgtgctgcacgtgtgcgagagcaaggccgaggaggaggagggcgagggcgagggcgaggagaaggaggaggacgtgtgcttcaccgaggccctggagcagagcaagaagaccctgctggccctggagggcgacggcctggtgagaagccccgaggaccccagcagaaacgaggacttcggcaagcccgccgtgagcaccgtgaccctggagcaccagaaggagctggagaacgtggcccagcccccccaggccccccaccagcccaccgagagaaccggcagaagcgagatggtgctgtacatccagagcgagcccgtgagccaggacgccaagcccaccggccacaacagagaggccagcaagaagagaaaggtgagaaccagaagcctgagcgacttcaccggccccccccagctgcaggccctgaagtacaaggaccccgccagcagaagagagctggagctgcccagcagcaagaccgagggcccctacggcgagatcagcatgctggacaccaaggtgagcgtggcccagctgagaagcgccttcctggccagcgccaacgcctgcagaagacccgagctgaagagcagagtggagagaagcgccgagggccccggcctgcccaccggcgtggagagagagagaggcagcagaaagcccagaagatacttcagccccggcgagagcagaaagaccagcgagagattcagaacccagcccatcaccagcgccgagagaaaggagagcgacagatgcaccagccacagcgagacccccaccgtggacgacgaggagaaggtggacgagagagccaagctgagcgtggccgccaagagactgctgttcagagagatggagaagagcttcgacgagcagaacgtgcccaagagaagaagcagaaacaccgccgtggagcagagactgagaagactgcaggacagaagcctgacccagcccatcaccaccgaggaggtggtgatcgccgccaccgagcccatccccgccagctgcagcggcggcacccaccccgtgatggccagactgcccagccccaccgtggccagaagcgccgtgcagcccgccagactgcaggccagcgcccaccagaaggccctggccaaggaccagaccaacgagggcaaggagctggccgagcagggcgagcccgacagcagcaccctgagcctggccgagaagctggccctgttcaacaagctgagccagcccgtgagcaaggccatcagcaccagaaacagaatcgacaccagacagagaagaatgaacgccagataccagacccagcccgtgaccctgggcgaggtggagcaggtgcagagcggcaagctgatccccttcagccccgccgtgaacaccagcgtgagcaccgtggccagcaccgtggcccccatgtacgccggcgacctgagaaccaagccccccctggaccacaacgccagcgccaccgactacaagttcagcagcagcatcgagaacagcgacagccccgtgagaagcatcctgaagagccaggcctggcagcccctggtggagggcagcgagaacaagggcatgctgagagagtacggcgagaccgagagcaagagagccctgaccggcagagacagcggcatggagaagtacggcagcttcgaggaggccgaggccagctaccccatcctgaacagagccagagagggcgacagccacaaggagagcaagtacgccgtgcccagaagaggcagcctggagagagccaacccccccatcacccacctgggcgacgagcccaaggagttcagcatggccaagatgaacgcccagggcaacctggacctgagagacagactgcccttcgaggagaaggtggaggtggagaacgtgatgaagagaaagttcagcctgagagccgccgagttcggcgagcccaccagcgagcagaccggcaccgccgccggcaagaccatcgcccagaccaccgcccccgtgagctggaagccccaggacagcagcgagcagccccaggagaagctgtgcaagaacccctgcgccatgttcgccgccggcgagatcaagacccccaccggcgagggcctgctggacagccccagcaagaccatgagcatcaaggagagactggccctgctgaagaagagcggcgaggaggactggagaaacagactgagcagaagacaggagggcggcaaggcccccgccagcagcctgcacacccaggaggccggcagaagcctgatcaagaagagagtgaccgagagcagagagagccagatgaccatcgaggagagaaagcagctgatcaccgtgagagaggaggcctggaagaccagaggcagaggcgccgccaacgacagcacccagttcaccgtggccggcagaatggtgaagaagggcctggccagccccaccgccatcacccccgtggccagccccatctgcggcaagaccagaggcaccacccccgtgagcaagcccctggaggacatcgaggccagacccgacatgcagctggagagcgacctgaagctggacagactggagaccttcctgagaagactgaacaacaaggtgggcggcatgcacgagaccgtgctgaccgtgaccggcaagagcgtgaaggaggtgatgaagcccgacgacgacgagaccttcgccaagttctacagaagcgtggactacaacatgcccagaagccccgtggagatggacgaggacttcgacgtgatcttcgacccctacgcccccaagctgaccagcagcgtggccgagcacaagagagccgtgagacccaagagaagagtgcaggccagcaagaaccccctgaagatgctggccgccagagaggacctgctgcaggagtacaccgagcagagactgaacgtggccttcatggagagcaagagaatgaaggtggagaagatgagcagcaacagcaacttcagcgaggtgaccctggccggcctggccagcaaggagaacttcagcaacgtgagcctgagaagcgtgaacctgaccgagcagaacagcaacaacagcgccgtgccctacaagagactgatgctgctgcagatcaagggcagaagacacgtgcagaccagactggtggagcccagagccagcgccctgaacagcggcgactgcttcctgctgctgagcccccactgctgcttcctgtgggtgggcgagttcgccaacgtgatcgagaaggccaaggccagcgagctggccaccctgatccagaccaagagagagctgggctgcagagccacctacatccagaccatcgaggagggcatcaacacccacacccacgccgccaaggacttctggaagctgctgggcggccagaccagctaccagagcgccggcgaccccaaggaggacgagctgtacgaggccgccatcatcgagaccaactgcatctacagactgatggacgacaagctggtgcccgacgacgactactggggcaagatccccaagtgcagcctgctgcagcccaaggaggtgctggtgttcgacttcggcagcgaggtgtacgtgtggcacggcaaggaggtgaccctggcccagagaaagatcgccttccagctggccaagcacctgtggaacggcaccttcgactacgagaactgcgacatcaaccccctggaccccggcgagtgcaaccccctgatccccagaaagggccagggcagacccgactgggccatcttcggcagactgaccgagcacaacgagaccatcctgttcaaggagaagttcctggactggaccgagctgaagagaagcaacgagaagaaccccggcgagctggcccagcacaaggaggaccccagaaccgacgtgaaggcctacgacgtgaccagaatggtgagcatgccccagaccaccgccggcaccatcctggacggcgtgaacgtgggcagaggctacggcctggtggagggccacgacagaagacagttcgagatcaccagcgtgagcgtggacgtgtggcacatcctggagttcgactacagcagactgcccaagcagagcatcggccagttccacgagggcgacgcctacgtggtgaagtggaagttcatggtgagcaccgccgtgggcagcagacagaagggcgagcacagcgtgagagccgccggcaaggagaagtgcgtgtacttcttctggcagggcagacacagcaccgtgagcgagaagggcaccagcgccctgatgaccgtggagctggacgaggagagaggcgcccaggtgcaggtgctgcagggcaaggagcccccctgcttcctgcagtgcttccagggcggcatggtggtgcacagcggcagaagagaggaggaggaggagaacgtgcagagcgagtggagactgtactgcgtgagaggcgaggtgcccgtggagggcaacctgctggaggtggcctgccactgcagcagcctgagaagcagaaccagcatggtggtgctgaacgtgaacaaggccctgatctacctgtggcacggctgcaaggcccaggcccacaccaaggaggtgggcagaaccgccgccaacaagatcaaggagcagtgccccctggaggccggcctgcacagcagcagcaaggtgaccatccacgagtgcgacgagggcagcgagcccctgggcttctgggacgccctgggcagaagagacagaaaggcctacgactgcatgctgcaggaccccggcagcttcaacttcgcccccagactgttcatcctgagcagcagcagcggcgacttcgccgccaccgagttcgtgtaccccgccagagcccccagcgtggtgagcagcatgcccttcctgcaggaggacctgtacagcgccccccagcccgccctgttcctggtggacaaccaccacgaggtgtacctgtggcagggctggtggcccatcgagaacaagatcaccggcagcgccagaatcagatgggccagcgacagaaagagcgccatggagaccgtgctgcagtactgcaagggcaagaacctgaagaagcccgcccccaagagctacctgatccacgccggcctggagcccctgaccttcaccaacatgttccccagctgggagcacagagaggacatcgccgagatcaccgagatggacaccgaggtgagcaaccagatcaccctggtggaggacgtgctggccaagctgtgcaagaccatctaccccctggccgacctgctggccagacccctgcccgagggcgtggaccccctgaagctggagatctacctgaccgacgaggacttcgagttcgccctggacatgaccagagacgagtacaacgccctgcccgcctggaagcaggtgaacctgaagaaggccaagggcctgttctag

SEQ ID NO: 209383 - DNA, 6645 bp, Artificial Sequence
  derived and/or modified sequence
atgaaacgcaaggaacgaatcgctcgcagattggaaggcattgagaacgatactcagcctatactactgcagagttgcaccgggctggtcacacatagactcctggaagaggacactccgcgctatatgcgagccagcgacccagcttcacctcatattggcaggtccaacgaggaagaagagactagcgactcttccttggagaaacaaacacggagcaagtattgcactgagacttcgggcgtgcatggggattccccctacggcagtgggacgatggacacccactcccttgagtcgaaagctgagaggatcgcacgttataaggctgaacggcgaagacagctcgctgagaagtacggacttacactggaccccgaagcagattccgagtacctgagcaggtacactaagagcaggaaggagcctgacgccgttgaaaagcgcggagggaagagtgataagcaggaagaatcgagcagggatgcaagctcattgtacccgggcactgagactatggggcttcggacctgcgcgggggaatccaaggactatgcattacacgtaggcgacgggagcagcgatcctgaagtcctgctgaacatagagaatcagagacgaggccaggagctgagtgctacccgccaggcccatgatctgtcacccgctgccgaatcttcatcgaccttcagctttagtggcagggattctagcttcacagaggttccccggtcgcccaaacatgcacatagttcctccttgcagcaggcagctagcagatcgcctagcttcggcgatccgcagctctcaccggaggccaggccctctactggcaagcctaaacatgagtggttcttacagaaggattcagaaggggatactccctccctcattaattggcccagcagggtgaaggtccgtgaaaaacttgtaaaagaagaatccgcgagaaactcgcctgaactcgcctccgagtctgtaacacaacgccgacatcaaccagcacccgtccattacgtctcttttcagagtgaacacagcgctttcgacagagtcccttccaaagctgccggatccacacgccaaccaattcgcggatacgtgcaaccagccgacacaggccacacggcaaaattggtgactcccgagactccagagaacgcttcagagtgttcttgggttgcaagcgccacacagaacgtcccaaagccaccaagcttaaccgtgctggagggcgatggaagggatagccctgtgctgcacgtatgtgagtcaaaggccgaggaggaggagggggaaggagagggcgaggaaaaagaggaggatgtgtgttttactgaggccctcgagcagagcaaaaagacgttactagccttggagggagacggactcgttcgatctcccgaagatccttctaggaacgaggacttcggaaagcctgccgtgtccaccgtgactctcgagcaccaaaaagaacttgaaaatgtggcccaaccccctcaggcacctcaccagcccacagagagaactggcaggagcgagatggtgctgtacatccaaagcgaacccgtcagtcaggatgccaagccgacggggcacaacagggaagccagtaagaaaagaaaagtccgcaccaggtccctaagcgacttcactggcccccctcagcttcaggccctgaaatacaaggatccagctagccgccgtgagctggagctcccatcctctaaaaccgaggggccctacggtgagataagtatgctcgacacaaaggtgtcagtggcacaattaaggagcgcatttctggccagcgccaatgcctgtcggcgacctgagctgaaatcccgggtggaaaggtctgccgaaggacccggtttgcctacaggcgtcgagcgcgagcgcgggtcccgcaaaccccggcggtatttttctcccggcgaaagccggaaaacttccgaacgattccggacccagcccatcacatccgccgagcggaaagagagcgatagatgtacatcccactccgaaacccctacagttgacgacgaggagaaggtagacgagagagcgaaactcagtgtcgcggccaaacggcttctgttccgagagatggaaaagtcgttcgacgagcagaacgtccccaaacggagaagccgcaatacggccgttgaacagagactccgacgacttcaagatcgctctctgactcagcccatcacgacagaagaagtggtgattgcggccaccgagccgatccccgcaagctgctccggcggtacccatcccgttatggcccgcctcccctcgccaacagtggccagatcagcagtgcagcccgcaagactccaggcaagcgcgcaccagaaagccctggctaaggaccagaccaatgaaggcaaggaactcgctgagcaaggggagccagactccagcacactcagcctcgctgaaaagctggcattgttcaacaagctgagccagcccgtgagtaaggcaatctccacaaggaatcggatcgacacacgacaacgaaggatgaatgctcggtaccaaacgcagccggtcactctgggcgaggtcgagcaggtgcagagcgggaagttgattcccttcagccctgctgtgaacactagcgtgtctaccgtggcaagtacggtcgcccctatgtacgcgggcgacctgaggacaaagccacctctggaccacaatgcctctgccacagattataagttttccagttcaatagaaaactccgattcacctgtgcggtcaatcctcaaaagtcaggcctggcagccgctcgtggagggatcagagaacaagggcatgcttagagaatacggcgaaaccgaaagcaagagagccttaaccgggcgggattccggcatggagaaatacggttcatttgaggaggctgaggccagctaccctattctgaatcgagccagagagggtgattcccataaagagtcgaagtacgccgtgcccaggagaggtagcctggagcgcgctaaccccccaattacacaccttggcgacgaaccaaaggaattctccatggcaaagatgaacgctcaggggaaccttgatctacgggaccgcctaccctttgaagagaaggtagaagtcgaaaatgtcatgaagcggaagttcagtctccgggccgccgagttcggagagcctactagtgaacagactggaactgcagctgggaaaaccatcgcacagactacagcacccgtctcctggaagcctcaggatagtagtgaacaaccccaggagaaattatgtaaaaacccttgcgcgatgttcgccgctggcgaaatcaaaacacccaccggcgaaggactccttgattccccaagcaagaccatgtctatcaaggaacggctagcccttctcaaaaaatccggcgaagaggattggcgcaaccgcctctctaggcggcaggaggggggcaaggcccctgcctcctcactccatacgcaagaggccggaaggagcctgattaaaaaacgtgtcaccgagtctagggaatcccaaatgactatcgaagagcgcaagcaactgataacagtgcgagaggaagcatggaaaacacgaggccgcggggctgctaatgactctacacagtttaccgtggcgggcagaatggtgaagaaggggctggcatctccaacagcaatcacccctgtggcctcccctatctgcgggaaaacccgtggaactacccccgtatcaaagcctttggaagatatagaagcccgtcccgacatgcagctggagagcgacttaaagcttgaccgcctggagacatttctgagacgattaaacaataaagttggcggcatgcatgaaaccgtgctgaccgtgacaggaaagtcagtgaaagaggtaatgaagccagatgacgatgagactttcgccaagttctaccgctccgtagattataacatgcccaggagcccggtggagatggacgaggacttcgacgtcatttttgatccgtatgcccccaagttgacaagcagcgtggctgaacacaagcgggccgtacgtccgaaacgacgggttcaggccagtaagaatcctctgaagatgttggccgcccgcgaggatcttctccaggaatatacagagcagcgccttaacgtggccttcatggagagcaagcgtatgaaagtcgaaaaaatgtcatccaactctaatttcagcgaagtcacactggctggactggctagcaaggagaacttcagtaacgttagccttcgcagcgtaaacctgacggagcaaaattcgaacaactcggccgtaccctacaaacgcctgatgcttttgcagataaaaggtagacgccatgtgcaaacaaggctcgtggaaccccgggcttctgccctcaattctggggactgctttttgctactgtcgccacattgctgttttctctgggtgggcgaattcgccaatgtaatcgaaaaggccaaagcaagtgagctggcgaccctgatacagactaagcgagagctcgggtgcagagctacatacattcagacgatcgaagaaggaatcaacacacacacacacgccgctaaggatttttggaaacttcttggtgggcagacttcctatcagtcagccggcgatcctaaggaagacgagttgtacgaagctgccatcatagagaccaattgtatttatcggctgatggacgataagctggtgcccgatgacgattactggggcaagattcctaagtgttctctcctgcagcctaaggaggtgctcgtttttgacttcggaagtgaagtgtacgtctggcacggtaaagaagtaaccctggcgcaacggaaaattgccttccagttagccaaacatctgtggaacggaaccttcgattacgaaaattgcgacatcaatcctttggacccaggcgagtgtaaccccctgattccacgcaaaggtcagggaaggccagattgggcgattttcggccgactgacagagcataacgagactattctattcaaggaaaagttcctggattggaccgaattaaagaggagcaatgaaaagaatccaggcgaacttgcccagcataaagaagatcctagaaccgacgttaaggcctatgatgttacccggatggtgagcatgccccagactactgcagggaccatccttgatggggttaatgttgggagaggatacgggttggtcgagggccacgataggaggcagttcgagataacatctgttagtgtcgacgtttggcatatcttggagttcgactattccaggctgcccaagcagtcaatcggacaatttcatgaaggcgatgcctacgtcgtcaaatggaagtttatggtgagtacggcagtgggctctcggcagaagggggagcacagtgtgcgggctgcgggtaaggaaaagtgtgtttatttcttttggcaggggagacactctacggtgtccgagaaaggcaccagcgcccttatgacagttgaacttgatgaggagaggggggcacaggttcaggttctgcagggaaaagagcctccgtgtttcctgcagtgtttccaaggtggcatggtggtgcacagcgggcggagggaagaggaagaggaaaatgtgcaatcagagtggagactctattgtgttagaggggaggtgcctgtcgagggtaacctgttagaagtcgcatgccattgcagctcactccgcagccggacctccatggttgtgctaaacgttaacaaggctcttatctacctttggcacggatgtaaagctcaggctcatactaaggaagtgggcagaaccgccgcaaataagataaaagagcagtgccccctcgaggccgggctgcactcctcatcgaaagtgacgatccacgagtgtgatgaaggatctgagccattaggattctgggatgcactcggcaggcgggatagaaaagcctacgattgcatgctccaggacccgggcagctttaatttcgctcctcggttattcattttgtctagcagctcaggggactttgcagccaccgaatttgtataccccgcccgtgcccctagcgtggtgagcagtatgcccttcttacaggaggatctgtatagtgccccacagcccgcgctgtttttagtggataatcatcacgaagtatatttatggcagggttggtggcctatagagaataagatcaccggttctgccagaattcggtgggcttccgatcgtaaatccgcaatggaaactgtcctccagtactgtaaggggaagaatctcaagaaaccagctcccaagagctacctgatccatgctggcctcgaacctctgactttcacaaatatgtttccctcgtgggaacatcgggaggatatcgccgaaatcaccgaaatggacacagaagtgtcgaaccaaataaccttggtggaggacgtgctcgccaaactctgcaagacgatctaccctttagctgatctactggctcggcctctgcccgagggagtggatccgctgaagcttgagatctacttaaccgatgaggattttgagtttgctctggacatgacaagggatgagtacaacgcacttccggcatggaagcaggtgaacctcaaaaaggcaaagggactcttctag

SEQ ID NO: 209384 - DNA, 6645 bp, Artificial Sequence
  derived and/or modified sequence
atgaagcgcaaggagcggatcgcaaggcggctggaggggatcgagaacgacacgcagcctatccttctgcagagctgcaccgggttagtaacacaccggctgctggaggaggacacgccaagatacatgagagctagcgatcctgcgagcccccacattggccggagcaatgaggaggaggaaacctcggattccagtttggaaaagcagacccgatccaaatactgtactgaaacatcaggcgtgcatggcgacagcccatacggttctggtactatggatactcatagcttagagtccaaagcggagagaattgccaggtacaaagctgaaagacggcggcagctagcagagaaatacggtctcaccctcgaccccgaggccgactcggagtatcttagtcgctacacaaagtcccgtaaagaaccagatgccgtggaaaaacgggggggcaaatcagacaagcaggaagaatcatcccgcgacgcctcttcattgtatcctgggacagaaacaatgggcctgcggacgtgtgctggggagagcaaagactatgcactccacgtcggagatggatcttcagatccggaggtcctgctaaacatcgagaaccagaggcgaggccaagaactatcagccacaagacaggcccacgacttaagccctgcggctgaatcaagcagcacgttctcgttttctgggagagacagctctttcaccgaggttccacggtcaccaaaacacgcacatagttcctctcttcagcaggcggcatccagatccccatcgttcggggacccccagctgagccctgaggctcggccatccacaggaaagccaaagcacgaatggtttctccaaaaggattcagaaggagataccccgtctctcattaattggcctagccgcgttaaggtgcgggagaagctggtcaaagaggaatccgcccgcaactcccctgaattggcatcagagtcggtgacccagcgccgtcaccagccggctccagtccactacgtgtccttccagtccgagcacagcgcctttgatcgggtacctagcaaggctgccggctctactcggcagcctatccgcggatatgtacaaccagccgacactggacacaccgcaaaactggttacccctgagacccctgagaatgccagcgaatgctcctgggtggctagcgcaactcagaacgttcctaaacctccaagtctgactgttctggaaggagatggtcgggactctcccgtattacatgtatgcgagtccaaggcggaagaggaagagggtgaaggtgagggcgaggagaaggaagaggatgtctgttttactgaggccttggagcaatcaaagaagaccctgttggccctcgagggtgacgggctagtgaggtcccctgaggatccatctcggaacgaggacttcggcaagcccgccgtctccaccgtcacactcgagcatcagaaggagttggagaatgtggcccagcccccacaggccccccaccagcctaccgaacggacaggacgttccgaaatggtcctctacatccagtccgaacccgtctcccaggacgctaaaccaactgggcacaatcgcgaagccagcaaaaaacggaaagtgcgcacacgctccctatcagacttcacaggcccacctcaacttcaggctctgaagtacaaggacccagcatctcggcgcgaactcgagctgccttcaagcaaaaccgaagggccatatggggagataagtatgctggatacaaaggtcagcgtggcgcagctgcgatccgcttttttagcctctgcgaacgcctgtaggagaccagagctgaaatcccgggtggagcggtccgcggagggccctgggctacccaccggtgttgaacgtgagaggggctcaagaaagccaagacggtatttctctccaggagagtcccggaaaaccagcgagcggtttcgcacacaacctattacgtccgccgagcgcaaagaatccgaccggtgcacatcccactctgagacaccaacagtcgacgatgaagaaaaggtggacgagcgggctaaactctctgtggccgcaaaacgcttgctgtttcgagaaatggagaaaagctttgatgaacaaaacgtccccaagcggcgctcaaggaataccgccgtcgaacagcgcctgcggagactgcaggatcgcagcctgacgcagcctatcacaaccgaagaggtggtcattgccgcgactgagcctatacccgcaagctgcagcggcgggacccatcctgttatggctaggctgccctctcctacagttgctcgttccgcagttcagcccgcaagactgcaagcctctgcgcaccaaaaggccctagctaaagaccaaacaaacgagggcaaggagctcgctgaacagggagagcccgactccagcacactttcactggccgagaagcttgccctgtttaacaaattgtctcaacccgtttccaaagccatatccacccggaacagaatcgatacgagacagagaagaatgaatgctcgctatcagacacagcccgttaccttgggggaagttgagcaagtccaaagcggcaaattaatacccttcagcccagctgtcaacacgagtgtctctaccgtggcttccacagtggccccgatgtacgctggtgatcttcggacaaagcctccacttgatcacaatgcaagcgctactgattacaaattctccagcagtatcgagaacagcgattctcctgtgagaagcatcctgaagagccaggcatggcaaccgctcgtggaaggttccgaaaataaggggatgttgcgcgagtacggggagacagagagcaagcgagcactgactgggcgcgatagcggaatggaaaagtatggctcttttgaagaagccgaagctagctacccaattctgaaccgggctcgggaaggtgacagtcacaaggagagtaaatacgctgtacctcgccgaggaagcttggaaagggccaatcctcccatcacacacctgggcgacgagcccaaagagttttccatggcgaagatgaacgcccagggtaacctcgacctgcgggatagattaccatttgaagaaaaggtagaagttgaaaatgtgatgaagcgcaaattttctctgagagccgccgagttcggagaacccacatcggaacagactggcactgccgccggcaagactatcgcacagactaccgcgcctgtttcatggaaaccccaggactctagtgagcagcctcaagaaaaattatgcaaaaatccttgcgcgatgtttgctgctggggaaatcaagacacccaccggcgaaggacttcttgactccccaagtaaaaccatgtccataaaggaaagactcgccctcctgaaaaagtcaggtgaggaagattggcggaatagactcagcagacgtcaggaggggggtaaggcacccgcctctagtctgcatacccaggaagctggccgctcactgatcaaaaaacgcgtgacggaaagtcgggagagtcagatgaccatcgaagagagaaagcagctgatcacagttcgggaagaggcctggaagactcggggacgcggcgcagccaacgattcaacgcaattcacagtggccggcaggatggtcaaaaaaggcctggccagtcctactgctattacccctgtggcctcacctatctgcgggaagactcgtggaacaacccctgtgtcgaagcctctggaagatatcgaggcccgcccagatatgcagctggaaagtgacttgaagctggacagattggagacattcctccgtaggctgaacaataaggtgggtggtatgcatgagacagtactgactgtcacagggaagtccgtcaaggaagtaatgaagcccgacgacgatgaaactttcgccaaattctatcgcagcgtcgattacaatatgccacgcagcccagttgagatggatgaagactttgatgtgatatttgatccctacgcccctaaactgacttcgagtgtggctgagcacaaacgagccgtgagacctaagcggagagtgcaggcatccaagaatcctttaaagatgctggccgcgcgtgaagatctcctgcaggaatataccgaacagcgtttgaacgttgcttttatggaatcaaagcggatgaaggtcgagaaaatgtcaagcaactcaaatttttctgaagtaaccctagcaggcctggcttccaaggaaaatttctccaatgtatctttgcgctcagtgaatctaactgaacagaattctaacaactctgccgttccttataagagactgatgctgctccaaatcaaagggaggcgccatgtccagactagacttgtggagccaagggccagcgccctgaatagcggtgattgcttcctgctcctaagcccacactgttgctttttgtgggtgggtgagtttgcgaacgtgattgagaaggcgaaggccagtgaattggcaacattgattcagaccaaacgtgaacttggttgtagggccacctacattcagactattgaggaaggcatcaacacccacacccatgcagctaaggatttctggaaactgctaggggggcagacgtcctatcagtccgccggcgacccaaaagaggatgagctttacgaggccgctataatcgagaccaattgcatttaccgcctgatggatgataagttagtgcccgatgacgactactggggcaagattccgaaatgttcactgctccagccgaaagaggtgctggtcttcgattttggatcagaggtctacgtgtggcacggcaaggaagtgactctggcgcagaggaagatcgcattccagcttgctaagcatctgtggaacgggactttcgattacgagaattgtgatattaacccgctggaccccggggagtgtaaccctctgatccccaggaaagggcaagggaggccagactgggcaatcttcgggaggctgaccgagcataatgaaactattctgtttaaagaaaaattcttggactggacagagctgaaaaggtcaaatgagaagaatcctggggagctggcacaacacaaggaagatccgcgtactgatgttaaagcatatgatgtgactcgtatggtgagcatgccccaaaccacagctggtacgatcttagatggtgttaatgtggggcggggatacggactggtcgagggccatgataggcgccagtttgagatcacatcagtgtcggtggatgtgtggcacatcctcgagttcgactatagccggctgcccaaacagtctatagggcagttccatgaaggcgatgcatacgtggtcaaatggaaatttatggtaagcacggccgtcggaagcagacagaagggggagcatagtgttcgggccgctggtaaggaaaaatgcgtctatttcttttggcaaggtaggcacagcaccgtgtcggagaagggcacatcggctcttatgacggtcgagctggacgaggaacgcggcgctcaggtgcaggtgctgcaagggaaagagcctccttgctttcttcagtgtttccagggagggatggtggtacatagtgggaggcgtgaggaggaagaggaaaacgtgcaatccgaatggaggctgtactgcgtgaggggagaagtgccagtcgaaggcaacctgttagaagtagcctgccactgttcgagtttacgttctagaacctcgatggttgttcttaatgtgaataaggctctcatttatttgtggcacggatgtaaagcacaagcgcataccaaagaagtcggacggaccgcggccaacaagatcaaagagcagtgcccattggaagcggggttgcactctagctccaaggtgacgattcacgagtgtgacgaggggtcagaacctcttggtttttgggacgcattagggaggcgggataggaaagcctatgactgcatgctccaggacccaggctccttcaattttgcaccgcgcctgtttattctatcctcctcatctggagacttcgcagcaaccgaattcgtttaccccgctcgtgccccttcagtcgtctcttctatgcccttcctgcaggaggatttgtatagtgctcctcaacctgccttgtttttagtcgacaaccaccatgaggtttacctgtggcaaggctggtggcccatcgaaaacaagatcactggatctgctcggattagatgggcttctgacagaaaatccgccatggaaaccgtgctgcagtactgcaagggtaagaacctgaagaagcctgcacctaagagctatctcatccacgccggtctggaacccctcactttcaccaatatgttccctagctgggagcacagggaggacattgcagagattaccgagatggacacggaggtatcaaatcagattacactggtggaggatgtgcttgcaaaattatgcaagacgatctacccgttagctgacctcctggccaggcccctccccgagggcgttgaccccctgaagctggaaatctacctgactgatgaagatttcgagtttgccctggatatgacacgggatgagtataatgcgctgccagcctggaagcaggtcaatctgaaaaaggccaaaggactgttctag

SEQ ID NO: 209385 - DNA, 6645 bp, Artificial Sequence
  derived and/or modified sequence
atgaagaggaaggagagaattgcccggcggctggagggcattgaaaatgacacccagcccatcctgctgcagagctgcaccggcctggtgacccaccggctgctggaggaggacaccccccgctacatgagggccagtgaccctgccagcccccacatcggccgcagcaatgaggaggaggagaccagtgacagcagcctggagaagcagaccaggagcaagtactgcacagagaccagcggcgtgcatggagacagcccctacggcagcggcaccatggacacccacagcctggagagcaaggccgagagaattgcccgctacaaggccgagcggcggcggcagctggccgagaagtatggcctgaccctggaccctgaggccgacagcgagtacctgagccgctacaccaagagcaggaaggagccagatgctgtggagaagaggggcggcaagagtgacaagcaggaggagagcagcagagatgccagcagcctgtacccaggcacagagaccatgggcctgcggacctgtgccggggagagcaaggactatgccctgcacgtgggagatggcagcagtgaccctgaggtgctgctgaacatcgagaaccagaggcggggccaggagctgagcgccacccggcaggcccatgacctgagccctgctgctgagagcagcagcaccttctccttcagcggccgggacagcagcttcacagaggtgcccaggagccccaagcacgcccacagcagcagcctgcagcaggccgccagccgcagccccagctttggagacccccagctgagccctgaggcccggcccagcacaggcaagcccaagcatgagtggttcctgcagaaggacagcgagggggacacccccagcctcatcaactggcccagccgggtgaaggtgcgggagaagctggtgaaggaggagagcgccaggaacagccctgagctggccagcgagagcgtgacccagaggaggcaccagcctgcccctgtgcactacgtgtccttccagagcgagcacagcgcctttgacagagtgcccagcaaggctgctggcagcacccggcagcccatccggggctacgtgcagcctgctgacaccggccacacagccaagctggtgaccccagagaccccagaaaatgccagcgagtgctcctgggtggccagcgccacccagaatgtgcccaagccacccagcctgactgtgctggagggagatggccgggacagccctgtgctgcacgtgtgtgagagcaaggccgaggaggaggagggggagggggagggggaggagaaggaggaggatgtgtgcttcacagaggccctggagcagagcaagaagaccctgctggccctggagggagatggcctggtgcgcagccctgaggaccccagcagaaatgaagattttgggaagccagctgtgtccacagtgaccctggagcaccagaaggagctggagaatgtggcccagcccccccaggccccccaccagcccacagagaggacaggccgctctgagatggtgctgtacatccagagcgagcctgtgtcccaggatgccaagcccaccggccacaaccgggaggccagcaagaagaggaaggtgaggaccaggagcctgagtgacttcaccggccccccccagctgcaggccctgaagtacaaggaccctgccagccggcgggagctggagctgcccagcagcaagacagagggcccctacggggagatctccatgctggacaccaaggtgtctgtggcccagctgcggagcgccttcctggccagcgccaatgcctgcagaagacctgagctgaagagccgggtggagaggtctgctgagggccctggcctgcccaccggggtggagcgggagcggggcagcaggaagccccggcgctacttcagccctggagagagcaggaagaccagcgagcgcttccgcacccagcccatcaccagcgctgagaggaaggagagtgaccgctgcaccagccacagcgagacccccaccgtggatgatgaggagaaggtggatgagcgggccaagctgtctgtggccgccaagaggctgctcttccgggagatggagaagagctttgatgagcagaatgtgcccaagaggaggagcaggaacacagctgtggagcagaggctgcggcggctgcaggacaggagcctgacccagcccatcaccacagaggaggtggtgattgctgccacagagcccatcccagccagctgcagcggcggcacccaccctgtgatggcccggctgcccagccccaccgtggcccggtctgctgtgcagcctgcccggctgcaggccagcgcccaccagaaggccctggccaaggaccagaccaatgaaggcaaggagctggccgagcagggcgagccagacagcagcaccctgagcctggccgagaagctggccctcttcaacaagctgagccagcctgtgtccaaggccatcagcaccaggaacagaattgacacccggcagaggaggatgaatgcccgctaccagacccagcctgtgaccctgggggaggtggagcaggtgcagagcggcaagctgatccccttctccccagctgtgaacacctctgtgtccacagtggccagcacagtggcccccatgtatgctggggacctgcggaccaagccacccctggaccacaatgccagcgccacagactacaagttcagcagcagcattgagaacagcgacagccctgtgcgcagcatcctgaagagccaggcctggcagcccctggtggagggctctgaaaataaaggcatgctgcgggagtatggagaaacagagagcaagagggccctgaccggccgggacagcggcatggagaagtatggcagctttgaggaggccgaggccagctaccccatcctgaacagagcccgggagggggacagccacaaggagagcaaatatgctgtgccccggcggggcagcctggagcgggccaacccccccatcacccacctgggagatgagcccaaggagttctccatggccaagatgaatgcccagggcaacctggacctgcgggaccggctgccctttgaggagaaggtggaggtggagaatgtgatgaagaggaagttcagcctgcgggctgctgagtttggagagcccaccagcgagcagacaggaacagctgctgggaagaccatcgcccagaccacagcccctgtgtcctggaagccccaggacagcagcgagcagccccaggagaagctgtgcaagaacccctgtgccatgtttgctgctggggagatcaagacccccactggagagggcctgctggacagccccagcaagaccatgagcatcaaggagcggctggccctgctgaagaagtctggagaggaggactggaggaaccggctgagccggcggcaggagggcggcaaggccccagccagcagcctgcacacccaggaggccggccgcagcctcatcaagaagagggtgacagagagccgggagagccagatgaccatcgaggagaggaagcagctgatcaccgtgcgggaggaggcctggaagacccggggcagaggagctgccaatgacagcacccagttcaccgtggccggccgcatggtgaagaagggcctggccagccccacagccatcacccctgtggccagccccatctgtgggaagacccggggcaccacccctgtgtccaagcccctggaggacatcgaggcccggccagacatgcagctggagagtgacctgaagctggaccggctggagaccttcctgcggcggctgaacaacaaggtgggcggcatgcatgaaacagtgctgactgtgacaggcaagtctgtgaaggaggtgatgaagccagatgatgatgagacctttgccaagttctacagatctgtggactacaacatgcccaggagccctgtggagatggatgaggactttgatgtgatctttgacccctatgcccccaagctgaccagctctgtggccgagcacaagagagctgtgcggcccaagagaagagtgcaggccagcaagaaccccctgaagatgctggccgcccgggaggacctgctgcaggagtacacagagcagaggctgaatgtggccttcatggagagcaagaggatgaaggtggagaagatgagcagcaacagcaacttcagcgaggtgaccctggccggcctggccagcaaggagaacttcagcaatgtgtccctgcggtctgtgaacctgacagagcagaacagcaacaacagcgctgtgccctacaagaggctgatgctgctgcagatcaagggcagaagacatgtgcagacccggctggtggagccccgggccagcgccctgaacagcggggactgcttcctgctgctgagcccccactgctgcttcctgtgggtgggggagtttgccaacgtgattgagaaggccaaggccagcgagctggccaccctcatccagaccaagcgggagctgggctgccgggccacctacatccagaccatcgaggagggcatcaacacccacacccatgctgccaaggacttctggaagctgctgggcggccagaccagctaccagagcgctggggaccccaaggaggatgagctgtatgaagctgccatcatcgagaccaactgcatctaccgcctgatggatgacaagctggtgcctgatgatgactactggggcaagatccccaagtgcagcctgctgcagcccaaggaggtgctggtgtttgattttggaagtgaggtgtatgtgtggcacggcaaggaggtgaccctggcccagaggaagatcgccttccagctggccaagcacctgtggaatggcacctttgattatgagaactgtgacatcaaccccctggaccctggagagtgcaaccccctcatccccaggaagggccagggccgcccagactgggccatcttcggccgcctgacagagcacaatgagaccatcctcttcaaggagaagttcctggactggacagagctgaagaggagcaatgagaagaaccctggagagctggcccagcacaaggaggaccccaggacagatgtgaaggcctatgatgtgaccaggatggtgtccatgccccagaccacagctggcaccatcctggatggagtgaatgtgggccggggctacggcctggtggagggccatgaccggcggcagtttgagatcacctctgtgtctgtggatgtgtggcacatcctggagtttgactacagccggctgcccaagcagagcatcggccagttccacgagggagatgcctacgtggtgaagtggaagttcatggtgtccacagctgtgggcagccggcagaagggggagcacagcgtgcgggccgccggcaaggagaagtgtgtgtacttcttctggcagggccgccacagcacagtgtctgagaagggcaccagcgccctgatgacagtggagctggatgaggagcggggggcccaggtgcaggtgctgcagggcaaggagcccccctgcttcctgcagtgcttccagggcggcatggtggtgcacagcggcagaagagaggaggaggaggagaatgtgcagagcgagtggaggctgtactgtgtgcggggggaggtgcctgtggagggcaacctgctggaggtggcctgccactgcagcagcctgcggagcaggacctccatggtggtgctgaatgtgaacaaggccctgatctacctgtggcacggctgcaaggcccaggcccacaccaaggaggtgggccgcacagctgccaacaagatcaaggagcagtgccccctggaggccggcctgcacagcagcagcaaggtgaccatccatgaatgtgatgagggcagcgagcccctgggcttctgggatgccctgggcagaagagacaggaaggcctatgactgcatgctgcaggaccccggcagcttcaactttgcccccaggctcttcatcctgagcagcagcagcggggactttgctgccacagaatttgtgtacccagcccgggcccccagcgtggtgtcctccatgcccttcctgcaggaggacctgtacagcgccccccagcctgccctcttcctggtggacaaccaccacgaggtgtacctgtggcagggctggtggcccatcgagaacaagatcactggaagtgcccgcatccgctgggccagtgacaggaagagcgccatggagaccgtgctgcagtactgcaagggcaagaacctgaagaagccagcccccaagagctacctgattcatgctggcctggagcccctgaccttcaccaacatgttccccagctgggagcaccgggaggacattgctgagatcacagagatggacacagaggtgagcaaccagatcaccctggtggaggatgtgctggccaagctgtgcaagaccatctaccccctggccgacctgctggcccggcccctgcctgagggcgtggaccccctgaagctggagatctacctgacagatgaagattttgaatttgccctggacatgaccagagatgagtacaatgccctgcctgcctggaagcaggtgaacctgaagaaggccaagggcctcttctag

SEQ ID NO: 209386 - DNA, 6645 bp, Artificial Sequence
  derived and/or modified sequence
atgaagcggaaggagcggatcgcccggcggctggagggcatcgagaacgacactcagcccatattactgcagagctgcaccgggctagtaacgcatcgccttctcgaggaggataccccaagatacatgcgggcttcagaccccgcctctccgcacattggtagaagcaacgaagaggaggagacctcagactcctccctagagaaacaaaccagatctaagtactgcaccgaaacatctggagtgcacggtgactccccctacggctcaggcactatggatacacacagtctcgagagcaaagccgaacgcatcgcgaggtataaggcagaaaggcggagacaactagccgagaagtatggactcaccctcgacccagaggccgattctgagtacctctcccgatataccaaatcgaggaaggagcccgacgctgtggagaagagaggagggaagtctgataaacaagaggagtcgagccgcgatgctagctccctctatcccggcacagagactatgggcctgcgaacctgcgctggtgagagcaaggattacgcactgcatgtcggagatggtagttccgaccctgaggttctactgaacatcgagaatcagcgtaggggccaggagttgtccgctactagacaggctcatgatctgtcacccgccgcagaatcttcatctactttcagcttctctggtcgtgattcatcatttactgaggttcccagatcccccaagcacgcacactcctcctccctgcagcaggccgcttctaggtccccctcgttcggtgacccacagttaagccccgaagcgcgaccaagcaccggtaaacccaaacacgagtggttcctgcagaaagactccgagggagacacccctagcctgattaattggccaagtcgggtaaaggtccgggaaaagctggtgaaagaagaaagcgcccggaatagccccgaactggcttccgagagtgtcactcagaggcggcatcagccagcccccgtgcactacgttagctttcaaagcgagcactccgctttcgatcgggtcccttccaaagcggccggaagtacccggcaacctataaggggctatgtccagccagcagacactggccatacggcgaagctcgtgacacctgaaacccctgaaaatgcctctgagtgctcatgggtcgcttccgccactcagaatgtgccaaaaccccccagtctgacagtgcttgagggagacggacgcgattctccagtcttacacgtgtgtgagtccaaggccgaagaagaggagggggaaggggaaggcgaagagaaggaggaagatgtgtgcttcacagaagcactcgaacagtctaaaaaaacattgctggcactggagggagatggactggtgcgctccccagaggacccatccaggaacgaagatttcgggaagcccgccgtcagcacggtcaccctggaacaccagaaggagctagagaacgttgcccagcctccccaggcaccacatcagcctactgaaagaactggcagatccgagatggtgctttacatacagagtgagccggtgtcccaggatgctaaacctacaggacataaccgagaagctagtaaaaagcggaaagttcggacccgatcattatcagattttacagggccaccccaattgcaggcactgaagtacaaagaccctgcctctaggagagaacttgaactccccagttctaagaccgaagggccatacggcgagatttccatgctggataccaaagtatcagtggcccagcttagatccgcattccttgccagcgccaacgcatgccggcgcccagaacttaaatcccgcgtggagcggtcagccgagggccccggtctgcccactggcgtggagcgcgagcgcggatccagaaaacctaggcgatatttcagtcccggagagagtagaaaaacctccgagagattccggactcagcccatcacgtcagccgaacgcaaggagagtgataggtgcacttcccactcagagactcccaccgtggatgacgaagaaaaggtggatgagagggcaaagctgtccgtagctgcgaagcgcctcctgtttcgggaaatggagaagtcattcgatgagcagaacgtcccaaagaggaggagtaggaacaccgcggtcgagcaaagactgaggagattgcaggacagatccttgacccagccaataacaactgaagaagttgtgatcgccgctacagagcccattccggcgagctgctctgggggcactcacccagttatggctcggctgccctcccccactgttgcacgttcagccgtgcagcctgcacgcctgcaggcgtcagcgcatcagaaagcactggccaaagaccagacgaatgaaggaaaggagctggcagaacagggggaacccgattctagcacattatcactggccgagaaattggccctgttcaataagctgagccaacccgtttccaaagccatttctaccaggaaccgcattgatacgaggcaacggcggatgaacgcccggtaccagacccagcctgtgactctgggagaggtggagcaagtccagtccgggaaactgatacctttctcacctgctgtgaatacaagtgtgtcaactgtggcgagcactgtcgcgcccatgtacgccggcgatcttcggacaaagcctcctctcgaccacaatgctagcgccactgactacaagttctcgtctagtattgaaaatagcgacagcccagtccgaagcattcttaagtcccaggcatggcagccgctggtggaggggtccgagaataagggaatgctccgtgaatatggagagactgaatccaagcgagcgctgactggccgggatagtggcatggaaaagtacggtagcttcgaggaagccgaagcctcttacccaatcctgaacagagcacgggaaggagacagccataaggagtctaagtacgccgttccacgccgcgggagcttggaaagggcgaatccccctatcacccatcttggagacgaaccaaaggaattctccatggctaaaatgaacgcccaagggaaccttgatcttagagacagactgccttttgaagagaaggtggaggtcgagaatgtaatgaaaaggaaatttagcttacgcgctgctgaattcggcgagcccacatccgaacagaccgggactgcagccgggaaaacaattgctcagactacggctccagtgtcctggaagccccaagattccagcgaacaacctcaggagaaactgtgtaagaacccctgcgctatgttcgcagctggagaaataaagacccctaccggcgaggggctgctcgatagtcccagcaagactatgagcatcaaagaacggctcgctctactcaagaaatctggggaagaagactggcgcaatcgtctctcacgtcgtcaggaggggggcaaggcgcccgcctcatcgcttcatacccaggaagcaggcagaagcctgatcaagaagagggtgacagaatcaagagagtcacagatgaccatcgaagaacgaaaacagctgattaccgtgcgagaggaggcatggaagacaagggggaggggtgccgctaacgacagcacgcagtttaccgtcgcagggcgtatggtaaaaaaaggactggctagccctacagccatcactccagtggcttcgcctatatgtgggaagacaagggggacgactcccgtgtctaaacccctggaagacatcgaggcaagacccgacatgcagctggaaagtgacttaaagctggatagactcgagacattcctgagacgattaaacaacaaagtgggcggtatgcacgagaccgtgcttaccgtgactgggaagtccgtcaaagaggttatgaagcctgacgatgatgagacgtttgccaaattttatagatcagtggactacaacatgccacgtagccccgtggagatggacgaggactttgatgtgatctttgatccatacgccccgaaactcactagttctgtggccgaacataagcgtgctgttcggcccaaacgtcgggtccaagctagcaaaaacccgctgaaaatgcttgctgcccgggaagacctgctccaggaatataccgagcagcgtctgaacgtcgcttttatggagagcaagaggatgaaggttgagaaaatgagttcaaacagcaatttttccgaggtcactctggcaggacttgcctctaaggaaaatttctccaacgttagcctgcgcagtgtgaatcttactgagcaaaacagtaataattccgctgttccctacaagagattaatgcttctgcaaattaaaggccgaagacacgtgcagacaagattagtggaaccacgagccagcgccctgaatagcggggattgcttcctgctgctgagtccacattgttgctttctgtgggtgggggagttcgctaatgttattgagaaggccaaggccagcgagctggccactctgatccagactaaacgggagttgggatgccgggctacatatatacagacgattgaggaaggcattaatacacacacccacgccgcaaaagatttttggaaactgctgggaggacagacttcttatcagagtgcgggtgatcctaaagaggatgaactgtacgaggccgccattattgagacaaactgtatctatagactcatggacgacaagctggtgccagacgacgactactggggaaagattcctaagtgctccctgctgcaacccaaagaagttctggtttttgattttgggtcagaagtgtacgtatggcacggcaaagaagttactcttgcccagcgaaaaatcgccttccagctggcaaaacatctgtggaacgggacattcgactacgagaactgtgatatcaacccactcgatcccggggagtgcaaccctctgattccccgcaagggccagggtcgcccggattgggctatctttggccgactgactgagcacaacgagaccatcctgtttaaagaaaaattcctggactggacagaactgaagcgctccaatgaaaaaaatcccggggaacttgcccagcataaggaagatccacggaccgacgttaaggcttacgacgtgacccgcatggtttcgatgccgcaaacaacagccgggaccattttggatggtgtcaacgttggtcggggctacggcctcgtcgagggacatgataggcgccaattcgaaataactagtgtctccgtagacgtctggcacatacttgaatttgactatagtcgtttgcctaagcagagcatcggacagtttcatgagggagacgcatatgtagtgaaatggaagttcatggtgagcactgctgtaggctcgagacaaaagggagaacacagcgtgagggctgcagggaaggaaaaatgtgtttacttcttctggcagggccggcatagcactgtctcagagaaagggacctccgcactcatgacggtggaattagacgaggaacgcggcgcccaggttcaggtgctccagggcaaagagcctccatgttttcttcagtgctttcagggcggcatggtggtacacagtggtcgacgggaggaagaggaagagaacgtacagagcgagtggcggttgtactgcgtgcgcggtgaggttcccgttgaggggaaccttctcgaggtcgcatgccattgctcctctctccgctccaggacatcgatggtggttctgaacgtgaataaggcgttgatttacctgtggcacggctgtaaggcgcaggcccacacgaaagaagtaggcaggacggcggccaataaaataaaagagcaatgtccactagaggctggcctccactccagcagcaaagtgactatccatgaatgtgacgaaggatccgaaccactcgggttctgggatgctctcgggagacgcgatcggaaggcttacgactgtatgctacaggaccccgggagctttaatttcgccccacgcctttttattctgagttcctcaagcggagatttcgctgccacagagttcgtttatcccgctagagcaccgtccgtagtctctagtatgcctttcctccaggaagacctgtacagcgctccacagccagcactattcctggtagacaatcaccatgaggtctacctttggcagggatggtggccaatagaaaacaaaataactggcagtgcaagaataagatgggcatctgataggaagtctgccatggaaaccgtcttgcaatactgtaagggaaaaaatctgaaaaagccagctccaaaaagctacctgattcatgctgggctggagcctttgacttttacaaacatgttcccatcctgggaacatcgagaggacattgcagagatcactgaaatggataccgaggtgagcaatcaaataaccctggtggaggatgtcctggccaagctttgtaagacaatatatccactcgccgatctgctggctcggcctcttcctgagggtgtggatccactgaaactggagatctatctcacggacgaggacttcgagttcgccttggacatgactagagatgagtataacgccttgcccgcctggaaacaggtgaacctgaagaaggccaagggccttttctag

SEQ ID NO: 209387 - DNA, 6645 bp, Artificial Sequence
  derived and/or modified sequence
atgaagcggaaggagcggatcgcccggcggctggagggcatcgagaacgatacgcagccaattctgcttcaatcatgcactgggcttgttactcatcgtctactcgaggaggacactccaagatacatgagagcttctgacccagcctccccacatatcggaagatctaatgaggaagaagagacatcggacagctctctagagaagcaaaccaggtcgaagtactgtaccgagacaagcggcgtgcatggtgactcaccatatggcagcggtaccatggatacccactccttggagtccaaagcagagcgcatcgcaaggtacaaggccgaacggcggagacagctggccgaaaagtatggtttgacactcgaccctgaagctgatagcgaatacctgtccagatacaccaagtctcgcaaagaacctgacgctgtcgaaaagcgcggtggtaaaagcgacaagcaagaggagagttcaagagacgcaagcagcctttaccctggaaccgaaacaatgggactgagaacctgtgccggagagagcaaggactatgctctacacgtgggcgatggctcaagcgaccccgaggttctcctgaacatcgaaaaccagagaaggggccaggagctcagtgcgacccgacaggcccatgacctaagtcctgctgctgaatccagtagcacgtttagcttctcaggcagggactcaagtttcaccgaagtgcctagatctcccaagcacgcacatagttctagcctgcagcaggcggctagtagatcaccttccttcggggaccctcaactgtctccagaagcccggccaagcactgggaaaccgaaacacgaatggttccttcagaaggacagcgagggcgacacacccagcctgattaattggccgagcagagttaaggttcgggagaagctggtcaaagaggagagtgctagaaattctccagaactggcatccgaatcagtgactcagcgccggcatcagcccgcgcccgtacattacgtaagctttcagagtgagcatagcgctttcgaccgcgttccatcgaaagccgccggttctactcggcagccaatcaggggctacgtacaaccagctgatactgggcatactgcaaaactcgttactcccgagactcccgaaaacgcatccgagtgctcatgggtcgcatccgctacacaaaacgtgcccaagccaccaagtctgactgtcctggagggcgatggccgagatagcccggtgctgcatgtctgcgaatccaaagccgaggaggaggaaggggagggcgagggcgaggagaaagaggaggatgtctgcttcaccgaggcgcttgaacagtctaagaagaccttactcgccctggagggcgacgggctggtcagatcccctgaggaccccagccggaacgaagactttggaaagcccgccgtgtcaacagtgacactggaacaccagaaagagctcgaaaatgtggctcaacctccccaagcaccccatcagcccaccgagcgcactgggcggtccgaaatggtgctgtatattcagtctgaacccgtgagccaggacgccaagccaaccggccacaatcgggaggcctccaaaaaacgcaaagtgcgcactagatcgctgagtgacttcacaggcccccctcagttgcaggccctcaagtataaggatccagcttcccggcgggagttagagttgccctcgagtaaaacagaaggaccatacggagaaatatccatgctcgataccaaggtgtccgtggcgcagctgcggtccgcattcctcgcttcagccaacgcttgcagacgacccgaactcaaatcacgcgtggagcgttctgctgagggtccagggctgcccaccggagtcgagagagagaggggctccagaaagccccggagatacttttctccaggagagagccgcaaaacgagcgagcggtttcggacacagccgatcacctccgctgagcgtaaagaaagcgaccgctgcactagtcactctgaaacacccactgtggacgatgaagagaaggttgatgaacgggctaaactcagcgttgccgcaaaacgcctgctttttcgcgaaatggaaaagtcctttgatgagcaaaatgtgcccaagcggcgttcccggaatacagcggtggaacaaaggcttcggaggctccaggataggtctctgacccagcccatcaccaccgaagaggtggttatcgccgccactgaacctatacctgcaagctgttcaggaggcacacatcctgtgatggcccgactgccgtcccctacagtggcacgcagcgcagttcaacctgctagactgcaagcctcggcacatcagaaggcgcttgccaaggatcaaacaaacgaggggaaggaacttgctgaacaaggggagcctgacagtagtacactcagccttgcggagaaattagcccttttcaataaactttctcagcccgtgtcaaaggccatctctactcgtaataggatcgacactcggcaaaggcggatgaatgcccgttaccaaacccagcctgtcacactgggtgaagtggagcaggtgcaaagcggaaaactgattcccttctctccagccgttaataccagcgtgtcaacagttgcatcaactgtggcccccatgtatgcgggcgacctgaggaccaaaccccctctggatcataacgccagtgctactgattataagttttccagttctatagaaaacagcgattcccccgtgagatctatcttgaagagtcaggcttggcagcctctggtggagggctccgagaataaaggcatgctgcgggagtacggcgagactgaaagtaaaagggctttgactggtcgtgactcaggtatggagaagtacggcagtttcgaagaagcagaggccagctatcccatcctcaaccgcgcgcgtgagggagattctcacaaggagtctaaatacgccgtgcctaggcgagggagcttggagcgcgccaacccgcctatcacgcatctgggggatgagccaaaggaattttcaatggcaaagatgaacgcccagggcaatctggatctccgggaccggttgccatttgaggaaaaggttgaggtcgagaacgttatgaagaggaagttctccctgcgcgcagcagagttcggggagccaaccagcgaacagactgggacagcggccggaaagacaatcgcacagactaccgcacccgtgagttggaagcctcaggacagttccgaacagccccaagagaagctgtgtaaaaatccgtgcgccatgttcgccgccggagaaatcaagacacctactggggaagggctgctggactccccctccaaaaccatgtctatcaaggagcgactggcgctgcttaagaaatctggcgaggaggattggaggaataggctgagcagaagacaggaaggagggaaagcaccagcctcatcactgcacacccaagaggcagggagatccctgataaaaaaaagggttactgaaagcagagaatcccagatgacgattgaggaacggaagcagctgataacagtgcgcgaagaggcttggaaaacccgcggccgcggagctgccaacgattccacccagttcacagtcgccggacgaatggtgaaaaagggcctcgctagccctaccgctatcactccagtggcttctccaatctgcggaaaaacccggggcaccacacctgtcagtaagccactcgaggatatagaggcgcgacctgatatgcagctcgagtccgacctcaaacttgacaggttggaaacattcttgaggcgattgaataacaaggttgggggaatgcacgagactgtgctgactgtcaccggtaaaagcgttaaggaagtgatgaaaccggatgacgacgagacctttgcaaagttttataggtctgtcgactataacatgccccgttcaccagttgagatggacgaggattttgacgtcattttcgacccttacgctcccaagttgacgagtagtgtggccgaacataagcgcgcggtaaggccgaagcgccgtgtgcaggcatctaaaaatccactgaagatgctggccgccagagaggatttgctgcaggaatatactgagcaaagactcaacgtggcattcatggagtccaaacggatgaaagtcgaaaagatgagctccaacagcaatttctccgaagtgactttggccgggctggctagtaaagaaaacttctccaacgtttccctgaggtctgtgaacctgaccgagcagaactcaaacaattccgccgtaccttataagaggctgatgctacttcagattaaagggcgaaggcacgtccagacacgcctcgtggagccacgggcctccgcacttaattctggggactgctttcttctgctgtcacctcattgttgtttcctgtgggttggggaatttgccaacgttatcgagaaggctaaagcgtcagaactagctacccttattcagaccaaacgggaattggggtgtagggccacatacattcaaactatagaagaggggattaatacgcacacccatgcagccaaagacttttggaagctcctaggcgggcagaccagctaccagagcgctggagatcccaaggaagacgaactgtacgaggcagctattattgagacaaactgtatataccggctgatggatgataagctggtccccgatgatgactattggggtaagatacccaaatgcagtctgcttcagcctaaggaagttctggtgtttgacttcggcagtgaggtgtatgtgtggcacggcaaggaagtgactttagcacagcgtaagatcgcatttcagctcgcaaagcatctgtggaatggcaccttcgactatgagaactgtgatattaacccccttgatcccggggagtgcaaccctctaataccacgaaaaggccaagggcgcccagactgggccatcttcggccggctgaccgaacacaacgagactatcctgtttaaggaaaaattcctcgactggaccgaactcaaacgctctaatgagaagaatccaggggaactggcccagcacaaggaggatccccgcacagacgtaaaggcgtacgatgtgactcgcatggtctcgatgccccagactacagccggcaccatcctggacggggtgaacgtcggaagagggtacgggctggtcgagggccatgatcgaagacaattcgagatcacttctgtttccgtcgacgtctggcacattcttgagtttgattatagccggctgcctaagcagtcgattggtcagtttcatgagggcgacgcctatgttgtgaagtggaagtttatggtttcaaccgccgttggttcccgacaaaagggagagcattcagttcgagcggccggtaaggaaaagtgcgtgtatttcttctggcaggggagacattccactgtgtccgagaaaggaactagcgcactgatgacagtggaacttgacgaggagaggggcgctcaggtgcaggtcctgcagggcaaggagccaccttgtttcctgcagtgtttccagggcggaatggtcgtgcatagcggacgccgagaggaagaggaagagaatgtgcaatcagaatggcgtctatactgtgtccgaggggaagtaccggtcgagggaaacctgctcgaggtcgcctgccattgcagcagcctccgcagccggacaagtatggtggtactgaacgtgaataaagctttgatctacctgtggcacggatgcaaggctcaggctcacacaaaggaagtggggcgcacggcagctaacaaaattaaggagcagtgcccactagaagcgggactgcactcatctagcaaggtgaccatacatgaatgtgatgagggatccgagccactcggcttttgggatgccttagggagaagggacagaaaggcctacgactgtatgctgcaggaccccggcagcttcaactttgcccccagactcttcatactgtcttccagttctggagattttgcagccacggagttcgtgtatcccgccagggccccctccgtggtttcctccatgccctttttacaagaggatttgtactccgctcctcagccagcactttttctggttgacaaccaccacgaggtgtatctatggcagggatggtggccaatcgagaataagattactggctccgccaggatccggtgggcatcggaccgcaaatccgcgatggaaacagtgctgcagtattgtaaaggcaagaatctcaaaaagccggcccccaagtcctatctgatccacgccggtctggagcctctgacatttactaacatgtttccttcttgggagcatagggaggatattgcagagataacagaaatggatacagaagtcagcaaccagataaccctggtggaggacgtcctcgctaagctctgcaagactatttaccctctggctgaccttctcgctagacctctgcccgagggagtggatcccctcaagctggaaatctacctgactgacgaggattttgaattcgcgctcgatatgaccagagacgaatataatgcgctccctgcctggaagcaggtgaaccttaagaaggcaaagggcctgttttag

SEQ ID NO: 209388 - DNA, 6644 bp, Artificial Sequence
  derived and/or modified sequence
atgaagcggaaggaacgaatagctaggagactcgaggggatagaaaatgatacacagcccatcctccttcagtcatgcacagggttggtcacacaccgcctgcttgaggaggacacgccccgatatatgagggcctctgatcccgcttctcctcacatcggcagaagcaatgaggaggaggaaactagcgactctagtttggagaagcaaaccagatctaaatattgtaccgaaacatctggggtacatggagattccccatacgggagtggaaccatggatacccactctctggagagcaaggctgagaggatcgcgagatataaagcggagagacgccgacagttggccgagaagtacggcctgacgttggacccagaggcagatagtgaatacctctcacggtatacgaaaagccgaaaagaacccgatgccgtggaaaagcggggaggaaaatcggacaagcaggaagaatccagtcgcgacgctagctcgttgtacccgggaacagagaccatgggcctgcgaacgtgtgctggcgagtcgaaggattatgccctgcacgtgggggacggaagctcagacccagaggtgcttctaaatatcgaaaaccagagacgcggacaagagcttagcgctacacggcaagctcacgacttaagtccagcagctgagtcaagcagcacattcagcttttccggtagggattccagtttcacagaagtccctcgcagtccgaaacatgcccacagttcttctttgcagcaggccgcaagcagatcgccctcctttggagatccccagctgtctccggaggccagaccttctaccggcaaacctaaacacgagtggttcctccagaaagattcggaaggcgacacgccatcgctcattaattggccatctcgggtgaaggtgcgcgaaaagcttgtcaaggaggagagtgcaaggaactcaccagagctcgcctctgaatccgtcacccaaagaagacatcagcccgcaccagtacattatgtgtcctttcagagtgagcactcagcatttgacagggtcccttctaaggccgcaggaagcaccagacagcccattcggggatacgtccaacctgccgatacgggtcatacagccaaactcgtcacacccgagacacctgagaatgcctcggaatgtagctgggtggcgtccgccacacagaatgttcctaagccaccttctctcacagtcttggagggcgatgggagggactcgcccgtcctccacgtatgtgaatccaaagctgaagaagaggagggagagggagaaggcgaagaaaaggaagaggatgtatgcttcactgaggccctggagcagtctaagaaaaccctactggcccttgaaggtgatggactcgtgcgcagccccgaggaccccagcagaaacgaggactttggcaagccagctgtgtccaccgtgacactggaacaccagaaggagttggaaaatgtcgcccagcccccacaggcaccacatcagcctaccgagcgaacagggcgatccgagatggtgctgtatattcagtccgaacctgtttctcaggatgcaaagcctaccggtcataaccgcgaagcttctaagaagaggaaggtgagaacccgatcactcagcgattttaccggccctccacagctacaggccttaaagtacaaggacccagccagccggagagaattagagttaccctcctccaagactgaaggaccttacggagagatctcgatgctagacactaaggttagcgttgcacagcttcggtcagcgttcctagccagtgccaacgcgtgtagaaggcccgagctaaaaagtagagtggaaagatccgctgagggccctggcctccccaccggggtggaaagggagcggggatctaggaaaccccgtaggtattttagccccggagagtcacggaagaccagtgaacggttcagaacccaacccattacatccgcagaaaggaaagagtcagatcggtgcactagtcactctgagacaccaaccgtggacgacgaggagaaggtcgacgaaagagccaagctgagcgtggcagctaaaagacttctgtttcgtgagatggaaaaaagttttgacgagcagaatgtcccaaaacggcgaagcagaaacaccgctgttgagcagaggttacggaggttgcaggatcgcagcctgacacagccaattaccacagaggaggttgtgattgctgccacagagcccattcctgcctcatgcagtggcggaactcatcccgttatggcaagactaccttcaccaaccgtggcccgatctgccgtccagccagcccgattgcaggcctcagctcatcagaaggccctggccaaggaccagacaaacgaaggaaaggaactggctgaacagggcgagccggacagctcaacactctccctcgcagaaaagctggcgttgttcaacaagctgagtcagcccgtgtctaaggctatctctactagaaaccgcattgacacccgccagcgccgaatgaacgccaggtaccaaacccagcctgtcacgctgggcgaagtggagcaggtccaaagcgggaagctgatccccttcagtcccgcagtgaatactagtgtgtcaaccgtcgcatccacagtggcgcctatgtacgcgggtgacctgaggactaagccaccactcgaccacaatgcgagcgccacagattacaagtttagttccagtatagaaaatagtgacagccctgttcgcagcatcctcaaatctcaagcatggcaacctctggttgaaggctctgagaacaaggggatgctgcgagaatatggcgagaccgagagtaaaagggcgctgaccggaagagactccggaatggagaaatacggctctttcgaggaggccgaagcatcttatcctatcctgaatcgcgctcgcgaaggcgacagccacaaagaatccaaatacgcagtgcctcggagaggaagtctcgagcgggctaacccccctatcacccacctcggagacgagccaaaagagttttcaatggctaagatgaatgctcagggaaacctggatctgcgagatagactccctttcgaggagaaagtggaagtggaaaatgttatgaagcggaagttctccctgcgtgccgctgagttcggggaaccaaccagtgaacagacaggaacagctgctggcaagaccatcgcacagactactgcaccggttagctggaagccccaagattcaagcgaacagccacaggagaaactgtgcaagaatccttgcgctatgtttgctgcgggagagatcaagactcccaccggggagggattgctggactcaccctccaagaccatgagcattaaagaacgactggcccttcttaagaaatctggagaggaagactggcggaaccgcctcagtcgcaggcaggagggaggtaaggctccagcgtccagccttcatacccaggaagccggaagaagcctgatcaaaaagagggtcaccgagtcccgggaatctcagatgaccatagaggagagaaaacagctgatcactgttagagaagaagcttggaagactaggggcaggggggcagctaatgattcaacccaattcacggtggctgggcgtatggtgaagaagggcctcgcctcccctaccgctatcacaccggtggccagccctatctgcggaaaaacccgaggtacaacacccgtttctaaacccctcgaagacatagaagccagacctgatatgcagctggaatccgacctcaaactcgaccgattggaaactttcctgaggaggttgaacaacaaggttggaggcatgcacgagacggtgctgactgtaaccgggaaaagcgtcaaagaagtgatgaagccagacgatgatgagacctttgcaaagttttaccggagcgttgactacaacatgcctaggagtcccgtagaaatggacgaagactttgatgtgatttttgacccgtatgcacctaaacttacatcgtctgtggccgagcacaaacgcgcagttcgcccaaaaaggcgggtgcaggccagcaagaaccccttgaagatgctggccgcaagggaggatctgctacaggagtataccgagcagcggctaaacgttgcgttcatggagagcaagaggatgaaggtcgagaaaatgtcctccaactctaacttttctgaggttaccctggctgggcttgcgtccaaagagaacttcagcaacgtcagtctgcgctccgttaatctgaccgagcagaattctaacaacagcgcggtgccctacaagagactcatgcttctgcaaattaaaggcaggcgccacgttcaaactagactggttgagcctagagccagtgctctgaacagcggcgactgttttcttctgctgagccctcattgctgcttcctgtgggtgggcgagtttgccaacgtgattgaaaaggccaaggcatcagagctggctacactgatccagacaaaaagagagttgggatgcagggccacttacatccagaccatcgaggagggtatcaatacccacactcacgctgcaaaggatttctggaagcttctcggtggccagacgagttaccagtccgcaggcgacccaaaggaagatgaattgtatgaggccgctattatagagaccaactgcatatatagactgatggacgacaagctggtgcccgacgacgattattggggaaagatcccaaaatgttctttgttgcaaccaaaagaagtgttggtgttcgactttggatctgaggtttatgtctggcacggtaaagaggtcaccctggcccagcggaaaatcgcatttcagcttgcaaagcatctgtggaacggaacctttgactatgagaattgcgacatcaatcctctggaccctggagaatgtaatccgttgatcccacgaaagggacaaggacggccagattgggccatctttggcagactgaccgaacacaacgagaccatcctgtttaaggaaaaatttctggattggacagagctaaagagatctaatgagaaaaacccaggagagctcgcccagcacaaagaagacccgagaacagacgttaaagcatacgacgtcactcggatggtctccatgccacagaccactgccggaaccatactggatggcgtaaacgttggaagggggtacggattagtggagggccatgatcgaagacagttcgaaatcacctcggttagcgtggatgtctggcacatcctggagtttgactattcacgcctgccaaaacagtccattggtcaatttcatgagggagatgcttacgtcgtaaagtggaaattcatggtgtccacagctgtgggttcaagacagaaaggtgaacacagcgtgagggccgctggaaaggagaagtgcgtctacttcttttggcaaggccgacactcaactgtgtcagaaaaggggacctctgctttgatgacagtggaactggacgaagagcgaggtgcccaggtgcaggtgctccagggcaaagagcctccatgtttcctgcagtgctttcaaggagggatggttgttcactccggtcggagagaagaggaggaagagaacgtgcagtcagaatggagactgtactgtgtcaggggagaagtccctgtggagggcaatcttctcgaggtggcatgccactgtagctcgctgagatcaagaacaagcatggtggtcctgaatgttaacaaggccctgatttatctttggcacggatgcaaagcgcaggcccataccaaggaggttggacggacggcagccaataaaattaaggaacaatgccccctcgaagctggattgcattcttcaagtaaggtgactatccacgaatgcgacgaggggagcgaacctcttggattctgggatgctctgggccgtcgcgacagaaaagcttatgactgtatgctgcaggatcccggttcatttaatttcgcaccaaggctgttcatactgtcgtccagtagcggagactttgccgcaaccgagttcgtgtaccccgcacgggctccctctgtggtgtccagcatgccttttcttcaggaagacctgtatagtgctccgcaaccagcgctctttctcgtagacaaccaccatgaggtgtatctgtggcagggctggtggccgatcgagaataaaattaccggttctgctcgcattcggtgggcgtccgacagaaaatctgccatggaaaccgtccttcaatattgtaagggaaaaaacctgaagaagcccgctccaaaatcttacctaatccacgctgggctcgagcctttaacattcacaaacatgttcccttcttgggagcatcgggaagatattgccgagattactgagatggacacggaggttagtaaccagatcacgctcgtcgaggacgtgttggcaaagttatgtaagaccatctatccgctggcagatttactggccaggcccctgcccgaaggagttgacccactgaaattggaaatttatcttaccgatgaagacttcgagttcgccttagacatgacaagagacgaatacaacgcgttaccagcctggaaacaagtcaaccttaagaaagctaagggcctatttta

SEQ ID NO: 209389 - DNA, 6644 bp, Artificial Sequence
  derived and/or modified sequence
atgaagcgcaaggagcgaatcgccagacggctagagggcatcgagaatgatacacagccgatcctactgcagtcatgtactggccttgtcacacataggctcctggaagaggacacccctcgctacatgcgagccagcgatccagccagcccccatatcggcaggagtaatgaggaggaagagaccagtgactctagcctcgagaagcaaacccgctcaaaatattgtaccgagacatcgggcgtgcacggcgactcaccctatggaagtgggacgatggatactcactcattagagagcaaggctgaacgaatcgccagatataaggccgagcgaagacgacagctggctgagaaatatggacttaccctggacccggaggcggacagcgagtatctatcgcgatacaccaagagtagaaaggagcccgacgccgttgagaagcggggaggcaaatcagacaaacaagaagagtcctcgcgagatgcgtcatccctctaccctggaacagaaactatgggcttgaggacttgtgccggagagtcaaaggattacgccttgcatgtaggcgatgggagtagtgatccggaagtactcctcaatatcgagaatcagcggcgtgggcaagaactgtcggcaacgcgacaggctcacgacctctcacccgctgctgaatcatcttctaccttttcattctctggaagagattcctctttcacagaggtcccacggagtcccaagcacgcccattctagcagcttacagcaggccgcttccagatctccctccttcggcgatccacaactttctccagaggccaggccttccacaggcaagcccaagcacgaatggtttctccagaaggacagtgagggtgacaccccatctctcattaactggccctctcgagttaaggtgcgggagaagctggtcaaggaagagagtgccaggaactcacctgagctggcctctgagagcgtcacccaaaggcgccaccagcccgcaccggtgcactatgtttcctttcagtccgagcacagcgcgttcgatagggttcctagtaaggcagcaggaagcacacggcagcctatacggggatatgtgcaaccggctgacacagggcataccgccaaattggtaaccccggagacgcccgaaaatgcaagcgaatgtagctgggtggcgtctgcaacacagaatgtgcctaagcccccttccctgaccgtcctggagggcgacgggagagactctcccgtgctgcatgtctgcgagtctaaagccgaagaagaggaaggggaaggagagggcgaagaaaaagaagaggatgtgtgctttactgaggcccttgaacaaagtaagaaaacactgttggcactcgagggggatggcctagtgcggtccccagaagatcccagtcgaaacgaagattttggaaagccggcagtgtctactgtgaccctagagcaccagaaagagcttgagaacgtggcacaaccacctcaggcaccccaccagcctacggaaaggaccggtagatccgaaatggttctatacatccagagcgagccagtgtctcaggatgctaaaccaacaggacataatagagaagcgtccaaaaagaggaaagtacggacacgaagtttgagtgacttcacgggacctccccagttgcaggcactaaagtacaaggatccagcatctcgaagagaactagaattgcccagttcaaaaacagaagggccatacggggagatatccatgctagacactaaggtctccgtcgctcagttaaggtcagccttcttggcctcagccaatgcctgccgcagacccgaactgaagagccgcgttgaacggagcgctgagggccctgggctgcccacaggcgtggagcgggaacggggttctaggaagccacggaggtatttttctcccggtgagtcccgcaagacctcagaaagattccggacccagccgataacaagtgcagagaggaaggaaagtgaccggtgtacctctcattctgaaactcccaccgtggatgacgaggaaaaggtggatgagcgggctaagctaagtgtggccgcaaagaggttactgttccgcgagatggagaagtcttttgatgagcaaaacgtccccaaacggaggagccgcaacaccgcggtcgagcaaaggttgcggcgtctccaggatagaagtttaactcagcccataacaaccgaggaggtggtaattgcggctacagagccaataccagctagctgttccggcggaactcatcccgtcatggccaggcttccgagtcctacagtcgccaggtctgctgtacagcccgctaggcttcaggcttccgcccaccagaaggccttggcaaaggaccaaacgaacgagggtaaggaactcgcagagcagggagagccagatagctctacgttgtctttggctgaaaaactggctttgttcaataaactgtcacagcccgtctctaaagccatcagcactaggaatcggatcgacacgcgtcagcgcagaatgaatgccaggtatcagactcagcccgttacacttggcgaggtggagcaagtgcaatccggaaagctgatcccttttagccccgcagtgaacacctcagtgtcgaccgtagctagtactgtcgctccaatgtatgccggtgatctaagaactaaacctccgttggaccataatgcctcagctaccgattataagttctcaagttctatcgagaatagcgattcccctgtgaggagcattctgaaaagccaagcctggcagcctctcgtcgagggatctgagaataaaggcatgctgcgggagtatggcgaaacagagtcaaagagggccctgaccggccgagattccggcatggagaagtacggatcctttgaagaagcagaagcatcttaccccatactgaaccgagcccgagaaggagatagtcataaggaatctaagtacgccgtcccaaggcggggtagtcttgaacgagcaaacccaccgatcacgcatctgggcgacgaacctaaggagttcagtatggccaagatgaatgcccagggaaacttggatctgcgggatcgtttgccatttgaggagaaagttgaagtcgaaaacgtgatgaagaggaagttctcgctacgtgctgcagagttcggtgagcctaccagtgaacagaccggcacagctgccggaaaaaccatagcccagaccaccgctcctgtcagctggaaacctcaggattccagcgagcagccccaagagaaattgtgcaaaaatccatgtgctatgttcgccgcaggagaaatcaagacaccgaccggcgaaggcctactggactcacccagcaaaactatgtcaatcaaagagaggcttgctctgctgaaaaaatcaggagaagaggattggaggaatagactgtctcgccgacaggaaggagggaaagctcctgcaagctcgctgcacactcaagaggccggacggtcccttatcaagaagagggtcactgagagtcgggagtcacagatgactattgaagaacgtaaacaacttatcaccgtgagggaggaggcctggaagactaggggacgaggggctgccaacgatagtacacaatttactgtggctggcagaatggttaaaaagggtttggcatctccgacagcaatcaccccagtggcgagcccgatctgcggaaaaacaaggggcacgactcctgttagcaaacctctggaggacattgaagcaagacctgatatgcagctggagtccgatctgaagctcgatcggcttgagactttcctgaggaggttgaataacaaggtcggcggtatgcacgaaacagtgctcactgtgaccggtaagagcgtcaaggaagtgatgaagccggatgatgatgagacttttgctaagttctacagatcagtggactacaatatgcccagatcgccagtggagatggacgaggatttcgatgtcatctttgatccctacgctcctaagttgaccagttccgtcgccgaacataaaagggccgtaagacccaagcggcgagtgcaagcaagcaaaaaccctttaaagatgttagccgcacgggaggacctcctacaggagtacactgaacagaggctgaatgtggccttcatggaatctaaaaggatgaaggtggagaagatgagctccaactcaaacttcagcgaggtgactctggctggcctggctagtaaagaaaatttctcaaatgtgagcctgaggagtgtgaatctgactgagcagaattccaacaatagcgcagtgccgtacaaaaggctcatgctgctgcagatcaagggacggagacacgtgcagacaaggctggtggagcctcgggcaagcgccctcaattcaggggattgtttcctgctgttgagcccccattgttgtttcttatgggtgggcgagttcgccaacgtgatcgagaaggctaaagcatcggagctggctaccttaattcagactaagcgcgagttaggttgtagagccacctacattcagactattgaagagggtattaatacacacactcacgccgctaaagatttttggaagctccttggcggtcagactagctaccagtctgcaggggacccgaaggaagacgaactctacgaagcagccatcatcgagaccaattgtatctacaggttgatggacgataaacttgtgcctgacgatgattactggggcaagataccaaaatgcagcttgctgcaacctaaagaggtgctggtgttcgatttcgggagcgaggtctacgtgtggcatggcaaggaagtaacattagctcaaaggaaaatcgccttccaactggcgaaacacctttggaacgggacttttgactatgagaactgtgacattaatccgttggatcccggtgagtgcaacccccttatcccgaggaaagggcaggggcgtcccgattgggccatatttggtcgcctcacagagcataacgagaccatcctcttcaaggaaaaatttctagattggaccgagttaaagcgctcaaatgagaagaaccctggggaattggcccaacataaggaagaccccaggactgatgttaaggcttatgacgttacacggatggtctctatgccacagacaaccgcaggcacaatcttggatggagtgaatgtgggaaggggatatggactggtagagggtcacgaccgcagacagttcgagatcaccagcgtttctgtggatgtgtggcatattctggagtttgactattcacggctgcccaaacagtcaatcggccagtttcacgagggggatgcctatgttgttaaatggaaatttatggtgagtactgcggtgggatctagacaaaagggagagcacagcgtgagggccgcaggaaaggaaaagtgtgtgtacttcttctggcaaggcagacacagcactgtgagcgaaaaggggacctcagccctcatgacagttgagctggacgaggagcgcggtgcccaagtgcaagttctacaagggaaggaaccgccatgttttctgcagtgtttccaggggggtatggtggtccactccggccgaagggaggaggaggaggagaatgtgcagtcagagtggcgcttgtactgtgtacgtggcgaagtgcctgtcgaaggtaacctcctggaagttgcatgtcactgctctagcttaagatcacgaacatccatggtggttctgaacgtgaataaggcgttaatatatttgtggcacggctgcaaggcccaagcccacaccaaagaagtcggacggacagctgccaataagatcaaagagcaatgccccctggaagcagggctgcactcctcaagcaaggtgactatccatgagtgcgacgagggttccgagcctcttggattctgggatgccctcggccgtcgcgaccgcaaagcttatgattgtatgttacaggacccaggcagcttcaactttgcacctcgactgttcattctctcatctagttctggcgatttcgctgccacagagttcgtgtaccctgcacgcgcacctagcgtagtcagttcaatgccctttctacaggaggatctatatagtgcacctcagcctgcccttttcctggtagacaaccaccacgaagtatatttatggcagggatggtggccaattgagaataaaattactggctccgcgcgaatcagatgggcttcagatcgtaagtcagccatggaaactgtcttacagtactgtaaagggaagaacttgaaaaagcccgcacctaagtcttacttgattcacgccggacttgaacccctgacatttacaaacatgttccctagctgggaacaccgcgaagacatcgccgagatcacggaaatggacacagaggtgtctaatcagattaccctggtggaggatgtgctggcgaaactgtgtaaaacaatctacccgctcgcagacctgctcgcccgaccccttcctgaaggagtagaccccctgaagcttgaaatttatctcactgacgaagatttcgagttcgctctggatatgacccgtgacgagtataatgccttgccagcatggaaacaggtgaaccttaaaaaggctaagggcctattcta

SEQ ID NO: 209390 - DNA, 7586 bp, Artificial Sequence
  derived and/or modified sequence
cactgctctgactgcgtcctccccaggctgaagtgtcctcaggtttcatgtggatttgcccagtaatggatggctccaccgaggccaggttggggaagttcagcctcgaggacactaggggacgaaaaacttcaaaaagaagactctttttattaatattttggcgttctttttggagaggaacttttgggatgtagcctttacctgtttcctgaatttgacatccaaaaagccttttggaaaacaccattctaaatttatcctgttctgaatcatcatcgcttctgatagatgcagttgcttgctgacatcgtgatctttgattttgtacaacgctatttgggctaacttttgggattttactttgtgcttagaatttgaaagtagtattcattggaaagagactccaagaaaatactcgaagacatcaaaagctggattcgagggtataacgtgttttgttttgttttttaaattagaaaaataaggaattgcagtgtgattttctttccccctttaacttagaggaacgaggattatacagaaatttgaaatttcaacaagaaaaacttaagcttccttggattcccacgtcaaaggaaagtttcaagctttcagaaggagttctcactcgaagataaagaacagctcgctaaccacgaaagaggaatcgatgctcagcttttagttgcacttcctaaagttgcagaattaagacaaatctttgaaccaaagaagaaagaattcttagaaatgaaaagaaaagaaagaattgccaggcgcctggaagggattgaaaatgacactcagcccatcctcttgcagagctgcacaggattggtgactcaccgcctgctggaggaagacacccctcgatacatgagagccagcgaccctgccagcccccacatcggccgatcaaatgaagaggaggaaacttctgattcttctctagaaaagcaaactcgatccaaatactgcacagaaacctccggtgtccacggtgactcaccctatggttcgggtaccatggacacccacagtctggagtccaaagccgaaagaattgcaaggtacaaagcagaaagaaggcgacagctggcagagaagtatgggctgactctggatcccgaggccgactccgagtatttatcccgctataccaagtccaggaaggagcctgatgctgtcgagaagcggggaggaaaaagtgacaaacaggaagagtcaagcagagatgctagttctctgtaccccgggaccgagacgatggggctcaggacctgtgccggtgaatccaaggactatgccctccatgtgggtgacggctcttccgacccggaggtgctgctgaacatagaaaaccaaagacgaggtcaagagctgagtgccacccggcaggcccatgacctgtccccagcagccgagagttcctcgaccttctctttctctgggcgagactcctccttcactgaagtgccacggtcccccaagcacgcccacagctcctccctgcagcaggcagcctcccggagcccctcctttggtgacccacagctatcccctgaggcccgacccagtacagggaaacccaaacatgagtggtttctccagaaagattccgaaggggacacaccttcacttatcaactggccttccagagttaaagttagagaaaaattggtgaaagaggaaagtgctcgaaacagccctgaactcgcctcagagtccgtaactcagaggagacaccagccagcgccagtccattacgtgtcatttcagtctgagcactcagcctttgatagggtccccagcaaggcagcaggctctacacgacagccaatccgtggctatgtccaacccgcagataccggtcacaccgccaagctagtgacgccagaaaccccagaaaatgcatctgagtgtagctgggtagcatcagccacccagaatgtccccaaacctcccagcttgacggttctagaaggtgacggaagggatagcccagttctccatgtctgcgagtcaaaagcagaagaagaagaaggggaaggagaaggagaagaaaaagaagaagatgtgtgcttcactgaagctctcgagcaaagcaagaaaaccctactggctttggagggtgatgggctagtgagaagcccagaagatccctctagaaatgaggactttggtaagcctgctgtgagcacagtcaccttagagcatcagaaggaactggaaaacgtggcacaaccccctcaagctccgcaccagcccactgagaggacaggcaggagcgagatggttctctacattcaaagtgagcctgtgtcccaagacgccaaaccaactggtcacaacagggaagcctcgaaaaagcgcaaggtccgtacccgctctctgtcagatttcacaggcccccctcagctccaggccttgaagtataaggacccagcttccaggagagagctggagctgcccagctccaagaccgaagggccttatggggagatcagcatgctggacacaaaagtctctgtcgcccagctccgaagtgcgttcctggcatctgccaacgcctgcaggagacctgaactcaaatcacgggtggagaggtcggctgaaggacctggcttgcccaccggtgtggaacgggagagagggtcccggaaaccaagacgctatttttctcctggtgaaagtagaaaaacttccgagagatttagaacccaacctataacttcagcagaacgaaaggaatcggataggtgcacttcacattcagaaacgccaactgtcgatgatgaagaaaaggtggatgaacgagccaagctgagcgtcgccgccaagaggttgcttttcagggagatggaaaaatcttttgatgaacaaaatgttccaaagcgacgctcaagaaacacagctgtggagcagaggctacgccgtctgcaggacaggtccctcacccagcccatcaccactgaagaggtggtcatcgcagccactgaacctatccccgcttcgtgttctgggggcacccaccctgtaatggcgagacttcctagccccactgtagctaggagcgctgtgcagcctgccagattgcaggcctctgctcaccaaaaggccttagccaaggaccagacaaatgagggcaaagagcttgctgagcaaggagaacctgattcctccactctaagcttggccgaaaagttggccttgtttaacaaattgtcccagccagtctcaaaagcgatttctacccggaacagaatagacacgagacagaggagaatgaacgctcgctatcaaactcagccagtcacactgggagaggtggagcaggtgcagagtggaaagctcattcctttctcacctgccgtgaacacatcagtgtctaccgtagcatccacggttgctccaatgtatgccggagatcttcgcacaaagccacctcttgaccacaatgcaagtgccactgactataagttttcttcttcaatagaaaattcggactctccagttagaagcattctgaaatcgcaagcttggcagcctttggtagagggtagcgagaacaagggaatgttgagagaatatggagagacagaaagcaagagagctttgacaggtcgagacagtgggatggagaagtatgggtcctttgaggaagcagaagcatcctaccccatcctgaaccgagccagggaaggagacagccataaggaatctaaatatgctgttcccagaagaggaagcctggaacgggcgaaccctcccatcacccacctcggggatgaaccgaaggaattttccatggctaaaatgaatgcacaaggaaacttggacttgagggacaggctgccctttgaagagaaggtggaggtggagaatgttatgaaaaggaagttttcactaagagcggcagagttcggggagcccacttccgagcagacggggacagctgctgggaaaactattgctcaaaccacagcccccgtgtcctggaagccccaggattcttcggaacagccacaggagaagctctgcaagaatccatgtgcgatgtttgctgctggagagatcaaaacgccgacaggggagggccttcttgactcacccagcaaaaccatgtctattaaagaaagattggcactgttgaagaaaagcggggaggaagattggagaaacagactcagcaggaggcaggagggcggcaaggcgccggccagcagcctgcacacccaggaagcagggcggtccctcatcaagaagcgggtcacagaaagtcgagagagccaaatgacgattgaggagaggaagcagctcatcactgtgagagaggaggcctggaagacgagaggcagaggagcggccaacgactcgacccagttcactgtggctggcaggatggtgaagaaaggtttggcgtcacctactgccataaccccagtagcctcacccatttgcggtaaaacaagaggcaccacacccgtttccaaacccctggaagatatcgaagccagaccagatatgcagttagaatcggacctgaagttggacaggctggaaacctttctaagaaggctgaataacaaagttggcgggatgcacgaaacggtgctcactgtcaccggcaaatctgtgaaggaggtgatgaagccagatgatgatgaaacctttgccaaattttaccgcagcgtggattataatatgccaagaagtcctgtggagatggatgaggacttcgatgtcattttcgatccttatgcacccaaattgacgtcttccgtggccgagcacaagcgggcagttaggcccaagcgccgggttcaggcctccaaaaaccccctgaaaatgctggcggcaagagaagatctccttcaggaatacactgagcagagattaaacgttgccttcatggagtcaaagcggatgaaagtagaaaagatgtcttccaactccaacttctcagaagtcaccctggcgggtttagccagtaaagaaaacttcagcaacgtcagcctgcggagcgtcaacctgacggaacagaactctaacaacagcgccgtgccctacaagaggctgatgctgttgcagattaaaggaagaagacatgtgcagaccaggctggtggaacctcgagcttcggcgctcaacagtggggactgcttcctcctgctctctccccactgctgcttcctgtgggtaggagagtttgcaaacgtcatagaaaaggcgaaggcctcagaacttgcaactttaattcagacaaagagggaacttggttgtagagctacttatatccaaaccattgaagaaggaattaatacacacactcatgcagccaaagacttctggaagcttctgggtggccaaaccagttaccaatctgctggagacccaaaagaagatgaactctatgaagcagccataatagaaactaactgcatttaccgtctcatggatgacaaacttgttcctgatgacgactactgggggaaaattccgaagtgctcccttctgcaacccaaagaggtactggtgtttgattttggtagtgaagtttacgtatggcatgggaaagaagtcacattagcacaacgaaaaatagcatttcagctggcaaagcacttatggaatggaacctttgactatgagaactgtgacatcaatcccctggatcctggagaatgcaatccgcttatccccagaaaaggacaggggcggcccgactgggcgatatttgggagacttactgaacacaatgagacgattttgttcaaagagaagtttctggattggacggaactgaagagatcgaatgagaagaaccccggggaacttgcccagcacaaggaagaccccaggactgatgtcaaggcatacgatgtgacacggatggtgtccatgccccagacgacagcaggcaccatcctggacggagtgaacgtcggccgtggctatggcctggtggaaggacacgacaggaggcagtttgagatcaccagcgtttccgtggatgtctggcacatcctggaattcgactatagcaggctccccaaacaaagcatcgggcagttccatgagggggatgcctatgtggtcaagtggaagttcatggtgagcacggcagtgggaagtcgccagaagggagagcactcggtgagggcagccggcaaagagaagtgcgtctacttcttctggcaaggccggcactccaccgtgagtgagaagggcacgtcggcgctgatgacggtggagctggacgaggaaaggggggcccaggtccaggttctccagggaaaggagcccccctgtttcctgcagtgtttccagggggggatggtggtgcactcggggaggcgggaagaggaagaagaaaatgtgcaaagtgagtggcggctgtactgcgtgcgtggagaggtgcccgtggaagggaatttgctggaagtggcctgtcactgtagcagcctgaggtccagaacttccatggtggtgcttaacgtcaacaaggccctcatctacctgtggcacggatgcaaagcccaggcccacacgaaggaggtcggaaggaccgctgcgaacaagatcaaggaacaatgtcccctggaagcaggactgcatagtagcagcaaagtcacaatacacgagtgtgatgaaggctccgagccactcggattctgggatgccttaggaaggagagacaggaaagcctacgattgcatgcttcaagatcctggaagttttaacttcgcgccccgcctgttcatcctcagcagctcctctggggattttgcagccacagagtttgtgtaccctgcccgagccccctctgtggtcagttccatgcccttcctgcaggaagatctgtacagcgcgccccagccagcacttttccttgttgacaatcaccacgaggtgtacctctggcaaggctggtggcccatcgagaacaagatcactggttccgcccgcatccgctgggcctccgaccggaagagtgcgatggagactgtgctccagtactgcaaaggaaaaaatctcaagaaaccagcccccaagtcttaccttatccacgctggtctggagcccctgacattcaccaatatgtttcccagctgggagcacagagaggacatcgctgagatcacagagatggacacggaagtttccaatcagatcaccctcgtggaagacgtcttagccaagctctgtaaaaccatttacccgctggccgacctcctggccaggccactcccggagggggtcgatcctctgaagcttgagatctatctcaccgacgaagacttcgagtttgcactagacatgacgagggatgaatacaacgccctgcccgcctggaagcaggtgaacctgaagaaagcaaaaggcctgttctgagtggggagacgccagaggagcctcacggtcacgtccaacaacaccactgcaccagggaaatggatatatatttttggactggtgtttttcacaaagtatttttcaatcagagttttcagaacctgacattgttaaagatactgcttgtcccggagttgtgtattttgtaaatgttcaagggaactgtt

SEQ ID NO: 209391 - DNA, 7994 bp, Artificial Sequence
  derived and/or modified sequence
tcggcgggaagcggcgatcctgccaccgggaggtgtggaagagccgggtagattctggctacattggagattggttgctttctaaaactgaaggagaagcccatgaagagatggtggattctcactgagttttgactagcggaagaaaagagagagttcaagtggatggccttgaggacttgaaaagctgagatatgatgattttgaagtcatttcacatcgaagccatgatttaaatatcggcgttaagatttcaacaagaaaaacttaagcttccttggattcccacgtcaaaggaaagtttcaagctttcagaaggagttctcactcgaagataaagaacagctcgctaaccacgaaagaggaatcgatgctcagcttttagttgcacttcctaaagttgcagaattaagacaaatctttgaaccaaagaagaaagaattcttagaaatgaaaagaaaagaaagaattgccaggcgcctggaagggattgaaaatgacactcagcccatcctcttgcagagctgcacaggattggtgactcaccgcctgctggaggaagacacccctcgatacatgagagccagcgaccctgccagcccccacatcggccgatcaaatgaagaggaggaaacttctgattcttctctagaaaagcaaactcgatccaaatactgcacagaaacctccggtgtccacggtgactcaccctatggttcgggtaccatggacacccacagtctggagtccaaagccgaaagaattgcaaggtacaaagcagaaagaaggcgacagctggcagagaagtatgggctgactctggatcccgaggccgactccgagtatttatcccgctataccaagtccaggaaggagcctgatgctgtcgagaagcggggaggaaaaagtgacaaacaggaagagtcaagcagagatgctagttctctgtaccccgggaccgagacgatggggctcaggacctgtgccggtgaatccaaggactatgccctccatgtgggtgacggctcttccgacccggaggtgctgctgaacatagaaaaccaaagacgaggtcaagagctgagtgccacccggcaggcccatgacctgtccccagcagccgagagttcctcgaccttctctttctctgggcgagactcctccttcactgaagtgccacggtcccccaagcacgcccacagctcctccctgcagcaggcagcctcccggagcccctcctttggtgacccacagctatcccctgaggcccgacccagtacagggaaacccaaacatgagtggtttctccagaaagattccgaaggggacacaccttcacttatcaactggccttccagagttaaagttagagaaaaattggtgaaagaggaaagtgctcgaaacagccctgaactcgcctcagagtccgtaactcagaggagacaccagccagcgccagtccattacgtgtcatttcagtctgagcactcagcctttgatagggtccccagcaaggcagcaggctctacacgacagccaatccgtggctatgtccaacccgcagataccggtcacaccgccaagctagtgacgccagaaaccccagaaaatgcatctgagtgtagctgggtagcatcagccacccagaatgtccccaaacctcccagcttgacggttctagaaggtgacggaagggatagcccagttctccatgtctgcgagtcaaaagcagaagaagaagaaggggaaggagaaggagaagaaaaagaagaagatgtgtgcttcactgaagctctcgagcaaagcaagaaaaccctactggctttggagggtgatgggctagtgagaagcccagaagatccctctagaaatgaggactttggtaagcctgctgtgagcacagtcaccttagagcatcagaaggaactggaaaacgtggcacaaccccctcaagctccgcaccagcccactgagaggacaggcaggagcgagatggttctctacattcaaagtgagcctgtgtcccaagacgccaaaccaactggtcacaacagggaagcctcgaaaaagcgcaaggtccgtacccgctctctgtcagatttcacaggcccccctcagctccaggccttgaagtataaggacccagcttccaggagagagctggagctgcccagctccaagaccgaagggccttatggggagatcagcatgctggacacaaaagtctctgtcgcccagctccgaagtgcgttcctggcatctgccaacgcctgcaggagacctgaactcaaatcacgggtggagaggtcggctgaaggacctggcttgcccaccggtgtggaacgggagagagggtcccggaaaccaagacgctatttttctcctggtgaaagtagaaaaacttccgagagatttagaacccaacctataacttcagcagaacgaaaggaatcggataggtgcacttcacattcagaaacgccaactgtcgatgatgaagaaaaggtggatgaacgagccaagctgagcgtcgccgccaagaggttgcttttcagggagatggaaaaatcttttgatgaacaaaatgttccaaagcgacgctcaagaaacacagctgtggagcagaggctacgccgtctgcaggacaggtccctcacccagcccatcaccactgaagaggtggtcatcgcagccactgaacctatccccgcttcgtgttctgggggcacccaccctgtaatggcgagacttcctagccccactgtagctaggagcgctgtgcagcctgccagattgcaggcctctgctcaccaaaaggccttagccaaggaccagacaaatgagggcaaagagcttgctgagcaaggagaacctgattcctccactctaagcttggccgaaaagttggccttgtttaacaaattgtcccagccagtctcaaaagcgatttctacccggaacagaatagacacgagacagaggagaatgaacgctcgctatcaaactcagccagtcacactgggagaggtggagcaggtgcagagtggaaagctcattcctttctcacctgccgtgaacacatcagtgtctaccgtagcatccacggttgctccaatgtatgccggagatcttcgcacaaagccacctcttgaccacaatgcaagtgccactgactataagttttcttcttcaatagaaaattcggactctccagttagaagcattctgaaatcgcaagcttggcagcctttggtagagggtagcgagaacaagggaatgttgagagaatatggagagacagaaagcaagagagctttgacaggtcgagacagtgggatggagaagtatgggtcctttgaggaagcagaagcatcctaccccatcctgaaccgagccagggaaggagacagccataaggaatctaaatatgctgttcccagaagaggaagcctggaacgggcgaaccctcccatcacccacctcggggatgaaccgaaggaattttccatggctaaaatgaatgcacaaggaaacttggacttgagggacaggctgccctttgaagagaaggtggaggtggagaatgttatgaaaaggaagttttcactaagagcggcagagttcggggagcccacttccgagcagacggggacagctgctgggaaaactattgctcaaaccacagcccccgtgtcctggaagccccaggattcttcggaacagccacaggagaagctctgcaagaatccatgtgcgatgtttgctgctggagagatcaaaacgccgacaggggagggccttcttgactcacccagcaaaaccatgtctattaaagaaagattggcactgttgaagaaaagcggggaggaagattggagaaacagactcagcaggaggcaggagggcggcaaggcgccggccagcagcctgcacacccaggaagcagggcggtccctcatcaagaagcgggtcacagaaagtcgagagagccaaatgacgattgaggagaggaagcagctcatcactgtgagagaggaggcctggaagacgagaggcagaggagcggccaacgactcgacccagttcactgtggctggcaggatggtgaagaaaggtttggcgtcacctactgccataaccccagtagcctcacccatttgcggtaaaacaagaggcaccacacccgtttccaaacccctggaagatatcgaagccagaccagatatgcagttagaatcggacctgaagttggacaggctggaaacctttctaagaaggctgaataacaaagttggcgggatgcacgaaacggtgctcactgtcaccggcaaatctgtgaaggaggtgatgaagccagatgatgatgaaacctttgccaaattttaccgcagcgtggattataatatgccaagaagtcctgtggagatggatgaggacttcgatgtcattttcgatccttatgcacccaaattgacgtcttccgtggccgagcacaagcgggcagttaggcccaagcgccgggttcaggcctccaaaaaccccctgaaaatgctggcggcaagagaagatctccttcaggaatacactgagcagagattaaacgttgccttcatggagtcaaagcggatgaaagtagaaaagatgtcttccaactccaacttctcagaagtcaccctggcgggtttagccagtaaagaaaacttcagcaacgtcagcctgcggagcgtcaacctgacggaacagaactctaacaacagcgccgtgccctacaagaggctgatgctgttgcagattaaaggaagaagacatgtgcagaccaggctggtggaacctcgagcttcggcgctcaacagtggggactgcttcctcctgctctctccccactgctgcttcctgtgggtaggagagtttgcaaacgtcatagaaaaggcgaaggcctcagaacttgcaactttaattcagacaaagagggaacttggttgtagagctacttatatccaaaccattgaagaaggaattaatacacacactcatgcagccaaagacttctggaagcttctgggtggccaaaccagttaccaatctgctggagacccaaaagaagatgaactctatgaagcagccataatagaaactaactgcatttaccgtctcatggatgacaaacttgttcctgatgacgactactgggggaaaattccgaagtgctcccttctgcaacccaaagaggtactggtgtttgattttggtagtgaagtttacgtatggcatgggaaagaagtcacattagcacaacgaaaaatagcatttcagctggcaaagcacttatggaatggaacctttgactatgagaactgtgacatcaatcccctggatcctggagaatgcaatccgcttatccccagaaaaggacaggggcggcccgactgggcgatatttgggagacttactgaacacaatgagacgattttgttcaaagagaagtttctggattggacggaactgaagagatcgaatgagaagaaccccggggaacttgcccagcacaaggaagaccccaggactgatgtcaaggcatacgatgtgacacggatggtgtccatgccccagacgacagcaggcaccatcctggacggagtgaacgtcggccgtggctatggcctggtggaaggacacgacaggaggcagtttgagatcaccagcgtttccgtggatgtctggcacatcctggaattcgactatagcaggctccccaaacaaagcatcgggcagttccatgagggggatgcctatgtggtcaagtggaagttcatggtgagcacggcagtgggaagtcgccagaagggagagcactcggtgagggcagccggcaaagagaagtgcgtctacttcttctggcaaggccggcactccaccgtgagtgagaagggcacgtcggcgctgatgacggtggagctggacgaggaaaggggggcccaggtccaggttctccagggaaaggagcccccctgtttcctgcagtgtttccagggggggatggtggtgcactcggggaggcgggaagaggaagaagaaaatgtgcaaagtgagtggcggctgtactgcgtgcgtggagaggtgcccgtggaagggaatttgctggaagtggcctgtcactgtagcagcctgaggtccagaacttccatggtggtgcttaacgtcaacaaggccctcatctacctgtggcacggatgcaaagcccaggcccacacgaaggaggtcggaaggaccgctgcgaacaagatcaaggaacaatgtcccctggaagcaggactgcatagtagcagcaaagtcacaatacacgagtgtgatgaaggctccgagccactcggattctgggatgccttaggaaggagagacaggaaagcctacgattgcatgcttcaagatcctggaagttttaacttcgcgccccgcctgttcatcctcagcagctcctctggggattttgcagccacagagtttgtgtaccctgcccgagccccctctgtggtcagttccatgcccttcctgcaggaagatctgtacagcgcgccccagccagcacttttccttgttgacaatcaccacgaggtgtacctctggcaaggctggtggcccatcgagaacaagatcactggttccgcccgcatccgctgggcctccgaccggaagagtgcgatggagactgtgctccagtactgcaaaggaaaaaatctcaagaaaccagcccccaagtcttaccttatccacgctggtctggagcccctgacattcaccaatatgtttcccagctgggagcacagagaggacatcgctgagatcacagagatggacacggaagtttccaatcagatcaccctcgtggaagacgtcttagccaagctctgtaaaaccatttacccgctggccgacctcctggccaggccactcccggagggggtcgatcctctgaagcttgagatctatctcaccgacgaagacttcgagtttgcactagacatgacgagggatgaatacaacgccctgcccgcctggaagcaggtgaacctgaagaaagcaaaaggcctgttctgagtggggagacgccagaggagcctcacggtcacgtccaacaacaccactgcaccagggaaatggatatatatttttggactggtgtttttcacaaagtatttttcaatcagagttttcagaacctgacattgttaaagatactgcttgtcccggagttgtgtattttgtaaatgttcaagggaactgtttggaaacttctttccaccattcaggaggttatcagaattaataaaagtatctgttatgtgcacttaagccgcagctgctatagatagcactgccttcttgttccagctaggcaatgccttttttttttttttttgaagcagttctctttataaagtgttattttgatagtttgtggattctaaaatatatatatatttatataaacaccatataagtcaaatatgtatttaacaaagcaatatgtattcattcactttcaagatttgttttggtgtcaaaataacatgaaaaggtagatggagttgcttctgttgaattagctctgccaccaatatgtatcttcatacacgtttggaaatgtttcctgcagcattaggtatgacttgttctgagtactgcttccggtgctaaaatgaacaaagaatttgtacttaatggcatggactctggagaatctatgcgaatcaacctttctaccttaatatctccccaaaaatgtatagtgccttgtttttatgtacagtttatatacagaaaagtttgctctgcatttttgatgatggtttggaacattatctacaattttactctcaaatagtcaaaataaaaacatctcaatttctaataccggttgtaaacagtacacatgtcattttgtgatataggactcccaaataaaagtatcagaataaacacaacaattaactggt

SEQ ID NO: 209392 - DNA, 6192 bp, Artificial Sequence
  derived and/or modified sequence
cactgctctgactgcgtcctccccaggctgaagtgtcctcaggtttcatgtggatttgcccagtaatggatggctccaccgaggccaggttggggaagttcagcctcgaggacactaggggacgaaaaacttcaaaaagaagactctttttattaatattttggcgttctttttggagaggaacttttgggatgtagcctttacctgtttcctgaatttgacatccaaaaagccttttggaaaacaccattctaaatttatcctgttctgaatcatcatcgcttctgatagatgcagttgcttgctgacatcgtgatctttgattttgtacaacgctatttgggctaacttttgggattttactttgtgcttagaatttgaaagtagtattcattggaaagagactccaagaaaatactcgaagacatcaaaagctggattcgagggtataacgtgttttgttttgttttttaaattagaaaaataaggaattgcagtgtgattttctttccccctttaacttagaggaacgaggattatacagaaatttgaaatttcaacaagaaaaacttaagcttccttggattcccacgtcaaaggaaagtttcaagctttcagaaggagttctcactcgaagataaagaacagctcgctaaccacgaaagaggaatcgatgctcagcttttagttgcacttcctaaagttgcagaattaagacaaatctttgaaccaaagaagaaagaattcttagaaatgaaaagaaaagaaagaattgccaggcgcctggaagggattgaaaatgacactcagcccatcctcttgcagagctgcacaggattggtgactcaccgcctgctggaggaagacacccctcgatacatgagagccagcgaccctgccagcccccacatcggccgatcaaatgaagaggaggaaacttctgattcttctctagaaaagcaaactcgatccaaatactgcacagaaacctccggtgtccacggtgactcaccctatggttcgggtaccatggacacccacagtctggagtccaaagccgaaagaattgcaaggtacaaagcagaaagaaggcgacagctggcagagaagtatgggctgactctggatcccgaggccgactccgagtatttatcccgctataccaagtccaggaaggagcctgatgctgtcgagaagcggggaggaaaaagtgacaaacaggaagagtcaagcagagatgctagttctctgtaccccgggaccgagacgatggggctcaggacctgtgccggtgaatccaaggactatgccctccatgtgggtgacggctcttccgacccggaggtgctgctgaacatagaaaaccaaagacgaggtcaagagctgagtgccacccggcaggcccatgacctgtccccagcagccgagagttcctcgaccttctctttctctgggcgagactcctccttcactgaagtgccacggtcccccaagcacgcccacagctcctccctgcagcaggcagcctcccggagcccctcctttggtgacccacagctatcccctgaggcccgacccagtacagggaaacccaaacatgagtggtttctccagaaagattccgaaggggacacaccttcacttatcaactggccttccagagttaaagttagagaaaaattggtgaaagaggaaagtgctcgaaacagccctgaactcgcctcagagtccgtaactcagaggagacaccagccagcgccagtccattacgtgtcatttcagtctgagcactcagcctttgatagggtccccagcaaggcagcaggctctacacgacagccaatccgtggctatgtccaacccgcagataccggtcacaccgccaagctagtgacgccagaaaccccagaaaatgcatctgagtgtagctgggtagcatcagccacccagaatgtccccaaacctcccagcttgacggttctagaaggtgacggaagggatagcccagttctccatgtctgcgagtcaaaagcagaagaagaagaaggggaaggagaaggagaagaaaaagaagaagatgtgtgcttcactgaagctctcgagcaaagcaagaaaaccctactggctttggagggtgatgggctagtgagaagcccagaagatccctctagaaatgaggactttggtaagcctgctgtgagcacagtcaccttagagcatcagaaggaactggaaaacgtggcacaaccccctcaagctccgcaccagcccactgagaggacaggcaggagcgagatggttctctacattcaaagtgagcctgtgtcccaagacgccaaaccaactggtcacaacagggaagcctcgaaaaagcgcaaggtccgtacccgctctctgtcagatttcacaggcccccctcagctccaggccttgaagtataaggacccagcttccaggagagagctggagctgcccagctccaagaccgaagggccttatggggagatcagcatgctggacacaaaagtctctgtcgcccagctccgaagtgcgttcctggcatctgccaacgcctgcaggagacctgaactcaaatcacgggtggagaggtcggctgaaggacctggcttgcccaccggtgtggaacgggagagagggtcccggaaaccaagacgctatttttctcctggtgaaagtagaaaaacttccgagagatttagaacccaacctataacttcagcagaacgaaaggaatcggataggtgcacttcacattcagaaacgccaactgtcgatgatgaagaaaaggtggatgaacgagccaagctgagcgtcgccgccaagaggttgcttttcagggagatggaaaaatcttttgatgaacaaaatgttccaaagcgacgctcaagaaacacagctgtggagcagaggctacgccgtctgcaggacaggtccctcacccagcccatcaccactgaagaggtggtcatcgcagccactgaacctatccccgcttcgtgttctgggggcacccaccctgtaatggcgagacttcctagccccactgtagctaggagcgctgtgcagcctgccagattgcaggcctctgctcaccaaaaggccttagccaaggaccagacaaatgagggcaaagagcttgctgagcaaggagaacctgattcctccactctaagcttggccgaaaagttggccttgtttaacaaattgtcccagccagtctcaaaagcgatttctacccggaacagaatagacacgagacagaggagaatgaacgctcgctatcaaactcagccagtcacactgggagaggtggagcaggtgcagagtggaaagctcattcctttctcacctgccgtgaacacatcagtgtctaccgtagcatccacggttgctccaatgtatgccggagatcttcgcacaaagccacctcttgaccacaatgcaagtgccactgactataagttttcttcttcaatagaaaattcggactctccagttagaagcattctgaaatcgcaagcttggcagcctttggtagagggtagcgagaacaagggaatgttgagagaatatggagagacagaaagcaagagagctttgacaggtcgagacagtgggatggagaagtatgggtcctttgaggaagcagaagcatcctaccccatcctgaaccgagccagggaaggagacagccataaggaatctaaatatgctgttcccagaagaggaagcctggaacgggcgaaccctcccatcacccacctcggggatgaaccgaaggaattttccatggctaaaatgaatgcacaaggaaacttggacttgagggacaggctgccctttgaagagaaggtggaggtggagaatgttatgaaaaggaagttttcactaagagcggcagagttcggggagcccacttccgagcagacggggacagctgctgggaaaactattgctcaaaccacagcccccgtgtcctggaagccccaggattcttcggaacagccacaggagaagctctgcaagaatccatgtgcgatgtttgctgctggagagatcaaaacgccgacaggggagggccttcttgactcacccagcaaaaccatgtctattaaagaaagattggcactgttgaagaaaagcggggaggaagattggagaaacagactcagcaggaggcaggagggcggcaaggcgccggccagcagcctgcacacccaggaagcagggcggtccctcatcaagaagcgggtcacagaaagtcgagagagccaaatgacgattgaggagaggaagcagctcatcactgtgagagaggaggcctggaagacgagaggcagaggagcggccaacgactcgacccagttcactgtggctggcaggatggtgaagaaaggtttggcgtcacctactgccataaccccagtagcctcacccatttgcggtaaaacaagaggcaccacacccgtttccaaacccctggaagatatcgaagccagaccagatatgcagttagaatcggacctgaagttggacaggctggaaacctttctaagaaggctgaataacaaagttggcgggatgcacgaaacggtgctcactgtcaccggcaaatctgtgaaggaggtgatgaagccagatgatgatgaaacctttgccaaattttaccgcagcgtggattataatatgccaagaagtcctgtggagatggatgaggacttcgatgtcattttcgatccttatgcacccaaattgacgtcttccgtggccgagcacaagcgggcagttaggcccaagcgccgggttcaggcctccaaaaaccccctgaaaatgctggcggcaagagaagatctccttcaggaatacactgagcagagattaaacgttgccttcatggagtcaaagcggatgaaagtagaaaagatgtcttccaactccaacttctcagaagtcaccctggcgggtttagccagtaaagaaaacttcagcaacgtcagcctgcggagcgtcaacctgacggaacagaactctaacaacagcgccgtgccctacaagaggctgatgctgttgcagattaaaggaagaagacatgtgcagaccaggctggtggaacctcgagcttcggcgctcaacagtggggactgcttcctcctgctctctccccactgctgcttcctgtgggtaggagagtttgcaaacgtcatagaaaaggcgaaggcctcagaacttgcaactttaattcagacaaagagggaacttggttgtagagctacttatatccaaaccattgaagaaggaattaatacacacactcatgcagccaaagacttctggaagcttctgggtggccaaaccagttaccaatctgctggagacccaaaagaagatgaactctatgaagcagccataatagaaactaactgcatttaccgtctcatggatgacaaacttgttcctgatgacgactactgggggaaaattccgaagtgctcccttctgcaacccaaagaggtactggtgtttgattttggtagtgaagtttacgtatggcatgggaaagaagtcacattagcacaacgaaaaatagcatttcagctggcaaagcacttatggaatggaacctttgactatgagaactgtgacatcaatcccctggatcctggagaatgcaatccgcttatccccagaaaaggacaggggcggcccgactgggcgatatttgggagacttactgaacacaatgagacgattttgttcaaagagaagtttctggattggacggaactgaagagatcgaatgagaagaaccccggggaacttgcccagcacaaggaagaccccaggactgatgtcaaggcatacgatgtgacacggatggtgtccatgccccagacgacagcaggcaccatcctggacggagtgaacgtcggccgtggctatggcctggtggaaggacacgacaggaggcagtttgagatcaccagcgtttccgtggatgtctggcacatcctggaattcgactatagcaggctccccaaacaaagcatcgggcagttccatgagggggatgcctatgtggtcaagtggaagttcatggtgagcacggcagtactgcgtgcgtggagaggtgcccgtggaagggaatttgctggaagtggcctgtcactgtag

SEQ ID NO: 209393 - protein, 540 aa, Artificial Sequence
  derived and/or modified sequence
MLQGLLPVSLLLSVAVSAIKELPGVKKYEVVYPIRLHPLHKREAKEPEQQEQFETELKYKMTINGKIAVLYLKKNKNLLAPGYTETYYNSTGKEITTSPQIMDDCYYQGHILNEKVSDASISTCRGLRGYFSQGDQRYFIEPLSPIHRDGQEHALFKYNPDEKNYDSTCGMDGVLWAHDLQQNIALPATKLVKLKDRKVQEHEKYIEYYLVLDNGEFKRYNENQDEIRKRVFEMANYVNMLYKKLNTHVALVGMEIWTDKDKIKITPNASFTLENFSKWRGSVLSRRKRHDIAQLITATELAGTTVGLAFMSTMCSPYSVGVVQDHSDNLLRVAGTMAHEMGHNFGMFHDDYSCKCPSTICVMDKALSFYIPTDFSSCSRLSYDKFFEDKLSNCLFNAPLPTDIISTPICGNQLVEMGEDCDCGTSEECTNICCDAKTCKIKATFQCALGECCEKCQFKKAGMVCRPAKDECDLPEMCNGKSGNCPDDRFQVNGFPCHHGKGHCLMGTCPTLQEQCTELWGPGRRTNPFPCACAKENHFR

SEQ ID NO: 209394 - protein, 307 aa, Artificial Sequence
  derived and/or modified sequence
MANYVNMLYKKLNTHVALVGMEIWTDKDKIKITPNASFTLENFSKWRGSVLSRRKRHDIAQLITATELAGTTVGLAFMSTMCSPYSVGVVQDHSDNLLRVAGTMAHEMGHNFGMFHDDYSCKCPSTICVMDKALSFYIPTDFSSCSRLSYDKFFEDKLSNCLFNAPLPTDIISTPICGNQLVEMGEDCDCGTSEECTNICCDAKTCKIKATFQCALGECCEKCQFKKAGMVCRPAKDECDLPEMCNGKSGNCPDDRFQVNGFPCHHGKGHCLMGTCPTLQEQCTELWGPGRRTNPFPCACAKENHFR

SEQ ID NO: 209395 - DNA, 1623 bp, Artificial Sequence
  derived and/or modified sequence
atgctccagggtctgctgccggtgtccctgctgctgagtgtggccgtgagtgccatcaaagaattgccaggtgttaagaagtatgaggttgtttatcccatccggctccacccactccacaagcgggaggccaaggagcccgaacagcaggaacaatttgagaccgagttaaaatacaaaatgaccataaacggtaagattgctgtgctgtatctgaagaaaaataaaaacctattagctcctggctacaccgagacttactacaacagtaccggcaaagagattacgacgtctccgcagatcatggatgattgttactatcaaggtcacattttgaacgagaaagtttctgacgcgagcatctccacctgccgtgggctgcgcggctatttcagccagggtgatcagcggtattttatagagccacttagcccaattcatagagatggacaggagcatgcccttttcaagtataaccccgacgagaagaattatgatagcacatgtggcatggatggagtcctttgggcacacgatctgcagcagaatattgccctccctgccactaagctcgttaaactcaaagaccggaaagtccaggaacatgagaaatatattgagtattatctggtgcttgacaacggcgagttcaagcggtacaatgaaaaccaggatgagatccggaaacgcgtgttcgaaatggcaaattacgtgaacatgttatataaaaaactcaacacgcacgttgcccttgttggaatggagatctggaccgacaaagacaagatcaaaataacccctaacgcgtcctttacactggagaactttagtaagtggcggggatcagttttaagtcgtcggaaacgacatgacatcgctcagctaataacagctacggagctggctgggacaactgttggccttgctttcatgtccacaatgtgcagtccgtatagcgtgggggtggtccaagaccactccgataacctgctacgtgtggcaggcacgatggcccacgagatggggcacaattttgggatgttccatgatgactacagctgcaagtgtccctcaaccatctgtgtgatggacaaagcgctcagtttctacatcccaaccgatttcagcagctgcagccgtttgtcctacgacaaattttttgaggacaagctgagcaactgcctgttcaacgctcccctgcctacagacatcatctcaacacccatttgtgggaatcagctggtggaaatgggtgaggactgtgactgcggtactagtgaagagtgcacgaacatatgctgcgatgccaaaacttgtaaaatcaaggccacctttcaatgcgctctcggagagtgttgcgagaaatgtcagttcaagaaggccggtatggtttgccgcccagccaaagacgaatgtgacttacctgaaatgtgtaatgggaaatccggaaactgccccgatgataggttccaggttaatggctttccctgccaccatggcaaagggcactgccttatggggacctgcccaactctacaggaacagtgcaccgagttgtgggggcccggacgtagaacaaatccctttccatgcgcatgcgccaaggaaaaccatttcaggtag

SEQ ID NO: 209396 - DNA, 924 bp, Artificial Sequence
  derived and/or modified sequence
atggccaactatgtaaatatgctctacaagaaactgaacacccacgtggctttggtggggatggagatttggacagacaaggataaaattaagatcactcctaatgcttcctttactcttgaaaacttttccaagtggcgggggtccgtcctgtcacggcgtaagcgccacgacattgcacagcttattaccgccacagaactggcagggacaaccgtagggctggctttcatgtccactatgtgttctccctactccgtgggagtcgtccaagaccactcagataacctgttgagggtcgcaggcactatggcccacgagatgggacacaatttcgggatgtttcacgacgattattcctgcaagtgcccgtctacaatttgcgtaatggacaaagcactctccttctatatcccaacagatttcagctcttgctctcgactgtcctatgacaaattttttgaggacaagttgagtaattgcctcttcaacgcgcctctgcccactgatatcatttctaccccaatttgtggaaatcagctcgtggaaatgggagaggactgcgactgcgggacctccgaagagtgtaccaacatctgttgtgacgccaaaacctgtaagatcaaggctaccttccagtgtgccctgggtgagtgctgcgagaagtgccaattcaaaaaagctggcatggtgtgtcggcccgcgaaggacgagtgcgacctccctgagatgtgcaatgggaagtccggcaattgtcccgatgatagatttcaggtaaacggctttccttgccatcacggcaaggggcactgtcttatgggtacatgcccaacactccaggaacagtgtactgagttatgggggcctggtcggcggactaatccgtttccatgcgcctgtgctaaggagaatcattttcgatag

SEQ ID NO: 209397 - DNA, 1623 bp, Artificial Sequence
  derived and/or modified sequence
atgctgcagggcctgctgcctgtgtccctgctgctgtctgtggccgtgtctgccatcaaggagctgcccggggtgaagaagtatgaggtggtgtaccccatccggctgcaccccctgcacaagcgggaggccaaggagcctgagcagcaggagcagtttgaaacagagctgaagtacaagatgaccatcaacgggaagattgctgtgctgtacctgaagaagaacaagaacctgctggcccctggctacacagagacctactacaacagcacaggcaaggagatcaccaccagcccccagatcatggatgactgctactaccagggccacatcctgaatgagaaggtgtctgatgccagcatcagcacctgccggggcctgcggggctacttcagccagggcgaccagcgctacttcatcgagcccctgagccccatccacagagatggccaggagcacgccctcttcaagtacaacccagatgagaagaactatgacagcacctgtggcatggatggagtgctgtgggcccatgacctgcagcagaacatcgccctgcctgccaccaagctggtgaagctgaaggacaggaaggtgcaggagcacgagaagtacatcgagtactacctggtgctggacaacggggagttcaagcgctacaatgaaaaccaggatgagatcaggaagagggtgtttgagatggccaactacgtgaacatgctgtacaagaagctgaacacccacgtggccctggtgggcatggagatctggacagacaaggacaagatcaagatcaccccaaatgccagcttcaccctggagaacttcagcaagtggaggggctctgtgctgagcaggaggaagagacatgacatcgcccagctgatcacagccacagagctggccggcaccaccgtgggcctggccttcatgagcaccatgtgcagcccctacagcgtgggcgtggtgcaggaccacagcgacaacctgctgcgggtggccggcaccatggcccacgagatgggccacaactttggcatgtttcatgatgactacagctgcaagtgccccagcaccatctgtgtgatggacaaggccctgtccttctacatccccacagacttcagcagctgcagccggctgtcctatgacaagttctttgaggacaagctgagcaactgcctcttcaatgcccccctgcccacagacatcatcagcacccccatctgtggcaaccagctggtggagatgggagaggactgtgactgtggcaccagcgaggagtgcaccaacatctgctgtgatgccaagacctgcaagatcaaggccaccttccagtgtgccctgggggagtgctgtgagaagtgccagttcaagaaggccggcatggtgtgcaggcctgccaaggatgaatgtgacctgcctgagatgtgcaatggcaagagcggcaactgcccagatgaccgcttccaggtgaatggcttcccctgccaccacggcaagggccactgcctgatgggcacctgccccaccctgcaggagcagtgcacagagctgtggggccctggccgccgcaccaaccccttcccctgtgcctgtgccaaggagaaccacttcagatag

SEQ ID NO: 209398 - DNA, 924 bp, Artificial Sequence
  derived and/or modified sequence
atggccaactacgtgaacatgctgtacaagaagctgaacacccacgtggccctggtgggcatggagatctggacagacaaggacaagatcaagatcaccccaaatgccagcttcaccctggagaacttcagcaagtggaggggctctgtgctgagcaggaggaagagacatgacatcgcccagctgatcacagccacagagctggccggcaccaccgtgggcctggccttcatgagcaccatgtgcagcccctacagcgtgggcgtggtgcaggaccacagcgacaacctgctgcgggtggccggcaccatggcccacgagatgggccacaactttggcatgtttcatgatgactacagctgcaagtgccccagcaccatctgtgtgatggacaaggccctgtccttctacatccccacagacttcagcagctgcagccggctgtcctatgacaagttctttgaggacaagctgagcaactgcctcttcaatgcccccctgcccacagacatcatcagcacccccatctgtggcaaccagctggtggagatgggagaggactgtgactgtggcaccagtgaagaatgtaccaacatctgctgtgatgccaagacctgcaagatcaaggccaccttccagtgtgccctgggggagtgctgtgagaagtgccagttcaagaaggccggcatggtgtgcaggcctgccaaggatgaatgtgacctgcctgagatgtgcaatggcaagagcggcaactgcccagatgaccgcttccaggtgaatggcttcccctgccaccacggcaagggccactgcctgatgggcacctgccccaccctgcaggagcagtgcacagagctgtggggccctggaagaaggaccaaccccttcccctgtgcctgtgccaaggagaaccacttcagatag

SEQ ID NO: 209399 - DNA, 1623 bp, Artificial Sequence
  derived and/or modified sequence
atgctgcagggcctgctgcccgtgagcctgctgctgagcgtggccgtgtcagctataaaggagctccccggtgtcaagaagtacgaggtcgtttatcccatcagactccaccctctgcacaaacgcgaggccaaagaacccgaacaacaggagcagtttgagaccgaactgaaatacaagatgaccatcaacggaaaaatcgctgtgttgtacttgaagaagaataagaacttgcttgcacctgggtacacagagacctactacaattccacggggaaagaaattaccacaagcccgcagattatggatgactgctactatcagggacatatcctgaacgaaaaagtctcggacgcctctattagcacttgccgcggcctgagagggtacttcagccagggtgatcagcgctatttcatcgagcctctgtcccctatccatcgagacgggcaggaacacgctctcttcaagtacaatccagacgaaaagaactacgacagcacatgcgggatggatggagtgctctgggcacacgacctacaacagaatattgctctcccggcgaccaaacttgtgaagttgaaggataggaaggtccaagagcatgagaaatacattgaatattacttagtacttgacaacggggaattcaaacgctataacgagaaccaagatgaaatccggaagcgggtgtttgaaatggctaattacgttaacatgctgtataagaagctgaacacacacgtggccctggtcggaatggagatctggaccgacaaggacaaaattaagataactcctaacgcctcctttaccctggaaaacttcagcaagtggagaggaagcgtgctttcgagacgcaaaagacacgacatagcacagctgattacggccacagagcttgctggcaccaccgtgggactagcgtttatgagcaccatgtgttctccttattccgtgggggtggtgcaggaccatagcgataatctgctgcgggtcgccggcacaatggctcacgagatgggtcataatttcggtatgttccacgacgattattcctgcaaatgcccatcaacaatctgtgtgatggacaaggccctgtcattctatatccctacggatttctcctcttgttcccgattaagttacgacaaattttttgaagacaagttgtccaattgtctgtttaatgcccccctaccgaccgacatcatctccacacctatttgtgggaatcagttggtggagatgggggaagactgtgactgcggaacaagcgaagagtgcacaaacatctgttgtgacgctaaaacgtgtaagatcaaggctacatttcagtgcgccctgggagaatgctgtgagaagtgtcagtttaaaaaggccggaatggtttgtcgcccagctaaagacgaatgcgatctgcccgaaatgtgtaacggtaagagcggcaattgtccagatgatcgctttcaggtgaatgggttcccctgccaccatggcaaggggcactgcctgatggggacatgtccaaccctgcaggaacaatgcacagagctctggggtcccgggcgacgcacgaatcctttcccctgcgcttgtgctaaggagaaccactttaggtag

SEQ ID NO: 209400 - DNA, 924 bp, Artificial Sequence
  derived and/or modified sequence
atggccaactacgtgaacatgctgtacaagaagctgaacacccacgtggcccttgtcggtatggagatttggacagataaagataagatcaaaattacccccaatgcgagtttcaccctggaaaattttagtaagtggcggggatctgtactgtcccggcgcaagagacacgatatcgctcagctgatcaccgccacagagctggcagggaccaccgtcggcctggcatttatgagtactatgtgctcaccatactcggtgggcgtggtccaggaccatagcgacaacctcctgagagtcgctgggacaatggctcacgagatgggacacaactttggaatgttccatgatgactattcgtgtaaatgtccatcaactatatgcgtgatggacaaggctctgtcattctacattccaaccgactttagcagttgttcaaggctctcttatgataagttcttcgaggacaagctgtcaaactgtttgttcaacgcgcccttgccaacggatataatatccaccccaatctgcggaaaccaattagtggaaatgggggaggattgtgattgtgggacgtctgaggaatgcacaaatatctgttgtgacgccaaaacttgcaagatcaaggcgacattccaatgcgcgttgggggaatgctgcgagaaatgtcagtttaagaaagcaggaatggtctgccggcccgccaaggacgagtgcgatctgcctgagatgtgcaatgggaagagcggaaattgtccagacgaccgattccaggtcaatggatttccatgccatcacggaaagggccactgtctgatggggacgtgcccgacactccaagagcaatgcaccgagctctggggacctgggaggaggacaaatcctttcccatgtgcctgcgcgaaagagaatcactttcggtag

SEQ ID NO: 209401 - DNA, 1623 bp, Artificial Sequence
  derived and/or modified sequence
atgttgcagggcctgcttccagtgagcctcctgttgtccgtggccgtcagtgctatcaaggagctgccaggcgtaaagaagtatgaagtggtctacccgatccgcctgcaccctctgcataagcgggaggcaaaagagccagaacagcaggagcagtttgagacggaactgaaatacaagatgaccattaacgggaaaattgccgtcctgtacctaaagaagaacaagaacctgcttgcaccaggttacaccgagacatattataatagcactggaaaagagattactacaagcccccagataatggatgactgctactaccaaggccacattctgaatgagaaggtaagcgacgctagcatctcaacttgtcggggtctgagaggatatttcagtcagggggaccagcgctatttcattgaacccctatcacctatccaccgggatggccaggaacacgccctgtttaaatacaaccccgatgagaaaaattacgactccacatgcgggatggatggcgtgttgtgggcccacgacctgcagcagaatattgcgctacctgccacaaagctggtgaagctaaaggacaggaaggtacaggaacatgagaaatatattgagtattatttggtgctggacaatggcgaattcaaaagatacaacgagaaccaagacgaaattaggaagagggtgtttgaaatggctaattatgtgaacatgctatacaaaaaattgaacacccacgtggccctggtcggcatggagatctggaccgacaaggataagatcaaaattactcccaatgcatcattcacgctggagaacttcagcaaatggcggggaagcgtgctcagccgaagaaaacgacatgacatcgctcagctaatcacagcaactgagttggccggtacaactgtcggtctggccttcatgtccacaatgtgcagcccatactccgtgggagtggttcaggaccattcagataaccttttgcgagtggccggaacaatggcgcatgaaatggggcacaacttcggcatgtttcacgatgattacagctgcaaatgtcctagcaccatctgtgtgatggacaaagcactttctttttatataccaacagacttctcatcatgtagccgattaagctacgataagttcttcgaggacaagctgtccaactgtctttttaacgccccactccccactgatataatttccacacctatctgcggaaatcagcttgtggagatgggcgaagattgtgactgcggcacttctgaggagtgcactaatatctgctgcgatgcgaaaacatgcaagatcaaagctaccttccagtgtgccctcggcgagtgttgtgagaagtgccaattcaagaaggcaggaatggtgtgccggcctgccaaggacgaatgtgatctcccagagatgtgcaacggcaagtccggaaattgtcccgatgaccgtttccaggtgaatgggttcccatgtcaccacggaaagggacactgcctaatgggcacgtgccccacattacaagaacagtgcacagagctgtgggggcctggacgtcgcacaaaccctttcccttgcgcatgcgctaaggagaaccactttaggtag

SEQ ID NO: 209402 - DNA, 924 bp, Artificial Sequence
  derived and/or modified sequence
atggcaaactatgtgaatatgctttataagaagctcaacacccatgtcgccctagttggtatggaaatttggacggacaaggataagataaaaatcacccctaacgcaagtttcaccctggaaaatttcagcaaatggcgcggatcagtgttgtctcgcagaaaaaggcacgacattgctcagctaatcactgccactgaattggccggaacaaccgtgggcctggcatttatgagtactatgtgctcaccttattcggttggcgtggtgcaggatcatagcgacaatctattgcgggtggcaggtactatggcccacgagatggggcataactttggaatgtttcatgacgactacagttgtaaatgcccttccaccatttgcgttatggataaggctctgagtttctacatcccaacagacttcagttcatgcagcaggctgagctacgataaattctttgaggataaactcagcaattgtctgttcaatgcgccattaccgacagacatcatcagtactccaatatgcggcaatcagctcgttgagatgggcgaggactgtgactgcggtacgtctgaagagtgcactaatatctgctgtgatgcgaagacgtgcaagattaaggccacttttcagtgcgctttaggtgagtgctgcgagaaatgccagtttaaaaaagctgggatggtgtgtcgtccagctaaggatgagtgcgatctcccagaaatgtgtaacggcaagagcggcaactgtccagatgatcggtttcaggtcaacggttttccctgccatcacggaaaaggccactgcttgatgggcacttgcccaacccttcaagaacagtgcaccgagctgtggggacctggccgacggactaacccgttcccctgtgcgtgtgccaaagagaatcatttccgctag

SEQ ID NO: 209403 - DNA, 1623 bp, Artificial Sequence
  derived and/or modified sequence
atgctgcagggcctgctgcccgtgagcctgctgctgagcgtggccgtgagcgccatcaaggagctgcccggcgtgaagaagtacgaggtggtgtaccccatcagactgcaccccctgcacaagagagaggccaaggagcccgagcagcaggagcagttcgagaccgagctgaagtacaagatgaccatcaacggcaagatcgccgtgctgtacctgaagaagaacaagaacctgctggcccccggctacaccgagacctactacaacagcaccggcaaggagatcaccaccagcccccagatcatggacgactgctactaccagggccacatcctgaacgagaaggtgagcgacgccagcatcagcacctgcagaggcctgagaggctacttcagccagggcgaccagagatacttcatcgagcccctgagccccatccacagagacggccaggagcacgccctgttcaagtacaaccccgacgagaagaactacgacagcacctgcggcatggacggcgtgctgtgggcccacgacctgcagcagaacatcgccctgcccgccaccaagctggtgaagctgaaggacagaaaggtgcaggagcacgagaagtacatcgagtactacctggtgctggacaacggcgagttcaagagatacaacgagaaccaggacgagatcagaaagagagtgttcgagatggccaactacgtgaacatgctgtacaagaagctgaacacccacgtggccctggtgggcatggagatctggaccgacaaggacaagatcaagatcacccccaacgccagcttcaccctggagaacttcagcaagtggagaggcagcgtgctgagcagaagaaagagacacgacatcgcccagctgatcaccgccaccgagctggccggcaccaccgtgggcctggccttcatgagcaccatgtgcagcccctacagcgtgggcgtggtgcaggaccacagcgacaacctgctgagagtggccggcaccatggcccacgagatgggccacaacttcggcatgttccacgacgactacagctgcaagtgccccagcaccatctgcgtgatggacaaggccctgagcttctacatccccaccgacttcagcagctgcagcagactgagctacgacaagttcttcgaggacaagctgagcaactgcctgttcaacgcccccctgcccaccgacatcatcagcacccccatctgcggcaaccagctggtggagatgggcgaggactgcgactgcggcaccagcgaggagtgcaccaacatctgctgcgacgccaagacctgcaagatcaaggccaccttccagtgcgccctgggcgagtgctgcgagaagtgccagttcaagaaggccggcatggtgtgcagacccgccaaggacgagtgcgacctgcccgagatgtgcaacggcaagagcggcaactgccccgacgacagattccaggtgaacggcttcccctgccaccacggcaagggccactgcctgatgggcacctgccccaccctgcaggagcagtgcaccgagctgtggggccccggcagaagaaccaaccccttcccctgcgcctgcgccaaggagaaccacttcagatag

SEQ ID NO: 209404 - DNA, 924 bp, Artificial Sequence
  derived and/or modified sequence
atggccaactacgtgaacatgctgtacaagaagctgaacacccacgtggccctggtgggcatggagatctggaccgacaaggacaagatcaagatcacccccaacgccagcttcaccctggagaacttcagcaagtggagaggcagcgtgctgagcagaagaaagagacacgacatcgcccagctgatcaccgccaccgagctggccggcaccaccgtgggcctggccttcatgagcaccatgtgcagcccctacagcgtgggcgtggtgcaggaccacagcgacaacctgctgagagtggccggcaccatggcccacgagatgggccacaacttcggcatgttccacgacgactacagctgcaagtgccccagcaccatctgcgtgatggacaaggccctgagcttctacatccccaccgacttcagcagctgcagcagactgagctacgacaagttcttcgaggacaagctgagcaactgcctgttcaacgcccccctgcccaccgacatcatcagcacccccatctgcggcaaccagctggtggagatgggcgaggactgcgactgcggcaccagcgaggagtgcaccaacatctgctgcgacgccaagacctgcaagatcaaggccaccttccagtgcgccctgggcgagtgctgcgagaagtgccagttcaagaaggccggcatggtgtgcagacccgccaaggacgagtgcgacctgcccgagatgtgcaacggcaagagcggcaactgccccgacgacagattccaggtgaacggcttcccctgccaccacggcaagggccactgcctgatgggcacctgccccaccctgcaggagcagtgcaccgagctgtggggccccggcagaagaaccaaccccttcccctgcgcctgcgccaaggagaaccacttcagatag

SEQ ID NO: 209405 - DNA, 2085 bp, Artificial Sequence
  derived and/or modified sequence
gcgagaagagcagacaccgtgctcctggaatcacccagcatgttgcaaggtctcctgccagtcagtctcctcctctctgttgcagtaagtgctataaaagaactccctggggtgaagaagtatgaagtggtttatcctataagacttcatccactgcataaaagagaggccaaagagccagagcaacaggaacaatttgaaactgaattaaagtataaaatgacaattaatggaaaaattgcagtgctttatttgaaaaaaaacaagaacctccttgcaccaggctacacggaaacatattataattccactggaaaggagatcaccacaagcccacaaattatggatgattgttattatcaaggacatattcttaatgaaaaggtttctgacgctagcatcagcacatgtaggggtctaaggggctacttcagtcagggggatcaaagatactttattgaacctttaagccccatacatcgggatggacaggagcatgcactcttcaagtataaccctgatgaaaagaattatgacagcacctgtgggatggatggtgtgttgtgggcccacgatttgcagcagaacattgccctacctgccaccaaactagtaaaattgaaagacaggaaggttcaggaacatgagaaatacatagaatattatttggtcctggataatggtgagtttaaaaggtacaatgagaatcaagatgagatcagaaagagggtatttgagatggctaattatgtcaacatgctttataaaaagctcaatactcatgtggccttagttggtatggaaatctggactgacaaggataagataaagataaccccaaatgcaagcttcaccttggagaatttttctaaatggagggggagtgttctctcaagaagaaagcgtcatgatattgctcagttaatcacagcaacagaacttgctggaacgactgtgggtcttgcatttatgtctacaatgtgttctccttattctgttggcgttgttcaggaccacagcgataatcttcttagagttgcagggacaatggcacatgaaatgggccacaactttggaatgtttcatgacgactattcttgcaagtgtccttctacaatatgtgtgatggacaaagcactgagcttctatatacccacagacttcagttcctgcagccgtctcagctatgacaagttttttgaagataaattatcaaattgcctctttaatgctccattgcctacagatatcatatccactccaatttgtgggaaccagttggtggaaatgggagaggactgtgattgtgggacatctgaggaatgtaccaatatttgctgtgatgctaagacatgtaaaatcaaagcaacttttcaatgtgcattaggagaatgttgtgaaaaatgccaatttaaaaaggctgggatggtgtgcagaccagcaaaagatgagtgcgacctgcctgaaatgtgtaatggtaaatctggtaattgtcctgatgatagattccaagtcaatggcttcccttgccatcacgggaagggccactgcttgatggggacatgccccacactgcaggagcagtgcacagagctgtggggaccaggtaggaggacaaatcctttcccctgtgcatgtgcgaaggaaaatcatttcagatgacagtgtttaaccatggtcaaaggaccattctgtcctatccttcttagaagctttgaactcaaaatcatggaaaggttttaagatttgaggttggttttagggttgctagatttagcaagtaaaaataaggatggccccgttaaattttaacttaaaattaacaagttttttgttaattttttgttttttgtctcagcatcagtatatcccatgcaatatttgaggtgtgctcatactaaaattatttgtgtatctgaaattcaaattaaactgggtgtctttttcttttcatctggcaaccctactaagatcataaacccttggaaatctgtgtgtgtgcgggtgtgtgtgtgtgtgtgtgtgcaggggtggcagaagtactgtgggatgggacagaaataagaaaagatggaaaaaagaaaa

SEQ ID NO: 209406 - DNA, 1873 bp, Artificial Sequence
  derived and/or modified sequence
actggagaggaggcagggacagacccagcagcacccacctgagcgagaagagcagacaccgtgctcctggaatcacccagcatgttgcaaggtctcctgccagtcagtctcctcctctctgttgcagtaagtgctataaaagaactccctggggtgaagaagtatgaagtggtttatcctataagacttcatccactgcataaaagagaggccaaagagccagagcaacaggaacaatttgaaactgaattaaagtataaaatgacaattaatggaaaaattgcagtgctttatttgaaaaaaaacaagaacctccttgcaccaggctacacggaaacatattataattccactggaaaggagatcaccacaagcccacaaattatggatgattgttattatcaaggacatattcttaatgaaaaggtttctgacgctagcatcagcacatgtaggggtctaagaaattgaaagacaggaaggttcaggaacatgagaaatacatagaatattatttggtcctggataatggtgagtttaaaaggtacaatgagaatcaagatgagatcagaaagagggtatttgagatggctaattatgtcaacatgctttataaaaagctcaatactcatgtggccttagttggtatggaaatctggactgacaaggataagataaagataaccccaaatgcaagcttcaccttggagaatttttctaaatggagggggagtgttctctcaagaagaaagcgtcatgatattgctcagttaatcacagcaacagaacttgctggaacgactgtgggtcttgcatttatgtctacaatgtgttctccttattctgttggcgttgttcaggaccacagcgataatcttcttagagttgcagggacaatggcacatgaaatgggccacaactttggaatgtttcatgacgactattcttgcaagtgtccttctacaatatgtgtgatggacaaagcactgagcttctatatacccacagacttcagttcctgcagccgtctcagctatgacaagttttttgaagataaattatcaaattgcctctttaatgctccattgcctacagatatcatatccactccaatttgtgggaaccagttggtggaaatgggagaggactgtgattgtgggacatctgaggaatgtaccaatatttgctgtgatgctaagacatgtaaaatcaaagcaacttttcaatgtgcattaggagaatgttgtgaaaaatgccaatttaaaaaggctgggatggtgtgcagaccagcaaaagatgagtgcgacctgcctgaaatgtgtaatggtaaatctggtaattgtcctgatgatagattccaagtcaatggcttcccttgccatcacgggaagggccactgcttgatggggacatgccccacactgcaggagcagtgcacagagctgtggggaccaggtaggaggacaaatcctttcccctgtgcatgtgcgaaggaaaatcatttcagatgacagtgtttaaccatggtcaaaggaccattctgtcctatccttcttagaagctttgaactcaaaatcatggaaaggttttaagatttgaggttggttttagggttgctagatttagcaagtaaaaataaggatggccccgttaaattttaacttaaaattaacaagttttttgttaattttttgttttttgtctcagcatcagtatatcccatgcaatatttgaggtgtgctcatactaaaattatttgtgtatctgaaattcaaattaaactgggtgtctttttcttttcatctggcaaccctactaagatcataaacccttggaaatctgtgtgtgtgcgggtgtgtgtgtgtgtgtgtgt

SEQ ID NO: 209407 - protein, 463 aa, Artificial Sequence
  derived and/or modified sequence
MHSASSMLGAVKMEGHEPSDWSSYYAEPEGYSSVSNMNAGLGMNGMNTYMSMSAAAMGSGSGNMSAGSMNMSSYVGAGMSPSLAGMSPGAGAMAGMGGSAGAAGVAGMGPHLSPSLSPLGGQAAGAMGGLAPYANMNSMSPMYGQAGLSRARDPKTYRRSYTHAKPPYSYISLITMAIQQSPNKMLTLSEIYQWIMDLFPFYRQNQQRWQNSIRHSLSFNDCFLKVPRSPDKPGKGSFWTLHPDSGNMFENGCYLRRQKRFKCEKQLALKEAAGAAGSGKKAAAGAQASQAQLGEAAGPASETPAGTESPHSSASPCQEHKRGGLGELKGTPAAALSPPEPAPSPGQQQQAAAHLLGPPHHPGLPPEAHLKPEHHYAFNHPFSINNLMSSEQQHHHSHHHHQPHKMDLKAYEQVMHYPGYGSPMPGSLAMGPVTNKTGLDASPLAADTSYYQGVYSRPIMNSS

SEQ ID NO: 209408 - protein, 457 aa, Artificial Sequence
  derived and/or modified sequence
MLGAVKMEGHEPSDWSSYYAEPEGYSSVSNMNAGLGMNGMNTYMSMSAAAMGSGSGNMSAGSMNMSSYVGAGMSPSLAGMSPGAGAMAGMGGSAGAAGVAGMGPHLSPSLSPLGGQAAGAMGGLAPYANMNSMSPMYGQAGLSRARDPKTYRRSYTHAKPPYSYISLITMAIQQSPNKMLTLSEIYQWIMDLFPFYRQNQQRWQNSIRHSLSFNDCFLKVPRSPDKPGKGSFWTLHPDSGNMFENGCYLRRQKRFKCEKQLALKEAAGAAGSGKKAAAGAQASQAQLGEAAGPASETPAGTESPHSSASPCQEHKRGGLGELKGTPAAALSPPEPAPSPGQQQQAAAHLLGPPHHPGLPPEAHLKPEHHYAFNHPFSINNLMSSEQQHHHSHHHHQPHKMDLKAYEQVMHYPGYGSPMPGSLAMGPVTNKTGLDASPLAADTSYYQGVYSRPIMNSS

SEQ ID NO: 209409 - DNA, 2428 bp, Artificial Sequence
  derived and/or modified sequence
cccgcccacttccaactaccgcctccggcctgcccagggagagagagggagtggagcccagggagagggagcgcgagagagggagggaggaggggacggtgctttggctgacttttttttaaaagagggtgggggtggggggtgattgctggtcgtttgttgtggctgttaaattttaaactgccatgcactcggcttccagtatgctgggagcggtgaagatggaagggcacgagccgtccgactggagcagctactatgcagagcccgagggctactcctccgtgagcaacatgaacgccggcctggggatgaacggcatgaacacgtacatgagcatgtcggcggccgccatgggcagcggctcgggcaacatgagcgcgggctccatgaacatgtcgtcgtacgtgggcgctggcatgagcccgtccctggcggggatgtcccccggcgcgggcgccatggcgggcatgggcggctcggccggggcggccggcgtggcgggcatggggccgcacttgagtcccagcctgagcccgctcggggggcaggcggccggggccatgggcggcctggccccctacgccaacatgaactccatgagccccatgtacgggcaggcgggcctgagccgcgcccgcgaccccaagacctacaggcgcagctacacgcacgcaaagccgccctactcgtacatctcgctcatcaccatggccatccagcagagccccaacaagatgctgacgctgagcgagatctaccagtggatcatggacctcttccccttctaccggcagaaccagcagcgctggcagaactccatccgccactcgctctccttcaacgactgtttcctgaaggtgccccgctcgcccgacaagcccggcaagggctccttctggaccctgcaccctgactcgggcaacatgttcgagaacggctgctacctgcgccgccagaagcgcttcaagtgcgagaagcagctggcgctgaaggaggccgcaggcgccgccggcagcggcaagaaggcggccgccggagcccaggcctcacaggctcaactcggggaggccgccgggccggcctccgagactccggcgggcaccgagtcgcctcactcgagcgcctccccgtgccaggagcacaagcgagggggcctgggagagctgaaggggacgccggctgcggcgctgagccccccagagccggcgccctctcccgggcagcagcagcaggccgcggcccacctgctgggcccgccccaccacccgggcctgccgcctgaggcccacctgaagccggaacaccactacgccttcaaccacccgttctccatcaacaacctcatgtcctcggagcagcagcaccaccacagccaccaccaccaccaaccccacaaaatggacctcaaggcctacgaacaggtgatgcactaccccggctacggttcccccatgcctggcagcttggccatgggcccggtcacgaacaaaacgggcctggacgcctcgcccctggccgcagatacctcctactaccagggggtgtactcccggcccattatgaactcctcttaagaagacgacggcttcaggcccggctaactctggcaccccggatcgaggacaagtgagagagcaagtgggggtcgagactttggggagacggtgttgcagagacgcaagggagaagaaatccataacacccccaccccaacacccccaagacagcagtcttcttcacccgctgcagccgttccgtcccaaacagagggccacacagataccccacgttctatataaggaggaaaacgggaaagaatataaagttaaaaaaaagcctccggtttccactactgtgtagactcctgcttcttcaagcacctgcagattctgatttttttgttgttgttgttctcctccattgctgttgttgcagggaagtcttacttaaaaaaaaaaaaaaattttgtgagtgactcggtgtaaaaccatgtagttttaacagaaccagagggttgtactattgtttaaaaacaggaaaaaaaataatgtaagggtctgttgtaaatgaccaagaaaaagaaaaaaaaagcattcccaatcttgacacggtgaaatccaggtctcgggtccgattaatttatggtttctgcgtgctttatttatggcttataaatgtgtattctggctgcaagggccagagttccacaaatctatattaaagtgttatacccggttttatcccttgaatcttttcttccagatttttcttttctttacttggcttacaaaatatacaggcttggaaattatttcaagaaggagggagggataccctgtctggttgcaggttgtattttattttggcccagggagtgttgctgttttcccaacattttattaataaaattttcagacataaaaaa

SEQ ID NO: 209410 - DNA, 2420 bp, Artificial Sequence
  derived and/or modified sequence
cccgcccacttccaactaccgcctccggcctgcccagggagagagagggagtggagcccagggagagggagcgcgagagagggagggaggaggggacggtgctttggctgacttttttttaaaagagggtgggggtggggggtgattgctggtcgtttgttgtggctgttaaattttaaactgccatgcactcggcttccagtatgctgggagcggtgaagatggaagggcacgagccgtccgactggagcagctactatgcagagcccgagggctactcctccgtgagcaacatgaacgccggcctggggatgaacggcatgaacacgtacatgagcatgtcggcggccgccatgggcagcggctcgggcaacatgagcgcgggctccatgaacatgtcgtcgtacgtgggcgctggcatgagcccgtccctggcggggatgtcccccggcgcgggcgccatggcgggcatgggcggctcggccggggcggccggcgtggcgggcatggggccgcacttgagtcccagcctgagcccgctcggggggcaggcggccggggccatgggcggcctggccccctacgccaacatgaactccatgagccccatgtacgggcaggcgggcctgagccgcgcccgcgaccccaagacctacaggcgcagctacacgcacgcaaagccgccctactcgtacatctcgctcatcaccatggccatccagcagagccccaacaagatgctgacgctgagcgagatctaccagtggatcatggacctcttccccttctaccggcagaaccagcagcgctggcagaactccatccgccactcgctctccttcaacgactgtttcctgaaggtgccccgctcgcccgacaagcccggcaagggctccttctggaccctgcaccctgactcgggcaacatgttcgagaacggctgctacctgcgccgccagaagcgcttcaagtgcgagaagcagctggcgctgaaggaggccgcaggcgccgccggcagcggcaagaaggcggccgccggagcccaggcctcacaggctcaactcggggaggccgccgggccggcctccgagactccggcgggcaccgagtcgcctcactcgagcgcctccccgtgccaggagcacaagcgagggggcctgggagagctgaaggggacgccggctgcggcgctgagccccccagagccggcgccctctcccgggcagcagcagcaggccgcggcccacctgctgggcccgccccaccacccgggcctgccgcctgaggcccacctgaagccggaacaccactacgccttcaaccacccgttctccatcaacaacctcatgtcctcggagcagcagcaccaccacagccaccaccaccaccaaccccacaaaatggacctcaaggcctacgaacaggtgatgcactaccccggctacggttcccccatgcctggcagcttggccatgggcccggtcacgaacaaaacgggcctggacgcctcgcccctggccgcagatacctcctactaccagggggtgtactcccggcccattatgaactcctcttaagaagacgacggcttcaggcccggctaactctggcaccccggatcgaggacaagtgagagagcaagtgggggtcgagactttggggagacggtgttgcagagacgcaagggagaagaaatccataacacccccaccccaacacccccaagacagcagtcttcttcacccgctgcagccgttccgtcccaaacagagggccacacagataccccacgttctatataaggaggaaaacgggaaagaatataaagttaaaaaaaagcctccggtttccactactgtgtagactcctgcttcttcaagcacctgcagattctgatttttttgttgttgttgttctcctccattgctgttgttgcagggaagtcttacttaaaaaaaaaaaaaaattttgtgagtgactcggtgtaaaaccatgtagttttaacagaaccagagggttgtactattgtttaaaaacaggaaaaaaaataatgtaagggtctgttgtaaatgaccaagaaaaagaaaaaaaaagcattcccaatcttgacacggtgaaatccaggtctcgggtccgattaatttatggtttctgcgtgctttatttatggcttataaatgtgtattctggctgcaagggccagagttccacaaatctatattaaagtgttatacccggttttatcccttgaatcttttcttccagatttttcttttctttacttggcttacaaaatatacaggcttggaaattatttcaagaaggagggagggataccctgtctggttgcaggttgtattttattttggcccagggagtgttgctgttttcccaacattttattaataaaattttcagac

SEQ ID NO: 209411 - DNA, 2401 bp, Artificial Sequence
  derived and/or modified sequence
gctagaggggctgcttgcgccaggcgccggccgccccactgcgggtccctggcggccggtgtctgaggagtcggagagccgaggcggccagaccgtgcgccccgcgcttctcccgaggccgttccgggtctgaactgtaacagggaggggcctcgcaggagcagcagcgggcgagttaaagtatgctgggagcggtgaagatggaagggcacgagccgtccgactggagcagctactatgcagagcccgagggctactcctccgtgagcaacatgaacgccggcctggggatgaacggcatgaacacgtacatgagcatgtcggcggccgccatgggcagcggctcgggcaacatgagcgcgggctccatgaacatgtcgtcgtacgtgggcgctggcatgagcccgtccctggcggggatgtcccccggcgcgggcgccatggcgggcatgggcggctcggccggggcggccggcgtggcgggcatggggccgcacttgagtcccagcctgagcccgctcggggggcaggcggccggggccatgggcggcctggccccctacgccaacatgaactccatgagccccatgtacgggcaggcgggcctgagccgcgcccgcgaccccaagacctacaggcgcagctacacgcacgcaaagccgccctactcgtacatctcgctcatcaccatggccatccagcagagccccaacaagatgctgacgctgagcgagatctaccagtggatcatggacctcttccccttctaccggcagaaccagcagcgctggcagaactccatccgccactcgctctccttcaacgactgtttcctgaaggtgccccgctcgcccgacaagcccggcaagggctccttctggaccctgcaccctgactcgggcaacatgttcgagaacggctgctacctgcgccgccagaagcgcttcaagtgcgagaagcagctggcgctgaaggaggccgcaggcgccgccggcagcggcaagaaggcggccgccggagcccaggcctcacaggctcaactcggggaggccgccgggccggcctccgagactccggcgggcaccgagtcgcctcactcgagcgcctccccgtgccaggagcacaagcgagggggcctgggagagctgaaggggacgccggctgcggcgctgagccccccagagccggcgccctctcccgggcagcagcagcaggccgcggcccacctgctgggcccgccccaccacccgggcctgccgcctgaggcccacctgaagccggaacaccactacgccttcaaccacccgttctccatcaacaacctcatgtcctcggagcagcagcaccaccacagccaccaccaccaccaaccccacaaaatggacctcaaggcctacgaacaggtgatgcactaccccggctacggttcccccatgcctggcagcttggccatgggcccggtcacgaacaaaacgggcctggacgcctcgcccctggccgcagatacctcctactaccagggggtgtactcccggcccattatgaactcctcttaagaagacgacggcttcaggcccggctaactctggcaccccggatcgaggacaagtgagagagcaagtgggggtcgagactttggggagacggtgttgcagagacgcaagggagaagaaatccataacacccccaccccaacacccccaagacagcagtcttcttcacccgctgcagccgttccgtcccaaacagagggccacacagataccccacgttctatataaggaggaaaacgggaaagaatataaagttaaaaaaaagcctccggtttccactactgtgtagactcctgcttcttcaagcacctgcagattctgatttttttgttgttgttgttctcctccattgctgttgttgcagggaagtcttacttaaaaaaaaaaaaaaattttgtgagtgactcggtgtaaaaccatgtagttttaacagaaccagagggttgtactattgtttaaaaacaggaaaaaaaataatgtaagggtctgttgtaaatgaccaagaaaaagaaaaaaaaagcattcccaatcttgacacggtgaaatccaggtctcgggtccgattaatttatggtttctgcgtgctttatttatggcttataaatgtgtattctggctgcaagggccagagttccacaaatctatattaaagtgttatacccggttttatcccttgaatcttttcttccagatttttcttttctttacttggcttacaaaatatacaggcttggaaattatttcaagaaggagggagggataccctgtctggttgcaggttgtattttattttggcccagggagtgttgctgttttcccaacattttattaataaaattttcagacat

SEQ ID NO: 209412 - DNA, 2422 bp, Artificial Sequence
  derived and/or modified sequence
cccgcccacttccaactaccgcctccggcctgcccagggagagagagggagtggagcccagggagagggagcgcgagagagggagggaggaggggacggtgctttggctgacttttttttaaaagagggtgggggtggggggtgattgctggtcgtttgttgtggctgttaaattttaaactgccatgcactcggcttccagtatgctgggagcggtgaagatggaagggcacgagccgtccgactggagcagctactatgcagagcccgagggctactcctccgtgagcaacatgaacgccggcctggggatgaacggcatgaacacgtacatgagcatgtcggcggccgccatgggcagcggctcgggcaacatgagcgcgggctccatgaacatgtcgtcgtacgtgggcgctggcatgagcccgtccctggcggggatgtcccccggcgcgggcgccatggcgggcatgggcggctcggccggggcggccggcgtggcgggcatggggccgcacttgagtcccagcctgagcccgctcggggggcaggcggccggggccatgggcggcctggccccctacgccaacatgaactccatgagccccatgtacgggcaggcgggcctgagccgcgcccgcgaccccaagacctacaggcgcagctacacgcacgcaaagccgccctactcgtacatctcgctcatcaccatggccatccagcagagccccaacaagatgctgacgctgagcgagatctaccagtggatcatggacctcttccccttctaccggcagaaccagcagcgctggcagaactccatccgccactcgctctccttcaacgactgtttcctgaaggtgccccgctcgcccgacaagcccggcaagggctccttctggaccctgcaccctgactcgggcaacatgttcgagaacggctgctacctgcgccgccagaagcgcttcaagtgcgagaagcagctggcgctgaaggaggccgcaggcgccgccggcagcggcaagaaggcggccgccggagcccaggcctcacaggctcaactcggggaggccgccgggccggcctccgagactccggcgggcaccgagtcgcctcactcgagcgcctccccgtgccaggagcacaagcgagggggcctgggagagctgaaggggacgccggctgcggcgctgagccccccagagccggcgccctctcccgggcagcagcagcaggccgcggcccacctgctgggcccgccccaccacccgggcctgccgcctgaggcccacctgaagccggaacaccactacgccttcaaccacccgttctccatcaacaacctcatgtcctcggagcagcagcaccaccacagccaccaccaccaccaaccccacaaaatggacctcaaggcctacgaacaggtgatgcactaccccggctacggttcccccatgcctggcagcttggccatgggcccggtcacgaacaaaacgggcctggacgcctcgcccctggccgcagatacctcctactaccagggggtgtactcccggcccattatgaactcctcttaagaagacgacggcttcaggcccggctaactctggcaccccggatcgaggacaagtgagagagcaagtgggggtcgagactttggggagacggtgttgcagagacgcaagggagaagaaatccataacacccccaccccaacacccccaagacagcagtcttcttcacccgctgcagccgttccgtcccaaacagagggccacacagataccccacgttctatataaggaggaaaacgggaaagaatataaagttaaaaaaaagcctccggtttccactactgtgtagactcctgcttcttcaagcacctgcagattctgatttttttgttgttgttgttctcctccattgctgttgttgcagggaagtcttacttaaaaaaaaaaaaaaattttgtgagtgactcggtgtaaaaccatgtagttttaacagaaccagagggttgtactattgtttaaaaacaggaaaaaaaataatgtaagggtctgttgtaaatgaccaagaaaaagaaaaaaaaagcattcccaatcttgacacggtgaaatccaggtctcgggtccgattaatttatggtttctgcgtgctttatttatggcttataaatgtgtattctggctgcaagggccagagttccacaaatctatattaaagtgttatacccggttttatcccttgaatcttttcttccagatttttcttttctttacttggcttacaaaatatacaggcttggaaattatttcaagaaggagggagggataccctgtctggttgcaggttgtattttattttggcccagggagtgttgctgttttcccaacattttattaataaaattttcagacat

SEQ ID NO: 209413 - DNA, 1392 bp, Artificial Sequence
  derived and/or modified sequence
atgcattcagcctcgagcatgcttggggccgtgaagatggaggggcacgaaccctctgattggtcttcctactacgccgagccagaggggtacagttcagtcagtaatatgaacgccgggctgggtatgaatggcatgaacacatacatgtcaatgtcagcagcggccatgggatcaggcagtggtaacatgagcgccggctctatgaacatgtcttcgtacgtgggcgccggcatgagtccatcactggctggcatgtcaccaggggcgggcgcaatggctggcatgggtggatccgctggagcagcgggagtggctggtatgggcccacacctgagccctagtctcagccccctcggggggcaggccgctggtgctatgggcggtctggctccctacgccaatatgaattcgatgtctcccatgtatggtcaagccggtctcagcagggccagagatcctaaaacttatcgccgcagttacactcacgctaagcctccatactcttatattagtttgatcaccatggccatacagcaatctcccaataagatgctgaccctgtctgagatttaccagtggatcatggacttgtttccattctataggcagaaccagcagcggtggcagaattcaattcggcatagtctgagtttcaacgactgcttcttgaaagttcccaggtcccccgacaagccagggaaaggaagcttctggacactccatcccgatagtgggaatatgttcgagaatgggtgttacctgagacgtcagaagaggtttaaatgcgagaagcagctggcccttaaagaggccgctggcgccgctgggtcaggcaagaaggcggccgccggggctcaggcctctcaagcacaattgggagaagccgcgggcccggctagcgagacaccagccggcacggaatctccccattcgtcggctagcccatgccaagagcacaagcgaggagggctaggcgaactcaaaggtacccctgccgctgcactgtcgccgcctgaaccagcgccaagccccggccaacagcaacaggcggccgctcaccttttggggccccctcaccatccaggactgccgcccgaggcccacctgaagcccgaacaccactacgcctttaaccatccattttctatcaataacttgatgtcttccgagcagcagcatcatcatagccaccatcaccatcagccccacaagatggacctgaaagcgtacgagcaagttatgcactaccctggttacggaagcccaatgcccggatcactcgcgatggggcccgtgaccaacaaaactggactcgatgcctctcctctagcagccgatacaagctattatcaaggagtctacagtcggcctatcatgaattctagctag

SEQ ID NO: 209414 - DNA, 1392 bp, Artificial Sequence
  derived and/or modified sequence
atgcacagcgccagctccatgctgggcgctgtgaagatggagggccacgagcccagcgactggagcagctactatgcagagcctgagggctacagctctgtgagcaacatgaatgccggcctgggcatgaatggcatgaacacctacatgtccatgtctgctgctgccatgggcagcggcagcggcaacatgtctgctggctccatgaacatgagcagctatgtgggcgccggcatgagccccagcctggccggcatgagccctggggccggggccatggccggcatgggcggcagcgctggagctgctggggtggccggcatgggcccccacctgagccccagcctgagccccctgggcggccaggccgccggggccatgggcggcctggccccctatgccaacatgaacagcatgagccccatgtatggccaggccggcctgagccgggcccgggaccccaagacctaccgccgcagctacacccacgccaagccaccctacagctacatcagcctcatcaccatggccatccagcagagccccaacaagatgctgaccctgtctgagatctaccagtggatcatggacctcttccccttctaccggcagaaccagcagcgctggcagaacagcatccgccacagcctgtccttcaatgactgcttcctgaaggtgcccaggagcccagacaagccaggcaagggcagcttctggaccctgcacccagattctggcaacatgtttgaaaatggctgctacctgcggcggcagaagcgcttcaagtgtgagaagcagctggccctgaaggaggccgccggggccgccggcagcggcaagaaggctgctgctggggcccaggccagccaggcccagctgggggaggccgccggccctgccagcgagaccccagctggaacagagagcccccacagcagcgccagcccctgccaggagcacaagagaggaggcctgggggagctgaagggcaccccagctgctgccctgagccccccagagcccgcccccagccctggccagcagcagcaggccgccgcccacctgctgggccccccccaccaccctggcctgcccccagaggcccacctgaagccagagcaccactacgccttcaaccaccccttcagcatcaacaacctgatgagcagcgagcagcagcaccaccacagccaccaccaccaccagccccacaagatggacctgaaggcctatgagcaggtgatgcactacccaggctacggcagccccatgcctggcagcctggccatgggccctgtgaccaacaagacaggcctggatgccagccccctggccgctgacaccagctactaccagggcgtgtacagccggcccatcatgaacagcagctag

SEQ ID NO: 209415 - DNA, 1392 bp, Artificial Sequence
  derived and/or modified sequence
atgcacagcgccagcagcatgctgggcgccgtgaagatggagggccacgaacccagcgactggagttcctattatgccgaaccagaagggtatagcagcgtgagcaacatgaacgcaggcttgggcatgaatgggatgaacacttacatgagtatgagtgcggcggccatgggcagcggatctggaaatatgtccgccgggtccatgaacatgagcagctatgtaggcgccggaatgtctcccagtttggcgggaatgtccccgggagccggagcaatggcagggatgggagggtccgctggcgccgcaggcgtggcagggatgggaccacacctttctccgagtctgtctcccttgggcggtcaggccgccggagctatgggaggactagccccttatgcaaacatgaattctatgagcccaatgtatggccaggcgggactgagcagggccagggatcccaaaacatatcgccgaagttatacacatgcgaagcccccttactcgtatatttccctcattaccatggccatccagcagtcacctaacaagatgctgactctctcagagatataccagtggataatggacctgtttcccttttaccggcaaaaccagcagaggtggcagaactctatccgccacagtctttccttcaatgactgctttttgaaggtgcctcggtcaccggacaagccaggaaaaggctcattctggactctccacccagattctgggaatatgtttgagaacgggtgctatctgagacggcaaaagcggtttaagtgtgagaagcagctggctctaaaagaggccgctggtgcagcaggatcaggaaagaaggcagccgccggggcgcaggcctcccaggcccaactgggcgaagcagcaggccccgcaagcgagactcccgcagggacagagagtccacactcaagtgcctcgccatgccaggaacacaagagaggtggcttaggtgaactcaaaggaacacccgctgccgccttgtcacctccagagccagctccttcaccagggcaacaacaacaggccgccgcacatctgctgggcccgccacatcacccaggcctgcctccggaggctcacctcaagcccgaacaccattacgccttcaatcatccctttagtattaataatctaatgtcttcagaacagcagcatcatcatagtcatcaccaccaccagccgcacaagatggacctgaaggcgtacgaacaagtgatgcattatccaggatacggatccccgatgccaggttccctggcgatgggcccagtgaccaataaaactgggcttgacgcctcgccgctggctgcagataccagttactatcagggggtgtattcccgccccataatgaacagttcatag

SEQ ID NO: 209416 - DNA, 1392 bp, Artificial Sequence
  derived and/or modified sequence
atgcattcagccagcagtatgctaggagccgtgaaaatggagggacacgagccttcagattggtctagctactacgccgagcctgaggggtattcttctgtctccaatatgaacgcaggattgggtatgaacggtatgaatacatatatgtcaatgtccgcagccgcaatgggcagtggttctgggaacatgtccgcagggtccatgaacatgtccagttatgtaggcgctgggatgagtccatccttggccggaatgtctccgggagccggagcaatggccggaatggggggaagtgcaggagccgcaggggtggccggaatgggtcctcacctgtctccttcactctctcctttaggcggacaggccgcaggcgctatgggaggcctggctccatatgccaatatgaattccatgtcaccaatgtacggacaggctggcctctcccgggctcgagaccccaagacctaccggaggtcttacactcacgccaagccgccatactcttatatcagcctcattactatggccatccagcagtctcccaacaaaatgttgactttaagcgagatctatcagtggattatggatctgtttccgttctatcggcaaaatcagcagcgatggcagaattccattcgacattccctcagcttcaacgactgcttcctaaaagtgcccagatctcccgataagcctggtaaggggtcattttggaccctccatccagattccggcaacatgtttgagaatggttgctatcttagaagacaaaagcgtttcaagtgcgagaaacaattggccctgaaagaagccgcaggcgctgccggaagcggtaagaaggccgctgctggggcacaggcctcccaggcccagttgggtgaggctgctggaccagccagcgagactccagcagggactgagtcccctcacagttccgcaagtccatgtcaagagcacaagagaggcggattaggagagctaaaaggcaccccggcagccgctttgtctccgccagaaccagccccatcccccggacagcagcagcaggccgcagcccacctgctgggccctccgcaccatcctggacttcctccagaggcccatcttaagcctgaacaccattacgcttttaaccacccctttagcatcaataacctcatgtccagcgagcagcaacaccaccatagtcaccaccaccatcagcctcacaagatggacctgaaggcctacgagcaggtgatgcattatcccggatatggatctcccatgcccggttcgttggccatggggccagtcacaaataaaaccggcctcgatgcttccccactggctgccgacacaagttactatcagggcgtttactcgcgcccaataatgaatagtagttag

SEQ ID NO: 209417 - DNA, 1392 bp, Artificial Sequence
  derived and/or modified sequence
atgcacagcgccagcagcatgctgggcgccgtgaagatggagggccacgagcccagcgactggagcagctactacgccgagcccgagggctacagcagcgtgagcaacatgaacgccggcctgggcatgaacggcatgaacacctacatgagcatgagcgccgccgccatgggcagcggcagcggcaacatgagcgccggcagcatgaacatgagcagctacgtgggcgccggcatgagccccagcctggccggcatgagccccggcgccggcgccatggccggcatgggcggcagcgccggcgccgccggcgtggccggcatgggcccccacctgagccccagcctgagccccctgggcggccaggccgccggcgccatgggcggcctggccccctacgccaacatgaacagcatgagccccatgtacggccaggccggcctgagcagagccagagaccccaagacctacagaagaagctacacccacgccaagcccccctacagctacatcagcctgatcaccatggccatccagcagagccccaacaagatgctgaccctgagcgagatctaccagtggatcatggacctgttccccttctacagacagaaccagcagagatggcagaacagcatcagacacagcctgagcttcaacgactgcttcctgaaggtgcccagaagccccgacaagcccggcaagggcagcttctggaccctgcaccccgacagcggcaacatgttcgagaacggctgctacctgagaagacagaagagattcaagtgcgagaagcagctggccctgaaggaggccgccggcgccgccggcagcggcaagaaggccgccgccggcgcccaggccagccaggcccagctgggcgaggccgccggccccgccagcgagacccccgccggcaccgagagcccccacagcagcgccagcccctgccaggagcacaagagaggcggcctgggcgagctgaagggcacccccgccgccgccctgagcccccccgagcccgcccccagccccggccagcagcagcaggccgccgcccacctgctgggccccccccaccaccccggcctgccccccgaggcccacctgaagcccgagcaccactacgccttcaaccaccccttcagcatcaacaacctgatgagcagcgagcagcagcaccaccacagccaccaccaccaccagccccacaagatggacctgaaggcctacgagcaggtgatgcactaccccggctacggcagccccatgcccggcagcctggccatgggccccgtgaccaacaagaccggcctggacgccagccccctggccgccgacaccagctactaccagggcgtgtacagcagacccatcatgaacagcagctag

SEQ ID NO: 209418 - protein, 405 aa, Artificial Sequence
  derived and/or modified sequence
MDSAITLWQFLLQLLQKPQNKHMICWTSNDGQFKLLQAEEVARLWGIRKNKPNMNYDKLSRALRYYYVKNIIKKVNGQKFVYKFVSYPEILNMDPMTVGRIEGDCESLNFSEVSSSSKDVENGGKDKPPQPGAKTSSRNDYIHSGLYSSFTLNSLNSSNVKLFKLIKTENPAEKLAEKKSPQEPTPSVIKFVTTPSKKPPVEPVAATISIGPSISPSSEETIQALETLVSPKLPSLEAPTSASNVMTAFATTPPISSIPPLQEPPRTPSPPLSSHPDIDTDIDSVASQPMELPENLSLEPKDQDSVLLEKDKVNNSSRSKKPKGLELAPTLVITSSDPSPLGILSPSLPTASLTPAFFSQVACSLFMVSPLLSFICPFKQIQNLYTQVCFLLLRFVLERLCVTVM

SEQ ID NO: 209419 - DNA, 3077 bp, Artificial Sequence
  derived and/or modified sequence
tttcttgttaaacaaacacctaatttatttcttggaggttttgttcagctgtcctaatttatgactttacattccttctggtgctaaactgctcaagtagcctcttgtatcaagtgtgacctgattccttaagaattttacttaatgagaacctctaagctagaaactcttgctaggtgtttcatgcaccttattttctttaatcattacaacaactctaagattgggttctctccaccttataaatgatgactgttttagagaggttaaggttgcttaaaattggtgagttagtgaggggtagagccacgaatggatttctggtcgctgcctccatcgtcagggcaagcttttcccacgactccagcgcttccatttgtcagtccccaggctagaaagccacagtgctaatttagtatttatcaagcgtttgtagtgtcctgggatctggcacttcgatgagaaagctgtgacggccccaacttctaacagcgagtggtaaggaggacgagggacacaggagggaggagactctccccaaagcttagcaccaacagaagtggtcccccgcaggttgctctgcgagcgccacctcttccctccaaccgaggagaaagtggcgcgcctttgaggagtccgaggtcccggcccaggcggcagcttgggtcctggcgggttccggacgggcgcctcagggacctggaagcaaccgcaccgaacgcgacggagagcggcgagacgactccaggaggcgcccgagctacatcccccggccacaccaaacccgggtttgctggcagacgcggctcacgacaccccttagggtcgcagcccctcccccggaagtgacgtgtagcgactacggcgtctgggagggacccaggagcagtcggggggtttgagagtggcggcggccgcggagggcctggcaggccccgccgctgcaaggaacgccccgaacgcgcgcgcccggcgtgtagcggccccaagacccgcgccgccgctgccgcgtgcgggggcggggagggcggggcgccaggagccgcggcggcgggagatgcgggcggctgcgggcacccggcgggctcggcttggccgccgccgccttctacggctccgccgcgggggtcgcagcggctgccgcgccgtcctcgagtttccagcgtgaggaggaggctgagggcggagaggcgcatcgtgttcgaggcggagaccgagggggagccccgcgcgcggcgtcgctcattgctatggacagtgctatcaccctgtggcagttccttcttcagctcctgcagaagcctcagaacaagcacatgatctgttggacctctaatgatgggcagtttaagcttttgcaggcagaagaggtggctcgtctctgggggattcgcaagaacaagcctaacatgaattatgacaaactcagccgagccctcagatactattatgtaaagaatatcatcaaaaaagtgaatggtcagaagtttgtgtacaagtttgtctcttatccagagattttgaacatggatccaatgacagtgggcaggattgagggtgactgtgaaagtttaaacttcagtgaagtcagcagcagttccaaagatgtggagaatggagggaaagataaaccacctcagcctggtgccaagacctctagccgcaatgactacatacactctggcttatattcttcatttactctcaactctttgaactcctccaatgtaaagcttttcaaattgataaagactgagaatccagccgagaaactggcagagaaaaaatctcctcaggagcccacaccatctgtcatcaaatttgtcacgacaccttccaaaaagccaccggttgaacctgttgctgccaccatttcaattggcccaagtatttctccatcttcagaagaaactatccaagctttggagacattggtttccccaaaactgccttccctggaagccccaacctctgcctctaacgtaatgactgcttttgccaccacaccacccatttcgtccataccccctttgcaggaacctcccagaacaccttcaccaccactgagttctcacccagacatcgacacagacattgattcagtggcttctcagccaatggaacttccagagaatttgtcactggagcctaaagaccaggattcagtcttgctagaaaaggacaaagtaaataattcatcaagatccaagaaacccaaagggttagaactggcacccacccttgtgatcacgagcagtgatccaagcccactgggaatactgagcccatctctccctacagcttctcttacaccagcatttttttcacaggtagcttgctcgctctttatggtgtcaccattgctttcatttatttgcccttttaagcaaatccagaatttatacactcaagtttgctttctgttacttaggtttgtcttagaaaggttatgtgtgactgtcatgtgaaagttaccccatttctcatcttaattaggattgctaaaatagaaagtttggagtattttcttaaaaaattcattgttctacaagtaaataaatattttgatttttctatttcctcctaaagaaagtacacacactctctcgctctctctcggtcttataaaactcgttggtgtcttataaaacaaacagtgataatctcaagttagaaaacagtaggtcctgagaaccataagaaaaatgactggtgtgatgttgagtaacaagttggtacagttactttagctatttattaacttgctcatctcatagaacattttagtagatttttcacacacctcattattaaaaaaaaacaaacatgctggtgtcttggttacccattattcctctgtacctgaattcaggttggtttttctatttggaaaagactttataaatgttggcttaaaaagaggttgagcaccagaatctcagaatttaccaccaaagaactcatccatgtaaccaaaaaccacttgtacccccaaaaactattgaaataaaaatttaaaaaattttaaaaaaaaaaaaaaaaaaaaaaaaaaaaaaaaaaaaaaaaaaaaaaaaaaa

SEQ ID NO: 209420 - DNA, 1218 bp, Artificial Sequence
  derived and/or modified sequence
atggactcagcgataactctgtggcaatttcttctacagctgcttcagaagccccagaataaacatatgatttgttggaccagcaatgatggacagttcaagcttctgcaggctgaagaagtggcccgactctggggtattcgcaagaacaagcccaatatgaattacgacaaactcagtagggctctgaggtactactacgtcaaaaatattattaaaaaagtgaacggccagaagtttgtctacaaattcgtgagttaccccgaaatccttaacatggatcccatgactgtcggaagaatagagggagactgcgagtctctaaattttagcgaggtttcttcctccagtaaggatgtcgagaacggaggaaaagacaaacccccccaacccggagccaagactagcagcagaaatgattacatccattctggactgtactcgtctttcaccctgaactctctgaatagttctaatgtcaaactatttaagttaatcaaaactgagaaccctgccgagaagctcgctgaaaagaagagcccgcaggagcccaccccttcagtcatcaaatttgttacaacacccagtaagaaaccccccgtggagcctgtggccgctactatatccattggaccctctatttctccctcttctgaagaaaccatccaagcactggagactttggtaagtcccaaactgccatcacttgaggcccccacttctgcaagtaatgtcatgacagcatttgccaccacccctccaatcagctcgattcctcctctgcaggagcctcctcgcacccccagcccccccctgtccagccatccagacatcgacacggatattgactccgttgcctctcagcctatggagctgcctgaaaacctgagcctggaaccaaaagaccaggattctgtgctcctggagaaagataaggtgaacaattcctccagatcgaagaaaccaaaagggctagaactcgcccctacattggtgatcacctcatcggatccctcccccctggggatactatctccgtctttaccaactgcaagcctgacacccgcctttttcagtcaggttgcttgttctctgtttatggtgtctcccctactgtcctttatatgtcctttcaaacagattcagaacctgtacacccaagtttgtttccttcttctgaggttcgtgttggaaagactgtgtgtgaccgtgatgtag

SEQ ID NO: 209421 - DNA, 1218 bp, Artificial Sequence
  derived and/or modified sequence
atggattctgccatcaccctgtggcagttcctgctgcagctgctgcagaagccccagaacaagcacatgatctgctggaccagcaatgatggccagttcaagctgctgcaggccgaggaggtggcccggctgtggggcatcaggaagaacaagcccaacatgaactatgacaagctgagccgggccctgcgctactactacgtgaagaacatcatcaagaaggtgaatggccagaagtttgtgtacaagtttgtgtcctacccagagatcctgaacatggaccccatgacagtgggcagaattgaaggagactgtgagagcctgaacttcagcgaggtgagcagcagcagcaaggatgtggagaatggaggcaaggacaagccaccccagcccggggccaagaccagcagcagaaatgactacatccacagcggcctgtacagcagcttcaccctgaacagcctgaacagcagcaatgtgaagctgttcaagctgatcaagacagaaaatcctgctgagaagctggccgagaagaagagcccccaggagcccaccccatctgtcatcaagtttgtgaccacccccagcaagaagccccctgtggagcctgtggccgccaccatcagcatcggccccagcatcagccccagcagcgaggagaccatccaggccctggagaccctggtgagccccaagctgcccagcctggaggcccccaccagcgccagcaatgtgatgacagcctttgccaccaccccacccatcagcagcatcccccccctgcaggagccccccaggacccccagcccccccctgagcagccacccagacatcgacacagacatcgacagcgtggccagccagcccatggagctgcctgagaacctgagcctggagcccaaggaccaggacagcgtgctgctggagaaggacaaggtgaacaacagcagccgcagcaagaagcccaagggcctggagctggcccccaccctggtgatcaccagcagtgaccccagccccctgggcatcctgagccccagcctgcccacagccagcctgaccccagccttcttcagccaggtggcctgcagcctcttcatggtgagccccctgctgtccttcatctgccccttcaagcagatccagaacctgtacacccaggtgtgcttcctgctgctgcgctttgtgctggagcggctgtgtgtgacagtgatgtag

SEQ ID NO: 209422 - DNA, 1218 bp, Artificial Sequence
  derived and/or modified sequence
atggacagcgccatcaccctgtggcagttcctgctgcagctgctgcagaagcctcagaataagcacatgatctgttggacaagcaacgatggccagttcaagttactccaggccgaggaggtggcccgcctgtggggcataagaaagaataaacccaatatgaactacgacaaactgagccgggctttgaggtattattacgtaaagaacattatcaaaaaagtgaacggacaaaagttcgtttacaagttcgtatcgtatcccgagattctcaatatggatccaatgactgtcggccgaattgagggtgattgcgaatccctcaatttttccgaagtgagtagctcgtcgaaggacgtagagaatggcggaaaggacaaaccaccgcagcctggggccaagacatctagccggaatgactacattcattccgggctgtacagctcttttacactcaactctcttaattcttctaatgtcaagctgtttaagttgataaagaccgagaatccagctgagaagttagcagaaaaaaaaagccctcaggaacccaccccatcagtgattaagttcgtgactacaccttctaaaaaaccacccgtggaacccgttgccgcgaccatttccatcggcccaagtattagcccctcctccgaggaaacaatccaggcgctggagacacttgtctcccctaagctgccatctcttgaagcaccgaccagcgcctccaacgtgatgactgccttcgccaccactccccccatctctagtattccacccctgcaagaaccgccgcgtacacccagcccccccctctcatcccacccagacatcgacacagatatcgattccgtggcctcccaaccaatggagctgcccgagaacctgtccctggaacctaaagaccaagattctgtcctgctggagaaagacaaggttaataattccagtagatctaaaaagcctaagggtctggagctggccccaaccctggtgatcacatcgtccgacccgagccctctcggcatccttagtcccagcctgccgacagcttcactcactccggctttttttagtcaggttgcctgctccttattcatggtgtcgcctctactatcttttatctgcccatttaaacagattcagaatctgtacacgcaggtgtgcttcctgctgcttcgctttgtgctggagcggctctgtgtcacagtcatgtag

SEQ ID NO: 209423 - DNA, 1218 bp, Artificial Sequence
  derived and/or modified sequence
atggacagcgccatcacgctttggcagttcctcctgcagctgctccagaaacctcagaataagcacatgatctgttggacatccaacgacggacaattcaaactcctccaggctgaagaggtggccaggctgtgggggattcggaaaaacaagcccaacatgaattacgataagctgagtagggcattacgttactactatgtgaagaatataatcaaaaaagtaaatggacagaagttcgtttacaagttcgtttcgtacccggaaatccttaatatggaccccatgacagtcggtcggatcgagggggactgcgaatccctaaatttctccgaggtctcatcgagctcaaaggatgttgagaacggcggtaaagataagccaccacaaccaggagcaaagacaagctctcgaaatgactacatacatagtggtctttacagttcatttaccctcaattccttgaactcttctaacgtgaagttgtttaagctcataaagacagaaaaccctgcagagaagcttgcagagaagaaatctccccaggagccaactcctagcgtgatcaaattcgtgactacaccttccaagaagcctcctgtggagcctgtagccgctactattagtattgggccaagtatctcaccctcctctgaggaaactattcaggctctcgaaaccctggtgtctccaaaactgcccagcctggaagccccaacgtccgcctctaacgtgatgaccgcgttcgcaaccacccccccaattagttccattcccccactgcaggaacctcccaggaccccatccccacctctaagcagccacccagacatagatactgatattgactcagtggccagtcagcccatggagctgccagaaaacctgagcttagagcccaaagaccaggattctgtgctgctggagaaggacaaggttaacaattccagccgatctaaaaaacccaaggggttagaactggctccgaccctggttataacatccagtgacccctcccctctgggaatcctatcccccagtctccctactgccagcttaactcctgcttttttcagtcaggtggcctgctccttattcatggtgtctccgttgctgagcttcatctgtcctttcaaacaaattcagaacctgtatacccaggtctgctttctcttactgcggttcgtccttgaaagattgtgcgtgaccgttatgtag

SEQ ID NO: 209424 - DNA, 1218 bp, Artificial Sequence
  derived and/or modified sequence
atggacagcgccatcaccctgtggcagttcctgctgcagctgctgcagaagccccagaacaagcacatgatctgctggaccagcaacgacggccagttcaagctgctgcaggccgaggaggtggccagactgtggggcatcagaaagaacaagcccaacatgaactacgacaagctgagcagagccctgagatactactacgtgaagaacatcatcaagaaggtgaacggccagaagttcgtgtacaagttcgtgagctaccccgagatcctgaacatggaccccatgaccgtgggcagaatcgagggcgactgcgagagcctgaacttcagcgaggtgagcagcagcagcaaggacgtggagaacggcggcaaggacaagcccccccagcccggcgccaagaccagcagcagaaacgactacatccacagcggcctgtacagcagcttcaccctgaacagcctgaacagcagcaacgtgaagctgttcaagctgatcaagaccgagaaccccgccgagaagctggccgagaagaagagcccccaggagcccacccccagcgtgatcaagttcgtgaccacccccagcaagaagccccccgtggagcccgtggccgccaccatcagcatcggccccagcatcagccccagcagcgaggagaccatccaggccctggagaccctggtgagccccaagctgcccagcctggaggcccccaccagcgccagcaacgtgatgaccgccttcgccaccaccccccccatcagcagcatcccccccctgcaggagccccccagaacccccagcccccccctgagcagccaccccgacatcgacaccgacatcgacagcgtggccagccagcccatggagctgcccgagaacctgagcctggagcccaaggaccaggacagcgtgctgctggagaaggacaaggtgaacaacagcagcagaagcaagaagcccaagggcctggagctggcccccaccctggtgatcaccagcagcgaccccagccccctgggcatcctgagccccagcctgcccaccgccagcctgacccccgccttcttcagccaggtggcctgcagcctgttcatggtgagccccctgctgagcttcatctgccccttcaagcagatccagaacctgtacacccaggtgtgcttcctgctgctgagattcgtgctggagagactgtgcgtgaccgtgatgtag

SEQ ID NO: 209425 - DNA, 2118 bp, Artificial Sequence
  derived and/or modified sequence
gcggccgcggagggcctggcaggccccgccgctgcaaggaacgccccgaacgcgcgcgcccggcgtgtagcggccccaagacccgcgccgccgctgccgcgtgcgggggcggggagggcggggcgccaggagccgcggcggcgggagatgcgggcggctgcgggcacccggcgggctcggcttggccgccgccgccttctacggctccgccgcgggggtcgcagcggctgccgcgccgtcctcgagtttccagcgtgaggaggaggctgagggcggagaggcgcatcgtgttcgaggcggagaccgagggggagccccgcgcgcggcgtcgctcattgctatggacagtgctatcaccctgtggcagttccttcttcagctcctgcagaagcctcagaacaagcacatgatctgttggacctctaatgatgggcagtttaagcttttgcaggcagaagaggtggctcgtctctgggggattcgcaagaacaagcctaacatgaattatgacaaactcagccgagccctcagatactattatgtaaagaatatcatcaaaaaagtgaatggtcagaagtttgtgtacaagtttgtctcttatccagagattttgaacatggatccaatgacagtgggcaggattgagggtgactgtgaaagtttaaacttcagtgaagtcagcagcagttccaaagatgtggagaatggagggaaagataaaccacctcagcctggtgccaagacctctagccgcaatgactacatacactctggcttatattcttcatttactctcaactctttgaactcctccaatgtaaagcttttcaaattgataaagactgagaatccagccgagaaactggcagagaaaaaatctcctcaggagcccacaccatctgtcatcaaatttgtcacgacaccttccaaaaagccaccggttgaacctgttgctgccaccatttcaattggcccaagtatttctccatcttcagaagaaactatccaagctttggagacattggtttccccaaaactgccttccctggaagccccaacctctgcctctaacgtaatgactgcttttgccaccacaccacccatttcgtccataccccctttgcaggaacctcccagaacaccttcaccaccactgagttctcacccagacatcgacacagacattgattcagtggcttctcagccaatggaacttccagagaatttgtcactggagcctaaagaccaggattcagtcttgctagaaaaggacaaagtaaataattcatcaagatccaagaaacccaaagggttagaactggcacccacccttgtgatcacgagcagtgatccaagcccactgggaatactgagcccatctctccctacagcttctcttacaccagcatttttttcacaggtagcttgctcgctctttatggtgtcaccattgctttcatttatttgcccttttaagcaaatccagaatttatacactcaagtttgctttctgttacttaggtttgtcttagaaaggttatgtgtgactgtcatgtgaaagttaccccatttctcatcttaattaggattgctaaaatagaaagtttggagtattttcttaaaaaattcattgttctacaagtaaataaatattttgatttttctatttcctcctaaagaaagtacacacactctctcgctctctctcggtcttataaaactcgttggtgtcttataaaacaaacagtgataatctcaagttagaaaacagtaggtcctgagaaccataagaaaaatgactggtgtgatgttgagtaacaagttggtacagttactttagctatttattaacttgctcatctcatagaacattttagtagatttttcacacacctcattattaaaaaaaaacaaacatgctggtgtcttggttacccattattcctctgtacctgaattcaggttggtttttctatttggaaaagactttataaatgttggcttaaaaagaggttgagcaccagaatctcagaatttaccaccaaagaactcatccatgtaaccaaaaaccacttgtacccccaaaaactattgaaataaaaatttaaaaaattttaa

SEQ ID NO: 209426 - protein, 123 aa, Artificial Sequence
  derived and/or modified sequence
MKTILGFKGLFYLHSLIWTCAGDWSAIQVHCTQFWFFARIKPTIFYNLYVNPDEVFLGDGCHVTHVLPNVYYEFFYHPHDCGIVTQPLQEVLLLKTKIRYISRDSTVRSEMPLSCVVHKQKCQ

SEQ ID NO: 209427 - protein, 212 aa, Artificial Sequence
  derived and/or modified sequence
MKVFKFIGLMILLTSAFSAGSGQSPMTVLCSIDWFMVTVHPFMLNNDVCVHFHELHLGLGCPPNHVQPHAYQFTYRVTECGIRAKAVSQDMVIYSTEIHYSSKGTPSKFVIPVSCAAPQKSPWLTKPCSMRVASKSRATAQKDEKCYEVFSLSQSSQRPNCDCPPCVFSEEEHTQVPCHQAGAQEAQPLQPSHFLDISEDWSLHTDDMIGSM

SEQ ID NO: 209428 - DNA, 372 bp, Artificial Sequence
  derived and/or modified sequence
atgaagaccatcctgggcttcaagggcctgttctacctgcacagcctgatctggacctgcgccggcgactggagcgccatccaggtgcactgcacccagttctggttcttcgccagaatcaagcccaccatcttctacaacctgtacgtgaaccccgacgaggtgttcctgggcgacggctgccacgtgacccacgtgctgcccaacgtgtactacgagttcttctaccacccccacgactgcggcatcgtgacccagcccctgcaggaggtgctgctgctgaagaccaagatcagatacatcagcagagacagcaccgtgagaagcgagatgcccctgagctgcgtggtgcacaagcagaagtgccagtag

SEQ ID NO: 209429 - DNA, 372 bp, Artificial Sequence
  derived and/or modified sequence
atgaaaaccatacttggatttaagggactcttttacctgcatagtctcatttggacgtgtgcaggcgactggagtgcaatccaggtgcattgtacgcagttctggttcttcgcccgcattaaacctactatcttctacaacctatacgtgaatcccgatgaggtgttccttggggatggctgtcatgtaactcatgtgcttcctaatgtgtattatgaattcttctaccacccacatgactgcggcatcgtgacccaaccactgcaggaagtcttgctcctaaaaaccaaaattcgatacatctcgcgggacagtaccgtgagaagtgagatgccactgagctgcgtcgtacataagcagaaatgtcagtag

SEQ ID NO: 209430 - DNA, 372 bp, Artificial Sequence
  derived and/or modified sequence
atgaagaccatcctgggcttcaagggcctcttctacctgcacagcctcatctggacctgtgccggggactggagcgccatccaggtgcactgcacccagttctggttctttgcccgcatcaagcccaccatcttctacaacctgtatgtgaacccagatgaggtgttcctgggagatggctgccacgtgacccacgtgctgcccaacgtgtactatgagttcttctaccacccccatgactgtggcatcgtgacccagcccctgcaggaggtgctgctgctgaagaccaagatccgctacatcagccgggacagcacagtgcgctctgagatgcccctgagctgtgtggtgcacaagcagaagtgccagtag

SEQ ID NO: 209431 - DNA, 372 bp, Artificial Sequence
  derived and/or modified sequence
atgaagaccatcctgggcttcaagggcctgttctacctgcacagcttaatctggacttgcgctggagattggagtgcgatccaggttcactgtacacagttctggtttttcgctcgcattaaaccgacgattttctacaatctgtatgtgaatcctgacgaagtttttctcggggatggatgccatgtcacccatgtactgccaaatgtgtactatgagttcttctatcatccacacgattgtggtatagttactcagccacttcaggaagtactcctactgaagacgaagattcgctacatctcaagagactcaactgtcagaagtgaaatgccccttagctgtgtggtccataagcagaaatgtcagtag

SEQ ID NO: 209432 - DNA, 369 bp, Artificial Sequence
  derived and/or modified sequence
atgaagaccattctggggttcaaagggctcttttatctgcattccttgatatggacctgcgctggggactggtcagctattcaagtacactgcacccagttttggttctttgccaggattaaacccacgatattttacaatttgtatgtgaaccccgatgaagtgtttctaggagatggctgccatgtaacccatgttttgccaaatgtctactatgagtttttctaccatcctcatgactgtggtattgtaactcaacctctccaggaagttcttctgcttaaaactaaaatcaggtatatctcaagagactctactgtccgatctgaaatgcctctgtcgtgtgtcgtccacaaacaaaaatgccaa

SEQ ID NO: 209433 - DNA, 372 bp, Artificial Sequence
  derived and/or modified sequence
atgaagacaatcttgggattcaagggactgttttatctgcactccctcatctggacctgtgcaggcgattggtccgccattcaggttcactgcacacaattttggttttttgcgcgaatcaagcctaccatcttctataatttgtacgtgaacccggacgaggtgtttctcggtgacggatgtcacgtgactcatgttctgcccaacgtctactatgagttcttttaccatcctcacgactgtggcatcgtgacgcagcccttgcaggaagtcctgctactgaagaccaaaatcaggtacatcagtcgagattcgacggtcagaagcgagatgccactctcgtgtgtcgttcacaaacagaagtgccaatag

SEQ ID NO: 209434 - DNA, 639 bp, Artificial Sequence
  derived and/or modified sequence
atgaaggtgttcaagttcatcggcctcatgattctgcttacgagtgctttctctgcgggctccggacagtcaccaatgaccgtactgtgctctatcgactggttcatggtgacagtccacccctttatgctcaataatgatgtatgcgtccattttcatgaactccacctgggactgggctgcccgccaaaccatgtccagccacacgcgtaccagttcacctatcgggtcactgagtgcggtattcgggcaaaagccgtgagccaggacatggtgatctactcaactgaaattcactactccagcaaggggacacctagcaagttcgttattccagtgtcttgtgctgcccctcagaagagcccgtggctcaccaaaccctgctccatgcgcgtcgctagcaagtccagagctacagctcaaaaggatgaaaagtgttacgaggtcttcagcttaagccaatcctctcagagacccaattgcgattgtccaccctgcgttttctctgaagaggagcacacacaggtgccttgtcatcaggcaggggcccaggaggcccagcccctgcaaccctctcactttctggacatatccgaggactggtccctgcatacggacgatatgataggctccatgtag

SEQ ID NO: 209435 - DNA, 639 bp, Artificial Sequence
  derived and/or modified sequence
atgaaggtgttcaagttcatcggcctgatgatcctgctgaccagcgccttctctgctggcagcggccagagccccatgacagtgctgtgcagcattgactggttcatggtgacagtgcaccccttcatgctgaacaatgatgtgtgtgtgcacttccacgagctgcacctgggcctgggctgcccccccaaccacgtgcagccccacgcctaccagttcacctacagagtgacagaatgtggcatccgggccaaggctgtgtcccaggacatggtgatctacagcacagagatccactacagcagcaagggcacccccagcaagtttgtgattcctgtgtcctgtgccgccccccagaagagcccctggctgaccaagccctgcagcatgagggtggccagcaagagccgggccacagcccagaaggatgagaagtgctatgaggtgttcagcctgagccagagcagccagaggcccaactgtgactgccccccctgtgtgttttctgaggaggagcacacccaggtgccctgccaccaggccggggcccaggaggcccagcccctgcagcccagccacttcctggacatcagcgaggactggagcctgcacacagatgacatgattggctccatgtag

SEQ ID NO: 209436 - DNA, 639 bp, Artificial Sequence
  derived and/or modified sequence
atgaaggtgttcaagttcatcggcctgatgatcctgctgaccagcgcattcagcgctggcagcgggcagagccccatgaccgtgttgtgttcaatcgactggtttatggttactgtgcatccgttcatgctgaacaatgacgtgtgcgtccacttccatgagctccaccttggcctgggttgccctcccaaccacgtgcagccgcatgcttatcagtttacgtaccgcgtgaccgagtgcggtatacgcgcaaaggcagtgtcacaggacatggtcatttactcaacagagatacattattcaagcaagggaacccccagtaagtttgtcattcctgtgtcgtgcgccgccccacagaagagtccatggcttaccaagccgtgctccatgcgagttgcgtccaaatcacgcgctaccgctcagaaagatgaaaagtgctacgaagtcttttcgctgtcccagtctagtcagcggcctaattgcgactgccctccttgcgtgttcagcgaggaagagcatacccaagtaccgtgtcatcaggcaggagcccaggaagcacaaccactgcagccttcacattttctcgatatttccgaggactggtccctgcacactgatgacatgatcgggagcatgtag

SEQ ID NO: 209437 - DNA, 1131 bp, Artificial Sequence
  derived and/or modified sequence
atatatcagaccatcagaaggatttgtataaagagtgactctcctatgaaggtaaaggccacccctcttcagttccagtgactgagatacatttttccaatcctgggggcaaatacagacacagcaagttccttcttccctttggaaatttggcagctgccttcaccagtgagcacaaagccacatttcaaaggaaactgacaaattatccccagctgccagaagaagaaatcctcactggacggcttcctgtttcctgtggttcattatctgattggctgcagggatgaaagtttttaagttcataggactgatgatcctcctcacctctgcgttttcagccggttcaggacaaagtccaatgactgtgctgtgctccatagactggttcatggtcacagtgcaccccttcatgctaaacaacgatgtgtgtgtacactttcatgaactacacttgggcctgggttgccccccaaaccatgttcagccacacgcctaccagttcacctaccgtgttactgaatgtggcatcagggccaaagctgtctctcaggacatggttatctacagcactgagatacactactcttctaagggcacgccatctaagtttgtgatcccagtgtcatgtgctgccccccaaaagtccccatggctcaccaagccctgctccatgagagtagccagcaagagcagggccacagcccagaaggatgagaaatgctacgaggtgttcagcttgtcacagtccagtcaaaggcccaactgcgattgtccaccttgtgtcttcagtgaagaagagcatacccaggtcccttgtcaccaagcaggggctcaggaggctcaacctctgcagccatctcactttcttgatatttctgaggattggtctcttcacacagatgatatgattgggtccatgtgatcctcaggtttggggtctcctgaagatgctatttctagaattagtatatagtgtacaaatgtctgacaaataagtgctcttgtgaccctcatgtgagcacttttgagaaagagaaacctatagcaacttcatgaattaagcctttttctatatttttatattcatgtgtaaacaaaaaataaaataaaattctgatcgcataaaaa

SEQ ID NO: 209438 - DNA, 639 bp, Artificial Sequence
  derived and/or modified sequence
atgaaggtgtttaaatttataggacttatgattctgcttactagtgccttttctgctggatctggtcaatcccccatgacagtcctgtgctcaatagactggtttatggttaccgttcatcccttcatgctgaacaacgacgtatgcgtgcacttccacgaactccatctgggactaggttgcccacccaatcatgttcagccacacgcgtaccagtttacctacagggtgacagaatgtggaatccgagcaaaggcagtgtcacaggacatggtgatttactccaccgagatacactacagcagtaaagggacaccctcaaagtttgtgatcccagtatcttgtgcagcaccccagaagagcccttggttgactaagccatgtagcatgagggtcgcatccaagtcaagggcaaccgctcagaaagacgagaagtgctacgaggtgttttcccttagtcaatcgagccagcggcctaattgtgactgccccccttgcgtgttttctgaggaggagcacactcaagtcccatgtcaccaagcgggtgcgcaggaggcccagcctctgcaaccaagtcactttctcgatataagcgaagactggtccctgcatactgatgacatgattgggagtatgtag

SEQ ID NO: 209439 - DNA, 639 bp, Artificial Sequence
  derived and/or modified sequence
atgaaggtgttcaagttcatcggcctgatgatcctgctgaccagcgccttcagcgccggcagcggccagagccccatgaccgtgctgtgcagcatcgactggttcatggtgaccgtgcaccccttcatgctgaacaacgacgtgtgcgtgcacttccacgagctgcacctgggcctgggctgcccccccaaccacgtgcagccccacgcctaccagttcacctacagagtgaccgagtgcggcatcagagccaaggccgtgagccaggacatggtgatctacagcaccgagatccactacagcagcaagggcacccccagcaagttcgtgatccccgtgagctgcgccgccccccagaagagcccctggctgaccaagccctgcagcatgagagtggccagcaagagcagagccaccgcccagaaggacgagaagtgctacgaggtgttcagcctgagccagagcagccagagacccaactgcgactgccccccctgcgtgttcagcgaggaggagcacacccaggtgccctgccaccaggccggcgcccaggaggcccagcccctgcagcccagccacttcctggacatcagcgaggactggagcctgcacaccgacgacatgatcggcagcatgtag

SEQ ID NO: 209440 - protein, 538 aa, Artificial Sequence
  derived and/or modified sequence
MPRGWAAPLLLLLLQGGWGCPDLVCYTDYLQTVICILEMWNLHPSTLTLTWQDQYEELKDEATSCSLHRSAHNATHATYTCHMDVFHFMADDIFSVNITDQSGNYSQECGSFLLAESIKPAPPFNVTVTFSGQYNISWRSDYEDPAFYMLKGKLQYELQYRNRGDPWAVSPRRKLISVDSRSVSLLPLEFRKDSSYELQVRAGPMPGSSYQGTWSEWSDPVIFQTQSEELKEGWNPHLLLLLLLVIVFIPAFWSLKTHPLWRLWKKIWAVPSPERFFMPLYKGCSGDFKKWVGAPFTGSSLELGPWSPEVPSTLEVYSCHPPRSPAKRLQLTELQEPAELVESDGVPKPSFWPTAQNSGGSAYSEERDRPYGLVSIDTVTVLDAEGPCTWPCSCEDDGYPALDLDAGLEPSPGLEDPLLDAGTTVLSCGCVSAGSPGLGGPLGSLLDRLKPPLADGEDWAGGLPWGGRSPGGVSESEAGSPLAGLDMDTFDSGFVGSDCSSPVECDFTSPGDEGPPRSYLRQWVVIPPPLSSPGPQAS

SEQ ID NO: 209441 - protein, 198 aa, Artificial Sequence
  derived and/or modified sequence
MDAILNYRSEDTEDYYTLLGCDELSSVEQILAEFKVRALECHPDKHPENPKAVETFQKLQKAKEILTNEESRARYDHWRRSQMSMPFQQWEALNDSVKTSMHWVVRGKKDLMLEESDKTHTTKMENEECNEQRERKKEELASTAEKTEQKEPKPLEKSVSPQNSDSSGFADVNGWHLRFRWSKDAPSELLRKFRNYEI

SEQ ID NO: 209442 - DNA, 1197 bp, Artificial Sequence
  derived and/or modified sequence
catctggtgtattgactgtggccagtcttaaagctagtttttgctatgtggaacatgctgctctaattcagatttaaagagtttcttcctgttaattcgaagctcactgtgcctcttgtttccgagggaagaaggactgattaagtcatctaaatggatgcaatactgaattacaggtcagaagatactgaagattactacacattactgggatgtgatgaactatcttcggttgaacaaatcctggcagaatttaaagtcagagctctggaatgtcacccagacaagcatcctgaaaaccccaaagctgtggagacttttcagaaactgcagaaggcaaaggagattctgaccaatgaagagagtcgagcccgctatgaccactggcgaaggagccagatgtcgatgccattccagcagtgggaagctttgaatgactcagtgaagacgtcaatgcactgggttgtcagaggtaaaaaagacctgatgctggaagaatctgacaagactcataccaccaagatggaaaatgaggaatgtaatgagcaaagagaaagaaagaaagaggagctggcttcaaccgcagagaaaacggagcagaaagaacccaagcccctagagaagtcagtctccccgcaaaattcagattcttcaggttttgcagatgtgaatggttggcaccttcgtttccgctggtccaaggatgctccctcagaactcctgaggaagttcagaaactatgaaatatgaaatatctctgcttcaaaaaatgaggaagagcaagactgtcccctatgctgccaacatgcagtctttgtttatgtcttaaaaatgtcatgtttatgtcatgtctgtgaattgctgagtactaattgattcctccatccttgaatcagttctcataatgctttttaaataagaaaaattcagaagatgaatttcttccaatatttgaataaattaaagctcttagatacagagtagattgtattatatgctttttcctattaatactacttatagaaatccattaaaaagcaatctctgtacagtgtatttaaatatttcattgacatactgtgatctctattagtgatggatgtacaaaaaatgttttcttacccttgacttacaatgaaatgtgaaattacttgtctgaaccccgtggggagaaataaataattttcccaaagttca

SEQ ID NO: 209443 - DNA, 597 bp, Artificial Sequence
  derived and/or modified sequence
atggacgccatcctgaactaccgctcagaggacactgaggactactacactctgctggggtgcgacgagctgagcagcgtggaacagattctcgctgagtttaaggtgcgtgctctggagtgccacccggataagcatcccgagaaccccaaggccgtcgagacattccagaaactacagaaagccaaggaaattctaaccaacgaagagtcacgcgcaaggtacgaccattggcgccggtctcagatgtctatgccgttccagcagtgggaggctctcaatgatagcgtgaaaacatcaatgcattgggtagttcgggggaagaaggaccttatgctcgaagagtctgataagacccacacgaccaaaatggagaacgaggaatgcaacgaacaacgcgagaggaaaaaggaagaattggcaagtaccgctgagaagacggaacagaaggaacccaaacctcttgagaagagtgtcagtcctcagaactctgattccagcgggttcgctgatgtaaatgggtggcacctccggtttaggtggtccaaagatgctccttctgagctgctgagaaaattcagaaattacgaaatttag

SEQ ID NO: 209444 - DNA, 597 bp, Artificial Sequence
  derived and/or modified sequence
atggatgccatcctgaactacagaagtgaggacacagaggactactacaccctgctgggctgtgatgagctgagctctgtggagcagatcctggccgagttcaaggtgcgggccctggagtgccacccagacaagcaccctgagaaccccaaggctgtggagaccttccagaagctgcagaaggccaaggagatcctgaccaatgaggagagccgggcccgctatgaccactggaggaggagccagatgtccatgcccttccagcagtgggaggccctgaatgacagcgtgaagacctccatgcactgggtggtgcggggcaagaaggacctgatgctggaggagagtgacaagacccacaccaccaagatggagaatgaggagtgcaatgagcagcgggagaggaagaaggaggagctggccagcacagctgagaagacagagcagaaggagcccaagcccctggagaagtctgtgagcccccagaacagcgacagcagcggctttgctgatgtgaatggctggcacctgcgcttccgctggagcaaggatgcccccagcgagctgctgaggaagttcaggaactatgagatctag

SEQ ID NO: 209445 - DNA, 597 bp, Artificial Sequence
  derived and/or modified sequence
atggacgccatcctgaactaccggagcgaggacaccgaggactactacactctgttaggatgtgacgagctctcgtccgttgagcagattttggccgagtttaaggtaagggcgcttgagtgccacccagacaagcacccagaaaacccaaaagccgtggagacctttcagaagctccagaaggccaaggagatactgacaaacgaggagagtcgcgcacgttacgaccattggcgtaggagccagatgagtatgccattccaacaatgggaggctctaaatgattccgtaaagacttctatgcattgggtggttagagggaaaaaagatcttatgcttgaggaatcggataagacccacacaaccaaaatggagaacgaggaatgcaacgaacagcgtgaacgaaagaaggaagagctggcctccacagccgagaaaaccgagcagaaagaaccaaagcccctggaaaaatctgtgtctccacagaattctgattcgtccggctttgcggatgtgaacggctggcacctgcgctttaggtggtcaaaagatgcaccaagtgagctgttaagaaagtttagaaactatgagatctag

SEQ ID NO: 209446 - DNA, 597 bp, Artificial Sequence
  derived and/or modified sequence
atggacgctattctgaactacagatcagaggacacagaagactactacactcttttgggctgcgacgaactttcctctgtagaacagatcctggccgaattcaaagttagagcattggaatgccaccccgacaagcatcccgagaatcctaaggctgtggaaacgttccagaagcttcaaaaagcaaaggagatcttgacaaatgaggaaagccgagcacggtacgaccattggaggcggagccagatgagcatgcctttccagcagtgggaggcgctcaacgattccgtcaagacctcaatgcactgggtggtgcgtggcaagaaggacctgatgctggaggaatctgataagacccacacgactaaaatggagaacgaggagtgcaatgagcaaagagagagaaaaaaagaggaactcgcctccactgcagagaaaactgagcagaaggaaccaaaaccactggaaaagagcgtgagcccacaaaatagcgactcatcaggtttcgccgatgtcaacgggtggcacttgcgctttcggtggagcaaagacgctccctccgaactcctacgaaagttccgaaattacgagatttag

SEQ ID NO: 209447 - DNA, 597 bp, Artificial Sequence
  derived and/or modified sequence
atggacgccatcctgaactacagaagcgaggacaccgaggactactacaccctgctgggctgcgacgagctgagcagcgtggagcagatcctggccgagttcaaggtgagagccctggagtgccaccccgacaagcaccccgagaaccccaaggccgtggagaccttccagaagctgcagaaggccaaggagatcctgaccaacgaggagagcagagccagatacgaccactggagaagaagccagatgagcatgcccttccagcagtgggaggccctgaacgacagcgtgaagaccagcatgcactgggtggtgagaggcaagaaggacctgatgctggaggagagcgacaagacccacaccaccaagatggagaacgaggagtgcaacgagcagagagagagaaagaaggaggagctggccagcaccgccgagaagaccgagcagaaggagcccaagcccctggagaagagcgtgagcccccagaacagcgacagcagcggcttcgccgacgtgaacggctggcacctgagattcagatggagcaaggacgcccccagcgagctgctgagaaagttcagaaactacgagatctag

SEQ ID NO: 209448 - protein, 261 aa, Artificial Sequence
  derived and/or modified sequence
MQLVILRVTIFLPWCFAVPVPPAADHKGWDFVEGYFHQFFLTKKESPLLTQETQTQLLQQFHRNGTDLLDMQMHALLHQPHCGVPDGSDTSISPGRCKWNKHTLTYRIINYPHDMKPSAVKDSIYNAVSIWSNVTPLIFQQVQNGDADIKVSFWQWAHEDGWPFDGPGGILGHAFLPNSGNPGVVHFDKNEHWSASDTGYNLFLVATHEIGHSLGLQHSGNQSSIMYPTYWYHDPRTFQLSADDIQRIQHLYGEKCSSDIP

SEQ ID NO: 209449 - DNA, 786 bp, Artificial Sequence
  derived and/or modified sequence
atgcagctggtgatcctgagagtgaccatcttcctgccctggtgcttcgccgtgcccgtgccccccgccgccgaccacaagggctgggacttcgtggagggctacttccaccagttcttcctgaccaagaaggagagccccctgctgacccaggagacccagacccagctgctgcagcagttccacagaaacggcaccgacctgctggacatgcagatgcacgccctgctgcaccagccccactgcggcgtgcccgacggcagcgacaccagcatcagccccggcagatgcaagtggaacaagcacaccctgacctacagaatcatcaactacccccacgacatgaagcccagcgccgtgaaggacagcatctacaacgccgtgagcatctggagcaacgtgacccccctgatcttccagcaggtgcagaacggcgacgccgacatcaaggtgagcttctggcagtgggcccacgaggacggctggcccttcgacggccccggcggcatcctgggccacgccttcctgcccaacagcggcaaccccggcgtggtgcacttcgacaagaacgagcactggagcgccagcgacaccggctacaacctgttcctggtggccacccacgagatcggccacagcctgggcctgcagcacagcggcaaccagagcagcatcatgtaccccacctactggtaccacgaccccagaaccttccagctgagcgccgacgacatccagagaatccagcacctgtacggcgagaagtgcagcagcgacatcccctag

SEQ ID NO: 209450 - DNA, 786 bp, Artificial Sequence
  derived and/or modified sequence
atgcagctggtaatcctaagggtgacaatttttttgccttggtgtttcgccgtgcctgtgccacctgcggcagaccataagggctgggacttcgtggagggctatttccaccagttttttttaaccaaaaaagaaagtcctctgctgacccaagaaacccagacacagttgctgcagcagtttcacaggaacggaacagacctgttagatatgcagatgcatgcattgttgcaccagccccactgcggcgtccctgatgggtctgacacctccatatcccctggacgttgtaagtggaataaacataccctgacctatcggatcatcaactaccctcacgatatgaaaccttccgcagtgaaggacagcatatataacgctgtgtctatttggtcgaacgtgacccctctgatttttcagcaggttcaaaacggcgacgctgatatcaaagtcagcttttggcagtgggcccacgaggatggctggccatttgacggccctggtggcatcctggggcacgcgtttcttcccaatagcggcaaccccggagtggtccatttcgacaagaacgaacactggtcagcctctgatacaggatataatttattcttggtggcaacgcacgagataggtcactcccttggcctgcaacactccggcaatcagtccagcatcatgtacccaacttattggtatcatgatcctcgaacatttcagctgtctgcggatgatatccagcggatccaacacttgtacggagagaagtgttctagtgatataccctag

SEQ ID NO: 209451 - DNA, 786 bp, Artificial Sequence
  derived and/or modified sequence
atgcagcttgtgatactcagagtgacaatattcttgccatggtgcttcgccgtccccgttccaccagccgccgatcacaaaggctgggactttgtagagggctattttcatcaattctttctgacgaaaaaggagagtccactgctgacccaggagacacaaacgcaattgctgcaacagttccacaggaacgggactgatctcctggacatgcagatgcacgccttgctccatcagccacattgcggagttcctgatggcagcgataccagtattagtcctggcaggtgtaagtggaataaacatacgctgacctacagaattatcaattatcctcatgacatgaaacccagtgcagttaaagacagtatctacaacgctgtatccatctggtctaacgtgacacccctgatttttcagcaggttcagaatggtgatgcggacatcaaagtctctttttggcaatgggcacacgaagatggatggcccttcgatggccccggaggaattctcggccacgccttccttcccaatagtggtaaccctggcgttgtccattttgacaagaatgaacactggtccgcaagcgataccggctataatctttttctcgtggctacacatgagataggacacagcctgggattgcaacactccggcaaccagagctccatcatgtatcctacgtattggtatcacgaccccaggaccttccagctgagtgcggatgacattcagcggatccaacatctatatggggaaaaatgcagctccgacatcccatag

SEQ ID NO: 209452 - DNA, 786 bp, Artificial Sequence
  derived and/or modified sequence
atgcagctggtgatcctgcgggtgaccatcttcctgccctggtgctttgctgtgcctgtgcccccagctgctgaccacaagggctgggactttgtggagggctacttccaccagttcttcctgaccaagaaggagagccccctgctgacccaggagacccagacccagctgctgcagcagttccacagaaatggaacagacctgctggacatgcagatgcacgccctgctgcaccagccccactgcggcgtgcctgatggcagtgacaccagcatcagccctggccgctgcaagtggaacaagcacaccctgacctaccgcatcatcaactacccccatgacatgaagcccagcgctgtgaaggacagcatctacaatgctgtgtccatctggagcaatgtgacccccctcatcttccagcaggtgcagaatggagatgctgacatcaaggtgtccttctggcagtgggcccatgaagatggctggccctttgatggccctgggggcatcctgggccacgccttcctgcccaacagcggcaaccctggggtggtgcactttgacaagaatgagcactggagcgccagtgacaccggctacaacctcttcctggtggccacccatgagatcggccacagcctgggcctgcagcacagcggcaaccagagcagcatcatgtaccccacctactggtaccatgaccccaggaccttccagctgtctgcagatgacatccagaggatccagcacctgtatggagagaagtgcagcagtgacatcccctag

SEQ ID NO: 209453 - DNA, 786 bp, Artificial Sequence
  derived and/or modified sequence
atgcagctggtgatcctgcgggtgaccatcttcctgccctggtgctttgcggtgcctgtaccacccgcagccgaccataagggctgggactttgtcgaaggatatttccatcagttttttttgactaagaaagagagtcccttactgacacaagaaacccagactcagctgcttcagcagtttcacaggaacggtaccgaccttttggatatgcagatgcacgccctgttacatcagccacattgcggcgttcctgacggaagcgacactagtatctctccaggaaggtgcaaatggaacaagcataccctgacataccgaattattaactatccccatgacatgaaaccaagtgccgtcaaagatagcatctacaacgcagtgagcatctggtctaatgtgacaccgcttatcttccagcaggttcagaacggcgatgccgatattaaggtttccttctggcagtgggcccatgaagacggctggccttttgatgggcctggcggaatcctgggccacgcttttttacccaattccgggaacccaggcgtcgtacacttcgataagaatgaacattggagcgcctccgacactggctataatctgtttctggtcgcaactcacgaaattgggcatagcttgggtcttcaacactccggcaatcagtctagcatcatgtatccaacctactggtaccacgatccccgcactttccaattatcagctgacgatatacagcggattcagcacctttacggggagaagtgcagctcagacattccgtag

SEQ ID NO: 209454 - DNA, 786 bp, Artificial Sequence
  derived and/or modified sequence
atgcagctggtgatcctgcgggtgaccatcttcctgccctggtgctttgccgtgccagtcccgcctgcagcggaccacaagggttgggactttgtcgaagggtattttcatcagttcttcctgaccaagaaggagtcaccactgctcacccaggagacacagactcagttgctgcagcagttccaccgaaatggcacagatctcctggacatgcagatgcacgctctcctgcaccagccccattgcggagtcccagatggtagtgacacatctataagccccggtagatgtaaatggaacaaacatactctgacttacaggataataaattacccacacgatatgaaacccagcgccgttaaggactcgatctataacgcagtgagcatctggtcaaacgtaactcccttgattttccagcaagtccaaaacggcgatgcagacatcaaggtatccttttggcagtgggctcatgaagatggttggcccttcgatggccccgggggcattctcggacacgcgttcctgccgaacagcggcaatccaggcgtggtccattttgataaaaacgaacactggagcgcctcagataccggctacaatcttttcctggtggccacccacgagatcggacactctctagggttgcagcactcaggcaaccagtccagcataatgtatccaacatattggtaccatgatccacgcacctttcaactgtctgcagacgacattcagcggatccaacatctgtatggggagaagtgctctagtgatatcccttag

SEQ ID NO: 209455 - DNA, 786 bp, Artificial Sequence
  derived and/or modified sequence
atgcagctggtaatactccgtgttacaatatttctgccttggtgctttgctgtgcctgttccacccgcagcggaccacaaaggttgggatttcgtggagggctactttcaccagttttttttgaccaagaaagaatcgccacttctgacccaagaaacgcagacacagcttcttcagcaatttcatcgtaacggcactgatctgctcgatatgcaaatgcatgctctgctgcaccagcctcactgtggagtccccgatggatccgatacctctatcagcccagggagatgcaaatggaataaacacaccctgacataccgtattattaactatccacatgacatgaaaccatcagcagtgaaagattccatttataacgctgtgtctatctggagcaacgtaacacctcttatcttccagcaggttcagaacggtgatgccgatattaaagtgtcgttctggcagtgggcacacgaggatgggtggccatttgacggtcctggtggcatacttggccatgcattcctgcctaactcagggaatcctggtgtagtacactttgacaagaacgagcattggtcagcttcagatacaggttataacctgtttctggtggcaacccatgaaatcgggcatagcctgggtctccagcattccggcaatcagagctcaattatgtatcccacgtattggtatcacgatccaagaacgtttcagctcagcgcagatgatattcagagaatacagcatctgtatggcgagaaatgtagttctgacatcccgtag

SEQ ID NO: 209456 - DNA, 786 bp, Artificial Sequence
  derived and/or modified sequence
atgcaactggtgattctgcgcgttactatttttttaccctggtgctttgctgtcccagtccccccagctgcggatcacaaggggtgggatttcgtggagggttacttccaccagttctttctgactaaaaaggagagccctctgttaacccaagagactcaaacccagctgttacagcagttccaccgcaacggaacagatctgttagacatgcagatgcatgccctgctgcatcagcctcattgcggcgtacctgacggttccgacacttccatctccccaggtaggtgcaaatggaataaacatacactgacctaccggattataaactacccccatgacatgaagccctccgcagtcaaagactcaatctataacgctgtgagcatctggtctaacgtcactcctctgatttttcagcaggtgcagaatggagatgccgacataaaggtgagtttctggcaatgggcccacgaagatgggtggccatttgatggacccggtggaatcctggggcatgcgttcctgcccaattcgggcaatcctggcgttgtgcattttgacaagaacgagcactggagcgcctcagatactggctataatctgttcctggtcgctacgcacgagattggacacagcctcgggcttcaacatagtggcaatcagagcagcataatgtacccaacatattggtaccacgatcccaggaccttccagctgagcgccgatgatattcaaaggatccagcacctgtatggggagaaatgttcctccgatatcccatag

SEQ ID NO: 209457 - DNA, 989 bp, Artificial Sequence
  derived and/or modified sequence
gacaaatgagggtttggcatgcagctcgtcatcttaagagttactatcttcttgccctggtgtttcgccgttccagtgccccctgctgcagaccataaaggatgggactttgttgagggctatttccatcaatttttcctgaccaagaaggagtcgccactccttacccaggagacacaaacacagctcctgcaacaattccatcggaatgggacagacctacttgacatgcagatgcatgctctgctacaccagccccactgtggggtgcctgatgggtccgacacctccatctcgccaggaagatgcaagtggaataagcacactctaacttacaggattatcaattacccacatgatatgaagccatccgcagtgaaagacagtatatataatgcagtttccatctggagcaatgtgacccctttgatattccagcaagtgcagaatggagatgcagacatcaaggtttctttctggcagtgggcccatgaagatggttggccctttgatgggccaggtggtatcttaggccatgcctttttaccaaattctggaaatcctggagttgtccattttgacaagaatgaacactggtcagcttcagacactggatataatctgttcctggttgcaactcatgagattgggcattctttgggcctgcagcactctgggaatcagagctccataatgtaccccacttactggtatcacgaccctagaaccttccagctcagtgccgatgatatccaaaggatccagcatttgtatggagaaaaatgttcatctgacataccttaatgttagcacagaggacttattcaacctgtcctttcagggagtttattggaggatcaaagaactgaaagcactagagcagccttggggactgctaggatgaagccctaaagaatgcaacctagtcaggttagctgaaccgacactcaaaacgctactgagtcacaataaagattgttttaaagagt

SEQ ID NO: 209458 - DNA, 1189 bp, Artificial Sequence
  derived and/or modified sequence
agtttcttacaaaatcgtcctatccagcatgcacttttggatactctttcaactcagaagtcaacataaagggtatggatgatgacgccactcacagattcaaagaaagggcaaactggcagagtgagtcattggatgttgctggcacagctataaagatccagtggcccaagttgtgtacctgaattcaagcagtgggacaaatgagggtttggcatgcagctcgtcatcttaagagttactatcttcttgccctggtgtttcgccgttccagtgccccctgctgcagaccataaaggatgggactttgttgagggctatttccatcaatttttcctgaccaagaaggagtcgccactccttacccaggagacacaaacacagctcctgcaacaattccatcggaatgggacagacctacttgacatgcagatgcatgctctgctacaccagccccactgtggggtgcctgatgggtccgacacctccatctcgccaggaagatgcaagtggaataagcacactctaacttacaggattatcaattacccacatgatatgaagccatccgcagtgaaagacagtatatataatgcagtttccatctggagcaatgtgacccctttgatattccagcaagtgcagaatggagatgcagacatcaaggtttctttctggcagtgggcccatgaagatggttggccctttgatgggccaggtggtatcttaggccatgcctttttaccaaattctggaaatcctggagttgtccattttgacaagaatgaacactggtcagcttcagacactggatataatctgttcctggttgcaactcatgagattgggcattctttgggcctgcagcactctgggaatcagagctccataatgtaccccacttactggtatcacgaccctagaaccttccagctcagtgccgatgatatccaaaggatccagcatttgtatggagaaaaatgttcatctgacataccttaatgttagcacagaggacttattcaacctgtcctttcagggagtttattggaggatcaaagaactgaaagcactagagcagccttggggactgctaggatgaagccctaaagaatgcaacctagtcaggttagctgaaccgacactcaaaacgctactgagtcacaataaagattgttttaaagagtaa

SEQ ID NO: 209459 - protein, 162 aa, Artificial Sequence
  derived and/or modified sequence
MRSSPGNMERIVICLMVIFLGTLVHKSSSQGQDRHMIRMRQLIDIVDQLKNYVNDLVPEFLPAPEDVETNCEWSAFSCFQKAQLKSANTGNNERIINVSIKKLKRKPPSTNAGRRQKHRLTCPSCDSYEKKPPKEFLERFKSLLQKMIHQHLSSRTHGSEDS

SEQ ID NO: 209460 - DNA, 486 bp, Artificial Sequence
  derived and/or modified sequence
atgcgatcctcacctggcaacatggagaggatcgtgatctgccttatggtgatttttctggggacactggtccacaaaagcagctctcagggtcaagaccgccatatgattcgaatgaggcagcttattgacatagttgatcaacttaagaattatgtcaatgacctcgtccccgaattcctgcctgctcctgaggacgtggagacaaattgcgagtggagtgctttttcttgctttcaaaaggcacagctgaagtccgccaataccggcaacaacgaacggatcataaacgtctcaatcaaaaaactgaagcgaaaaccgccgtcaaccaatgcgggtcggcgacagaagcatcggctcacatgccctagctgcgactcctacgagaagaagccgccaaaggagttcctggaacggttcaagtcccttctgcagaaaatgatccatcaacacctgagttccaggactcacggctccgaagatagt

SEQ ID NO: 209461 - DNA, 486 bp, Artificial Sequence
  derived and/or modified sequence
atgcgaagctcgccaggcaacatggaacgaattgtgatttgtctgatggtgatctttctggggactttggtccataaatcgtcctcgcagggtcaagataggcatatgatccgcatgcggcaacttatcgacatcgtggatcaactgaagaactacgtgaacgatcttgtgcctgaattcctgccggccccagaggacgtcgaaaccaactgtgaatggtcagccttttcgtgctttcagaaggcacaactgaagtcggcgaatactggtaacaacgagagaatcatcaacgtgtcaataaagaaacttaagaggaagcccccatccaccaacgcaggacgtagacaaaaacatcgactcacttgtccctcgtgcgattcgtacgagaagaaacctcccaaagaatttctggagcggttcaagtcgctgctgcaaaagatgatacatcagcacttgtcctccaggacccatggttccgaagattcc

SEQ ID NO: 209462 - DNA, 486 bp, Artificial Sequence
  derived and/or modified sequence
atgaggagttcacccggtaacatggaacgcattgtgatttgtctgatggtcatattcttgggcacactggttcacaaatccagctcccaaggccaggatcggcatatgataaggatgagacagttaatcgacattgttgaccagttgaaaaattacgtaaacgatctggtgcccgagtttctgcctgcacctgaagacgtagagaccaactgcgaatggtctgcgttctcatgtttccagaaggcccagctaaaatcagctaacacaggcaacaatgaacgaatcatcaacgtcagcatcaagaagctgaaaagaaagcctccctctacaaatgctgggcgaagacagaaacatcgtctcacttgtccctcctgcgattcgtacgaaaaaaagccaccaaaagagttcctagaacgatttaaatcgctcctgcagaagatgatccaccagcatctaagctcccgcacccacggttccgaggattct

SEQ ID NO: 209463 - DNA, 486 bp, Artificial Sequence
  derived and/or modified sequence
atgcggagcagcccgggtaacatggagagaatcgtgatctgcctgatggtgatctttctggggactctggtgcacaagtcctcgtcgcagggacaagatcggcacatgatccggatgcggcaattgatcgatatcgtggatcaattgaagaattacgtcaacgatttggtgccagaattcctgccagcccccgaggacgttgaaaccaactgcgaatggtccgcattctcctgttttcaaaaggcccaacttaagtcagcaaacaccggcaacaacgaacgaatcatcaatgtgtcgatcaaaaaactgaagcgcaagcctccatctactaacgcgggacggaggcagaagcaccgccttacttgcccgtcctgcgactcatacgagaagaagccgcctaaagagttcctcgagcgatttaagagcctcctccagaagatgattcatcagcacctgtcgtcgcgcactcatgggtccgaagattcg

SEQ ID NO: 209464 - DNA, 486 bp, Artificial Sequence
  derived and/or modified sequence
atgcgttcaagtccgggcaatatggaacgcatcgtaatatgcctgatggtgatcttcctggggactctggttcacaaaagctcctcgcaggggcaagaccggcacatgatccggatgcggcagctgatagatatcgtggaccaactgaagaattatgtaaacgacctggtgcccgaattcctaccagctcccgaggacgttgaaactaactgcgagtggagcgcttttagttgctttcagaaggctcagcttaagtctgctaacacggggaataacgaacgtattattaacgtgtccataaagaaactcaaaagaaagcccccatcaactaacgccggaaggcggcaaaaacacaggctcacatgccccagttgcgattcttacgaaaagaaaccaccaaaggagtttctggagcggtttaagtccctgcttcagaaaatgatccaccagcacctgtcgtcccgcactcacggcagcgaggactca

SEQ ID NO: 209465 - DNA, 486 bp, Artificial Sequence
  derived and/or modified sequence
atgcgctcgtcaccgggaaatatggaacggatcgtgatctgtctcatggttatcttcttgggtaccctggtccacaagtccagcagccagggacaagaccggcatatgattcggatgaggcaacttatcgatatcgttgatcagctgaagaactacgtcaacgacctcgtgccggaattcctgccagcgccggaagatgtggaaacgaattgcgaatggagcgcattctcatgcttccaaaaggcccaacttaaaagcgccaacaccggcaacaacgaacgcatcattaacgtgtcaatcaaaaagctcaagcgcaagccaccttcgaccaatgcagggcgtcgccagaaacaccgactgacctgcccgtcctgcgactcgtacgaaaagaagccccccaaggagttcctggagcggttcaagtccctgctccaaaagatgattcatcagcacctctcaagcaggactcatggctcggaggattcc

SEQ ID NO: 209466 - DNA, 486 bp, Artificial Sequence
  derived and/or modified sequence
atgaggagtagtcccggtaacatggagaggattgtaatttgtttgatggtcatttttctggggacactggtccacaaaagtagttctcagggacaggacaggcacatgatccggatgcgccagctaatagatattgtagaccagttgaagaactacgtgaatgacttagtgcctgaatttttgcccgctcccgaagacgttgagacaaactgcgaatggagcgccttctcctgttttcaaaaggctcagctgaagagtgccaacactggcaacaatgaaaggattataaatgtgagtattaagaagctgaaacggaagccaccctccactaatgctggacgccggcagaaacacaggcttacatgtccttcctgcgactcctacgagaagaaacctcccaaagaatttctggagcgatttaagtcgctgctccagaagatgatccaccagcacctgagtagcaggactcatggctccgaggacagt

SEQ ID NO: 209467 - DNA, 486 bp, Artificial Sequence
  derived and/or modified sequence
atgcgatcttctccgggaaatatggaaaggatcgtaatttgtcttatggttatttttctaggtacgctagtgcataagtcatctagccagggtcaggaccgtcatatgatcagaatgcgtcagctgatcgatatcgtagaccaactgaagaactacgtgaatgatcttgtgcctgagtttctcccagcgccagaagatgtcgagacgaactgtgaatggtcagcattctcctgcttccagaaagcgcaactcaagtccgccaacaccgggaacaacgagcgtataattaacgtgagtatcaagaagttgaagcgcaagccaccgtcaactaacgcaggccggagacaaaagcaccgccttacatgcccttcatgtgactcgtacgagaagaagccacctaaagaattcctcgaacggttcaagtccctactgcagaaaatgattcaccagcatcttagctctcggacccatggatctgaggattca

SEQ ID NO: 209468 - DNA, 486 bp, Artificial Sequence
  derived and/or modified sequence
atgcggtcgagccctgggaatatggaaagaattgtgatctgtctcatggtgatcttcttgggcactcttgtgcataaatcttcgtcccaaggacaagataggcacatgattagaatgaggcagctgattgatatagtggatcaactgaagaactacgtcaatgatctggtgccggagtttcttcctgcacccgaggacgtggaaaccaattgtgaatggagcgcattttcgtgcttccaaaaggctcaactcaagtcggctaacaccggaaataacgaaagaatcattaacgtgtcgattaagaagctcaagagaaagcctccatccaccaacgcaggtagacggcagaagcaccgtctcacctgtccttcgtgcgatagctacgagaaaaagccacctaaggaatttctcgaaagatttaagtcacttctccagaagatgattcaccaacatctttcgtcgagaactcatgggtccgaagatagc

SEQ ID NO: 209469 - DNA, 486 bp, Artificial Sequence
  derived and/or modified sequence
atgagatcgtcgccagggaatatggaaaggatcgtgatatgtcttatggtcatctttctcggcactctggtgcacaagtcatcatcacaaggtcaggatagacacatgattagaatgcgacaacttattgacatcgttgatcaacttaagaattacgtgaacgatctggtgcctgaattcctgccggccccagaagatgtggagactaactgtgaatggagcgcgttctcttgctttcaaaaggcacagctgaagagcgcaaataccggcaacaatgagcggatcataaacgtgtcgatcaagaagctgaaaagaaagcccccgtcgactaacgcagggagaaggcagaaacaccgactgacctgtccttcgtgcgattcatacgagaagaagccacctaaggaattcttggagcgtttcaaaagccttctccagaagatgattcatcaacatctgtcatccagaacccacggttcggaggactcc

SEQ ID NO: 209470 - DNA, 486 bp, Artificial Sequence
  derived and/or modified sequence
atgcgctcgtcaccgggcaacatggaacggatcgtgatctgcctgatggtcattttcctcggcacgttggtgcataagtcgtcttcccagggtcaggaccggcacatgatccgcatgcgccaactgatcgatatcgttgaccagctcaaaaactacgtgaacgaccttgtgccggaattccttccggcacctgaggacgtcgagactaattgcgagtggtctgccttctcgtgcttccagaaggctcaactcaagtcagcgaacactggaaataacgagcggatcatcaacgtgagcataaagaagctgaagcgcaagccaccctcgactaatgcagggcgtaggcagaagcaccggttgacttgtccatcctgtgattcgtacgagaaaaagcctccaaaggaattcttggaacgctttaagtcgctcttgcagaaaatgatccaccagcacctgtcgtcgaggacccatggctcggaagatagc

SEQ ID NO: 209471 - DNA, 486 bp, Artificial Sequence
  derived and/or modified sequence
atgcgctccagcccaggaaacatggagcgcattgtaatttgcctgatggtaatcttcctgggcactctcgtacacaagagttcctctcagggccaagacagacatatgatccgaatgcgccagctgattgatatagtcgaccagctcaaaaattacgtaaatgatctggtgccggaatttctgccagcgccggaggacgtggaaacgaactgcgagtggtccgcgttcagttgttttcaaaaagctcagctgaaatccgcaaacaccggaaacaacgaacgtataataaacgtctctatcaagaagctgaagagaaagcccccatccaccaatgctgggcgacgccagaagcacaggctgacctgcccctcgtgtgattcttatgagaagaaaccacccaaagaatttttggaacgcttcaagtccttgctgcaaaaaatgattcatcaacacctgagcagtagaacacacggatctgaggactca

SEQ ID NO: 209472 - DNA, 486 bp, Artificial Sequence
  derived and/or modified sequence
atgcgctctagtcccgggaacatggaacggatcgtgatctgcctgatggtgatctttcttgggacacttgtacacaaaagttcttctcaaggacaggatagacatatgatacgaatgcgccagttgatagatatcgttgatcaactcaagaactatgtcaacgatctagttcctgagttcctgcccgcccccgaagatgtggaaacaaactgtgagtggtcagcattctcgtgctttcaaaaagcgcagttaaaatccgccaacacagggaacaatgaaaggatcataaacgtctctataaaaaagcttaaaagaaagcccccttcgactaacgccggacggcggcaaaaacacagactcacatgcccttcttgtgactcttatgaaaagaaaccacctaaagagttcctagaaagatttaaaagtcttctgcagaaaatgatccaccagcacctttcatcgaggacacatgggtcagaagattcc

SEQ ID NO: 209473 - DNA, 486 bp, Artificial Sequence
  derived and/or modified sequence
atgcggtcaagcccggggaacatggagcgcatcgttatctgcctgatggtgattttcttgggtaccctcgtgcacaagtcctcgtcacagggacaggataggcacatgattcgcatgcgccagctgatcgatatcgtggaccaacttaagaattatgtgaatgacctcgtccctgagtttctgccagcgccagaagatgtggaaaccaactgcgaatggtcagccttcagctgcttccagaaggcgcagctgaaatcggccaataccggaaataacgaacggatcattaacgtctccatcaagaagctgaagcggaagcctccaagcactaacgccggacgcagacagaagcaccgtcttacttgcccaagctgtgattcgtacgagaagaagccgccgaaggagttcctcgaaaggtttaagtccctgctgcagaaaatgatccaccagcatctgagctcaagaacccacggatcagaggactca

SEQ ID NO: 209474 - DNA, 486 bp, Artificial Sequence
  derived and/or modified sequence
atgcggagcagtcccggaaatatggagagaattgtaatctgcctgatggtgatatttttaggcaccctcgtgcataaatcctccagccaggggcaagataggcatatgattagaatgagacagctaatcgatatcgtggaccagcttaaaaactatgtgaacgatctcgtcccggaattcttaccagcccctgaggacgttgaaaccaattgcgaatggtccgcattttcatgcttccagaaggcccagctgaagtctgctaatactgggaacaacgaacggatcatcaatgtatctattaagaagttaaagcggaaaccgccttccaccaatgcaggacggagacaaaagcatcgtctgacctgcccctcttgcgacagctacgaaaaaaagccacctaaggagtttctggaacgattcaaatccctattgcagaaaatgatccatcagcacctgagttcccgcacgcacgggtcggaagatagt

SEQ ID NO: 209475 - DNA, 486 bp, Artificial Sequence
  derived and/or modified sequence
atgagatcctcacctggcaacatggagaggatcgtcatttgcttgatggtgatcttcctgggtaccctggtccacaagagctcctcccaggggcaagaccgtcatatgatccgaatgcggcagcttatagatatcgtggaccaacttaagaactatgtgaacgacctggtgccagaatttcttcccgctccagaggacgtcgaaaccaactgtgaatggtccgcgtttagttgctttcagaaggcacaactgaaatccgcaaacaccggcaataatgagaggattatcaacgtgtcgattaagaagctcaaacggaaacctccttccactaatgcaggtcggagacaaaagcatcgcctgacctgtccctcgtgtgactcgtacgagaagaagcctcctaaagagttccttgaacgctttaagtcactgctccagaagatgatccaccagcatttgtctagtcgaactcatggatcggaagatagc

SEQ ID NO: 209476 - DNA, 486 bp, Artificial Sequence
  derived and/or modified sequence
atgcggtcgtcgcctggtaatatggaaagaattgtgatttgtctgatggtgattttccttggcactcttgtgcataagtcatcatcgcaaggtcaagatcggcacatgatcaggatgcgacaacttatcgatatcgtggatcaactcaagaactacgtcaatgatcttgtcccagagtttttgcctgctccagaagatgtcgagactaactgtgagtggtcagcatttagctgttttcagaaggcacagctgaagtctgcaaacacgggaaataacgaacgtattatcaacgtgagcatcaagaaattgaaaagaaagccaccctcgaccaacgccgggcggcgccagaagcatagactgacttgtccatcgtgcgattcatatgagaaaaagccccctaaggaatttcttgagagatttaagtcccttctccaaaagatgattcatcaacacctctcatcgcggacccatggatcggaggactca

SEQ ID NO: 209477 - DNA, 486 bp, Artificial Sequence
  derived and/or modified sequence
atgcgctcctctccaggcaatatggaaaggatcgtaatatgtttgatggtaatcttcctaggaacattagtgcacaaatcatcgtcccagggtcaggatcgtcatatgattcgaatgcgacagctgatcgatattgtagatcagttgaagaattatgtgaacgatctggtccccgaattcttacccgcgcctgaagacgtcgaaaccaactgtgaatggtctgcattctcttgcttccagaaggcgcagctaaaatcagcaaataccggcaataatgaaaggattatcaatgtgagcattaagaagctgaaaagaaaaccccccagtacaaacgccggacggagacaaaaacacaggctcacctgtccctcctgcgacagctacgaaaaaaagccaccaaaggaattcctggaacgttttaaaagcctcctgcagaagatgatccaccagcatctctcctccaggacgcacggatcagaggacagt

SEQ ID NO: 209478 - DNA, 486 bp, Artificial Sequence
  derived and/or modified sequence
atgaggtcatctccgggcaatatggagcggatcgtcatttgcttgatggtcattttcctgggaacattggttcataaatcttccagtcaggggcaggaccgtcacatgatcaggatgaggcagctgattgatatcgttgatcaactgaagaattacgtgaatgacctcgtacctgagttcttgccggccccggaggatgtggagaccaactgcgagtggtctgcgttttcatgcttccagaaggctcaactgaagtccgccaacaccgggaacaacgagcggatcatcaatgtctcgatcaaaaagctgaagcggaaacctccatcaactaacgctgggaggaggcaaaaacaccgactaacatgcccttcgtgcgacagctatgagaagaaacccccaaaagaatttttggaaagatttaagtctttacttcaaaaaatgattcaccaacatctatccagtaggactcacggtagtgaagacagc

SEQ ID NO: 209479 - DNA, 486 bp, Artificial Sequence
  derived and/or modified sequence
atgcgctcgagtcctggtaatatggagcgcatcgtgatttgcctgatggtcattttcttaggaactttagttcataaaagcagcagccaggggcaggatcggcacatgatccgcatgaggcagctcatagatattgtcgaccaattgaaaaattacgtgaatgacctagtgcccgagttcctccctgctcccgaagatgtagagacaaattgcgagtggtcagctttctcttgtttccagaaggcacagctcaagagtgcaaatacagggaacaatgagaggatcataaatgtatccatcaaaaagctaaagcgtaaacctccatcaactaatgctggcagaagacagaagcacagacttacttgtccaagttgtgactcgtatgaaaagaagccgcccaaggagttcctagagcgctttaagtccttactgcaaaagatgatccaccagcacctatcatcaaggacacatggatcagaggattct

SEQ ID NO: 209480 - DNA, 486 bp, Artificial Sequence
  derived and/or modified sequence
atgcgcagcagcccgggcaatatggagagaatcgttatctgcctgatggttatcttcctgggcacactggttcataaatctagcagtcagggccaggatagacacatgataagaatgcgccagctgatcgacattgttgaccagctgaagaattatgttaacgatctggtgcctgaatttctgccagcgccagaagacgtggaaacaaactgtgagtggagcgccttttcatgctttcagaaagcccagcttaagagtgcaaatacaggtaataatgagcgaatcatcaacgtgagcatcaaaaaactgaaacgaaagcccccatccacaaacgccggcaggcgccagaaacacagattgacatgcccttcctgtgactcctacgagaagaaacctcccaaggagtttcttgagcgattcaaatctctgctccagaaaatgatacatcagcacctgagttctagaacccatgggagcgaagatagc

SEQ ID NO: 209481 - DNA, 486 bp, Artificial Sequence
  derived and/or modified sequence
atgaggagctccccagggaacatggaaagaattgtcatttgcctgatggtcatcttccttggaacgctggtgcacaaatccagtagtcaaggccaagatcgccatatgatcaggatgcgtcagttaattgatatcgttgaccagctcaaaaattatgttaatgatctggtcccagagttccttcctgcccccgaagatgtagagacgaactgcgaatggagcgctttcagctgcttccagaaggctcagctgaaatccgccaacaccgggaacaacgaaaggattattaacgtgagcatcaaaaagttgaagaggaaacctccatcaaccaatgctggtagacgccagaagcaccgactcacatgcccctcgtgcgatagctacgaaaaaaaaccccccaaagagtttctagaacgttttaagtctctgctccagaagatgatacaccagcatttgagctcgagaacacatggtagcgaggattcc

SEQ ID NO: 209482 - DNA, 486 bp, Artificial Sequence
  derived and/or modified sequence
atgcgctcgagccccggtaacatggaacgtatagtcatatgcctgatggtaatctttctaggcacgctggtccacaagagcagttcgcaaggacaggatcgccacatgatccggatgcgccagttgatcgatattgtcgatcagctcaagaattatgtgaatgatttggtaccggaattcctgccggccccggaagatgtggagaccaactgcgagtggtcggccttctcatgcttccaaaaagcccaactcaagtctgcgaacactggcaataacgagcgcatcattaacgtgagcatcaagaagctcaagcgcaagccgccgtccacaaatgcaggccgccgccagaagcataggttaacatgcccatcctgcgacagttacgagaagaagccgccgaaagagttcttggagcggtttaagagcttgctccagaagatgatccaccagcatttgagcagcagaactcatggatcggaggattcc

SEQ ID NO: 209483 - DNA, 486 bp, Artificial Sequence
  derived and/or modified sequence
atgaggtcatcaccaggcaatatggaaagaatagtaatatgtctcatggttatattcctcggcactttggtgcataagtcttcttcccagggccaggaccgacatatgatcagaatgagacagttgatagacatagtggaccagctcaagaactatgtcaacgacctggtgccggagttcctgcctgctccagaggacgtggagaccaattgtgaatggagtgccttttcctgttttcagaaggcccagctgaaaagtgccaacaccggcaacaatgagaggatcattaacgtgtctataaagaaattaaagcgtaagcctccaagcacgaatgctgggagaagacagaaacaccgattaacatgcccttcttgtgattcatatgagaagaagccccctaaggagttcctggaaagatttaagtcactgctgcaaaaaatgatccatcagcatctctcgtctcggacacatggttccgaagattcc

SEQ ID NO: 209484 - DNA, 486 bp, Artificial Sequence
  derived and/or modified sequence
atgagatcaagtcccggcaacatggagcgcatcgtcatttgcctcatggtcatatttctcgggaccctggttcacaaatcgtcatctcagggccaggaccgccacatgatacgaatgcgccagctcatcgatattgtggatcagctgaaaaactatgtgaatgaccttgtccctgagttcttgcctgctccagaggatgtggagacaaattgtgaatggagcgcgttttcctgtttccagaaggcccagctgaaatccgcaaataccggaaacaatgagaggataataaacgtgtccatcaaaaagctgaaacgcaagcccccaagtacaaacgcaggaagaaggcaaaaacacagactcacgtgtccaagctgcgatagctacgagaaaaaaccaccaaaggagttcctggagagattcaaatctctgctgcagaaaatgattcaccagcatctgtccagtagaacccacgggtcagaggattcc

SEQ ID NO: 209485 - DNA, 486 bp, Artificial Sequence
  derived and/or modified sequence
atgcgatcgtccccgggtaatatggagaggattgtgatatgtctgatggtgatatttcttggtaccctggtgcataaatcctcaagccagggacaagatcggcatatgatccggatgagacaactgatagatatcgtcgaccaactcaagaattacgtgaacgacctcgtgcctgagtttttgccagcgcccgaggacgtggaaaccaactgcgaatggtccgcattctcgtgtttccagaaggcacagcttaagtccgcgaacacgggcaacaacgagcggatcatcaatgtctccataaagaagctgaaaagaaagcccccatcaactaatgctggaaggagacaaaagcatcgtctgacttgtccatcctgcgattcctacgagaagaagcctcctaaagagtttctcgaacgattcaagtccctgctccagaagatgatccatcaacacttgagcagtcgaacccacggaagcgaagatagc

SEQ ID NO: 209486 - DNA, 486 bp, Artificial Sequence
  derived and/or modified sequence
atgaggtcctcacctgggaacatggaaaggatcgtgatatgtcttatggtcatctttctaggcactctggtccacaagtcttcttctcagggacaagatagacacatgattagaatgcggcagcttatagacatcgtggatcaactcaagaactacgttaatgatctggtgccagagtttcttcccgccccagaggatgttgaaacgaattgcgagtggagcgcatttagctgttttcagaaggcccagttaaagagcgcgaatacaggtaacaatgagcggataatcaacgtgtctatcaagaaactaaaaaggaagccgccctctacaaatgctggacgaaggcagaagcatagactgacctgtcctagctgcgattcctatgagaagaagcctccgaaggaattcctggagagattcaagtcactgctccagaaaatgatccatcagcacctctccagtcggacccacggttctgaagattct

SEQ ID NO: 209487 - DNA, 486 bp, Artificial Sequence
  derived and/or modified sequence
atgcggagctcccctggtaatatggagaggatcgtgatatgccttatggtgatatttctgggaaccttggtgcataagtcctcatcccaagggcaggatcggcatatgatacgaatgaggcaactgattgatatcgtggaccaactcaagaattatgttaatgatctggtcccagaatttcttccagctccagaagatgtggaaaccaattgtgaatggtccgcattttcctgttttcagaaagcacaacttaaatcagcaaacaccggcaataacgagcgaatcatcaacgtgtcaattaagaagctgaaacggaagccaccctcaaccaacgccggaagaaggcagaagcaccggctcacctgtccctcatgtgatagctacgagaagaagccaccaaaggaattcctggaaagattcaagtcgctgctgcagaagatgattcatcagcacctctcgtcgcggactcatggatcggaagattcg

SEQ ID NO: 209488 - DNA, 486 bp, Artificial Sequence
  derived and/or modified sequence
atgcgctcatccccgggtaacatggaacggatagtcatctgccttatggtcatctttctcggaaccctggtgcacaaaagcagctcccaaggccaggaccgccatatgattcggatgagacaactcatagacattgtcgaccagctcaagaattacgtgaacgacctggtcccggaattcctgccggcaccggaagatgtggagactaactgcgagtggtcggcgttcagctgttttcagaaggcccaacttaaaagcgccaataccggaaacaacgagcggatcatcaatgtgtcgatcaagaagctcaagcgcaagcccccaagtaccaacgcgggccgtcggcagaagcacaggctgacttgcccatcttgcgattcctacgagaagaaaccgcccaaagagttccttgaaaggttcaagagcctgttgcagaaaatgatccatcagcacctgagcagccgaactcatgggagcgaagattcc

SEQ ID NO: 209489 - DNA, 486 bp, Artificial Sequence
  derived and/or modified sequence
atgcgctcaagccctggaaacatggaacggattgtgatatgcttgatggtcatctttctgggaactctggtccataaatcctcgagccagggacaagacaggcacatgattcggatgcggcaactcattgatattgtggaccaactgaaaaactacgtgaacgatctggtgcctgaatttctgccagcccctgaagatgtcgagactaattgcgaatggtccgccttcagctgttttcagaaagcccaactgaaatcggcaaatacggggaacaacgaacgtatcattaacgtgtcgataaagaagctgaagcgtaaacccccttccactaatgcagggagaaggcaaaagcaccgcctcacttgcccttcctgcgattcctacgagaaaaaaccacctaaggaatttcttgaacgattcaaatcactgcttcaaaagatgattcatcagcacctttcatcccggacccatggtagcgaagattcg

SEQ ID NO: 209490 - DNA, 486 bp, Artificial Sequence
  derived and/or modified sequence
atgcggtcctctcccggaaacatggaacgaatagtgatatgccttatggtgatttttctcggcaccctcgtgcataagagcagcagccagggtcaagatcggcatatgatcagaatgagacagctgatagacatagtggaccagctgaaaaactacgtcaacgaccttgtgccagaattccttcctgcacccgaggacgtggaaactaattgcgagtggagcgccttcagctgtttccaaaaggcacaattgaagtcagcaaatactggaaataacgaacggattatcaacgtctctattaagaagctgaaaagaaagccaccgagcaccaacgctggacgtcgtcaaaagcatcggcttacttgcccttcctgtgactcgtacgagaagaagcctcctaaagaatttcttgaaaggttcaagtcccttctgcaaaagatgattcatcagcacttgtcgtcgagaactcatggtagcgaagattca

SEQ ID NO: 209491 - DNA, 486 bp, Artificial Sequence
  derived and/or modified sequence
atgagaagcagtcctggtaatatggaaagaattgtgatttgtcttatggttatctttctgggcacactggttcacaagtctagttctcaggggcaggatcggcacatgatccgaatgaggcagttgattgacattgttgatcagctaaagaactatgtgaatgacctggtgcccgagtttctgccagccccggaggatgtggagaccaactgtgaatggtctgcttttagttgctttcaaaaggctcagctgaagtctgctaacaccggcaataacgagcgtatcatcaatgtctcaatcaagaaacttaagcgtaagcccccaagtacaaatgccgggcgccgccagaaacaccggctgacatgtccctcttgcgactcttacgagaagaaacctccaaaagagttcttggagcgcttcaagtccttgctgcaaaagatgatccaccaacatctctccagccgaactcacggctccgaagattcc

SEQ ID NO: 209492 - DNA, 486 bp, Artificial Sequence
  derived and/or modified sequence
atgcgctcatcgccgggcaacatggagcgcattgtgatctgccttatggtgattttcctagggacactggtccacaaaagctctagtcagggccaggatcgccatatgatcaggatgaggcagctgatcgatattgttgaccagctcaagaactacgtgaacgatttggtgcccgagttcctccctgcccctgaggatgtggagacaaactgtgaatggagcgctttttcatgcttccagaaagcacagctcaaatccgcgaacaccggcaataatgagagaattatcaacgtcagcatcaagaagctgaaacgcaagcctcctagcacaaacgccggacgaagacaaaaacaccgcctaacatgcccgtcgtgtgattcgtacgaaaagaagcctccaaaagagtttctggagcgcttcaagtcacttcttcagaagatgattcatcaacatctttcaagtcggacccacggcagcgaggacagt

SEQ ID NO: 209493 - DNA, 486 bp, Artificial Sequence
  derived and/or modified sequence
atgcgctcttccccaggaaacatggaaaggatcgtgatttgcttgatggtaatcttcctcggaaccctggtgcataagtcctccagccagggccaagataggcatatgattcgcatgaggcaattgattgacattgtggaccagctgaaaaactacgttaatgaccttgttcccgaattccttcctgcgccggaagatgtggagacaaactgtgaatggtccgcgttttcatgcttccagaaagcccagttgaagagtgctaacacaggtaacaacgaaagaataattaacgtgtctatcaagaaattgaagcgcaagcctccaagtacaaatgcgggaagaaggcaaaaacacagattgacctgtccgtcctgcgactcatacgagaagaaaccccctaaggagttcctggagagatttaaatccttgctccagaagatgatccaccagcacttgtcctccaggacacatggctctgaagacagt

SEQ ID NO: 209494 - DNA, 486 bp, Artificial Sequence
  derived and/or modified sequence
atgagatcatctcctggtaatatggaacgcattgtcatctgcctcatggtgattttcctcggtacactggtacataagtcaagctcccaagggcaggatagacatatgataaggatgcgccagctcatcgacatcgtcgaccagctaaagaattacgtgaacgatctcgttccagagttcctccccgctccagaggatgttgagaccaattgtgagtggagcgccttcagctgtttccagaaggcccaactcaagtctgccaacacaggcaacaacgagaggataattaatgttagcatcaagaagttgaagcgcaagccaccgtcgactaatgccggtaggaggcaaaaacaccgattgacctgtccctcttgcgatagctatgaaaaaaagcctcctaaagagtttctcgagcggttcaagagtctacttcaaaaaatgatccaccagcacctgtctagcaggactcacgggagcgaagattca

SEQ ID NO: 209495 - DNA, 486 bp, Artificial Sequence
  derived and/or modified sequence
atgcgcagctcacccggaaatatggaaagaatcgtgatctgtctgatggtcattttcctgggtactctcgtgcacaagagctcgtcccaaggacaagatcgccatatgatcagaatgcgccagctgatcgacatcgtggatcagctgaaaaactacgtcaatgaccttgtgcccgagtttctgccagctcctgaagatgtagaaaccaactgcgagtggtcggctttttcctgctttcagaaagcccagctcaaatcagcaaataccggaaacaacgagcgcatcatcaatgtctcgatcaagaaactgaagcggaagccaccgtccaccaatgccggcagacgccaaaagcacaggctcacttgcccaagctgtgattcgtacgagaagaagcctccaaaggagttcctggaacgcttcaaatccctgctgcagaaaatgatccaccagcatctctcgtcgcggactcatggctcggaagatagc

SEQ ID NO: 209496 - DNA, 486 bp, Artificial Sequence
  derived and/or modified sequence
atgcgctctagtcccgggaatatggagcggatcgtgatatgcctgatggtaattttcctagggacactggtacacaagtccagctcacaaggtcaggaccgtcacatgattaggatgagacagctgatcgacattgtcgatcagttaaagaactacgtgaacgatttagtccccgaattcttaccagctcctgaagacgtggaaaccaattgcgagtggagtgccttttcctgctttcaaaaggctcagctgaagtctgccaacaccggtaacaacgagagaattatcaatgtgtctattaaaaaactgaagagaaaaccccccagcacaaacgccgggcgcaggcagaagcacaggcttacctgcccatcttgtgattcatatgagaaaaagcccccgaaggaatttctggagagattcaaaagcttactccagaagatgatacaccagcaccttagctcgcgaacccatgggtctgaggactct

SEQ ID NO: 209497 - DNA, 486 bp, Artificial Sequence
  derived and/or modified sequence
atgagaagctctcctggaaacatggagagaatagtgatctgcctaatggtgatctttcttggaacccttgtccacaaatcttcatcacagggccaggaccgccatatgattaggatgcgacaactaattgacattgtggaccagctgaaaaattacgtgaacgatctggtgccggagtttcttccagcccctgaagacgtcgaaaccaattgtgaatggtctgcattcagttgcttccagaaggcacagcttaagagcgcaaacacagggaacaatgagagaataataaatgtgtccattaagaaactcaagcggaagcctcccagtacaaatgctgggaggaggcaaaaacataggttgacgtgccccagttgcgatagttatgagaagaaaccgcctaaggaattcctcgagagattcaaatcattactacaaaagatgattcatcagcatctgagttccagaacacacggatccgaggattca

SEQ ID NO: 209498 - DNA, 486 bp, Artificial Sequence
  derived and/or modified sequence
atgcgctctagtcccggaaacatggagcggatcgtgatctgtctgatggttatttttcttggtacattagtacataaaagtagcagccagggccaggatcgccacatgatccgtatgaggcaactcatagacattgtcgatcagctcaaaaattacgttaacgatttagtgcctgaattcctacctgctcccgaggatgttgagactaactgcgagtggtcagcattttcttgctttcagaaagcccagctgaaatctgccaacacaggcaacaatgagcggataattaacgtgtcaatcaagaaactgaaaaggaagccaccaagcacaaatgctggccgccggcagaagcatcgtctaacctgccccagctgtgactcctatgagaagaagccacctaaggagttcttagagagatttaagtccctgctgcagaaaatgatccatcagcacctgtcttcccggacccacggaagcgaggattca

SEQ ID NO: 209499 - DNA, 486 bp, Artificial Sequence
  derived and/or modified sequence
atgaggtcttcccctggaaacatggaacgcattgtcatttgcctcatggtgatcttcttggggacacttgtccacaaatcctctagtcaaggacaggaccgccacatgattcggatgaggcaactcatcgacatcgtagatcagctcaagaactacgttaacgatctggttcctgagtttctgccagcccctgaagacgtggagaccaactgtgagtggagcgcttttagctgtttccagaaggctcagcttaagagtgcaaataccgggaacaacgaaaggatcatcaatgtctctatcaagaaactcaaacggaagccgcccagcacaaacgcaggaaggaggcaaaaacatagacttacctgtccctcctgcgacagctacgagaaaaagccccccaaagaattcctggaaaggtttaaaagcctgctgcagaaaatgatccatcagcacctttccagcaggacccacgggtctgaagattcg

SEQ ID NO: 209500 - DNA, 486 bp, Artificial Sequence
  derived and/or modified sequence
atgagaagcagtccaggaaacatggagagaattgtaatctgtctgatggtcattttcttgggcacacttgtgcacaaatcgtcatctcaggggcaggataggcatatgattcggatgcgacagctaattgatatagttgatcagttgaaaaactatgtgaatgatttggttcccgaattcttgccagcaccggaagacgtcgaaacgaattgcgagtggtccgcattctcatgcttccaaaaagctcaactgaagtccgccaatacaggaaacaatgaacgaatcattaacgtaagcatcaaaaagttaaaaaggaaacctccaagcacaaacgcaggtcggcgccaaaagcacagactgacatgtccttcatgcgactcttatgagaagaaacccccgaaagaatttctagaacgctttaaatccctacttcagaaaatgattcaccagcacctcagctctcgcacacatggatcagaggactct

SEQ ID NO: 209501 - DNA, 486 bp, Artificial Sequence
  derived and/or modified sequence
atgcgaagctcgcctggcaacatggagagaatcgtgatctgcctgatggtgatcttcctgggaactttggtccacaagtcctcgtcgcaaggccaggaccggcacatgattcgcatgcgccagctcattgacattgtggatcagttgaagaactacgttaacgatctggtgcctgaatttctgccagcaccggaggatgtggagactaactgcgagtggtcggcgttctcatgtttccagaaggctcaactgaaatctgcgaataccggcaacaacgaaagaatcattaatgtgtcaatcaaaaagctcaaaagaaaacctccttcaactaacgcaggcaggaggcaaaagcatcggctcacctgcccgtcgtgcgattcgtatgagaagaaacccccaaaagaattcctggaaagattcaagagcctcctccaaaagatgatccaccagcatttgagctcccgcacccacggaagcgaggatagc

SEQ ID NO: 209502 - DNA, 486 bp, Artificial Sequence
  derived and/or modified sequence
atgcgttcttcaccagggaacatggagcgaatcgttatttgccttatggtaatcttcctcggcacattggttcacaaatcatcaagccagggccaagacagacacatgattaggatgagacagctgattgatatcgtggaccagctcaagaattacgtcaatgacctcgtgccagagtttctgccagcgccagaggatgtggagactaattgtgaatggtcggccttttcatgctttcagaaagcacagttgaaatccgctaataccgggaataacgaaagaattattaacgtttccataaagaaactgaaacgaaaaccaccttcgacaaatgccgggagaagacagaagcaccggctaacctgcccatcctgcgacagctacgagaagaaaccccccaaggaatttcttgagagatttaaatcactgttacagaagatgatacatcagcacctctcctctcgcactcacggatccgaggattct

SEQ ID NO: 209503 - DNA, 486 bp, Artificial Sequence
  derived and/or modified sequence
atgcgtagctctcctggcaacatggagcgcatcgtcatttgtttaatggttattttcctgggaacactcgtccacaagagctctagccagggtcaagaccgtcacatgattcgcatgaggcaactgattgacatcgtcgaccagctcaagaattatgtcaacgaccttgtcccggagttcctccctgctcctgaggacgtggaaactaactgtgagtggagcgctttctcatgtttccagaaggctcaattgaaatccgctaacacgggtaacaacgagaggatcatcaacgtttcaatcaagaagctgaagcggaagcctccgtcgaccaacgccggtcgtcgccagaagcaccgtctcacttgcccctcatgcgacagttatgaaaaaaagccccccaaagagttcctcgagcgtttcaagtcgcttctgcagaagatgatccaccagcacctgagctcacgaacccacggttcagaagactcg

SEQ ID NO: 209504 - DNA, 486 bp, Artificial Sequence
  derived and/or modified sequence
atgcgctcttctccaggtaacatggagagaatcgtcatttgtcttatggtcatcttcttgggtaccttggtccacaaatctagttcccagggtcaagacaggcacatgatccgcatgcgccaactgatcgacatcgtagaccagttgaaaaattacgtgaatgacctggttccagagttcctgcccgccccagaggacgtcgagacaaactgtgaatggtccgccttttcttgcttccagaaggctcagcttaaatctgcaaataccggtaacaacgaacgtataataaatgtctctataaagaagttgaagcgtaagcccccctctacaaacgccggaagaagacagaagcacagacttacttgtcctagctgcgattcttacgagaaaaagcctcccaaggaatttcttgagcgtttcaaaagtctgcttcagaagatgatccatcagcacctgtcatcccgcacccacggatccgaggacagc

SEQ ID NO: 209505 - DNA, 486 bp, Artificial Sequence
  derived and/or modified sequence
atgcgctcctctcctggaaacatggagagaatagtgatttgcctcatggtcatctttttggggactctcgtccacaaatctagttcccaggggcaggatcggcatatgatccgaatgagacagttaattgacatcgtggatcagctgaagaactatgttaatgacttggtccccgaatttttaccggcgcccgaagacgttgagacgaactgcgaatggagcgcattctcgtgttttcagaaggctcagctgaagtccgcaaatacaggaaacaatgagcggattattaacgtgagcatcaagaaactgaagaggaaaccaccttctacaaacgcggggagacggcagaagcaccgactgacatgccctagttgcgattcttatgagaagaagccccctaaggaattccttgagaggtttaagagtctcttacagaaaatgatccaccaacacctgtcctccagaacccacgggtcagaggactcg

SEQ ID NO: 209506 - DNA, 486 bp, Artificial Sequence
  derived and/or modified sequence
atgcgttcatctccgggcaacatggagcgcattgtgatctgcctgatggtcatattcttaggtaccctggttcacaagtcgtcctcacagggacaggaccgtcatatgattcgtatgaggcaactaattgacatagtcgatcaacttaagaattatgtaaacgatttggttcctgagttcctgccagctccagaggacgtggagactaattgcgagtggtctgctttttcctgtttccagaaagctcaacttaaatccgccaacaccggtaataacgaaagaatcatcaacgtttcaatcaagaaactgaagagaaaaccaccaagcaccaatgctggcagaaggcagaaacacaggctcacttgcccttcttgtgactcctacgagaagaagcccccgaaggagttcctggaaaggttcaaatctctcttacagaaaatgatccatcaacatctgtcttcaaggacccatggcagcgaggactct

SEQ ID NO: 209507 - DNA, 486 bp, Artificial Sequence
  derived and/or modified sequence
atgaggagctcgccgggaaacatggagcggatcgtgatttgcctcatggtgatttttctgggaactctggtgcacaagtcatcatcccaaggacaggacagacatatgatccggatgaggcaactgatcgatatcgtcgatcagctgaagaactacgtgaacgacctcgtgcctgaattcctcccggccccagaggatgtcgagactaattgcgaatggtcggcgttctcctgcttccagaaggctcagctgaagagcgccaacacgggcaacaacgagaggattatcaacgtgtctattaagaaactgaagcggaaaccgccctcaactaacgctggtcggcgccaaaagcaccgcctcacttgcccgtcgtgtgattcgtacgaaaagaagccgccgaaggaatttctcgaaagattcaagtccttgctccaaaagatgatccaccaacatctctcctcgcgcacgcacggttcggaagattcg

SEQ ID NO: 209508 - DNA, 486 bp, Artificial Sequence
  derived and/or modified sequence
atgcgctcttcccccggtaatatggagcggatcgtgatttgcttgatggttatcttcctgggaactctggtccacaagagctcctcccagggccaagaccgccacatgataaggatgaggcagttgatcgacatcgtggaccagcttaaaaactatgtgaacgatcttgtgccagaatttttgcccgctccagaggacgtcgagacgaattgcgagtggagcgcatttagctgcttccagaaggcgcaactgaagtccgctaataccgggaataatgaacggatcatcaatgtttcaataaagaaactgaagaggaaacctcctagcactaacgctggacggcgacagaagcaccgcttgacttgcccttcatgcgattcctacgagaagaagcctccaaaagagttcctggaacggttcaagagtctcctccagaagatgatccaccagcacctatctagcagaacacatggcagcgaagattcc

SEQ ID NO: 209509 - DNA, 486 bp, Artificial Sequence
  derived and/or modified sequence
atgagatcctctccagggaacatggagcggatcgttatctgtctcatggtgatcttcctgggcactttggtgcacaagtcaagctcacagggacaggaccgtcacatgatacggatgaggcagctaatcgatatcgtggaccaactgaaaaactacgtaaacgatctcgtcccagaatttctgccagcaccagaggatgtggagacgaactgcgaatggtctgccttctcatgctttcaaaaagcgcagctgaagtctgccaacacaggcaataacgaacgcatcatcaacgttagtattaagaagcttaagcgtaagccgccgtcaacaaatgcgggccgaagacagaaacaccggctgacgtgtccatcttgcgacagttacgagaaaaagccacctaaggagtttttggagcggtttaaatccctacttcaaaaaatgatacatcagcacctttcgagccgtacacacgggtctgaagactcg

SEQ ID NO: 209510 - DNA, 486 bp, Artificial Sequence
  derived and/or modified sequence
atgagatcgagccctgggaacatggagaggattgtgatctgtcttatggtcattttcttgggaactctggtacataagtcctcatcacagggtcaagatcgccatatgattcggatgagacagcttatagacattgtggatcaactgaagaattacgtgaacgatctcgtgcccgaattcctgccagcaccggaagatgtcgaaaccaattgcgaatggtcagccttttcgtgtttccagaaggcacaattgaagtcagccaacactgggaataacgagcgaattatcaatgtttccattaagaagctgaaacggaagccgcctagcactaacgctggacgccgacagaagcatagactgacttgtccatcgtgtgactcctacgagaaaaaacctccaaaggaatttcttgagaggtttaagtcccttctccaaaagatgatacatcagcatctttcgagcagaactcatggctcggaagattca

SEQ ID NO: 209511 - DNA, 486 bp, Artificial Sequence
  derived and/or modified sequence
atgcgtagttctcctgggaacatggaaagaattgttatttgcttaatggtgattttcctgggaacgctagtacataagtcctcttctcaggggcaagatcgtcacatgataagaatgcgacagcttattgatattgtcgatcaattgaaaaattatgttaatgatctggttccagagtttttaccagccccagaggacgtggaaaccaattgtgagtggagtgctttttcatgcttccaaaaagcccaactgaaatctgctaacaccggtaacaatgagcgaattattaatgtatctattaaaaaactcaaacgtaaaccaccttcgacgaatgccggtcgacgccaaaagcaccggcttacttgcccatcgtgtgattcttatgaaaaaaagcctccaaaagagtttctcgagcgttttaagtccctcttacaaaaaatgatacatcagcatctctcgtcgcgaacgcacggtagtgaagacagt

SEQ ID NO: 209512 - DNA, 486 bp, Artificial Sequence
  derived and/or modified sequence
atgagatcatcaccaggtaatatggaacgaattgttatttgtttgatggttattttcttaggtacacttgtacataaatcttcttcacaaggacaagatagacatatgattagaatgcgacaattaattgatatagtcgatcaacttaaaaattatgtaaatgatttagtacctgaatttttaccagcacctgaggacgttgagactaattgtgaatggtcagcattttcttgttttcaaaaagctcaattaaagtcagctaatactggaaataatgagagaattattaatgtttcaataaagaagcttaaaagaaaacctccatcaacaaatgctggacgaagacaaaaacatagacttacttgtccatcatgtgattcttatgaaaaaaaaccaccaaaagaattcttggaaagattcaaatcacttttacaaaaaatgattcatcaacatctttcaagtagaacacatggatcagaagattca

SEQ ID NO: 209513 - DNA, 486 bp, Artificial Sequence
  derived and/or modified sequence
atgcgctcttccccgggcaatatggagcgcattgtgatctgccttatggtgatcttcctgggaaccctggttcataaatcaagctcgcaggggcaggacagacacatgattcgcatgcgccagctgatcgatattgtggaccaactgaagaattacgtcaacgacctggtccccgaattccttccggcaccggaggacgtcgagactaactgcgagtggtccgcttttagctgcttccagaaagctcaactcaagtccgcaaacacgggaaacaacgaacgcatcatcaacgtgtccatcaagaaactgaaacgaaagcctccgtccactaatgccgggcgccgccaaaagcatcgcttgacttgtccctcgtgtgattcttacgagaagaaaccacctaaggaatttctggaacggttcaagtcattgctgcaaaagatgatccaccagcacctctcttcgcgcacccatggttcggaagattcg

SEQ ID NO: 209514 - DNA, 486 bp, Artificial Sequence
  derived and/or modified sequence
atgaggtcatctcctggcaacatggagcggattgttatctgcttgatggtgatttttttgggtacacttgtgcacaaaagcagcagtcagggccaggatcgacacatgatccgtatgcggcaactcatcgacattgtggaccagctcaagaactacgtgaacgacttggttcctgagtttctcccggcaccagaggatgtggagacaaactgtgaatggagtgctttttcctgtttccagaaggcacagctgaagtcagctaacacgggcaataacgaacgaatcataaacgtgagtattaagaaactcaagcggaaaccaccttctacgaacgcaggcaggagacaaaaacacaggctgacctgcccatcatgcgacagctatgagaagaagccgcctaaggaatttctcgagcgtttcaagagccttttgcagaaaatgatacaccaacatctgtcaagtaggacacatggaagtgaggactcc

SEQ ID NO: 209515 - DNA, 486 bp, Artificial Sequence
  derived and/or modified sequence
atgcgctcttctcctggcaatatggagcggatcgttatttgcttgatggttatctttctgggcaccctggttcacaagagcagctcgcaggggcaggacagacacatgatcaggatgcgtcagctcatagacattgtggatcagctgaagaattacgtcaacgatctcgtgccagaattcctgcctgcacccgaggatgtagaaacgaactgtgaatggtctgctttcagctgcttccagaaagctcagctgaagtctgccaatacaggcaacaatgaacgtatcattaacgtctccattaagaaactcaaaagaaagcccccctcgacgaacgcgggcagaaggcagaaacaccgcctgacgtgtcctagctgcgacagttatgaaaagaaaccacctaaagaattcctcgagagattcaagtccctcctgcaaaaaatgatccaccagcacttgtcatcacggacccatggtagcgaggactcc

SEQ ID NO: 209516 - DNA, 486 bp, Artificial Sequence
  derived and/or modified sequence
atgcgctcctcgccgggcaacatggaacgaattgtgatatgtctgatggtcatcttcctgggaaccctggtccacaagtcgtccagccaaggacaggacagacacatgatccggatgaggcagctcatcgacatcgtggaccagctgaagaactacgtgaatgacctggtgcccgagttcctccccgctccggaggatgtggaaacgaactgcgaatggtcggctttctcgtgctttcagaaggcgcaacttaagagcgccaacactggcaacaatgaaagaatcatcaatgtatcgattaagaaactgaagcgcaagccgccttccaccaatgccgggcggaggcagaagcatcgtctgacttgccctagctgtgattcatacgagaaaaagccgccaaaggaatttctggaacgattcaaatcgctgttgcaaaagatgatccaccaacatctctcctcgagaactcacggatcagaggattcc

SEQ ID NO: 209517 - DNA, 486 bp, Artificial Sequence
  derived and/or modified sequence
atgaggtctagcccagggaacatggaaagaattgtgatctgtttgatggtgatattcctgggaaccctggtacataaatcctcttcccagggccaggaccgccatatgatccggatgcggcagttgatcgacatagtggaccagctgaaaaactatgtcaacgacctggttccagaatttctgcctgctccagaagacgttgaaacaaactgcgagtggtccgccttcagctgcttccagaaggcccaactgaagagtgcgaacacaggaaataatgagcgcatcatcaacgtcagtatcaagaagttaaaacggaaacctccgtccaccaatgcggggaggaggcaaaaacaccgtctgacttgccccagctgcgactcctatgagaagaagccccccaaagagtttctcgaaaggtttaagagcctcctgcaaaaaatgatccatcaacatctgagtagtagaacacatggctcagaggacagt

SEQ ID NO: 209518 - DNA, 486 bp, Artificial Sequence
  derived and/or modified sequence
atgaggtcctcaccaggcaatatggagcggattgttatttgcctaatggtaattttcttggggaccctggttcataagtcatcaagccaggggcaggaccgccacatgatacgaatgcgacaactaattgacatcgtggaccagctgaaaaactacgtgaatgacctagttccggagttcctgcccgcccccgaggacgttgagacgaattgtgagtggtccgctttctcctgttttcaaaaagctcaacttaagtctgcaaacacggggaacaacgaaaggattatcaacgtctcgatcaagaagctcaaacggaagccgccgagcacgaacgcaggacgacgacagaaacaccggctgacttgtccctcatgcgattcgtacgaaaaaaaacctcccaaggagtttctcgaacgtttcaagtccctgctgcaaaagatgattcaccagcatctctcctcccgaacacacggatccgaagactcc

SEQ ID NO: 209519 - DNA, 486 bp, Artificial Sequence
  derived and/or modified sequence
atgcgatcgtcccccggaaatatggagcgcatcgtcatttgccttatggtgatatttcttggcacgcttgtccataagtcgtccagccagggtcaagacagacatatgattcggatgaggcaattgatcgatattgtggatcagctgaagaactacgtcaatgatctcgtgcctgaattcctcccggcacctgaggatgttgaaaccaactgcgaatggtcggcattctcgtgttttcaaaaggcacagcttaagtcggcaaataccggaaacaatgagcggataatcaatgtctccataaagaagctcaaaagaaagccacctagcaccaacgcaggcagacgacagaagcaccgcctgacttgtccctcctgcgattcctacgaaaagaaaccaccgaaggagttcctcgagcgcttcaagagcctgctgcagaaaatgattcatcagcatttgagctcacgtacgcacggctcggaggactcc

SEQ ID NO: 209520 - DNA, 486 bp, Artificial Sequence
  derived and/or modified sequence
atgcggtcttccccaggcaacatggaacgcattgtcatttgcctgatggtgatttttctgggtactctggttcacaaaagcagcagccagggccaggaccggcacatgatcagaatgcgccaactgatagatattgtggatcagctgaaaaactacgtgaacgatctggttcctgagtttctacctgcgccagaagatgtggagaccaattgcgagtggagcgccttcagctgctttcagaaggcacaactcaagtccgccaacactggtaataacgagcgtatcattaatgtctccattaagaaactaaagcgtaagccgccctctacgaatgccggtaggcgccagaaacaccgcttgacatgccccagctgtgattcttacgagaaaaagccgcccaaggagtttctcgagcggtttaaaagcctgctgcaaaaaatgatccaccagcacttgtcttcacgcacccatggctctgaggatagc

SEQ ID NO: 209521 - DNA, 486 bp, Artificial Sequence
  derived and/or modified sequence
atgagatccagcccaggtaacatggaaagaattgtgatttgccttatggtgattttcctgggcactcttgttcacaaatcatcctcccagggacaagaccgtcacatgatcagaatgcggcagcttatagacattgtcgatcaactcaagaactacgtcaatgatttggtgccggaatttcttcctgcaccagaagatgtggagactaattgtgagtggtcggcattttcgtgtttccagaaggcgcaattgaagtcggctaacaccggaaacaacgaaagaatcatcaacgtatcgatcaagaaactcaagagaaagcctccttcaactaatgcaggacgccgtcaaaagcatcgactgacttgtccctcgtgtgattcgtatgaaaagaagccgccaaaagagtttcttgaaaggtttaagtcacttctgcaaaagatgatccatcagcatctctcctcacgaacccatggatctgaggactcg

SEQ ID NO: 209522 - DNA, 486 bp, Artificial Sequence
  derived and/or modified sequence
atgcgatcttcaccgggaaacatggagcggatcgtcatttgcctgatggtgatcttcctcggaaccctcgtgcacaaatcgtcatcccagggccaggatagacacatgatcagaatgcggcagctcatcgacatcgtggaccagctgaaaaactacgtgaacgatttggtcccggagttcctcccagccccggaagatgttgaaaccaactgcgagtggagcgcgttttcgtgtttccaaaaagctcagctgaagagcgccaataccgggaataatgaacggatcattaacgtgtccatcaagaagctgaaaaggaagcctcccagcactaacgcaggtcgccgccaaaagcatcgcttgacttgcccttcgtgcgactcgtacgaaaagaagccgccaaaggagtttcttgaacgcttcaagagcctgctgcagaagatgatccaccaacacctgtcatccagaacgcatggatccgaggactcg

SEQ ID NO: 209523 - DNA, 486 bp, Artificial Sequence
  derived and/or modified sequence
atgcggagctcacccggaaatatggaacgaatagtgatctgccttatggtcatcttcttggggaccttggtgcacaaaagctcctcgcagggccaggatcgccacatgattcggatgaggcagctcatcgacatagtggaccagctcaaaaactacgtcaacgacctggtgccagaattccttccggcaccggaggatgtggaaaccaactgtgagtggtcggccttctcgtgcttccaaaaggcccagctgaagagcgcaaacactggaaacaatgaacgcatcattaatgtctcgatcaagaaactcaagcgcaagccaccgtccactaatgcgggcagacggcaaaagcataggctgacctgcccttcctgcgacagctacgaaaagaagccgccaaaggaatttcttgaaaggttcaagtcacttctccagaaaatgatccatcaacatctctcgtcaagaactcacgggtccgaggactcc

SEQ ID NO: 209524 - DNA, 486 bp, Artificial Sequence
  derived and/or modified sequence
atgaggtcctcgccaggaaacatggaacggatcgttatctgcctgatggtgatcttcctcggaactctggtgcacaagtcgtcgtcgcaggggcaggaccgccacatgattcggatgcggcaactcatcgacatcgtggaccaactgaagaactatgtgaatgacctggttccggagttcctcccggcacccgaggatgtggagacgaactgtgagtggtccgccttttcatgcttccaaaaagctcagttgaaatcggcgaacactggaaacaatgagcggattatcaacgtgagcatcaaaaagctgaagagaaaaccaccgtcaactaacgctggtcgccggcagaaacaccgcctcacttgcccgtcatgcgattcatacgaaaagaagcccccgaaggaattcttggagcgttttaagagcctcctgcagaagatgatccaccagcatctgtcctcaaggactcatggatccgaagatagc

SEQ ID NO: 209525 - DNA, 486 bp, Artificial Sequence
  derived and/or modified sequence
atgcgatcctcacccggtaacatggaacgcattgtgatctgtctgatggtcattttcttgggtactctcgttcacaagtcatcatcccagggacaggatcggcatatgattcgcatgcgccagctgatcgatatagtggatcaactcaagaactacgtgaacgatctggtgcctgaatttctgcccgcgccagaggacgtggagactaactgtgaatggtccgcattttcctgcttccaaaaggctcaactcaagtcggcaaatactgggaacaacgagaggatcataaacgtgagcatcaagaaactcaagcgtaagccaccttccaccaacgcaggtcggaggcaaaaacatcgcctgacttgcccaagctgtgattcctacgagaaaaagcctcctaaagagttcctggaaagattcaagagcttgctgcaaaagatgattcaccagcacttgtcgtcgcggacccatggatcagaggactct

SEQ ID NO: 209526 - DNA, 486 bp, Artificial Sequence
  derived and/or modified sequence
atgcggagctccccgggcaatatggagcgcatcgtcatttgcctcatggtgatttttctcggcacattggtgcacaagtcctcttcacagggccaggaccggcatatgatacgcatgcgccagcttattgatatcgtggatcagctgaaaaattacgtgaacgatctggtgcccgagttcctgcctgctccggaggatgtggagacaaactgtgagtggtccgcttttagttgcttccagaaggcgcagctaaaaagcgcgaatactgggaacaacgaacgcatcataaacgtctccatcaaaaaactgaagcggaaaccaccatccaccaacgctggcaggagacagaagcacagattgacgtgcccttcgtgtgacagttatgaaaaaaagccccctaaggaatttctggagcgctttaaatcattattacagaaaatgatccaccagcatctcagttctcgtactcacggcagtgaggacagt

SEQ ID NO: 209527 - DNA, 486 bp, Artificial Sequence
  derived and/or modified sequence
atgcgatcctcccctggcaatatggagcgtattgtgatatgcttgatggttatcttcctgggcaccttggtacacaagtcatcaagccaggggcaggatcgacacatgatacgtatgcggcagcttatcgacattgtggaccaattgaagaattacgtcaatgacctggtccctgaatttctgccagctccagaggacgtcgaaacgaattgcgagtggagcgcatttagctgttttcagaaggcgcagctgaagtctgccaatactgggaacaacgagaggatcattaacgtgtctataaaaaagctgaaacgcaagccaccatctaccaacgctgggcgacgacagaaacatcggctgacttgccccagttgcgattcttacgaaaagaagccgcccaaggaattcctggaacgatttaagagcctactacagaagatgatccatcagcacctgtcgagtcgcacacacggatccgaggactcg

SEQ ID NO: 209528 - DNA, 486 bp, Artificial Sequence
  derived and/or modified sequence
atgcgttcgtcgccgggtaatatggaacgtatagtaatatgtctaatggtaatatttctaggtacgttagtacataaatcgtcgtcgcaaggtcaagatcgacatatgatacgtatgcgtcaactaatagatatagtagatcaattaaaaaattatgtaaatgatttagtaccggaatttttaccggcgccggaagatgtagaaacgaattgtgaatggtcggcgttttcgtgttttcaaaaagcgcaattaaaatcggcgaatacgggtaataatgaacgaataataaatgtttcgataaaaaaactaaaacgaaaaccgccgtcgacgaatgcgggtcgacgtcaaaaacatcgattaacgtgtccgtcgtgtgattcgtatgaaaaaaaaccgccgaaagaatttttagaacgatttaaatcgttactacaaaaaatgatacatcaacatttatcgtcgcgtacgcatggttcggaagattcg

SEQ ID NO: 209529 - DNA, 486 bp, Artificial Sequence
  derived and/or modified sequence
atgcggtccagtccaggcaacatggagcggatcgtgatctgcctgatggtgatcttcctgggcaccctcgtccacaagtcgtcctcgcagggccaagaccgccacatgatcagaatgcggcagttgatcgatatcgtggatcaattgaaaaactacgtgaatgaccttgtcccagaatttctgcctgcaccggaggacgtcgaaaccaactgcgaatggagcgccttctcgtgttttcagaaggctcaactcaagtctgccaatacggggaataacgaacgcatcatcaacgtctcaatcaaaaagttgaaacggaagccgccatccactaacgcgggccggaggcagaagcaccggctgacctgtccgtcgtgcgattcgtatgagaaaaagccaccaaaggaatttctcgaacggttcaaatccctcctgcagaagatgattcatcaacacctgtcctcaaggactcacggatccgaggactca

SEQ ID NO: 209530 - DNA, 486 bp, Artificial Sequence
  derived and/or modified sequence
atgcgaagttcacctggaaacatggaacgcattgtgatttgcctgatggtaatcttcctgggaactctggtccataagtcctcttcccagggccaggaccgacatatgatcaggatgcggcagctcatcgacatcgtggaccagctgaagaactatgttaatgatctcgtcccagaattcttgcccgcaccagaagatgtggagaccaattgtgagtggtccgcgttctcatgcttccagaaagcgcagctcaaatccgccaacaccggaaataacgagagaatcattaacgtcagcatcaaaaagctgaaacggaaacccccttccaccaacgcggggagaagacaaaagcacagacttacctgcccttcctgcgactcctacgaaaaaaagcctcctaaagagtttctcgaaaggtttaagtcccttttgcagaagatgatccaccaacacctcagctctcgcacgcatggaagcgaggatagc

SEQ ID NO: 209531 - DNA, 486 bp, Artificial Sequence
  derived and/or modified sequence
atgaggtcctcccctggaaacatggaacggattgtgatctgtcttatggtgatcttcctgggcaccctggtgcacaagagctcatcgcaaggacaagataggcacatgatcaggatgcggcagcttatcgacattgtggatcagttgaaaaactacgtgaacgatcttgtgcctgaattcctgccagcacctgaagatgtggagactaactgtgaatggtcggccttctcgtgcttccagaaggcccagcttaagtcggcaaacactgggaataatgaacgtatcataaacgtctctatcaaaaagctgaagagaaagcctccctccactaatgcaggtaggcgacagaagcacagacttacttgcccgtcctgcgacagctacgagaagaagccacctaaggagtttctcgaacggtttaagtccttgctccaaaagatgattcatcagcatctctcgagcagaacccatggctccgaggattcc

SEQ ID NO: 209532 - DNA, 486 bp, Artificial Sequence
  derived and/or modified sequence
atgaggtcaagtcccgggaacatggaaaggatagtgatctgcctcatggttatctttctcgggactcttgtccataaatctagttcacagggacaagataggcacatgatcaggatgcggcagctgatagatattgtggatcagctgaaaaactacgttaatgatcttgtgcccgaattcctcccagctcctgaagatgttgaaacaaactgcgaatggtctgcattctcatgttttcagaaagcgcagcttaagtctgctaacacaggaaacaacgaaaggatcatcaatgtgtctataaaaaagctgaagcgaaagccaccctcaacaaatgctgggaggcggcagaaacaccggctcacttgcccctcgtgtgattcttatgaaaaaaaacccccaaaagaattcctagaaagatttaaatctttgctacagaaaatgatacatcagcacctttcttctcgcacacacgggagtgaagatagt

SEQ ID NO: 209533 - DNA, 486 bp, Artificial Sequence
  derived and/or modified sequence
atgcgttcatcccccggcaacatggagcgcatagtaatttgcttgatggtaatcttcctggggacccttgtgcacaaaagttcatctcagggacaggatcgacatatgatccggatgcggcagctaatcgacattgtcgatcagctgaagaattacgtgaatgacctcgtgcccgagttcttacctgcgccggaggacgtcgaaaccaactgtgagtggtctgccttcagttgtttccagaaagcccagttgaaaagcgcaaatacgggaaacaatgagcgcatcataaatgtttctatcaaaaaactaaagaggaagccaccctcaactaacgctggccgcagacagaagcataggctgacctgcccctcatgcgattcatacgaaaagaaaccgcctaaggagtttttggagcgctttaagagccttcttcaaaagatgatacaccagcacttatcttccagaacacacggtagtgaagacagt

SEQ ID NO: 209534 - DNA, 486 bp, Artificial Sequence
  derived and/or modified sequence
atgaggtcctcaccggggaacatggaaagaattgtgatttgcctgatggtcatctttctgggaacccttgtccataagtcatccagccagggccaagatagacatatgatcagaatgcgtcaacttattgatatcgtggatcagttgaagaactacgtcaatgaccttgtgcctgaatttcttcctgcgcccgaggacgtggaaacgaactgcgaatggagcgcctttagctgttttcaaaaggcgcaactgaagtccgcaaatactggtaacaacgaacggattatcaatgtttcgatcaaaaagctgaagaggaagcccccatcgaccaatgcaggacgtagacagaagcaccgactgacctgtccttcttgtgactcctacgagaagaaaccacccaaagagttcctcgaacgtttcaaaagcctgctccagaagatgattcatcagcatctgagctcccgtacccacggctcggaggattcc

SEQ ID NO: 209535 - DNA, 486 bp, Artificial Sequence
  derived and/or modified sequence
atgagaagcagcccaggaaacatggagcggattgtgatctgcctcatggttatttttttaggtactctggtccacaagtcctcttcccagggccaggacagacacatgattaggatgaggcagctgatagatatcgtggaccagttgaaaaactacgtgaatgacctcgtgccggagttcctgcccgcccctgaagacgtggagacaaattgtgagtggtctgctttctcatgttttcagaaggcacagcttaaatctgccaatacggggaacaacgagcgaattattaatgtctcaatcaaaaagctgaagcggaagcctccctcaaccaatgccggccggcgtcagaagcacagactaacctgcccaagttgcgactcatatgaaaagaaaccaccaaaggagttcctggagagatttaaaagcctgttgcagaaaatgatccaccaacatctgtctagccgcacacacggatctgaggactcc

SEQ ID NO: 209536 - DNA, 486 bp, Artificial Sequence
  derived and/or modified sequence
atgcggagcagccccggcaacatggagcggatcgttatatgtttgatggtcattttcctggggacattagtccacaaatcatcctctcaagggcaggataggcatatgatcagaatgaggcagcttattgacatagtggatcagctcaaaaactacgtgaacgacctggtgcctgaattcctgcccgcccctgaggatgtggaaacgaattgcgaatggtcagcgttttcctgctttcagaaagcacagttgaaatctgcaaatacaggaaataacgaaaggatcatcaacgtgtccattaaaaaactgaagcggaaaccaccctccacaaatgccgggaggcggcagaaacaccgtttgacctgcccgtcttgtgactcatacgaaaagaagcctcctaaggaattcctagagaggttcaaatcattacttcagaagatgatccatcagcaccttagttccagaacacatggtagcgaagatagt

SEQ ID NO: 209537 - DNA, 486 bp, Artificial Sequence
  derived and/or modified sequence
atgagatctagccctggtaatatggagcgtattgtgatatgtctgatggtcatatttctaggaacactagttcataagtcatcaagccaaggtcaggatcgtcacatgatcaggatgaggcagttaattgatattgtggatcaactcaagaactacgtcaacgacttagtgcccgagttccttcctgctccagaagatgtggaaactaactgtgagtggtcagcattctcctgtttccagaaagctcagcttaagagtgccaacacaggtaataacgagaggataattaacgttagcattaagaagcttaagcgaaagccaccttccacaaatgcggggcgacgtcaaaaacataggttaacgtgccctagttgtgattcgtatgaaaagaagccaccgaaggaattcttggagagatttaagtctttgttacagaagatgatacatcagcacctctcatcgaggacccatggatctgaagatagc

SEQ ID NO: 209538 - DNA, 486 bp, Artificial Sequence
  derived and/or modified sequence
atgcgctccagccctggtaacatggaacggatcgtcatctgcttgatggtgatctttctgggcactctggtgcataagtcgtctagccaaggacaggaccgccacatgatcagaatgcgtcaactcatagatatcgtggaccagttgaagaattacgtgaacgatctggtgccggagttcctgcccgctccggaggatgtcgaaaccaactgtgaatggtccgcattcagttgctttcagaaggcccagctcaagtccgcgaatactggaaataacgaaagaattatcaacgtcagcataaagaaactgaaaagaaaaccgccgtcgaccaacgccggccgacgccaaaagcatcgcctgacttgcccgagctgcgacagctacgaaaagaaacccccgaaagagttccttgagcggttcaagtctctcctgcagaagatgatccatcaacacctctcctcacggacgcacggaagcgaggactcg

SEQ ID NO: 209539 - DNA, 486 bp, Artificial Sequence
  derived and/or modified sequence
atgcgctcaagccccggcaatatggaaaggatcgtgatttgtctgatggtcatcttcctgggcacccttgtccataagtcgtctagccaaggccaggatcggcatatgattagaatgcgtcagctgattgatatagtggatcagctgaagaactacgtgaacgatctggtcccagaattcctccctgcaccggaggatgtcgaaaccaactgtgaatggtcggcattttcgtgctttcaaaaagcgcaactgaagtcagccaatactgggaacaatgaaagaattatcaatgtgtcgatcaagaaactgaagagaaagccgccttcgactaatgcaggacgcagacaaaaacatagactgacttgtccatcgtgcgactcgtatgagaaaaaacctcctaaagaatttcttgagcgtttcaaaagcctcctgcaaaagatgatacaccaacatctgagctcgcggacccatggaagcgaggactcc

SEQ ID NO: 209540 - DNA, 486 bp, Artificial Sequence
  derived and/or modified sequence
atgagatcatcgccgggaaacatggagcggatcgtgatctgtctgatggtgatcttcttgggaaccctcgtccacaagagctcgtcgcaaggacaggatcgccacatgattcggatgcggcaactcatcgatatcgttgatcagctgaagaactacgtcaatgaccttgtgcccgagttcttgcccgcaccggaggacgtggaaactaactgcgaatggtcggcattttcatgtttccagaaggcgcaacttaagtcagccaacacggggaataatgaacggatcatcaacgtgagcatcaaaaagctcaagagaaagcctccttctaccaacgctggacggcgccaaaagcacaggcttacctgcccatcttgcgactcatacgaaaagaaaccaccaaaggagtttctcgagcggttcaaaagcctcttgcagaagatgatccatcagcacctgagctccaggactcatggctcggaggactcg

SEQ ID NO: 209541 - DNA, 486 bp, Artificial Sequence
  derived and/or modified sequence
atgaggagcagccccggaaacatggagcgaattgtgatatgtctcatggttatttttctgggcaccctggtgcataaaagttcatcccaaggccaggatcggcacatgattcgcatgcggcaactcattgacatcgtcgaccagctcaagaactatgtaaacgacctagtgccagagttcttgccggcccctgaggacgtcgagacaaattgcgaatggagtgctttctcctgttttcagaaggcccagctgaagtctgccaataccggcaataatgaaaggatcattaacgtctccatcaagaaattaaagcgcaagcctccttcgaccaacgcagggcgacgccagaagcacagactcacatgcccctcctgcgactcttacgaaaagaaacctcctaaggagttcttagaacgctttaagtcactgttgcagaagatgattcaccagcacctatcctctagaacccacggttcagaggacagc

SEQ ID NO: 209542 - DNA, 486 bp, Artificial Sequence
  derived and/or modified sequence
atgcggtcgtccccaggcaacatggagcgcatcgtgatctgcctcatggtgatcttcctgggaactttggtgcataaaagcagcagccaggggcaagaccgccacatgattcgcatgcgccaactgatcgacatcgtcgatcagctgaagaactacgtcaatgacctggtcccggaatttctcccggcgccggaggatgtcgaaactaactgtgaatggtcggccttctcatgctttcaaaaggcgcagctgaaaagcgcaaacaccggcaataatgaaagaattatcaatgtgtcgattaagaaacttaaaaggaagccaccgtcgacgaacgcaggtagacgccagaagcaccgactgacttgcccaagctgcgattcatacgagaagaagcctccaaaagaatttctcgagcgcttcaaatcacttctccagaagatgattcaccagcatctgtcgtcacgcacccacggcagcgaggactcg

SEQ ID NO: 209543 - DNA, 486 bp, Artificial Sequence
  derived and/or modified sequence
atgcggtcctcccctggtaatatggaaaggattgtgatttgtctgatggtcatctttctcggcactctggtgcataagtcgtccagccaaggtcaggatcgtcacatgatcagaatgcgtcaactgattgacattgtggaccaactgaagaattacgtgaacgacctggtgcccgagttccttcctgcacctgaggatgtcgaaactaattgtgagtggtcggcgttcagctgctttcaaaaggcgcaacttaagagcgcaaacactggcaacaacgaacggatcatcaacgtgtccataaagaagttgaagcgtaagcctcctagcaccaacgctggacgacgccagaaacatcgccttacttgcccgtcatgtgactcctacgagaaaaagcctccgaaagaatttctcgaaagatttaagtcgctgctgcagaaaatgatccatcagcacctttcgtcaagaactcatggatccgaggacagc

SEQ ID NO: 209544 - DNA, 486 bp, Artificial Sequence
  derived and/or modified sequence
atgcgctcctcaccggggaacatggaacggatcgtgatttgcctgatggtaatcttcctgggtacccttgtgcataaatccagcagccagggccaggaccgccatatgatccgcatgcgccaactgatagacatcgtggaccagctgaagaattacgtgaacgacctcgtccctgagtttctcccggcaccggaagatgtggaaactaactgcgagtggtccgccttttcatgtttccaaaaggctcagttgaaatcagctaataccggaaacaatgagagaatcatcaacgtctcgataaagaagctcaagagaaaaccacccagcacgaacgccggacggcggcagaaacaccgcctgacttgcccaagctgcgactcgtacgagaagaagccccctaaagaattcctggagagattcaagtctctgcttcaaaagatgatccaccaacatctcagctcacgtacccacggatcagaagattcc

SEQ ID NO: 209545 - DNA, 486 bp, Artificial Sequence
  derived and/or modified sequence
atgcggagctcgcctgggaacatggagcggatcgtgatctgcctgatggtcatcttcctgggcaccctggtccataagtcgtcgagccaaggtcaagaccgccacatgatccggatgcggcaactcattgatatcgttgaccagcttaagaactacgtgaatgacctggtgccggaattcctcccggccccagaagatgttgaaactaactgcgagtggtcagctttctcgtgcttccagaaggcccaactcaagtcggctaatactgggaataacgagcggatcattaacgtctcaattaagaagctgaaacgcaagcccccttcaactaatgccggcagacgacagaagcataggcttacctgcccgtcgtgtgactcctacgagaaaaagccgccgaaggaattcttggaaaggttcaagtcgctgctgcagaaaatgatccaccagcacctgagctcaagaacccatggatccgaagatagc

SEQ ID NO: 209546 - DNA, 489 bp, Artificial Sequence
  derived and/or modified sequence
atgagaagcagccccggcaacatggagagaatcgtgatctgcctgatggtgatcttcctgggcaccctggtgcacaagagcagcagccagggccaggacagacacatgatcagaatgagacagctgatcgacatcgtggaccagctgaagaactacgtgaacgacctggtgcccgagttcctgcccgcccccgaggacgtggagaccaactgcgagtggagcgccttcagctgcttccagaaggcccagctgaagagcgccaacaccggcaacaacgagagaatcatcaacgtgagcatcaagaagctgaagagaaagccccccagcaccaacgccggcagaagacagaagcacagactgacctgccccagctgcgacagctacgagaagaagccccccaaggagttcctggagagattcaagagcctgctgcagaagatgatccaccagcacctgagcagcagaacccacggcagcgaggacagctag

SEQ ID NO: 209547 - DNA, 635 bp, Artificial Sequence
  derived and/or modified sequence
gggaaataagagagaaaagaagagtaagaagaaatataagagccaccatgagatcgtcaccgggaaacatggagcggattgtcatttgtttgatggtgattttcctcggtactcttgtacacaaatcgtcatcccagggacaggacaggcacatgatcagaatgcggcagctgatcgacatcgtagatcagttgaaaaactacgtgaatgatctggtccccgagttccttccagcgcccgaggacgtggaaacaaactgcgagtggtcagcattttcgtgctttcaaaaggcccagcttaagtccgcgaatacgggcaacaacgaaaggatcattaatgtctccatcaagaagttgaagagaaaaccgccttcaaccaatgctgggaggcgccaaaaacatcggctcacatgcccctcgtgtgacagctatgagaagaagcctccgaaggaatttctcgagcgcttcaaatcgttgctccagaaaatgatccaccagcatctgagctcgcgaacgcacgggagcgaagattcctgataataggctgccttctgcggggcttgccttctggccatgcccttcttctctcccttgcacctgtacctcttggtctttgaataaagcctgagtaggaag

SEQ ID NO: 209548 - DNA, 489 bp, Artificial Sequence
  derived and/or modified sequence
atgagatcctcccccgggaatatggaaaggatagttatctgtctcatggttattttccttggtactttagtacacaaaagcagctcacaggggcaagaccgccacatgattagaatgcgtcagctgatagatatagttgatcagctgaagaactacgtgaacgatctggtgcccgaatttctgccggcccctgaggatgtggaaacaaactgcgagtggtccgccttctcatgctttcaaaaggctcagctgaaatccgccaataccggcaataacgaacgtattattaacgtgtccattaagaaacttaagagaaagccaccttcaaccaatgcgggcaggagacagaaacataggctaacgtgcccctcatgcgactcatacgagaagaaacctccgaaggagttccttgaacgctttaagagcctgttgcagaagatgattcaccagcacctctcctctcgcacccacggctctgaagacagctag

SEQ ID NO: 209549 - DNA, 489 bp, Artificial Sequence
  derived and/or modified sequence
atgaggagcagccctggcaacatggagagaattgtcatctgcctgatggtgatcttcctgggcaccctggtgcacaagagcagcagccagggccaggacagacacatgatccgcatgaggcagctgattgatattgtggaccagctgaagaactacgtgaatgacctggtgcctgagttcctgcctgccccagaagatgtggagaccaactgtgagtggagcgccttcagctgcttccagaaggcccagctgaagagcgccaacacaggcaacaatgaaagaatcatcaacgtgtccatcaagaagctgaagaggaagccacccagcaccaatgccggccggcggcagaagcaccggctgacctgccccagctgtgacagctatgagaagaagccacccaaggagttcctggagcgcttcaagagcctgctgcagaagatgatccaccagcacctgagcagcaggacccacggcagcgaggacagctag

SEQ ID NO: 209550 - DNA, 489 bp, Artificial Sequence
  derived and/or modified sequence
atgcggagcagccccggcaacatggagcggatcgtgatctgcctgatggtcatattcttgggaacactggtccacaaatcctcctcccagggccaggataggcatatgattaggatgaggcagctaattgatatcgttgaccagttaaagaattatgtgaatgatttggtgcccgagtttctgcctgcgccggaagatgtggaaaccaactgtgagtggagcgcgtttagctgctttcagaaagcacagctcaaatctgccaataccggaaacaatgagaggatcatcaacgtgagcatcaaaaagttgaagaggaagcctccttctaccaacgcaggtagaagacagaagcatcgtctcacatgtccatcttgtgatagctacgagaaaaaaccgcccaaagagtttctcgaacggttcaaaagcctgctccaaaagatgatacaccagcacttgtcgtctagaacacacggcagcgaagacagctag

SEQ ID NO: 209551 - DNA, 489 bp, Artificial Sequence
  derived and/or modified sequence
atgaggagtagcccagggaacatggagcgcatcgtgatctgtctgatggtgatcttcctggggactctggtgcataaaagctctagtcagggtcaggaccggcatatgattcggatgaggcagttaatcgacattgtggaccagctaaagaattatgtaaacgatttggtccctgaatttctccccgctccagaagacgtggagactaactgtgaatggtccgcgttcagttgtttccaaaaagcacagctgaagtccgccaatactgggaataacgagaggatcatcaacgtctcaataaaaaagcttaagcgcaagcccccatccacgaatgccggtcgacggcagaagcacaggttgacttgcccatcttgcgattcctacgaaaaaaagccgccaaaggagtttcttgagaggttcaagagcctacttcagaagatgattcaccaacatctctccagtagaacccacggtagcgaggactcctag

SEQ ID NO: 209552 - DNA, 629 bp, Artificial Sequence
  derived and/or modified sequence
gttctcagtcaagctgaagtgaaaacgagaccaaggtctagctctactgttggtacttatgagatccagtcctggcaacatggagaggattgtcatctgtctgatggtcatcttcttggggacactggtccacaaatcaagctcccaaggtcaagatcgccacatgattagaatgcgtcaacttatagatattgttgatcagctgaaaaattatgtgaatgacttggtccctgaatttctgccagctccagaagatgtagagacaaactgtgagtggtcagctttttcctgctttcagaaggcccaactaaagtcagcaaatacaggaaacaatgaaaggataatcaatgtatcaattaaaaagctgaagaggaaaccaccttccacaaatgcagggagaagacagaaacacagactaacatgcccttcatgtgattcttatgagaaaaaaccacccaaagaattcctagaaagattcaaatcacttctccaaaagatgattcatcagcatctgtcctctagaacacacggaagtgaagattcctgaggatctaacttgcagttggacactatgttacatactctaatatagtagtgaaagtcatttctttgtattccaagtggaggag

SEQ ID NO: 209553 - RNA, 635 nt, Artificial Sequence
  derived and/or modified sequence
gggaaauaagagagaaaagaagaguaagaagaaauauaagagccaccaugagaucgucaccgggaaacauggagcggauugucauuuguuugauggugauuuuccucgguacucuuguacacaaaucgucaucccagggacaggacaggcacaugaucagaaugcggcagcugaucgacaucguagaucaguugaaaaacuacgugaaugaucugguccccgaguuccuuccagcgcccgaggacguggaaacaaacugcgaguggucagcauuuucgugcuuucaaaaggcccagcuuaaguccgcgaauacgggcaacaacgaaaggaucauuaaugucuccaucaagaaguugaagagaaaaccgccuucaaccaaugcugggaggcgccaaaaacaucggcucacaugccccucgugugacagcuaugagaagaagccuccgaaggaauuucucgagcgcuucaaaucguugcuccagaaaaugauccaccagcaucugagcucgcgaacgcacgggagcgaagauuccugauaauaggcugccuucugcggggcuugccuucuggccaugcccuucuucucucccuugcaccuguaccucuuggucuuugaauaaagccugaguaggaag

SEQ ID NO: 209554 - protein, 15 aa, Artificial Sequence
  derived and/or modified sequence
SEPWTLALENVVGAK

SEQ ID NO: 209555 - protein, 805 aa, Artificial Sequence [sequence omitted]

SEQ ID NO: 209556 - DNA, 2418 bp, Artificial Sequence
  derived and/or modified sequence
atgagcagcagcagctggctgctgctgagcctggtggccgtgaccgccgcccagagcaccatcgaggagcaggccaagaccttcctggacaagttcaaccacgaggccgaggacctgttctaccagagcagcctggccagctggaactacaacaccaacatcaccgaggagaacgtgcagaacatgaacaacgccggcgacaagtggagcgccttcctgaaggagcagagcaccctggcccagatgtaccccctgcaggagatccagaacctgaccgtgaagctgcagctgcaggccctgcagcagaacggcagcagcgtgctgagcgaggacaagagcaagagactgaacaccatcctgaacaccatgagcaccatctacagcaccggcaaggtgtgcaaccccgacaacccccaggagtgcctgctgctggagcccggcctgaacgagatcatggccaacagcctggactacaacgagagactgtgggcctgggagagctggagaagcgaggtgggcaagcagctgagacccctgtacgaggagtacgtggtgctgaagaacgagatggccagagccaaccactacgaggactacggcgactactggagaggcgactacgaggtgaacggcgtggacggctacgactacagcagaggccagctgatcgaggacgtggagcacaccttcgaggagatcaagcccctgtacgagcacctgcacgcctacgtgagagccaagctgatgaacgcctaccccagctacatcagccccatcggctgcctgcccgcccacctgctgggcgacatgtggggcagattctggaccaacctgtacagcctgaccgtgcccttcggccagaagcccaacatcgacgtgaccgacgccatggtggaccaggcctgggacgcccagagaatcttcaaggaggccgagaagttcttcgtgagcgtgggcctgcccaacatgacccagggcttctgggagaacagcatgctgaccgaccccggcaacgtgcagaaggccgtgtgccaccccaccgcctgggacctgggcaagggcgacttcagaatcctgatgtgcaccaaggtgaccatggacgacttcctgaccgcccaccacgagatgggccacatccagtacgacatggcctacgccgcccagcccttcctgctgagaaacggcgccaacgagggcttccacgaggccgtgggcgagatcatgagcctgagcgccgccacccccaagcacctgaagagcatcggcctgctgagccccgacttccaggaggacaacgagaccgagatcaacttcctgctgaagcaggccctgaccatcgtgggcaccctgcccttcacctacatgctggagaagtggagatggatggtgttcaagggcgagatccccaaggaccagtggatgaagaagtggtgggagatgaagagagagatcgtgggcgtggtggagcccgtgccccacgacgagacctactgcgaccccgccagcctgttccacgtgagcaacgactacagcttcatcagatactacaccagaaccctgtaccagttccagttccaggaggccctgtgccaggccgccaagcacgagggccccctgcacaagtgcgacatcagcaacagcaccgaggccggccagaagctgttcaacatgctgagactgggcaagagcgagccctggaccctggccctggagaacgtggtgggcgccaagaacatgaacgtgagacccctgctgaactacttcgagcccctgttcacctggctgaaggaccagaacaagaacagcttcgtgggctggagcaccgactggagcccctacgccgaccagagcatcaaggtgagaatcagcctgaagagcgccctgggcgacaaggcctacgagtggaacgacaacgagatgtacctgttcagaagcagcgtggcctacgccatgagacagtacttcctgaaggtgaagaaccagatgatcctgttcggcgaggaggacgtgagagtggccaacctgaagcccagaatcagcttcaacttcttcgtgaccgcccccaagaacgtgagcgacatcatccccagaaccgaggtggagaaggccatcagaatgagcagaagcagaatcaacgacgccttcagactgaacgacaacagcctggagttcctgggcatccagcccaccctgggcccccccaaccagccccccgtgagcatctggctgatcgtgttcggcgtggtgatgggcgtgatcgtggtgggcatcgtgatcctgatcttcaccggcatcagagacagaaagaagaagaacaaggccagaagcggcgagaacccctacgccagcatcgacatcagcaagggcgagaacaaccccggcttccagaacaccgacgacgtgcagaccagcttctag

SEQ ID NO: 209557 - DNA, 3393 bp, Artificial Sequence
  derived and/or modified sequence
cgcccaacccaagttcaaaggctgataagagagaaaatctcatgaggaggttttagtctagggaaagtcattcagtggatgtgatcttggctcacaggggacgatgtcaagctcttcctggctccttctcagccttgttgctgtaactgctgctcagtccaccattgaggaacaggccaagacatttttggacaagtttaaccacgaagccgaagacctgttctatcaaagttcacttgcttcttggaattataacaccaatattactgaagagaatgtccaaaacatgaataatgctggggacaaatggtctgcctttttaaaggaacagtccacacttgcccaaatgtatccactacaagaaattcagaatctcacagtcaagcttcagctgcaggctcttcagcaaaatgggtcttcagtgctctcagaagacaagagcaaacggttgaacacaattctaaatacaatgagcaccatctacagtactggaaaagtttgtaacccagataatccacaagaatgcttattacttgaaccaggtttgaatgaaataatggcaaacagtttagactacaatgagaggctctgggcttgggaaagctggagatctgaggtcggcaagcagctgaggccattatatgaagagtatgtggtcttgaaaaatgagatggcaagagcaaatcattatgaggactatggggattattggagaggagactatgaagtaaatggggtagatggctatgactacagccgcggccagttgattgaagatgtggaacatacctttgaagagattaaaccattatatgaacatcttcatgcctatgtgagggcaaagttgatgaatgcctatccttcctatatcagtccaattggatgcctccctgctcatttgcttggtgatatgtggggtagattttggacaaatctgtactctttgacagttccctttggacagaaaccaaacatagatgttactgatgcaatggtggaccaggcctgggatgcacagagaatattcaaggaggccgagaagttctttgtatctgttggtcttcctaatatgactcaaggattctgggaaaattccatgctaacggacccaggaaatgttcagaaagcagtctgccatcccacagcttgggacctggggaagggcgacttcaggatccttatgtgcacaaaggtgacaatggacgacttcctgacagctcatcatgagatggggcatatccagtatgatatggcatatgctgcacaaccttttctgctaagaaatggagctaatgaaggattccatgaagctgttggggaaatcatgtcactttctgcagccacacctaagcatttaaaatccattggtcttctgtcacccgattttcaagaagacaatgaaacagaaataaacttcctgctcaaacaagcactcacgattgttgggactctgccatttacttacatgttagagaagtggaggtggatggtctttaaaggggaaattcccaaagaccagtggatgaaaaagtggtgggagatgaagcgagagatagttggggtggtggaacctgtgccccatgatgaaacatactgtgaccccgcatctctgttccatgtttctaatgattactcattcattcgatattacacaaggaccctttaccaattccagtttcaagaagcactttgtcaagcagctaaacatgaaggccctctgcacaaatgtgacatctcaaactctacagaagctggacagaaactgttcaatatgctgaggcttggaaaatcagaaccctggaccctagcattggaaaatgttgtaggagcaaagaacatgaatgtaaggccactgctcaactactttgagcccttatttacctggctgaaagaccagaacaagaattcttttgtgggatggagtaccgactggagtccatatgcagaccaaagcatcaaagtgaggataagcctaaaatcagctcttggagataaagcatatgaatggaacgacaatgaaatgtacctgttccgatcatctgttgcatatgctatgaggcagtactttttaaaagtaaaaaatcagatgattctttttggggaggaggatgtgcgagtggctaatttgaaaccaagaatctcctttaatttctttgtcactgcacctaaaaatgtgtctgatatcattcctagaactgaagttgaaaaggccatcaggatgtcccggagccgtatcaatgatgctttccgtctgaatgacaacagcctagagtttctggggatacagccaacacttggacctcctaaccagccccctgtttccatatggctgattgtttttggagttgtgatgggagtgatagtggttggcattgtcatcctgatcttcactgggatcagagatcggaagaagaaaaataaagcaagaagtggagaaaatccttatgcctccatcgatattagcaaaggagaaaataatccaggattccaaaacactgatgatgttcagacctccttttagaaaaatctatgtttttcctcttgaggtgattttgttgtatgtaaatgttaatttcatggtatagaaaatataagatgataaagatatcattaaatgtcaaaactatgactctgttcagaaaaaaaattgtccaaagacaacatggccaaggagagagcatcttcattgacattgctttcagtatttatttctgtctctggatttgacttctgttctgtttcttaataaggattttgtattagagtatattagggaaagtgtgtatttggtctcacaggctgttcagggataatctaaatgtaaatgtctgttgaatttctgaagttgaaaacaaggatatatcattggagcaagtgttggatcttgtatggaatatggatggatcacttgtaaggacagtgcctgggaactggtgtagctgcaaggattgagaatggcatgcattagctcactttcatttaatccattgtcaaggatgacatgctttcttcacagtaactcagttcaagtactatggtgatttgcctacagtgatgtttggaatcgatcatgctttcttcaaggtgacaggtctaaagagagaagaatccagggaacaggtagaggacattgctttttcacttccaaggtgcttgatcaacatctccctgacaacacaaaactagagccaggggcctccgtgaactcccagagcatgcctgatagaaactcatttctactgttctctaactgtggagtgaatggaaattccaactgtatgttcaccctctgaagtgggtacccagtctcttaaatcttttgtatttgctcacagtgtttgagcagtgctgagcacaaagcagacactcaataaatgctagatttacacactc

SEQ ID NO: 209558 - DNA, 3507 bp, Artificial Sequence
  derived and/or modified sequence
gttgttgtgatcccatggctacagaggatcaggagttgacatagatactctttggatttcataccatgtggaggctttcttacttccacgtgaccttgactgagttttgaatagcgcccaacccaagttcaaaggctgataagagagaaaatctcatgaggaggttttagtctagggaaagtcattcagtggatgtgatcttggctcacaggggacgatgtcaagctcttcctggctccttctcagccttgttgctgtaactgctgctcagtccaccattgaggaacaggccaagacatttttggacaagtttaaccacgaagccgaagacctgttctatcaaagttcacttgcttcttggaattataacaccaatattactgaagagaatgtccaaaacatgaataatgctggggacaaatggtctgcctttttaaaggaacagtccacacttgcccaaatgtatccactacaagaaattcagaatctcacagtcaagcttcagctgcaggctcttcagcaaaatgggtcttcagtgctctcagaagacaagagcaaacggttgaacacaattctaaatacaatgagcaccatctacagtactggaaaagtttgtaacccagataatccacaagaatgcttattacttgaaccaggtttgaatgaaataatggcaaacagtttagactacaatgagaggctctgggcttgggaaagctggagatctgaggtcggcaagcagctgaggccattatatgaagagtatgtggtcttgaaaaatgagatggcaagagcaaatcattatgaggactatggggattattggagaggagactatgaagtaaatggggtagatggctatgactacagccgcggccagttgattgaagatgtggaacatacctttgaagagattaaaccattatatgaacatcttcatgcctatgtgagggcaaagttgatgaatgcctatccttcctatatcagtccaattggatgcctccctgctcatttgcttggtgatatgtggggtagattttggacaaatctgtactctttgacagttccctttggacagaaaccaaacatagatgttactgatgcaatggtggaccaggcctgggatgcacagagaatattcaaggaggccgagaagttctttgtatctgttggtcttcctaatatgactcaaggattctgggaaaattccatgctaacggacccaggaaatgttcagaaagcagtctgccatcccacagcttgggacctggggaagggcgacttcaggatccttatgtgcacaaaggtgacaatggacgacttcctgacagctcatcatgagatggggcatatccagtatgatatggcatatgctgcacaaccttttctgctaagaaatggagctaatgaaggattccatgaagctgttggggaaatcatgtcactttctgcagccacacctaagcatttaaaatccattggtcttctgtcacccgattttcaagaagacaatgaaacagaaataaacttcctgctcaaacaagcactcacgattgttgggactctgccatttacttacatgttagagaagtggaggtggatggtctttaaaggggaaattcccaaagaccagtggatgaaaaagtggtgggagatgaagcgagagatagttggggtggtggaacctgtgccccatgatgaaacatactgtgaccccgcatctctgttccatgtttctaatgattactcattcattcgatattacacaaggaccctttaccaattccagtttcaagaagcactttgtcaagcagctaaacatgaaggccctctgcacaaatgtgacatctcaaactctacagaagctggacagaaactgttcaatatgctgaggcttggaaaatcagaaccctggaccctagcattggaaaatgttgtaggagcaaagaacatgaatgtaaggccactgctcaactactttgagcccttatttacctggctgaaagaccagaacaagaattcttttgtgggatggagtaccgactggagtccatatgcagaccaaagcatcaaagtgaggataagcctaaaatcagctcttggagataaagcatatgaatggaacgacaatgaaatgtacctgttccgatcatctgttgcatatgctatgaggcagtactttttaaaagtaaaaaatcagatgattctttttggggaggaggatgtgcgagtggctaatttgaaaccaagaatctcctttaatttctttgtcactgcacctaaaaatgtgtctgatatcattcctagaactgaagttgaaaaggccatcaggatgtcccggagccgtatcaatgatgctttccgtctgaatgacaacagcctagagtttctggggatacagccaacacttggacctcctaaccagccccctgtttccatatggctgattgtttttggagttgtgatgggagtgatagtggttggcattgtcatcctgatcttcactgggatcagagatcggaagaagaaaaataaagcaagaagtggagaaaatccttatgcctccatcgatattagcaaaggagaaaataatccaggattccaaaacactgatgatgttcagacctccttttagaaaaatctatgtttttcctcttgaggtgattttgttgtatgtaaatgttaatttcatggtatagaaaatataagatgataaagatatcattaaatgtcaaaactatgactctgttcagaaaaaaaattgtccaaagacaacatggccaaggagagagcatcttcattgacattgctttcagtatttatttctgtctctggatttgacttctgttctgtttcttaataaggattttgtattagagtatattagggaaagtgtgtatttggtctcacaggctgttcagggataatctaaatgtaaatgtctgttgaatttctgaagttgaaaacaaggatatatcattggagcaagtgttggatcttgtatggaatatggatggatcacttgtaaggacagtgcctgggaactggtgtagctgcaaggattgagaatggcatgcattagctcactttcatttaatccattgtcaaggatgacatgctttcttcacagtaactcagttcaagtactatggtgatttgcctacagtgatgtttggaatcgatcatgctttcttcaaggtgacaggtctaaagagagaagaatccagggaacaggtagaggacattgctttttcacttccaaggtgcttgatcaacatctccctgacaacacaaaactagagccaggggcctccgtgaactcccagagcatgcctgatagaaactcatttctactgttctctaactgtggagtgaatggaaattccaactgtatgttcaccctctgaagtgggtacccagtctcttaaatcttttgtatttgctcacagtgtttgagcagtgctgagcacaaagcagacactcaataaatgctagatttacacactc

SEQ ID NO: 209559 - DNA, 2564 bp, Artificial Sequence
  derived and/or modified sequence
gggaaataagagagaaaagaagagtaagaagaaatataagagccaccatgtcgtcatcctcatggctcttgctgtcattggtggccgtcacagcggcacaaagcacgatcgaagaacaggctaagacgtttctcgacaaattcaaccacgaagccgaagatctcttctaccagtccagcctcgcgagctggaactacaacaccaacatcactgaagaaaatgtgcagaacatgaataacgctggagacaaatggtccgcctttctcaaagaacaatcgacgctcgcacagatgtacccgcttcaagaaattcagaaccttacagtgaaactccagcttcaggcactccagcagaatgggtcatcggtattgtcagaggacaagtcaaaacgcttgaacacgattttgaatacgatgtcgacaatctactcgacgggaaaggtgtgtaatcctgataatcctcaagagtgtctcctgcttgaacccgggcttaacgagatcatggccaatagccttgactacaacgagcgactgtgggcatgggagtcatggcgctcagaagtcgggaagcagctgcgccccttgtacgaggaatatgtcgtgctgaaaaacgaaatggcccgagccaaccattacgaggactacggcgattattggaggggtgattacgaggtcaatggggtcgacgggtatgactacagccgaggtcagttgatcgaagatgtggagcacaccttcgaggagatcaaacccctgtacgagcacctccatgcgtatgtcagggcgaaattgatgaatgcctatccgagctacatctcgccaatcggttgcctgccagcgcaccttcttggggatatgtggggtcgattctggactaatctctattcgttgacggtcccgtttggacaaaagcccaatatcgacgtaacggatgccatggtagaccaagcgtgggatgcgcagaggatctttaaggaagcggagaaattcttcgtatccgtcgggctgcccaacatgacacagggattttgggagaactccatgctcactgatcccggcaatgtccaaaaggcagtctgccaccctaccgcttgggaccttggaaagggagattttcggattctgatgtgtacaaaagtgacaatggacgatttcctgacagctcaccatgaaatgggacacatccagtatgacatggcctacgcagcgcagccgtttttgcttcgcaacggtgcgaatgaggggtttcacgaggccgtgggagagattatgtcgctctccgctgcgacacccaagcatttgaagtccatcggactgctgtcacccgactttcaagaggacaacgaaacggaaatcaatttcctgctcaagcaagcgcttactatcgtaggcacactccccttcacctatatgcttgaaaagtggaggtggatggtgttcaagggcgagatccctaaagatcagtggatgaagaaatggtgggagatgaagagagagatcgtgggtgtcgtcgagccggtgccccatgatgagacttattgtgacccggcgtcactcttccacgtgtccaacgattatagctttatccggtactatactagaacgttgtaccagttccaattccaagaggccctctgccaggcggcgaagcacgagggacccctgcataagtgcgacatctcaaattccaccgaagccggtcagaagcttttcaatatgttgcgcttgggaaagtcggaaccttggactctggctctcgaaaatgtggtaggagcgaagaatatgaacgtcagacccctgctgaactattttgagcccctttttacgtggctgaaggaccagaacaaaaactcattcgtcggctggtcaacggattggagcccctacgcagatcagagcattaaggtccgaatctcgttgaagtcggctctcggtgacaaggcgtacgagtggaatgacaatgagatgtatctcttccgctcgtccgtggcgtatgcgatgaggcagtacttcctcaaagtaaagaaccagatgattttgttcggggaggaggatgtccgggtagccaatcttaaacctcggatctcgtttaacttctttgtcacggcgcctaaaaacgtgtcggacatcattccgcggaccgaagtagagaaagcgatcagaatgagccggtcgaggattaatgacgcgttcaggctgaacgacaacagcttggaatttctcgggattcaaccgacgcttgggcctccgaaccagccacccgtatccatttggttgattgtgttcggagtagtgatgggtgtgatcgtggtcggcattgtcatcttgatcttcaccgggattagagatcggaagaagaagaacaaagcgagatcgggagaaaacccgtatgcctcgattgacatctcgaaaggagagaataacccagggtttcagaatactgatgacgtgcagacatcattttgataataggctgccttctgcggggcttgccttctggccatgcccttcttctctcccttgcacctgtacctcttggtctttgaataaagcctgagtaggaag

SEQ ID NO: 209560 - DNA, 2418 bp, Artificial Sequence
  derived and/or modified sequence
atgagttcttccagttggctcctgttgtccctcgttgcagttactgccgcccagagcacaatagaagaacaggcaaaaacttttctggacaaattcaatcacgaagccgaagacctcttttatcagagttcactggcaagttggaactacaacaccaatattactgaggaaaacgtgcagaacatgaacaatgcgggggataagtggtccgcctttttgaaggagcagtcaactctggcacagatgtacccattacaggaaattcagaacctgacagttaagctccagctacaggcgttacagcaaaatgggtcaagcgtcctgtcagaggacaagtctaaaagattgaacaccatcctcaatacgatgagtactatctactcaactggtaaagtgtgtaacccagataacccacaggaatgcctcttgctggagcccggcctgaacgaaataatggctaatagcctggactacaatgaaagactgtgggcatgggaatcatggcgcagcgaagtgggtaaacagcttagaccactttacgaggaatacgtggtccttaagaatgagatggctcgcgccaatcactatgaggattatggtgattattggcgcggagattatgaggttaatggcgtggacggctatgactactcaaggggtcagcttattgaggacgtagagcataccttcgaagagataaagcctttgtacgagcatttgcacgcctatgtacgggcaaaattgatgaacgcctacccatcctacatatccccgatcggatgcctgcctgcgcacctgttgggcgatatgtgggggcggttttggaccaacttatactccctgacggttccttttggtcaaaagcctaacatcgacgttacggatgcgatggtggatcaggcttgggacgcccagaggattttcaaagaggcagagaagttttttgtgagcgtagggttgcccaatatgactcagggcttttgggaaaactcgatgctaaccgacccgggtaacgtacaaaaggctgtgtgtcaccccacagcctgggacttggggaaaggagattttaggattctgatgtgcacaaaggtgacaatggacgatttcctgaccgcccatcacgaaatgggacacatccagtacgatatggcctacgccgcccaaccattcctgctgcggaacggcgcaaatgaaggctttcacgaagccgtgggcgaaatcatgagcctctctgccgccacccctaagcatctgaaaagcatcggtttactgtcccctgactttcaagaggataatgaaaccgagataaattttctgctcaagcaggctttaactatcgtcgggactttaccatttacctacatgttggaaaagtggaggtggatggtttttaaaggggagattccaaaagaccagtggatgaagaaatggtgggaaatgaagcgggaaatcgtgggtgtggtcgagcccgtacctcacgacgagacgtactgtgatcccgcctctctgtttcacgtcagcaacgactattcattcatccggtattatactagaacgctttatcagttccaatttcaggaggccttatgccaggctgccaagcacgaaggaccgctacataaatgcgacatctccaattcaacggaggcaggacagaaattgtttaacatgctgcgcttgggtaagagcgagccttggaccctggccctggagaatgtggttggcgctaagaacatgaatgtcagacccctgctcaattacttcgagcccttgttcacttggctcaaggaccagaacaagaatagcttcgtgggatggtccactgactggtcaccttacgccgatcaaagtattaaggtgcgcattagcctcaagagtgcgctcggggacaaagcgtatgagtggaatgataatgagatgtacctgtttcgctcaagtgtggcctacgccatgaggcagtattttctcaaggttaagaaccaaatgatcctgttcggcgaagaggatgtccgagttgcgaacctgaaaccacgaatctcttttaacttcttcgtcaccgctccaaaaaatgtatccgatataatacccagaacggaagtggagaaagccatcagaatgtcacgatcccgcattaatgacgcttttaggctgaacgataattccttagaatttctcggcatacagcctacgctgggccccccaaaccagccgccagtgtcaatctggcttatagtgtttggcgttgtcatgggcgtgatcgtcgtaggcattgtgatccttattttcacaggaatacgggatagaaaaaagaagaacaaggcccgaagcggcgaaaacccttatgccagtatcgacatcagcaaaggggagaacaacccgggcttccagaatactgatgacgtgcagactagtttctag

SEQ ID NO: 209561 - DNA, 2418 bp, Artificial Sequence
  derived and/or modified sequence
atgtcatccagtagttggctgctgttatccctagtggcggtgactgccgcccaaagtacgatagaagaacaagctaaaacatttcttgacaagtttaaccacgaggcggaagatctcttctatcagtcatccctggctagctggaactataacactaacattaccgaggaaaacgtccagaacatgaataacgcgggtgataaatggtccgcattcctgaaggagcagtcaacccttgcacagatgtatccacttcaagagatccagaaccttactgtgaagctgcagcttcaggccctgcagcagaatggatccagcgttctgtcagaagacaagagcaaacgtctgaatactattctgaatacaatgtctaccatctattcaaccggaaaagtctgcaatcccgataacccacaggaatgtttgcttctggagcctggccttaatgagataatggccaattcactggactacaacgaacgactatgggcgtgggagtcttggaggtctgaagtgggaaagcaactccggccgctttatgaagaatacgtcgtcctaaagaacgaaatggctagggccaatcattatgaggactacggagactattggcgtggagactatgaggttaatggggtcgacggctacgattactctcgtggccagctgatcgaagatgtggagcatacctttgaggagattaagcctttgtatgaacatctgcatgcctatgtcagagctaagcttatgaatgcgtatccctcctacatttcacctatagggtgtcttcccgctcatctgttaggtgacatgtggggtcgtttttggacaaatctgtactccttgacagtgcctttcggtcagaaacccaacatcgacgtgactgatgccatggtggaccaggcatgggatgcccagagaatttttaaggaggccgaaaaattcttcgtgtctgtaggcctgcctaatatgacccagggtttctgggaaaattccatgctgactgatcccgggaatgtgcagaaagccgtctgccaccccactgcttgggatctgggaaagggcgactttcggatcctaatgtgtaccaaagttactatggacgattttctcaccgcgcaccacgaaatgggccatatccagtacgatatggcatacgcagcccagcctttcctgctgaggaacggggcaaatgaaggctttcacgaggccgtgggggaaattatgagcctgtcggcagcaacccccaagcacctgaagtcaattggattgttatcacccgacttccaggaggataatgagaccgagataaattttctcctcaagcaggctctgactatcgtggggaccctgccgttcacctatatgctcgaaaaatggaggtggatggtgtttaagggcgagattcccaaggatcaatggatgaagaaatggtgggaaatgaagcgcgagatcgtgggagtagtggaacccgtaccccatgatgagacatactgtgacccagcctcgctattccacgtgagcaatgactatagcttcatcaggtattacacgaggacgctgtaccagttccagtttcaagaagctctgtgtcaggccgcaaagcatgaagggccattacacaaatgtgacattagtaacagtacggaggctggtcagaaactatttaacatgttgagactgggaaagagcgaaccatggacattggccctagagaatgtggtgggggccaagaatatgaacgtaagaccactgctcaactactttgaaccactattcacttggctcaaggatcagaataagaattcatttgtggggtggagtaccgattggagtccatacgctgaccagtcaatcaaagtccggatatcgctaaagtctgctctgggagacaaggcctatgaatggaacgacaacgagatgtaccttttcaggagctcagtcgcatatgcaatgaggcagtacttcctcaaggtcaagaaccagatgattcttttcggagaggaagatgtgagagtcgctaaccttaagccccgaataagtttcaatttttttgtgaccgcacccaaaaatgtctccgacatcataccccgaactgaggtcgaaaaagctatccggatgagtcgctccagaatcaacgacgctttcagactgaatgacaatagcctagaatttctcgggattcagccaaccctgggccctcctaatcaaccccccgtctcaatttggctgatcgtgtttggtgttgtaatgggagtgatagtggtggggattgtgatacttatttttactggcataagggataggaagaaaaagaataaggcaagaagtggggagaacccctacgcgtcaattgatatcagcaagggcgagaataacccggggttccaaaacacggatgatgtgcaaactagcttctag

SEQ ID NO: 209562 - DNA, 2418 bp, Artificial Sequence
  derived and/or modified sequence
atgagcagcagctcctggctgctgctgagcctggtggccgtgacagctgcccagagcaccatcgaggagcaggccaagaccttcctggacaagttcaaccacgaggctgaagatctcttctaccagagcagcctggcctcctggaactacaacaccaacatcacagaagaaaatgtgcagaacatgaacaatgctggggacaagtggagcgccttcctgaaggagcagagcaccctggcccagatgtaccccctgcaggagatccagaacctgactgtgaagctgcagctgcaggccctgcagcagaatggcagctctgtgctgtctgaggacaagagcaagaggctgaacaccatcctgaacaccatgagcaccatctacagcacaggcaaggtgtgcaacccagacaacccccaggagtgcctgctgctggagcccggcctgaatgagatcatggccaacagcctggactacaatgaaaggctgtgggcctgggagagctggaggtctgaggtgggcaagcagctgcggcccctgtatgaggagtatgtggtgctgaagaatgagatggcccgggccaaccactatgaagattatggagactactggaggggggactatgaggtgaatggagtggatggctatgactacagccggggccagctgattgaagatgtggagcacacctttgaggagatcaagcccctgtatgagcacctgcacgcctacgtgcgggccaagctgatgaatgcctaccccagctacatcagccccatcggctgcctgcctgcccacctgctgggggacatgtggggccgcttctggaccaacctgtacagcctgactgtgcccttcggccagaagcccaacattgatgtgacagatgccatggtggaccaggcctgggatgcccagaggatcttcaaggaggccgagaagttctttgtgtctgtgggcctgcccaacatgacccagggcttctgggagaacagcatgctgacagatcctggaaatgtgcagaaggctgtgtgccaccccacagcctgggacctgggcaaaggagacttccgcatcctgatgtgcaccaaggtgaccatggatgacttcctgacagcccaccacgagatgggccacatccagtatgacatggcctatgctgcccagcccttcctgctgagaaatggagccaatgaaggcttccatgaagctgtgggggagatcatgagcctgtctgctgccacccccaagcacctgaagagcatcggcctgctgagcccagacttccaggaggacaatgaaacagagatcaacttcctgctgaagcaggccctgaccatcgtgggcaccctgcccttcacctacatgctggagaagtggcgctggatggtgttcaagggggagatccccaaggaccagtggatgaagaagtggtgggagatgaagcgggagatcgtgggcgtggtggagcctgtgccccatgatgagacctactgtgaccctgccagcctcttccacgtgtccaatgactacagcttcatccgctactacaccaggaccctgtaccagttccagttccaggaggccctgtgccaggccgccaagcatgagggccccctgcacaagtgtgacatcagcaacagcacagaggccggccagaagctgttcaacatgctgcggctgggcaagtctgagccctggaccctggccctggagaatgtggtgggcgccaagaacatgaatgtgcggcccctgctgaactactttgagcccctcttcacctggctgaaggaccagaacaagaacagctttgtgggctggagcacagactggagcccctatgctgaccagagcatcaaggtgcgcatcagcctgaagagcgccctgggggacaaggcctatgagtggaatgacaatgagatgtacctgttccgcagctctgtggcctatgccatgaggcagtacttcctgaaggtgaagaaccagatgatcctgtttggagaggaggatgtgcgggtggccaacctgaagccccgcatctccttcaacttctttgtgacagcccccaagaatgtgtctgacatcatccccaggacagaggtggagaaggccatccgcatgagccgcagccgcatcaatgatgccttccggctgaatgacaacagcctggagttcctgggcatccagcccaccctgggcccccccaaccagccccctgtgtccatctggctgattgtgtttggagtggtgatgggcgtgattgtggtgggcatcgtcatcctgatcttcaccggcatccgggacaggaagaagaagaacaaggcccggagcggggagaacccctatgccagcattgacatcagcaagggggagaacaaccctggcttccagaacacagatgatgtgcagaccagcttctag

SEQ ID NO: 209563 - DNA, 2418 bp, Artificial Sequence
  derived and/or modified sequence
atgagcagcagcagctggctgctgctgagcctggtggccgtgaccgctgctcaatcaaccattgaggagcaggctaagacatttctagacaaattcaaccatgaagccgaggatctattttaccaatcctcactggcttcctggaactacaataccaacattactgaggagaatgtccagaacatgaataatgcaggggacaaatggagcgctttcctgaaggaacagagtactctggcccagatgtatccgttgcaggaaattcagaacctaaccgtgaagttgcagctccaggcacttcagcagaacggctcctccgtgctgtccgaagataagtcaaagagactgaataccatcctcaataccatgtcaactatttattcaacgggcaaggtgtgcaatcccgacaatccccaagagtgtctgttgcttgagcctggactcaatgaaatcatggctaactcactggactataatgagcgcctgtgggcatgggagagctggaggtctgaagttgggaaacaactgagacctctttacgaggagtacgtggttctgaagaatgagatggcccgggcaaaccattatgaagactacggtgactattggcgaggtgattacgaagttaatggggtggacggatatgattacagccgtgggcaactgatagaggatgtggaacatacctttgaggaaatcaagcccctctatgaacaccttcatgcctacgtgagggcgaaactcatgaatgcttatccctcttacatctcgcccattggatgcctccccgcccatctgctcggagatatgtggggtagattctggactaacctctattctctcacagttccatttggccagaagcctaacatcgatgtgacggacgcaatggtcgaccaggcatgggatgcccaacgcatcttcaaagaggcagagaagttctttgttagcgtgggtctaccaaacatgactcaagggttctgggagaattccatgctgacagatccagggaatgtgcagaaagctgtgtgccatcccactgcctgggatcttggcaaaggtgactttcggatcctcatgtgtactaaggtgacaatggatgacttcttaaccgctcaccatgagatgggccatatccagtacgacatggcatatgccgctcagccattcctgctccgtaacggtgcaaacgagggcttccatgaggcggtgggagagatcatgtcgctgagcgccgcaacaccaaaacaccttaagtctattgggttgttgtcacctgacttccaggaagacaatgagaccgagattaactttttactaaagcaagccctgacaatcgtggggaccctgccattcacatacatgcttgagaagtggaggtggatggtgtttaaaggcgaaattcccaaggatcaatggatgaagaagtggtgggaaatgaagagagagattgtgggagtcgtggaacccgtaccacacgacgaaacgtactgcgacccagccagcctgttccacgtgagtaatgactacagcttcataagatattacacgcgtactctgtatcaattccaattccaagaggccctttgccaggccgctaagcacgagggaccgctgcacaaatgcgatattagtaacagtacagaagccggacaaaaattgttcaacatgcttagactgggaaagagcgaaccctggactctcgctctggaaaatgtcgttggcgcaaaaaatatgaatgtgcgcccattgctgaactacttcgagccattatttacatggctcaaagaccaaaataagaatagcttcgtcggttggtctacggactggagcccgtacgccgaccagagtatcaaggtgaggattagcctgaaatcggccttgggggacaaggcctacgagtggaacgataatgaaatgtatctgttcaggtccagtgtggcttatgccatgcgtcagtacttccttaaggtcaaaaaccaaatgatcttatttggcgaagaggatgtgcgggtggctaatctgaaaccgcgaatatcatttaactttttcgtcaccgcaccaaaaaatgtaagcgacatcattccacgtactgaggtcgaaaaggcgatccggatgtcgcggagcaggataaacgacgcatttcggctgaatgacaattccctggagtttctgggaattcagcccacactgggcccaccgaatcagcccccagtcagtatttggctgattgtgttcggcgtggtgatgggggtaatcgtcgtaggcatcgtgatcctgatttttacaggaatccgtgatcgtaaaaaaaagaataaggcgaggtccggcgagaatccatacgcatccatcgatatttccaagggcgagaacaatcctgggttccagaacaccgatgatgtgcagacttccttctag

SEQ ID NO: 209564 - DNA, 2418 bp, Artificial Sequence
  derived and/or modified sequence
atgagcagcagcagctggctgctgctgagcctggtggccgtgaccgccgctcagtcgactattgaggaacaggctaaaacatttctcgataagtttaaccatgaggcagaagacctgttttatcagagcagtctggcctcatggaactataataccaacataacagaagaaaacgtacagaatatgaataatgctggggataaatggagtgcttttctgaaagagcagtccacgttagcacagatgtaccctctgcaggagatccaaaaccttacagtgaagttgcagctgcaggctctgcaacagaatggttcttcagtgctgtcagaagataagtcaaagagacttaacaccatactcaatactatgtcaacgatttactccaccgggaaagtgtgcaatccggacaatccccaggagtgcttgttgctagaacctgggctcaacgagatcatggccaatagtttggactataatgagcggctgtgggcttgggaatcctggcgcagcgaggtggggaaacaactccgccccctgtacgaggagtacgttgtacttaagaacgagatggccagagctaatcactatgaagactatggagactattggagaggcgactatgaagttaacggcgtggatggttatgactactcccgcggccagctcattgaagatgtcgagcacactttcgaggagatcaagcctctgtatgagcatctccacgcttatgttcgggccaagttgatgaacgcatacccgtcttacatctcacctatcggttgtctcccggcgcacctattgggagatatgtgggggcggttttggaccaatctgtacagcctaacggtgccatttggccagaagccaaacattgacgtgactgatgcaatggtagatcaagcctgggatgcgcagcggatcttcaaggaggcagagaagttctttgtctctgtgggcctgccaaacatgacccagggcttttgggagaatagcatgctgactgatcccggaaatgtgcagaaggccgtttgtcaccctacagcatgggacttaggcaagggagattttagaattctgatgtgtacaaaagtaacaatggacgacttccttactgcccaccatgaaatggggcacatccaatatgacatggcctatgccgctcaacccttccttcttcgcaatggggccaacgaagggttccacgaggccgtgggcgagataatgagccttagtgccgccacacccaaacatctgaagagcatcggcctgcttagcccagactttcaggaagacaacgagaccgaaattaacttcctgttaaaacaggccctcacaatagtgggaactctcccgttcacatacatgctggaaaaatggcggtggatggtgtttaagggcgaaatacctaaggaccagtggatgaaaaagtggtgggagatgaagcgggaaatcgttggtgtcgttgagcccgtgccacatgacgaaacctattgtgatccagctagtctgtttcacgtgagcaatgattatagttttatccggtactatactagaacgttgtaccagttccagtttcaggaagctctgtgtcaagcggcgaaacatgaggggcccctgcacaaatgcgatatcagtaactcaaccgaagcaggccagaagttgttcaacatgctgcgcctaggaaagtccgaaccatggaccctcgctctggagaatgtggtgggagcgaagaacatgaacgtgagacccctgctgaactatttcgaacctctatttacttggctgaaggatcagaacaagaactccttcgtagggtggtccactgattggagcccatatgcggaccagagtataaaggtgcgaatctctctgaaaagcgcccttggtgataaggcgtacgagtggaatgacaatgagatgtatctgttcaggagttcagttgcatacgccatgcgtcaatacttccttaaggtcaagaaccagatgatcctgtttggggaggaggatgttagagtggctaacctcaagccccgaatcagcttcaattttttcgttacagcacccaagaacgtctctgatatcatccctcggaccgaggttgaaaaggccattcgcatgtcgcgctctcgaattaatgacgccttccggcttaacgacaatagcctggagttcctcggaatccagcctactctgggcccaccaaatcagcctcccgtctccatatggttgatcgtcttcggagtagtgatgggcgtgatcgtcgtcgggatcgttattctcatctttaccgggattagagatcgcaagaaaaaaaataaagcacgcagcggagagaacccttatgctagcatagatatttcgaaaggcgagaataatcctggcttccagaatacagatgatgtccagacaagcttctag

SEQ ID NO: 209565 - DNA, 2418 bp, Artificial Sequence
  derived and/or modified sequence
atgtcgagcagctcctggctgctgctgagcctggtggccgtcaccgccgctcaatccacaatcgaggaacaggcgaagacctttttggacaagttcaatcacgaagctgaagacctgttctatcagtcctccctcgcgtcttggaattataatacgaatattacagaagaaaacgtccagaatatgaacaatgccggagataaatggtcagcctttctcaaggagcagtctacgctggctcagatgtaccccctccaggaaatccaaaatctgacagtgaagctgcagttgcaagctctgcagcagaatggttctagtgttctttccgaagataagagcaagcgcctgaacaccattctgaacaccatgtccactatttactcgaccggcaaggtctgtaatcctgacaacccacaggaatgcctcttactcgagccaggcctaaatgaaatcatggcaaattccttagactacaatgagcggctatgggcatgggaatcttggcgtagcgaagtgggaaagcaactgcggcctttatatgaggaatacgtcgtgttaaagaatgagatggccagggccaaccactacgaggactacggcgactactggcgtggggactacgaagtgaatggagtcgacggatacgattactctcgaggccaactgatagaggacgttgaacatacatttgaagaaattaaaccgctgtatgaacatcttcacgcatatgtgcgggctaagttaatgaatgcctacccatcctacatttctcctattggctgccttccagcccatctgctaggagacatgtggggaagattttggactaatctctatagcctgaccgttcctttcggacagaaacccaatatcgatgtcacagacgccatggtcgatcaagcctgggacgctcagagaatcttcaaagaagccgaaaaatttttcgtgtcagtcggcctgcccaacatgacgcaggggttctgggagaattctatgctgacggacccaggaaacgtgcagaaagcagtgtgtcaccctacggcctgggaccttggcaagggcgattttcggatcctgatgtgcaccaaagtgaccatggacgactttcttactgctcaccacgagatgggacatatccagtacgacatggcatatgcggcacagccatttcttctgcggaatggagcaaatgaagggttccacgaggccgtcggggagatcatgtccctgtcagccgctacaccaaaacatcttaagtctattgggctcctgtcccccgattttcaagaggacaacgagacggagataaatttcttactcaagcaggcacttactatcgttggaaccctccctttcacctatatgctggagaaatggagatggatggtgtttaagggcgaaatccccaaggaccaatggatgaagaagtggtgggaaatgaaacgggagatcgttggtgtggtggaacccgtcccacacgacgaaacctactgcgacccagcgtctctgttccatgttagtaatgactactcctttattcggtattacacaaggactctgtaccaatttcagtttcaggaggccctctgtcaggctgcaaagcacgagggccctctacataaatgtgacattagtaactccaccgaggcgggacagaaactgttcaacatgctgagattggggaagtcggaaccctggacactcgctttagagaacgtggtcggcgcaaagaacatgaacgttcgtcctctgctcaactacttcgagcccctgttcacctggttaaaggaccagaacaagaattctttcgtcggctggagcactgattggtccccatatgccgatcagtcgatcaaggtgaggatctctctgaaaagcgctctaggagacaaggcctatgagtggaacgacaacgagatgtatctctttaggtcctctgtggcttacgctatgcggcagtatttcctgaaggttaagaatcagatgatactcttcggcgaagaggatgttcgggtcgccaaccttaaaccacggatctctttcaatttctttgttacagcaccaaaaaacgtctcagacatcatacctcgaacagaggttgagaaggcaatacggatgagcaggtctcgcatcaatgacgcctttagattaaacgataacagcctcgagtttcttggcatccaacctaccttaggccctcccaatcaaccgcctgtgtccatctggctgattgtttttggcgtagtgatgggcgtaattgtggttggcatcgtgattttgatctttacggggatccgcgatcgcaagaaaaagaacaaggctcgctcaggcgaaaatccttacgcctccatagatatttcaaagggtgagaacaatccagggttccaaaataccgatgacgtccagacctccttttag

SEQ ID NO: 209566 - DNA, 2418 bp, Artificial Sequence
  derived and/or modified sequence
atgagctcctcctcttggctgttgctttcactggtggcagtaaccgccgcacagtccaccattgaagagcaggctaagaccttccttgataaatttaatcacgaggccgaagatctgttttatcagagctccctagcctcgtggaactataacaccaacattacagaggagaacgtacagaacatgaacaatgccggtgacaagtggtctgcttttttgaaagaacagtcaaccctcgctcagatgtatccacttcaggagattcagaacctgacagtgaagctgcagctgcaggccctgcaacagaatgggtcatcagttttgtccgaagataaaagcaaacggcttaacaccatactgaatacgatgagcacaatttatagcactggcaaggtctgtaatcccgacaatccccaggagtgtctgctgttggaacccggattaaatgagatcatggccaactctctcgactataacgaacgcttatgggcatgggaatcctggcgttcagaagtgggcaaacaacttaggccactatacgaagaatacgttgtactgaagaatgagatggctcgagctaatcactacgaagattatggagactactggcgcggagattatgaggtcaatggtgtggacgggtatgactattcccgaggacagttaatcgaggatgtcgaacacacgtttgaagagatcaaacccctctacgaacacctgcatgcttatgtgagggctaagttgatgaacgcataccccagttatatctctccaatcgggtgtctgccggctcatctgctcggcgatatgtggggacggttctggacaaatctatactctctaacggtccctttcggccagaagcccaacatcgatgtgacagacgctatggtggatcaggcgtgggacgcccaacgcatcttcaaggaggcagaaaaatttttcgtcagcgtgggactgcccaacatgacacagggcttctgggagaattcaatgctgacagaccccggtaatgtgcagaaagcggtgtgccacccaaccgcctgggatctgggaaaaggggactttcgcatcctgatgtgcaccaaggtgaccatggacgatttcctcactgcccaccatgaaatgggccacatccagtacgatatggcgtacgccgctcagccctttcttttgcgaaacggggctaacgagggctttcatgaggccgtcggcgaaattatgtccctttcggccgcaactccgaagcaccttaaatccataggcctccttagccccgacttccaggaagacaacgaaacagaaattaatttcctgctgaaacaggccttaaccattgtgggaaccctgccttttacgtatatgctagaaaaatggcgctggatggttttcaagggtgagattcctaaggatcagtggatgaagaagtggtgggagatgaagcgcgagatagtgggagttgtggaacccgtcccccacgacgaaacgtattgcgatcccgctagtttattccacgtatccaatgattactcattcatccgctattacactaggaccctctaccagtttcagttccaggaggcgctatgccaggccgctaaacatgaaggccctcttcataagtgcgacattagcaattctacggaggcgggacagaaactgtttaatatgttgagactcggcaagtcggaaccatggactctggcacttgaaaacgtggtgggggcaaagaacatgaacgtgaggccactgctcaattactttgaacctctgtttacttggctcaaagatcagaataaaaatagcttcgtggggtggtccactgactggtccccatatgcagatcagagtattaaagtgagaatttctttgaagagtgcacttggagacaaagcttacgaatggaacgataacgaaatgtacctgttccggtcaagcgtcgcttatgccatgaggcagtatttcctgaaagttaaaaatcaaatgattctctttggcgaggaggacgtcagagtggcgaatctgaagcccagaatttcattcaattttttcgtgactgctcctaagaatgttagtgatatcatccccagaaccgaggtggaaaaagcgattcggatgagtcggagtcggattaatgatgcattcaggttaaatgacaacagcctggaatttttgggcattcaacccactctcggccctcctaatcaaccacctgtgagcatctggttgatcgtgttcggcgtcgttatgggcgtcattgtggtggggatcgtgatcctgatcttcactggaattagggatagaaagaagaaaaacaaggccaggagtggggaaaatccctatgcctctatagatatcagcaagggcgaaaataaccctggatttcagaatacagatgatgtgcagactagcttttag

SEQ ID NO: 209567 - DNA, 2415 bp, Artificial Sequence
  derived and/or modified sequence
atgtccagttcgagctggctgttgctttccctggttgcggtgaccgcagcacaatcgacaattgaggagcaagcgaagaccttcttagataaattcaatcatgaagccgaagaccttttctaccaatccagcttggcctcctggaattataatactaacatcaccgaggagaacgtgcagaacatgaataatgcaggcgataaatggagtgctttcctcaaagagcagtcaaccctggcacaaatgtatcccctgcaggagatccagaatctgacagtgaagctgcagctgcaggctctgcaacagaatggatctagcgtgctctccgaggataagtctaagcgtttgaacacaatcctgaataccatgtccacaatatacagcaccggaaaagtgtgtaaccccgataaccctcaggaatgtttgctgctggagccagggctcaacgaaattatggccaattctcttgattacaacgagcggctctgggcctgggagtcatggcgctctgaggtgggtaagcagctgcgacctctgtacgaagagtatgtcgttctgaaaaacgagatggcaagagccaatcactacgaggattacggcgactactggaggggagactacgaggtgaacggggtcgatggctatgactacagtcggggacaactgatcgaagacgtggagcacacctttgaagaaatcaagcccttgtatgagcacctgcacgcttatgttcgtgccaaacttatgaatgcctatcctagctatatcagtcctattggatgtctaccagcgcaccttctgggagatatgtggggtaggttctggactaacctgtatagcctgacggtgcctttcggacaaaagcctaacatcgacgtcacggatgctatggtagaccaggcctgggacgcccagcgaatctttaaggaggcggagaaattcttcgtatccgtggggttgccgaatatgactcagggcttttgggagaatagcatgctgacagatccaggcaacgttcagaaggccgtatgccacccaactgcatgggacctggggaaaggggatttccgtatcctgatgtgtactaaggtcacaatggacgactttctcacggcccatcacgagatgggtcacatccagtacgacatggcctacgcggcacaaccatttctgctgcggaatggcgctaacgaaggattccacgaggcagttggcgagataatgagcttgtccgccgcaactcctaagcacctaaagtctatcggtctgctgagccccgactttcaagaggacaacgagactgagatcaactttctgctcaagcaggctttaaccattgtgggcactctccccttcacatatatgctggagaaatggaggtggatggtcttcaaaggggagatcccgaaggatcagtggatgaaaaagtggtgggaaatgaaacgcgagattgtcggcgtagtcgagcctgtgcctcatgacgagacttactgcgatcccgcgtcattgttccacgtgtcaaacgactattctttcattagatactacacaagaacgctgtatcagtttcagtttcaggaggccctgtgtcaggctgctaagcacgaagggccactacacaaatgtgacatctctaactctaccgaggctggacaaaaactatttaatatgctgaggctcggcaaaagcgaaccttggaccctggccctggagaacgtcgtcggagcaaaaaacatgaacgtgcggcctcttttgaactactttgagcctctatttacatggctgaaagatcagaataagaatagctttgtcggatggtccaccgactggtccccctacgcggaccagtccattaaggtgagaatcagtctcaagtctgccttgggcgataaagcatacgagtggaatgacaatgagatgtacctcttcaggagctcagtcgcttatgccatgaggcagtacttccttaaggtgaagaatcaaatgatactctttggggaggaagatgtgagggtcgccaacctgaagccccgaatctcatttaatttctttgtcactgccccaaagaatgtgagtgatataataccccggactgaggtcgagaaggccatacgtatgagcagatccaggattaatgacgcatttaggctgaatgataatagcctggaatttctggggattcagcccacactcggtcctcccaaccagccgcctgtctccatctggttaattgttttcggggtggtaatgggtgtgatagtcgtgggaatagtgattcttatctttaccggtatcagagaccgcaaaaagaagaataaggcccgatcaggtgaaaatccctatgcctctatagatatcagtaaaggggaaaacaaccctggcttccagaataccgatgatgttcagacgtcattt

SEQ ID NO: 209568 - DNA, 2415 bp, Artificial Sequence
  derived and/or modified sequence
atgtcaagtagctcgtggctcctgttatctctagtcgcggtcactgcggcacagtccaccatcgaagagcaggctaaaacattcctggacaagttcaatcacgaagcagaggacctgttttatcagtcctccctggcttcctggaattataataccaacataactgaggagaatgtccagaatatgaacaacgcgggggataagtggtctgcctttttgaaggagcaatccacattggcgcagatgtaccctctgcaagagattcagaatctgaccgtcaagcttcagctgcaggctctgcagcagaatggatcttcagtcctctccgaagataaaagcaagcgcctcaacaccattctcaacaccatgagcacaatctatagtacagggaaggtctgcaatccagacaacccccaggaatgcctgttactggagcctggactcaacgagatcatggctaactccctagattataatgaacggctctgggcatgggagagttggaggagtgaggtggggaagcagctcaggcccctgtatgaggagtacgtcgtattgaagaacgagatggcccgggccaaccactacgaagattacggtgactattggcggggagactacgaggtcaacggcgtggacggatacgactacagtagagggcagctaatcgaggatgtcgagcatacgtttgaggaaattaaacccttgtacgaacatctccacgcctatgtccgggcaaagcttatgaacgcctacccatcttatatcagccctatcgggtgtctgccagcacatctcttgggcgacatgtgggggagattttggaccaatctctatagcctgacggtgccttttggccaaaagccgaatatcgacgtaaccgacgctatggtggatcaagcgtgggacgcgcagcggattttcaaagaagccgagaagttctttgttagcgtaggtctgcccaacatgacacagggattttgggaaaacagcatgctgacggatcctggaaacgtgcagaaggcagtttgccatcccacggcttgggacctgggtaaaggcgattttaggattctgatgtgtacgaaggtcacaatggatgattttctgacagcccatcatgagatggggcacatccagtacgacatggcctacgccgcacagccattcctattgcgcaatggcgccaacgaaggcttccatgaggctgttggcgagattatgtccttaagcgccgcaacgccgaagcatcttaaatccatcggtttactttcaccagattttcaagaggacaatgaaacggagattaattttctgctcaagcaggccctgaccatcgtgggaacgcttccctttacctacatgctggagaagtggcgctggatggtttttaagggcgagattcccaaggaccaatggatgaaaaaatggtgggaaatgaagcgcgaaatagtgggggtggtggagcccgtcccacatgatgagacctattgtgatccagcctcactcttccacgtatccaatgactactcctttattcgctactacactaggaccctttaccagttccagttccaggaggccctgtgccaggccgccaaacacgaggggccactccataagtgtgacatttccaattcaacggaagccgggcagaagttattcaatatgctgaggttggggaagtctgaaccctggaccctggctcttgaaaatgttgtcggggccaagaatatgaacgttagacccctcctgaactactttgagcccttatttacttggttgaaggatcaaaataagaactctttcgtcgggtggtccactgattggtcaccctatgccgaccagagcatcaaggtgagaatctctctgaagagcgcgttaggtgacaaagcatacgaatggaatgataatgagatgtatctgttccgttcttcagtcgcctacgccatgcggcagtattttctgaaagtgaagaatcagatgattttgttcggtgaggaggacgtgagggttgcaaacttaaagcccagaatctcatttaacttctttgttaccgccccgaaaaatgtatcggacataatccccagaactgaggtggagaaggcgatcagaatgtcccgctcaagaattaatgacgctttccgactgaatgacaattctctcgaatttttgggtatccaaccaacactgggccctcccaaccagccacccgtaagcatttggctgattgtgttcggcgttgtgatgggagtgattgtggtcgggatcgtgatcctgattttcacaggaatacgcgacaggaaaaaaaagaataaggcccggtcgggggagaacccttatgcctcgatagacatcagtaagggggagaacaaccctggcttccaaaacactgacgacgtgcaaactagtttt

SEQ ID NO: 209569 - DNA, 2415 bp, Artificial Sequence
  derived and/or modified sequence
atgtcatcatcatcttggctcttattgagtctcgtggccgtgacagccgctcagtcaactatcgaagaacaggccaaaacatttctggacaaatttaaccatgaagctgaagatttgttttatcaatcaagtctcgccagttggaattataatacaaacattactgaagagaacgtgcagaatatgaacaatgccggagataagtggagtgccttcctgaaagaacagagtactctggcccagatgtatcctcttcaggaaatccaaaatcttacagtcaagttacagttacaagctctccaacagaatgggtctagtgtgctctctgaggataaaagtaaaagacttaatactatattgaacacaatgtctacaatatattcaactggaaaagtttgtaaccccgataacccccaggaatgcctcctcctcgaaccaggattaaatgaaatcatggctaatagtctagattataatgaaaggctctgggcctgggaatcctggaggagtgaagtggggaagcagcttcgtcccctttatgaagagtatgtggtgttaaaaaacgaaatggctagagctaatcattacgaagattatggggattattggagaggagattatgaagtgaacggagtagatgggtatgattatagtagaggacagcttatcgaagacgtggagcatacatttgaggaaataaaacccctttatgaacatctccatgcatatgttcgcgcaaaactcatgaatgcatacccctcttacatatcacctatcgggtgccttcccgcccacttacttggagatatgtgggggaggttctggactaatctgtattctctgacagtaccatttggacagaaacccaatattgatgtgacagacgctatggttgatcaggcttgggacgctcagaggatctttaaagaggcagagaaatttttcgtttctgtagggctgccaaatatgacacaggggttctgggaaaattctatgctcactgaccctggaaacgtacagaaagcagtttgtcaccctactgcatgggacctagggaagggagacttccgaatacttatgtgcacaaaggtaactatggatgattttctcacggcacaccatgaaatggggcatatccagtatgatatggcatatgccgcacagccgttcctcctcaggaatggagcaaatgaagggtttcatgaagctgtcggagagattatgtcgctatctgcggctactcctaagcacctgaaatccatcgggctactcagtcccgattttcaagaagataacgaaacggaaattaactttttgctcaaacaggcgcttacaattgtaggaacactcccatttacttacatgctcgaaaagtggcggtggatggtatttaaaggggaaatcccaaaagaccagtggatgaaaaaatggtgggaaatgaagagggaaatcgttggggtggtggaacctgtaccacatgacgaaacatattgtgacccagcgtcgctgttccatgtatctaacgactattcctttatcagatattatactcgaacactttatcaatttcagttccaggaggcactgtgccaggcagctaaacacgaaggaccattgcataaatgtgatatcagtaactccactgaagccgggcagaaactgttcaatatgctgaggctaggaaaatcagaaccctggactctcgcattggaaaatgtggtaggggcaaaaaatatgaatgtgcggccactcctcaattattttgaacctctatttacatggctgaaagaccaaaacaaaaatagtttcgtcgggtggagtacagattggtcaccttatgccgaccagtcaatcaaagtgcgcatctctctgaagtctgccttgggagataaggcttatgaatggaatgataacgagatgtatctatttcggtcttcagtggcctatgctatgaggcagtattttctaaaagtaaagaaccagatgatactgttcggagaagaagatgtacgggtggctaatctaaaacctcgaatctctttcaatttttttgtaactgcccccaaaaatgtttctgatatcattcctcggacagaagtcgaaaaagctataaggatgtcacggtctaggatcaatgatgctttcagactcaatgacaattctctggaattcttggggatacagcctactttaggaccacccaatcagccccccgtatctatctggctaatagtgtttggagtcgtaatgggagttatagttgtgggaatcgttatcctaatcttcacagggattcgagatcgaaaaaaaaaaaacaaagcaagatccggagagaacccctatgcctccatcgacatatctaaaggagaaaacaaccccggattccagaatacagatgatgtccagacatcgttt

SEQ ID NO: 209570 - DNA, 2415 bp, Artificial Sequence
  derived and/or modified sequence
atgagtagctcttcatggctcctgttgagcctggtggcagttaccgctgctcaaagcactatcgaagaacaggctaaaactttcctagacaagttcaatcacgaggctgaggacctgttttatcagagcagtctcgcttcatggaactacaatactaacatcactgaggaaaatgtacagaatatgaataatgccggggataagtggtcagcattcctcaaagaacagagcacactagcccagatgtatcctctacaagagattcagaacctgaccgtgaaactacagctgcaggccctgcagcagaatgggtcttccgtcctaagtgaggacaagtccaaacggttgaacaccattctgaacaccatgagcaccatatattccaccggcaaggtgtgcaaccccgacaatccacaggagtgcctcctgctggaaccaggtctgaacgaaataatggctaatagcctcgactataacgagaggctttgggcttgggagtcttggcgatctgaagtgggtaagcagctgcgtccactgtatgaggagtacgttgtgctaaaaaatgagatggcccgggccaaccattatgaagactatggggattactggcgcggtgattatgaagtgaacggggttgatggctacgactacagtcgtggccagctgattgaggatgtggaacataccttcgaggagatcaagcccctctatgagcacctgcacgcctacgtgagggccaagctgatgaacgcttatccaagttacattagtccaattggctgcctacctgcccacctcttgggcgacatgtggggcagattctggaccaacctatattccctgactgtaccattcgggcagaaacctaacattgatgtgacagacgccatggtagatcaagcatgggacgcccagagaatcttcaaggaagccgagaaattctttgtctcagttgggttgccaaacatgacccagggcttttgggagaattctatgctcaccgaccctggcaacgtccagaaggccgtgtgccacccaactgcctgggacctcggcaagggcgatttccgtatcttgatgtgtacaaaagttaccatggacgattttctaactgcacaccacgaaatgggccacatacagtatgacatggcttacgccgcacagccatttcttctgcgaaacggggctaatgaagggttccacgaggctgtcggagagattatgtctctgtctgccgctacaccaaagcatttaaagagtattggtctgcttagccctgacttccaggaggataacgagacagagattaattttctactgaaacaggctctcactattgtgggcaccctcccttttacatacatgctggaaaaatggaggtggatggtgttcaagggagagattcccaaagatcagtggatgaaaaaatggtgggagatgaaacgagagattgtgggggttgtggaaccagtcccacacgatgagacttattgcgaccctgcttctctattccatgtgagcaacgactactcctttattcgctattatacaagaactctatatcagttccagttccaggaagccttgtgtcaggcagccaaacacgagggccctctgcataagtgtgatatttctaatagcacagaagctggtcaaaaactgttcaacatgctgcggctgggaaaatcagaaccatggaccctagctctggagaacgttgtcggcgcaaagaacatgaatgtgcgcccactgctgaattatttcgagccactgtttacatggctcaaggatcagaacaaaaacagttttgtgggctggtcaacagactggagtccttacgccgatcagtctattaaggtgcgcatcagtctgaagtctgctctaggtgataaagcttacgaatggaatgataatgagatgtacctgttccgctcctcagtcgcctatgcaatgcgacagtatttccttaaggtgaagaatcagatgatactgtttggcgaagaggatgtgagggtggctaacctgaaacctaggatttctttcaacttcttcgtgactgcacccaagaatgtgagtgacatcattcctcgcacagaggtcgagaaggctattaggatgagcaggagcagaatcaacgacgcctttcgactcaatgataatagcctggaattcctgggtatccaacccaccctgggaccacctaaccagccccctgttagtatttggctgattgtatttggggtggtgatgggcgtaattgtcgttggtattgtgattctgatctttaccggaattcgcgacaggaaaaaaaagaataaggcaaggtccggggaaaatccatacgcctcaatcgatataagcaagggagaaaacaatcctgggttccagaacacagacgatgttcagaccagtttt

SEQ ID NO: 209571 - DNA, 2415 bp, Artificial Sequence
  derived and/or modified sequence
atgtccagctcgtcatggctgttgctttcgcttgtcgcggtgactgctgctcagagcaccattgaggaacaggccaagacttttctcgacaagtttaaccacgaagcagaggatctcttttaccaatcttcgcttgcatcgtggaactataacaccaacattacggaagagaatgtccagaacatgaacaacgcaggcgataagtggtcggctttcctcaaggaacaatcgactttggcacaaatgtacccgcttcaagaaattcagaacctgaccgtgaagctgcagctgcaagccctgcagcaaaatggatcatccgtgctgtcggaggataaatccaagcgcctcaatacgatcctcaataccatgagcaccatttacagcaccggtaaggtttgtaatcccgataacccccaagaatgccttttgcttgagcctggattgaacgaaatcatggcgaattccctggattacaatgagagactgtgggcgtgggaaagctggcgaagcgaagtgggaaagcaattgcggcccctctacgaagaatacgtcgttctcaagaacgagatggcccgcgcaaatcattacgaagattacggtgactactggcgaggcgattatgaagtgaacggagttgacggttacgattattcacgaggccagctgatcgaagatgtcgagcatactttcgaggagattaagcctctttacgagcatctgcatgcatatgtgcgtgccaaacttatgaatgcttacccgtcatacatatcacctataggttgcctgcccgcacaccttcttggagacatgtggggtcggttttggaccaatctttactctctgacggtgccttttggacaaaaaccgaatatcgatgtgactgacgcgatggtcgaccaggcctgggatgctcagcgcatctttaaggaagcggaaaagttttttgtgagcgtgggactcccgaacatgactcaagggttctgggagaactccatgctgacggacccaggcaacgtccagaaagcagtctgccatccaactgcatgggacctcggcaagggagatttcagaattctcatgtgtaccaaggtgactatggatgattttctcaccgcacaccacgagatgggtcacattcaatacgacatggcatacgccgcacaaccattcctgcttagaaacggcgcaaacgaaggattccatgaagccgtcggcgaaatcatgtcactgtccgccgcgactccgaagcatctcaagtccatagggctgttgagccctgactttcaagaggataacgagactgaaatcaactttcttttgaaacaagcgctcacgatcgtggggaccctgccatttacctacatgctcgaaaagtggagatggatggtgtttaaaggagaaatccctaaggatcaatggatgaagaaatggtgggagatgaaaagggaaatcgtcggcgtggtggaacccgtgcctcatgacgagacttattgcgatcctgcctcactcttccacgtgtcaaacgattactcctttatccgctactacactagaactttgtatcagttccagtttcaggaagcgctttgtcaagccgcaaaacatgagggaccactgcacaagtgtgacatatccaattcgactgaagcagggcagaaactctttaacatgctgcggctcggcaagagcgaaccctggactctggcactcgagaatgtcgttggagcaaagaacatgaacgtgaggcctctgttgaactactttgaacctctctttacctggcttaaagatcagaacaagaatagctttgtgggatggtctacggactggtccccatacgcagatcagtcaatcaaggtgcgcatttcgctgaagtccgcactgggcgataaggcatatgaatggaacgataatgagatgtacctcttcagatcgtcagtggcatatgcaatgcggcagtactttcttaaggtgaagaaccaaatgatcctgtttggtgaagaggacgtccgtgtggccaatctgaagcctaggatctcgttcaacttttttgtgaccgcacccaaaaatgtgtccgacataattccacgaactgaagttgagaaggcaatccggatgtccaggagcaggattaatgatgcttttcgcctgaacgacaattcccttgaattcctcggtatacaaccaactctgggaccacctaaccaaccaccagtctccatatggctgatcgttttcggagtggtcatgggtgtgattgtggtcggcattgtgattttgatattcaccggcattcgagatagaaagaagaaaaacaaggcaagatcgggggagaacccatacgcaagcattgacatctcgaaaggtgagaataatccagggttccaaaacaccgatgatgtccaaactagcttt

SEQ ID NO: 209572 - DNA, 2415 bp, Artificial Sequence
  derived and/or modified sequence
atgtcgagctcgagctggctgttgctctccctggtggccgtgactgcagcacaatcgactatcgaagaacaagcaaagactttcctggataagtttaaccatgaagcagaagatctcttctaccagtcgagcctcgcttcgtggaactataacactaacattacggaagagaacgtgcaaaacatgaacaatgctggcgacaaatggtccgcctttttgaaggaacaaagcacccttgctcagatgtaccctctgcaggaaattcaaaatcttaccgtcaagttgcaactgcaagcactgcagcagaacggctcgtccgtgctttcggaagataaatccaaacggttgaacaccattttgaacaccatgtcgactatttactcaaccggaaaggtgtgtaaccccgacaatccgcaggagtgtctgctgcttgagcccgggctgaacgaaatcatggccaacagcctggattacaacgaaagactgtgggcatgggaaagctggagatcagaagtgggaaaacaacttcgtcctctgtacgaagaatacgtcgtccttaagaacgaaatggcaagggctaaccattacgaagattacggagattactggagaggggattacgaagttaatggcgtggacggttacgactactctcgcggacagttgattgaagatgtggaacacactttcgaagagattaagcctctttacgagcatcttcatgcctacgtgcgcgccaaacttatgaatgcatacccttcgtacatttcaccaattggttgccttccagcacaccttttgggagatatgtggggtcgcttctggaccaacctttactcccttaccgtcccttttggacaaaagccaaacatcgacgtgaccgatgcaatggtggatcaggcatgggatgctcaacgcattttcaaggaggcagagaagttttttgtgtccgtgggccttccgaatatgactcaaggattctgggaaaatagcatgctgaccgatccaggaaacgtgcagaaggcagtgtgccacccaacggcgtgggatcttggtaaaggagatttcagaatactgatgtgtaccaaggtcactatggacgactttctgaccgcacaccacgaaatggggcacatccaatacgatatggcctacgcagcgcaaccgtttcttcttcggaatggagcaaatgaaggcttccatgaagcagtcggagagataatgagcctgtcggccgccactccaaaacacctgaaatcaatcggcttgctgtccccggatttccaagaggataacgaaaccgaaatcaactttttgctcaagcaggcactgaccatcgttggaaccttgcctttcacttacatgctcgagaagtggcggtggatggtctttaagggtgaaataccgaaggatcagtggatgaaaaagtggtgggaaatgaaacgcgaaatagtcggtgttgtggagccagtccctcacgacgaaacctactgcgaccctgcatcgctgttccatgtgtcaaatgattactcctttatcaggtactacacgcgtactctctaccaattccaatttcaagaggcactttgtcaggcagctaagcatgaagggcccctccataaatgcgatatatcgaactcgaccgaggccgggcaaaaactgtttaacatgctgagacttgggaagagcgagccttggaccctcgcccttgagaacgttgtgggagcgaagaacatgaatgtccgacctcttctgaactacttcgagccgcttttcacttggctcaaggaccagaacaagaatagcttcgtgggttggagcaccgattggtcaccttacgcagatcaaagcattaaagtgcggattagcctgaagtctgcacttggcgataaggcatacgaatggaatgacaacgagatgtatctctttagatcctcggtggcctatgccatgaggcagtattttctcaaggtcaagaaccaaatgatcttgtttggagaggaagatgtgagggtggcgaacctcaaaccgcgcatctcattcaatttctttgtaacggctccgaaaaatgtgtccgacatcattccaagaaccgaagtcgagaaggcaattagaatgtccagatcaaggatcaacgacgcattccggcttaacgataacagccttgagtttttgggtatccaaccgactctcgggcctcccaaccaaccacctgtgtctatttggctcatcgtgttcggagtcgtgatgggggtgattgtcgtcggcatagtcattctgattttcactgggatccgagatcggaagaaaaagaacaaggcaaggtccggagaaaatccttacgcatccatcgatattagcaagggcgagaataatcctggattccagaacactgacgatgtgcaaacttccttc

SEQ ID NO: 209573 - DNA, 2415 bp, Artificial Sequence
  derived and/or modified sequence
atgtcatcctcttcctggcttctcctttctctggtggctgtaacagccgcgcagtctactatcgaggagcaggctaaaactttcctggacaaattcaatcacgaagctgaagatctgttttatcaaagttctctcgcatcatggaactataacactaacatcactgaggagaatgtacagaacatgaataatgcgggcgataagtggtctgcttttctgaaagagcagtctacgctcgctcaaatgtaccccctccaggaaatccaaaatttgacagtcaagctgcaactccaggcactgcaacaaaatggtagcagtgttctgtcagaagacaaatccaaaaggctcaacaccattctcaacacgatgagcacgatttatagtaccggcaaggtgtgcaatcccgataacccccaggaatgtttgctcctggaaccggggttgaacgagattatggccaacagcctcgattacaatgagcgactttgggcttgggaatcttggagatctgaagtggggaagcaactcagaccgttgtacgaggagtatgtagtgctgaaaaatgaaatggcaagagctaatcactatgaggattatggggactactggcggggtgattacgaggtcaacggggtagatggctacgattatagccgggggcagctcatcgaggacgtggagcacactttcgaggagatcaagcccctgtatgagcacctgcacgcctacgtcagggccaaattgatgaacgcctatccctcctacatttctcctattggctgtcttccagctcatctgcttggggatatgtggggacgattttggaccaatttgtattctctgacagtgcctttcggccagaaacctaatattgatgtgaccgacgcgatggtcgaccaggcctgggacgctcagaggattttcaaagaagccgagaagttctttgtgagcgtgggattgccgaacatgactcagggattctgggaaaatagtatgctcacggacccgggcaacgtccaaaaggcagtgtgccaccctactgcgtgggatctggggaagggcgatttcaggatacttatgtgcacgaaggtcactatggatgacttcttgacagcccatcacgaaatgggtcacatacagtacgacatggcctacgccgcccagcctttccttctgcggaacggggcgaacgagggtttccatgaggccgtcggagaaatcatgtccttgagcgcagcaaccccaaagcacctgaaatccattgggcttctgagccccgacttccaggaggacaatgagacagagatcaatttcctgctgaagcaggccctgacaatcgtcggtaccctgccttttacctatatgctggaaaagtggcgctggatggtattcaaaggagaaattcctaaggatcagtggatgaaaaaatggtgggagatgaagcgggaaatagtgggagttgtcgaacctgtccctcacgatgagacgtactgcgatcccgcgagcctcttccatgtgtccaacgattatagcttcatacggtactacacgcgaacattgtatcagttccagttccaagaggcgctgtgtcaggcagcaaaacacgaggggcctctgcataaatgtgacatcagcaattccactgaagcgggccagaaactgttcaacatgttgaggctggggaagtctgaaccttggaccttggccctcgagaatgttgtgggggccaagaacatgaatgtaaggccactgctcaactatttcgagccgctgttcacctggctcaaggatcagaacaaaaactcttttgtcggctggagcaccgactggagtccatacgctgaccagtctataaaagtacgcatctctcttaagagcgcacttggcgataaggcctatgaatggaatgacaatgagatgtacctgttcaggtcatctgtcgcctatgctatgagacagtatttcttgaaggtgaaaaaccagatgatcctgtttggggaagaagacgttcgggtggctaaccttaaaccccgcatatccttcaatttttttgtaaccgcgcctaaaaacgtcagcgatatcataccccggactgaggtcgagaaagcaataagaatgtctagatctaggatcaacgatgccttcaggctgaatgataactccctggaattcttgggcatacagcctactctgggccctccgaaccagccacctgtgagcatttggctcattgttttcggagtggtgatgggcgtcattgtggtggggatagtaatcctcatctttactggaatccgcgacagaaagaagaagaacaaggctaggagcggtgagaatccctacgcgtctatcgatatcagtaagggagaaaacaatcctggttttcagaataccgacgacgtccaaacctctttt

SEQ ID NO: 209574 - DNA, 2415 bp, Artificial Sequence
  derived and/or modified sequence
atgtcaagtagcagctggctactccttagtctggttgcagttacagccgctcaaagcactattgaggagcaggccaagacctttttggataagttcaaccatgaggccgaggatctgttttatcagtcatccctcgcttcttggaattacaacactaacattaccgaagagaatgtgcagaatatgaacaatgccggagacaagtggagtgcttttcttaaggagcaatctaccctggcacagatgtaccctctgcaggaaatacagaatctgactgtcaaactccaactccaagcactccagcagaacggctccagtgttctgagcgaggacaaatccaagaggcttaacactatacttaatactatgagcaccatatacagcacgggcaaagtctgcaatccagacaatcctcaagaatgcctgttattagagcccggattgaacgagattatggccaatagtctggattataacgagcgcctgtgggcctgggagagctggcgttctgaagtgggtaagcaactgaggcccttatatgaagagtatgtggtgctcaaaaatgaaatggccagggccaaccactatgaagactatggggactactggcgcggggactatgaagttaatggggttgacgggtatgattactcaagaggacaattgattgaggatgtggaacacactttcgaagagatcaagccactatacgaacacctgcatgcttatgtccgggccaagctgatgaatgcttacccttcttatatctcaccgatcggatgcctacccgcccacctcctgggagatatgtggggacgcttttggacaaacctgtattctctcactgtacccttcgggcagaaaccaaacatagatgtgactgatgctatggttgaccaagcatgggacgcccaaaggatctttaaagaggctgaaaaattttttgtgagtgtgggcctccctaacatgactcagggattttgggagaattctatgctcaccgatcccggtaacgtacagaaggctgtgtgccatcctacagcctgggatctggggaagggcgactttcgaatcctgatgtgcacaaaggtgacgatggacgatttcctgacggctcatcacgagatgggtcacatccaatacgacatggcatacgccgcccagccttttcttctccgaaacggagccaatgaagggttccacgaagctgttggcgagatcatgtcactgagcgctgccacacccaaacaccttaagtctattggccttctaagcccggacttccaggaggacaacgagactgaaatcaacttcctgttaaagcaagccttgacgatcgtgggaactctgccattcacctatatgctggaaaagtggagatggatggtgtttaagggtgaaataccaaaagatcagtggatgaagaaatggtgggagatgaagagagaaattgtgggcgtggtcgagccagtgccccatgatgagacctactgtgaccctgcctcactctttcacgtctccaacgactactcgtttatcagatattacaccaggactttgtaccagtttcaatttcaggaagcactgtgccaagcagccaaacatgagggccccctccataaatgcgacatctctaatagcacagaggcggggcagaaattgttcaatatgctgaggctgggcaaaagtgaaccatggaccctggctctcgagaatgtagtgggagctaagaatatgaatgtgcgcccgttattgaactattttgaaccactgtttacctggctcaaagaccagaacaagaattcgttcgtggggtggagcacagactggtccccctatgcagaccagtcaatcaaggtcaggatcagcctgaagtccgctttgggcgacaaagcatacgagtggaacgacaatgagatgtatctgtttaggtctagtgtggcttacgcgatgcggcagtattttctcaaagtcaaaaatcaaatgattctttttggtgaagaagacgttcgcgtggcaaatttaaaaccgcggatatctttcaatttctttgtgacagccccaaagaatgtttctgatatcatcccgcggacagaggtcgagaaggccattagaatgtctcgtagccgcattaacgatgcctttaggctgaacgataatagtctggagttcctgggcattcaacctacgcttggacctcccaaccagccccctgtctctatttggcttattgtgtttggggtcgtcatgggtgtcattgtcgtgggaatcgtgattctgatctttactggcattcgagatcgcaaaaaaaagaacaaagcccgctctggagaaaacccgtacgcatccattgacatttcaaaaggagagaacaacccaggcttccaaaacacagatgacgtacagacatctttc

SEQ ID NO: 209575 - DNA, 2415 bp, Artificial Sequence
  derived and/or modified sequence
atgtcttccagttcctggctcttgctgtcgctggtcgccgttactgcagcacagtcaactattgaggaacaggcaaagacttttctggacaagtttaaccacgaggcagaggatctgttctaccagtccagtttggctagctggaactacaacaccaacattacggaagagaatgtccagaacatgaacaatgccggcgacaagtggtccgcatttctgaaagagcagagcactctggcccagatgtatcccttgcaggagattcaaaatttaaccgtgaagcttcagctccaagccttgcagcaaaatgggtcgtccgtgctgtcagaagataagtcaaaaagactcaacacaattctcaacaccatgtctactatctacagcacaggtaaggtgtgtaaccctgacaatccccaggaatgcctgctgctggagccaggtcttaacgagatcatggccaactccttagattacaacgaacggctgtgggcttgggagagttggcgtagcgaggtggggaagcagctccggcccctgtatgaggagtacgtcgtcctgaaaaatgaaatggctcgcgctaatcactatgaggactatggagactattggcggggtgactacgaagtgaatggcgtcgacgggtacgattattcccgaggtcagttgatagaggatgtggagcatacatttgaggagattaaaccactctatgaacaccttcacgcatacgtcagggcaaagttgatgaatgcctatccaagctacatttctccaattggctgcttgcccgcccacctgctcggcgacatgtgggggagattttggaccaacctgtatagcctcactgtcccctttgggcagaagcctaatattgatgtaactgacgctatggtagatcaagcatgggacgcccagagaatcttcaaggaagctgaaaaattttttgtgtccgtgggcttacctaatatgacccaggggttctgggagaactcaatgctcacagatcccggtaatgtgcagaaagctgtgtgtcatccaacggcctgggatctaggaaagggtgatttcagaattctcatgtgtaccaaagtcactatggacgactttctcactgctcatcacgagatgggtcatatccagtatgatatggcttacgctgcccagccgtttctgctgcgaaatggcgcaaatgaaggtttccatgaagctgtaggggaaatcatgagcctgtcggcggctacccccaagcacctgaagagtattggcttgctgtctcctgacttccaggaagacaacgagaccgagattaatttcctgctcaagcaggctctgaccatcgtgggcactctacccttcacctatatgctggaaaagtggcgttggatggtcttcaaaggcgagatccccaaggaccaatggatgaaaaagtggtgggagatgaagcgcgagatcgtgggggtggtcgagccagtgccgcacgacgaaacctattgtgaccccgcctctctcttccatgtgtccaacgactattccttcatacggtactatactaggaccttgtatcagttccagtttcaggaggctctttgtcaggccgccaagcacgagggtcctcttcacaagtgcgatatctccaattccaccgaggctggtcaaaagctgttcaacatgctgaggcttggaaagtcagagccgtggacactcgctctcgaaaacgtggtgggagccaagaatatgaacgtgcgccccctcctgaactatttcgaacctctgttcacatggctgaaagatcagaataaaaattcctttgtgggttggtcaacggattggtcgccttacgctgaccaaagtatcaaagttcggataagcctcaaatctgccctgggagataaggcctacgaatggaatgacaatgagatgtatctgttccggagcagtgtggcttacgcgatgaggcaatacttcctgaaagtaaaaaatcagatgatactcttcggcgaagaagatgttcgcgtggcgaatctgaagccacgaatatcctttaacttctttgtgaccgcacccaagaacgtatccgatatcattcccaggaccgaggtagaaaaagctatcaggatgtcacgcagccggatcaacgatgccttccggctgaacgacaactccctcgagttcctgggaattcagcctacattgggtccccccaaccagcccccagtttccatctggctgatagtgtttggtgttgtgatgggagtcatcgtcgtggggatcgtcattctgatctttactggcatcagagataggaagaaaaagaataaggcacgcagcggcgagaatccttacgcctcaattgatatctcaaagggagagaacaacccaggtttccaaaacacagacgatgtgcagactagcttc

SEQ ID NO: 209576 - DNA, 2415 bp, Artificial Sequence
  derived and/or modified sequence
atgtcatccagctcatggctcctgctgtcgcttgtcgctgtgactgcagcccagtccacgatcgaggaacaagcaaagactttcctggataagttcaaccatgaagctgaagatctgttttaccagtcctcgctggcctcgtggaactataacaccaatatcacggaagaaaacgtgcaaaacatgaacaacgcgggcgataagtggtctgcttttttgaaagaacaatcgacgctggcacaaatgtatcctctgcaggagatccaaaacctgactgtcaagctccagctccaggccttgcagcaaaacggatcgtcggtgctgtcagaagataagtcaaagcgcctgaacaccatcctgaataccatgtcgacgatctactcaactgggaaggtctgcaatcccgacaaccctcaggaatgcctgctgctcgagccaggcctgaacgaaatcatggcaaactcgctcgattacaacgagcgattgtgggcctgggaatcatggcggtccgaagtcggaaaacagctccggcccctctacgaagaatacgtggtgttgaaaaacgaaatggcgcgggctaaccactatgaagattacggagactactggcgtggagactatgaggtcaacggagtggacggatacgactactccagaggacagctgattgaggacgtggagcacacgttcgaagagatcaagccgctctacgagcacctccatgcatacgtgagagccaaactgatgaatgcctacccatcgtacatctcgccgatcggatgcctcccggcccacctgttgggcgatatgtggggaaggttttggactaatttgtacagcctcactgtccctttcggacaaaagcccaatatcgatgtgaccgacgccatggttgaccaagcatgggatgcacagcggatcttcaaagaagctgagaagtttttcgtgagtgtgggactgccgaacatgactcaggggttctgggagaactctatgctgacggatcctggtaatgtccaaaaggctgtgtgtcatccgactgcatgggaccttggaaaaggggacttccggatcctcatgtgtactaaagtgaccatggacgacttcctgactgcccaccacgaaatgggccacatccagtacgatatggcatatgcagcccagcctttcctcctccgcaatggcgctaacgaaggattccacgaggcggtcggcgaaatcatgagcctgtccgccgcgaccccgaaacatctcaagtcgattggactgctcagccccgacttccaggaggataacgaaaccgagatcaactttctgctgaaacaagctctgaccatcgtgggcacgctgccttttacctacatgctggaaaaatggcggtggatggtctttaagggggagatccctaaggaccagtggatgaagaagtggtgggagatgaaaagggagattgtgggggtcgtagaaccggtgccgcacgatgagacttactgcgaccccgcgtcgctgtttcacgtgtctaacgactacagcttcatccggtactacacgcggaccctgtaccagttccagttccaggaagcgctgtgtcaagcagccaagcacgaaggaccgcttcataagtgcgatatctcaaactcgaccgaggctgggcagaagctgttcaatatgctgcgcctgggtaaatcagagccttggaccttggccctggaaaatgtcgtgggagccaagaacatgaacgtgcgtccgctgctgaactacttcgaaccactcttcacgtggctgaaagaccagaacaagaattccttcgtgggatggtcgactgattggagcccgtacgcagaccagagcatcaaggtccgcatttcgttgaaatcagctctcggcgacaaggcctacgaatggaatgacaacgaaatgtatctgttccgctcgtcggtcgcctacgcaatgaggcagtacttcctcaaagtgaaaaaccagatgatcctgttcggagaggaggacgtccgcgtggcgaatctgaaaccgagaatttcgtttaacttcttcgtgaccgcacctaagaacgtgagcgatatcatcccgcggaccgaagtggaaaaagccatcagaatgtcgagatctcgcatcaatgatgcttttcgccttaatgacaatagtctggagttcttgggcatccagccgactctcggcccgccaaaccagcctccagtctccatctggctcatcgtgttcggagtcgtgatgggggtcattgtggtgggcattgtcattcttatcttcaccggtatccgggatcgcaagaagaagaataaggcacggagcggagagaatccatacgcgtccattgacatctccaaaggcgagaacaatccgggctttcaaaacaccgatgacgtgcagacctcgttc

SEQ ID NO: 209577 - DNA, 2415 bp, Artificial Sequence
  derived and/or modified sequence
atgagctcctcgtcctggctgctgctttctctggtcgcagtgactgcagcccagtctactatcgaagaacaggcaaaaactttcctggacaagtttaaccacgaagcagaggatctgttctaccagtcgtcactggcgtcgtggaattacaacactaatatcactgaagaaaacgtccaaaacatgaacaatgcaggagataaatggtccgcctttctgaaagagcaaagcactctcgcgcagatgtaccctctgcaagagatccagaacctcacggtgaagctccagctccaggcgctgcaacagaatgggtcatccgtcttgtccgaagataagtcgaagcggctgaataccatcctgaacaccatgtcgaccatctactcgactgggaaagtgtgtaatcccgacaatccgcaagaatgtctgctgctggaacccggactcaacgaaatcatggcaaactcgcttgactacaatgagcggctgtgggcttgggaaagctggcgctcagaggtcggcaagcaattgcggcccttgtacgaagagtatgtggtgctgaagaacgaaatggcccgagccaatcactacgaggactacggagattattggcggggagactacgaggtgaacggagtggacggatacgactacagccgggggcagttgatcgaagatgtcgaacacaccttcgaggagatcaagccgctgtacgaacacctgcatgcctacgtcagagccaagctcatgaacgcctacccgtcatacatctcacctatcggatgtctcccagctcacctgttgggcgacatgtgggggcgcttctggaccaatctctattcactgaccgtccctttcggacagaagcctaacatcgacgtcaccgacgcgatggttgatcaggcctgggacgcgcaaagaatctttaaagaagcagaaaagttctttgtgtcggtgggacttccgaatatgacccaaggattctgggaaaattccatgttgaccgaccccggcaacgtgcagaaggcagtgtgccacccaactgcatgggacctgggtaagggagatttcaggatccttatgtgcactaaagtgactatggatgatttccttacggctcaccatgagatgggccatatccagtacgacatggcctatgctgcgcagccgtttttgctccgcaacggcgcgaacgaaggatttcacgaagctgttggtgaaatcatgtcactgagcgcagccacgccgaagcatctgaagtcgattgggctgctctcgccggattttcaagaagataacgaaaccgaaatcaatttccttttgaagcaggccttgaccattgttggaacgctcccgttcacttacatgttggagaagtggagatggatggtgttcaagggagagattccaaaggatcagtggatgaaaaagtggtgggagatgaaaagagaaatcgtgggtgtggtggaacctgtgccacatgacgaaacgtactgcgatccagccagcctgttccacgtgtcgaacgactactccttcatcagatactacaccaggactctgtaccaattccagttccaggaggcgctgtgccaggctgccaaacacgaaggacccctccataaatgtgatatttcgaactcgaccgaggctgggcaaaagctgtttaacatgttgcgcctgggtaaatcggaaccgtggaccctcgccctcgaaaatgtggtgggcgcaaaaaacatgaatgtccggccactgttgaattacttcgagccgctgttcacctggctgaaggaccagaacaagaattcgtttgtcggatggtccactgactggtcaccgtacgcggaccagtccatcaaagtgcggatttccctgaagtcggccctcggcgacaaggcttacgagtggaacgacaatgagatgtacttgttcagaagcagcgtggcttacgccatgcggcagtacttcctcaaggttaagaaccaaatgatcctgttcggtgaagaggacgtgagagtggccaacctgaagccacgaatctccttcaatttctttgtcactgcaccaaagaatgtgagcgacataatcccacggaccgaggtggagaaggcgattcggatgtctcgctctcgcatcaatgacgccttccgactcaacgacaattcgctcgaatttcttggaatccaacctactctcggacccccgaaccagccgccggtgtccatctggctcatcgtgttcggagttgtgatgggtgtgattgtcgtcgggatcgtcatcctgatcttcaccggaattcgagatcgcaagaagaagaacaaggctcggtcaggtgagaacccgtacgcgtctatagatatctccaaaggggagaacaacccgggattccaaaacacggacgatgtgcaaacttcgttt

SEQ ID NO: 209578 - DNA, 2415 bp, Artificial Sequence
  derived and/or modified sequence
atgtcttcatcctcatggcttcttctgagcttggttgccgtcaccgctgctcagtctactattgaagagcaagctaaaaccttcctagataaatttaaccatgaggctgaagatctcttttatcagtcgagcttagcctcttggaactacaatacaaatatcactgaggaaaacgtccaaaacatgaataacgctggcgataaatggtctgcctttctaaaagaacagtcaaccctcgctcaaatgtacccgcttcaagagattcaaaatttaacagtgaagcttcaattgcaagccttgcagcagaacgggtcttctgttctgtcagaggataaaagtaaaaggttgaacacgatactgaatacgatgtccacaatttatagtacaggaaaagtgtgcaaccctgacaacccgcaggaatgcctattgctcgaaccaggcctcaacgaaatcatggccaacagcctcgattacaatgaacgtctgtgggcgtgggagtcatggaggtcggaggtgggtaagcagttacggccattatacgaagaatacgttgtactgaagaatgagatggctagagcaaatcactatgaggactatggagattactggagaggtgattatgaggttaacggggtagatggatacgattattcacgtggtcaattgattgaggacgtggagcacacgttcgaagagattaaacctctttacgaacatttgcatgcttatgtccgtgctaagcttatgaatgcatacccttcgtatataagtccaatcggatgcctcccagcacaccttcttggagacatgtggggaagattttggacgaacttgtattccttaactgttcctttcggacagaaacctaatatagatgtgacagatgcgatggtcgatcaggcttgggatgcacagagaatctttaaggaggccgagaagttctttgtgtcggtggggctaccaaacatgactcagggtttttgggagaactctatgctaacagatcctggtaacgtacaaaaggccgtctgccatcctaccgcttgggatcttggaaaaggggacttccgaatacttatgtgcaccaaggtgacgatggatgactttcttacggcccatcatgagatgggacatattcagtacgatatggcttatgccgctcaaccttttctattacgcaacggagcgaacgagggtttccatgaagccgtcggagagatcatgagtttatcagctgcgacaccaaaacacttaaaatctatcgggctccttagtcccgatttccaggaagataatgaaaccgaaatcaattttctccttaagcaggccttgactattgttggtacactccccttcacttatatgcttgagaaatggcgctggatggtatttaagggcgagatccctaaagatcaatggatgaagaagtggtgggagatgaaaagagagattgtgggtgttgttgaaccagttccgcatgacgaaacatattgtgatcctgcgagcctgtttcatgtaagcaatgactattcattcattcggtattacactagaactctctaccaatttcaattccaagaggcactatgtcaggctgcaaaacatgagggtcctttgcataaatgtgatatttcaaattcgaccgaagcaggtcaaaagctgtttaacatgttgagattgggtaaatcagaaccatggacattagccttagaaaatgttgttggcgccaagaatatgaatgtgcgtccattgttgaattacttcgagccgctttttacctggttgaaggatcagaacaaaaactcatttgtaggatggagtacggactggtcaccttatgctgatcagtctattaaggttcgtatttcattgaagagcgctctcggcgacaaagcttatgagtggaacgataatgaaatgtatttgttccggtcttcagtagcctatgctatgcgacaatattttctgaaggtaaaaaaccagatgatcctttttggcgaagaggacgtgagagttgctaatttgaagccacggatctccttcaactttttcgttacagccccaaaaaatgtgagcgatattattccgaggacagaggttgaaaaagctatacgtatgtcccgaagcagaatcaatgacgcttttaggttaaacgacaattcacttgaattcctaggtattcaacccaccctcggtcctcctaatcaacctcctgtgtcgatatggttgatagtcttcggtgtcgtaatgggagtaatcgtcgttggcattgttatacttattttcacaggtattcgtgatagaaaaaaaaaaaataaagcaagatcgggagagaacccttacgcttccattgatatctctaaaggggaaaataatcctggttttcaaaacaccgatgatgtccagacatccttt

SEQ ID NO: 209579 - DNA, 2415 bp, Artificial Sequence
  derived and/or modified sequence
atgtcgtcgtcgtcatggcttctgctgtcactcgtggccgtcactgcagcacaatccaccatcgaagaacaggccaaaactttcctcgacaagttcaatcatgaagcggaagatctgttctaccaatcatccctggcctcctggaactacaacactaacatcacggaagaaaacgttcaaaacatgaacaacgcgggagataagtggtcagcgtttctgaaggaacagagcaccctcgcgcagatgtacccactccaagaaatccaaaacctgactgtgaaactccaactgcaagcccttcagcagaacggcagcagcgtgctgtccgaagataaaagtaagcgccttaataccattctgaacactatgtccactatctatagcaccgggaaagtgtgtaacccggataacccgcaggaatgcctgttgctcgagccaggactgaacgagataatggcgaactcactggactacaatgaaaggctgtgggcgtgggaaagctggaggtccgaagtgggtaaacagctgaggccgctttatgaggagtacgttgtgcttaagaatgaaatggcaagagccaatcactatgaagattacggggactactggcgaggcgattacgaagtcaacggagtcgatggatacgactactctcgcggccaactgatcgaggacgtcgagcacaccttcgaggaaatcaaaccactctatgaacatctgcacgcttacgtgcgcgcgaagttgatgaacgcctacccgtcatacatttcgccgatcggatgcctgccggctcacctgctcggcgacatgtgggggcgcttctggactaacctctactcgctgacggtgccattcggacagaagccaaacattgacgtgaccgacgccatggtcgaccaggcctgggacgcccaacggattttcaaagaagcagagaagttctttgtgagcgtcggactcccgaatatgacccagggattttgggagaactcaatgcttacggatcctgggaatgtgcaaaaagccgtatgccacccgactgcgtgggatctcggaaagggcgacttccggatcctgatgtgcactaaggtgaccatggatgacttcctcacggcgcatcatgagatgggccacatccagtacgacatggcctacgctgcacagccattcctcctgcggaacggtgccaacgagggcttccacgaagccgtgggcgagatcatgtcgctgtcagccgcgactccgaagcatctgaaatccatcggcttgctcagcccggatttccaagaggacaacgagacggaaataaacttcttgctcaagcaggctttgaccattgtgggcaccctgcctttcacgtacatgctggagaagtggagatggatggtcttcaaaggagaaattccgaaagaccagtggatgaagaagtggtgggagatgaagcgggaaattgtgggcgtcgtggagcccgtgccgcatgacgaaacctactgcgatccagcgtccctgttccacgtgtcgaatgactacagctttatccgatactacactcgcactctgtaccaatttcagttccaggaagctctgtgccaggcagctaaacacgaaggacctctccacaaatgtgatatctcgaactctacggaagcaggacagaaactgttcaatatgttgcggttgggtaaatcggagccgtggaccttggctttggagaatgtggtgggtgccaagaacatgaacgtccgcccactcctgaactactttgagcctctgttcacttggctgaaggaccaaaacaagaactcttttgtaggatggtccacggattggagcccttacgccgaccagtctatcaaagttagaatctctcttaagtccgcactcggtgataaggcttacgaatggaacgacaacgagatgtacctctttcgctcgtcggtcgcctacgccatgcgccagtactttctgaaggtcaagaatcagatgatcctcttcggcgaagaagatgtgagggtggcgaatctgaaacccagaatctccttcaacttctttgtgacggcacctaagaacgtgagcgacatcatcccacgcaccgaagttgagaaagccatccggatgtccaggtcgcgcatcaatgacgcatttagactgaatgataattccctggagtttctgggaatccaaccaacgctcggaccgccaaatcagccgcccgtgagcatctggctgatcgtgttcggagtcgtgatgggggtaattgtcgtcggcatcgtgattctcatcttcactgggatccgcgatcggaagaagaagaataaggcacggtcaggagagaacccgtacgcgtcgatcgacatctctaagggagagaacaatccaggtttccagaataccgacgatgtgcaaacctccttc

SEQ ID NO: 209580 - DNA, 2415 bp, Artificial Sequence
  derived and/or modified sequence
atgagttcgtcttcgtggcttttgctatcactggtcgcggttaccgcggcgcagtccaccattgaggagcaggccaagaccttcctagataaattcaaccatgaagcggaggatctcttctatcagtcctcgctggcctcctggaactataatacaaacatcaccgaagagaacgttcagaacatgaataacgcgggagataaatggagtgcattcttgaaggaacagtcaaccctagcgcagatgtacccgcttcaagagatccagaatcttaccgtgaagctccaactgcaggctctacagcaaaatggctctagtgtgctgtccgaggataaatcgaaacgccttaacacgatcctaaacacgatgtctacaatctattccaccggcaaggtctgcaacccggataacccgcaggagtgccttctgttggagccgggtttgaacgagattatggctaactcgttggactacaatgagagactgtgggcatgggagtcttggaggtcggaggtcggaaaacaactccgcccactgtatgaggaatacgtagtcctcaaaaacgagatggcgcgggcaaaccattacgaggattacggcgactactggagaggagactatgaagtcaacggagtggatggatacgactattcccgaggccagctaatagaagacgtggagcatactttcgaagaaattaagccactgtatgaacacctgcatgcatacgtgagagcaaagctaatgaatgcctatccgtcatatatctccccgataggctgcctaccggcgcatcttcttggagatatgtgggggaggttctggacaaatttgtattcgctcactgttccgttcggacaaaagccaaacattgacgttacggacgctatggttgatcaggcttgggatgctcaacgaatatttaaagaggccgaaaagtttttcgtgtcagtcggcctccctaatatgacgcaggggttttgggaaaattcaatgttgacagatcctggcaacgtccaaaaagcggtttgtcatcccacagcttgggacctgggaaaaggagatttccgtattcttatgtgcaccaaggtgaccatggacgatttcttaacggcccaccatgagatgggacatattcaatatgacatggcctatgcagcgcagccattcctgctgcgcaacggcgcaaacgagggttttcatgaagcagttggagagattatgtctttgtcagccgcgacgcctaaacatctaaagtctatcggacttctctctccggactttcaggaagataacgagactgagattaacttcctcctgaaacaggcgcttactatagtaggaacccttcccttcacttacatgcttgagaagtggcgttggatggtttttaaaggtgaaatcccgaaagatcaatggatgaaaaaatggtgggaaatgaaacgcgagatcgttggcgtcgtggagcccgtgccacatgatgaaacctattgtgaccccgcctcactctttcacgtctcaaacgattacagtttcatcaggtattatacaagaaccctttaccaatttcagttccaggaagcgctctgtcaagccgcgaagcatgaaggtccactacataaatgcgacatttccaactcaaccgaagctgggcagaagctattcaatatgttaagactcggaaagagcgagccatggacccttgcgctcgagaacgtcgtgggggctaaaaatatgaatgtccggcctctattaaactactttgaaccgctctttacatggctgaaggaccagaacaaaaattcctttgttggttggtctaccgactggtcgccctatgccgatcagagcatcaaagtccgcatctctcttaagagcgccttgggtgataaagcgtatgaatggaatgataacgaaatgtacctgttccggagcagtgtggcttacgcgatgcgacagtatttcctgaaggtgaagaatcaaatgatcctctttggtgaagaagatgtcagagttgcgaacctaaagcctcgtatctcttttaatttttttgtcaccgccccgaagaacgttagtgacatcatacctcgcactgaagttgagaaggccatccgtatgagccgttcacgtataaatgatgccttcagactgaacgacaactcactcgagttccttggaatacaacctacgctcggaccaccaaaccaaccaccagtctctatttggcttattgtcttcggtgtcgttatgggcgttatcgtcgttggaatcgtcatcttgatcttcacgggtatccgggaccgcaagaagaagaataaagcgcgctctggtgaaaatccgtatgccagtatcgacatttcgaagggcgaaaataaccccggattccagaacacggatgacgtgcaaacttctttt

SEQ ID NO: 209581 - DNA, 2415 bp, Artificial Sequence
  derived and/or modified sequence
atgtcgagttcatcctggctcctcctgagtttagtcgcagttaccgctgcacaatcaactatagaagagcaggctaagaccttcctcgataagttcaaccatgaagctgaagatctcttttatcagtcatctctggcttcatggaattataatactaacataactgaagaaaatgtccagaacatgaacaacgcaggtgacaagtggtcagcattccttaaagagcagagcacgttggcccagatgtatcctcttcaggaaatacagaaccttacggttaagcttcagttgcaggcactgcaacagaacggatcctctgtgcttagtgaggataagagcaagcggttgaacaccatccttaacacgatgagcactatctacagtaccgggaaggtttgtaatccagacaatccacaggaatgtctgctcctggagcccgggctgaacgaaataatggctaactcacttgattacaacgaaaggctgtgggcatgggaaagttggcgttcagaggtgggtaagcagctaagaccactctacgaagagtatgttgtgctgaaaaacgaaatggcaagagcaaaccattacgaggattatggagactactggcgtggagactacgaggtgaatggcgtggatgggtacgactatagccgtggccaactgattgaggacgtggagcacacctttgaggagataaaacccctctatgagcacctccacgcgtatgtgcgcgcaaagctgatgaacgcttacccctcatacattagtcctattggctgtctccccgcccacctattaggagacatgtggggccgcttttggacaaatctgtacagcctaaccgtgcccttcggccagaaacctaatattgacgttactgacgccatggtcgaccaggcatgggacgctcagagaatttttaaagaagccgagaagttctttgtttcggtcggcctccctaatatgacccagggtttctgggagaatagcatgctcacggaccctggtaacgttcagaaagccgtgtgccaccccacagcttgggacctgggcaagggggatttcaggatcctcatgtgcaccaaggtcacaatggatgactttttgaccgcgcaccacgagatgggccacatacaatacgacatggcttacgctgcccagccattcctattgcggaacggagccaatgaggggttccatgaggcggtgggtgaaataatgtcactttccgcagcaaccccaaaacaccttaagtcaattggtttactgtctcctgattttcaggaagacaacgaaaccgagattaactttctgctgaagcaggcactgacgatcgtgggcacactgccgttcacgtacatgcttgagaaatggcgctggatggtcttcaaaggggaaatcccaaaagaccagtggatgaagaagtggtgggagatgaaacgcgagattgtaggggtcgtggaacccgtaccccacgatgaaacctactgcgaccctgcctccttgtttcacgtgagcaatgattattctttcattcgttactatacacggactttgtaccagttccaattccaggaagccctctgtcaggccgctaagcacgaggggccgttgcacaagtgcgacatctctaattctactgaagctggccagaaactctttaatatgctgcgtctgggaaaaagtgaaccatggacactggccctggaaaacgtggtcggcgctaaaaacatgaatgtgcgacctctgctgaattacttcgaaccattgtttacctggttgaaggaccagaataaaaattctttcgtcggctggagcaccgactggtcaccttacgcagaccaatctattaaggtaagaatctccttgaaaagtgccctgggggataaagcctatgagtggaatgacaatgagatgtacctttttcgcagctccgtcgcatacgctatgaggcaatatttcctcaaggttaagaatcagatgattttattcggtgaggaagatgtgcgtgtggccaacctgaaaccccgaatctctttcaattttttcgtaacggctcctaagaacgtgtcagatatcatcccgaggacagaggtagagaaagcaatacggatgtcccgatcccgtataaacgatgctttccgattgaatgataattccttggagttccttggcattcagcctacgttaggcccacctaaccaaccccccgtaagcatctggctgatagtgttcggagtggtcatgggcgtgatcgtggtcggcatcgttatcctgatattcacagggattcgtgacaggaaaaaaaagaataaagccaggagtggcgagaacccctatgccagcatagacatcagcaaaggcgaaaacaatccgggcttccaaaacacagatgacgtccagactagcttc

SEQ ID NO: 209582 - DNA, 2415 bp, Artificial Sequence
  derived and/or modified sequence
atgtcaagcagcagctggttgctcctttcactggtagcggtcacggccgcccagtcaaccattgaagaacaggccaagacttttctggacaagttcaaccacgaggccgaggacctcttctaccaaagcagccttgcctcgtggaattacaatactaacattaccgaagaaaatgtccagaacatgaataacgccggagacaagtggtcagcgttcttgaaggagcagtcaactctggcacagatgtacccgttgcaagaaatccagaacctcactgtgaagttgcagttgcaggctctgcaacaaaatggatcctctgtcctttccgaggataaatcgaagcggctgaacactatcctgaataccatgtctacgatttactccaccggaaaggtgtgcaatccggacaatccacaagaatgcctcctgctcgaacctggactgaacgaaatcatggctaactcgctggactacaacgagcggctgtgggcgtgggagtcctggcgctcggaagtgggaaagcagctccgccctctgtacgaagaatacgtggtgttgaaaaatgagatggcccgggcaaaccactacgaggattacggggactactggagaggagactacgaggtgaacggagtggacggctacgattactccaggggtcaactcatcgaagatgttgagcacacctttgaagagatcaaaccactgtacgaacacctgcacgcgtatgtgcgggctaaactcatgaacgcatacccgagctacatctccccgatcgggtgcctgccggcgcacctgctgggagacatgtggggacggttctggactaatctgtattccctgaccgtgccattcgggcagaaaccgaatatcgacgtgactgacgccatggtggaccaggcctgggatgcgcagcgcatctttaaggaagcggagaagttcttcgtctccgtgggactcccaaacatgacccagggattttgggaaaattcaatgctcaccgacccgggcaatgtgcagaaagccgtgtgccacccgaccgcttgggatctcggaaaaggagacttcagaatcttgatgtgcaccaaggtgaccatggacgactttctgaccgcgcaccatgaaatgggacatatccagtacgacatggcttacgccgcacaaccctttctgctgcggaacggtgctaatgaaggcttccacgaagccgtcggagagatcatgtccctttccgccgccactccgaaacacctgaaaagcatcggccttcttagcccagattttcaagaggacaacgagactgagatcaacttcctcttgaaacaagcgctgaccattgtcggaacgctcccattcacctacatgctggagaaatggcggtggatggtgtttaagggagaaatacctaaagatcagtggatgaagaagtggtgggaaatgaagagagaaatcgtgggagtcgtggaaccggtcccacatgatgaaacctactgcgatccagcttcacttttccatgtgagcaacgattactcgttcatccgctactacacgagaactctgtaccaattccagtttcaggaagccctttgtcaggccgcgaagcacgaaggaccactgcataagtgtgacatcagcaacagcactgaagccgggcagaagctgttcaatatgttgagattgggcaaaagcgaaccttggaccctcgctcttgaaaacgtggtgggagccaagaatatgaatgtgaggccccttctgaattacttcgagcccctgttcacgtggttgaaggatcagaataagaactcgttcgtcggatggtccactgactggtcaccttacgccgaccagagcatcaaggtgcgcatctctctgaagagcgctctcggcgacaaggcctacgaatggaacgataacgaaatgtacctgtttcgctcgagcgtggcatacgccatgagacagtacttcctcaaggtgaaaaatcagatgatcctgttcggcgaagaggacgtcagagtggcaaacctgaagccgcggattagtttcaatttctttgtgaccgcgccgaagaatgtgtccgacatcatcccacgcacggaagtggaaaaagcgatcaggatgtcgaggtcacggattaatgatgcgttcagattgaatgacaactcgctcgaattcttgggcatccagccgactttgggcccaccgaaccaacctccggtgtccatctggctgatcgtctttggtgtcgtgatgggtgtgatcgtcgtgggaatcgtgatactcatcttcacgggaatccgggaccggaagaaaaagaataaggctagatcgggagagaatccatacgcctcaatcgatatttcaaaaggagagaacaacccaggattccaaaacactgatgacgtccagacctcattc

SEQ ID NO: 209583 - DNA, 2415 bp, Artificial Sequence
  derived and/or modified sequence
atgtcatcgtcctcgtggcttctcctctcactggtggcagtgactgcagcgcagagcaccatcgaggaacaggccaagacgttcctggacaaattcaaccacgaggccgaggatctcttttaccaaagcagcctggccagctggaactacaacaccaacatcaccgaggagaacgtgcagaacatgaataatgccggtgacaaatggtccgcctttttgaaagaacaatcaaccctggctcagatgtacccactgcaggaaatacaaaacctgacggtaaaactgcagctccaggccctgcagcagaacgggtcatcagtcctgagcgaagataagtcgaaacggttgaacaccatcctgaataccatgtccactatctacagcactgggaaggtttgcaacccagacaatccacaggaatgtctcctgctggaacctggactgaacgagatcatggccaatagcctggactacaacgaaagattgtgggcctgggaatcctggagatcggaggtcggcaagcaactgcgcccgctctacgaagaatacgtggtgctcaaaaatgagatggcgcgcgcaaaccactacgaggattatggcgactactggcggggagattacgaggtgaacggagtggatggctacgattactcgcggggccagttgatcgaagatgtcgagcacaccttcgaggaaatcaagccgctgtacgagcacttgcacgcctatgtgcgggccaagctcatgaatgcatacccatcgtacatttctccgatcggttgcctgccagcgcacctgctcggagacatgtggggccggttctggaccaatctgtatagcttgacggtcccattcggacaaaaaccaaatatcgatgtgactgacgccatggtggaccaagcctgggatgcacagcgcatctttaaggaggctgagaagttttttgtgtccgtcggactgcccaacatgacccagggtttctgggaaaactccatgctgactgaccctggcaacgtccagaaggccgtctgccaccctaccgcgtgggatcttggtaagggagactttcggatcctgatgtgtacgaaggtgactatggacgatttcttgactgcgcatcacgagatgggacacatccagtacgacatggcttacgccgcacaacctttcctgctgcgcaacggagccaacgaagggtttcacgaggctgtgggtgaaatcatgagcctctcggcggcaactccaaagcatctgaaatccatcggcttgctttctccggacttccaggaagataacgagactgagatcaacttcctgctcaagcaggcactcaccatcgtgggcactctgcccttcacttacatgctggagaagtggcggtggatggtgtttaagggcgagattccgaaagatcagtggatgaaaaagtggtgggaaatgaagcgggaaatcgtcggagtcgtggaacccgtgccgcacgacgaaacttactgtgatccggcatcgctgttccacgtgtcgaatgactactcgttcattcgttattacactcgcactctgtaccaattccaatttcaggaggccctgtgccaggctgcgaagcatgagggaccgctgcataagtgtgacatctccaattcgactgaagctggacagaagctgttcaacatgctccggctgggaaagagcgaaccatggactcttgcgcttgagaacgtggtcggcgctaagaatatgaacgtccggccgcttctgaactatttcgagccgctgttcacttggcttaaagaccagaataagaactcattcgtggggtggtcgactgactggtccccttacgccgaccagtcaatcaaggtgagaatctcgctcaagagcgccctcggtgataaggcatacgagtggaacgataacgaaatgtatctgtttcggtccagcgtcgcttacgccatgcggcagtacttccttaaggtcaagaatcagatgatcctcttcggcgaggaggacgtgcgggtcgccaatctgaaaccacggatcagcttcaacttttttgtcaccgcccctaagaatgtgtccgatatcatcccccgtaccgaggtggagaaggccatcaggatgtctcgcagccgcattaacgatgcattccgccttaacgataattcgctcgagtttttgggaattcagcccacccttgggccacctaaccaaccaccggtcagtatctggctgatcgtgttcggtgtggtgatgggcgtcattgtggttggaattgtgatcctcattttcaccggcatccgcgacagaaagaaaaagaataaggcgcggagcggtgagaatccatacgcgtccatcgacatctccaagggagagaataaccccggattccaaaacaccgacgacgtgcagacttccttt

SEQ ID NO: 209584 - DNA, 2415 bp, Artificial Sequence
  derived and/or modified sequence
atgagtagttcaagttggctcctgttgagcctggtggccgtcactgcagcccaaagtacaatcgaagagcaggccaagaccttcctggacaagttcaaccatgaagccgaggatttattctatcagagctctctggcgtcctggaactataacacgaatataaccgaggaaaatgtccagaatatgaacaacgcaggcgataagtggtccgcattcttgaaggaacagagcaccttggcccagatgtaccccctccaggagatccagaaccttactgtgaaactccagctgcaggccctccagcagaatggaagctccgttttgtctgaggacaaatctaagcggctgaacacaattctgaatactatgtctacgatatactcgaccggtaaggtttgcaaccccgataacccccaggagtgccttctgctggaacccggcttgaacgagattatggcaaattctttggactacaatgagagactttgggcatgggagagctggcgaagcgaagtgggcaagcaactgaggcccctttacgaggagtacgtggtactgaaaaacgaaatggcgcgtgccaatcattacgaggactacggagactactggaggggtgactacgaagtgaacggcgtggacggctacgactacagtcgggggcagctgatcgaagatgtagagcacaccttcgaggagattaaaccactctatgaacatctccacgcttatgtgcgagctaagctcatgaatgcttacccttcatatatttctccaattggatgccttccagctcatctgctaggtgacatgtggggaaggttttggacaaatctctattctctgaccgttccatttgggcagaaacctaacattgacgtgacagatgctatggtggaccaagcttgggatgcacagaggatctttaaagaggccgaaaagtttttcgtgagcgttggactgccaaatatgactcaggggttttgggagaatagcatgttgacagacccagggaatgtgcagaaggctgtctgccaccctaccgcatgggacttaggaaaaggagacttccgaattctgatgtgcacaaaagtgaccatggatgatttccttacagcacaccacgaaatgggacatattcagtatgacatggcctacgccgcccagccatttctcctccgcaatggagctaacgaaggttttcacgaggctgttggcgaaattatgtcactttccgccgcgactcctaagcacctgaagtctatagggctcctttctcctgacttccaggaagataatgagaccgagatcaatttcctgttaaagcaggcattaaccatagttggcacactgccatttacctatatgcttgagaaatggagatggatggtattcaaaggagagattcctaaagaccagtggatgaaaaaatggtgggagatgaagagggagatcgtcggcgttgttgaacctgttccgcacgacgagacttattgcgatccagcgagcttatttcatgtgtccaatgactattctttcattcggtattatacccggacgctatatcagttccagttccaggaggccctgtgtcaggccgccaagcatgagggcccattgcacaagtgcgacataagtaattcaacggaagctggccagaaactgttcaatatgcttcgtctcggaaagagcgagccatggactctggctctcgaaaacgttgtcggagccaaaaacatgaatgtacgacccctattaaactatttcgaaccactgtttacttggctgaaggatcaaaacaagaattccttcgttgggtggtcgaccgactggtccccctacgcagatcagtctatcaaggtaaggatttccctgaagagcgcattgggagataaggcctatgagtggaacgataatgagatgtatttattcagaagcagcgtggcctatgccatgagacagtactttcttaaggtgaagaatcagatgatcctctttggcgaggaggatgtgcgagtcgccaatttaaaaccgcggatctccttcaacttttttgtgaccgcccccaagaacgtgagtgatataataccccgaacagaggtcgagaaggcaatcagaatgagtcgttccagaattaatgatgcctttcgcctcaatgacaattccttagagttcctcggtatccagccaaccttaggacctcctaaccagcccccagtgagtatttggctcatagtgttcggcgtcgtcatgggtgttatcgtcgtgggtatcgtcatcctgatcttcactggaattagagataggaagaagaagaacaaagcccggtctggggagaacccgtacgccagcatcgatatctcaaaaggcgagaacaaccccgggtttcaaaataccgacgatgttcaaacctcgttt

SEQ ID NO: 209585 - DNA, 2415 bp, Artificial Sequence
  derived and/or modified sequence
atgtcctcaagctcgtggctgcttctgtcgctggtcgccgtcaccgcggctcaatcgacgatcgaagaacaggcgaaaaccttccttgacaaattcaatcatgaagcagaggatttgttctaccagagcagccttgcgtcgtggaactacaacaccaacatcactgaagaaaacgtgcaaaacatgaataacgcgggtgacaagtggtcggcctttcttaaagagcagtcaaccttggctcagatgtacccgctgcaggaaatccagaacttgaccgtgaaactccagctccaggcgttgcagcagaacggatcctcagtgctgtcagaagataagagcaaaagactgaatactattctcaacaccatgagcactatctactcaaccggcaaggtgtgtaaccctgacaatccgcaagaatgtctgctgctcgagccaggcctgaatgaaatcatggccaactcgctggattacaacgaacggctgtgggcgtgggaatcatggagatccgaggtgggcaagcagctccgcccactgtacgaagagtacgtggtgctgaagaacgagatggctcgggccaaccactacgaggattacggagactactggcggggagattacgaggtgaacggagtggacggctacgactactcaaggggacagctgatcgaggacgtggagcacactttcgaggaaatcaagccgttgtacgaacacctgcacgcttacgtgagagccaagctgatgaacgcctacccttcatatatctcccctatcggatgcctgcccgcacacctgctcggggatatgtgggggcgcttttggactaacctgtactcccttaccgtcccctttggacagaagccgaacatcgacgttacggacgccatggtggaccaagcctgggacgcccagagaattttcaaagaagccgagaagtttttcgtgtccgtcggcttgcccaacatgacgcaagggttctgggagaacagcatgctgaccgaccctggcaatgtccagaaggcggtgtgccacccgaccgcctgggatctgggtaagggagacttccgcatcctcatgtgtactaaagtgactatggacgacttcctgaccgcgcaccatgagatgggacatatccagtacgacatggcatatgccgcccagcccttcctgttgagaaatggagccaatgaaggattccatgaagccgtgggagagataatgtcgctgtccgccgccaccccaaagcacctgaagtctatcggcctgctgagcccagacttccaggaggacaacgaaaccgagatcaactttttgctcaaacaggccctgactatcgtgggaactctgccgtttacctacatgctggaaaagtggcggtggatggtgtttaaaggggaaatccctaaggaccagtggatgaagaagtggtgggaaatgaagcgcgaaatcgtcggagtcgttgaacccgtcccgcacgacgaaacctactgtgacccggcaagcctgttccacgtgtccaacgactactcgttcattcgctactacactcggactctctaccaatttcagttccaggaggccctgtgccaggcagcaaagcacgaaggcccgctccataaatgcgacatctcgaattcaaccgaggccggacagaaactgtttaacatgctccgtctgggaaagagcgaaccctggacgcttgcattggagaacgtggtcggagctaagaacatgaatgtgcggcctttgcttaactactttgagcctctcttcacctggctcaaagaccagaataagaattcgttcgtcggatggtccaccgattggtcgccgtacgcagaccagagcatcaaggtgagaatcagcctgaagtcggccctcggtgacaaagcgtacgagtggaatgataacgagatgtatctcttccgatcaagcgtcgcttacgcaatgcgccaatactttctcaaggtgaagaaccagatgatcctgttcggtgaagaggacgtgcgcgtggcaaaccttaagcctcggatctctttcaatttcttcgtgactgcaccgaagaacgtgagtgacattatcccgcggactgaagttgagaaagccatccgcatgtcgcggtccaggattaacgatgcctttcgcttgaacgacaattccctggaattcctggggatccagccgaccttgggaccaccaaaccagccaccggtgtccatttggctgattgtgttcggagtggtcatgggcgtgatcgtggtgggtattgtgatcctgatctttaccggtatccgggatagaaaaaagaagaacaaggcgcgctcgggagaaaacccgtatgcctccatcgacatctccaaaggagagaataaccctggattccagaacaccgatgacgtccagacttctttc

SEQ ID NO: 209586 - DNA, 2415 bp, Artificial Sequence
  derived and/or modified sequence
atgagctcttcttcgtggctgctcctgtcgctggtggcagtgaccgcggcgcagagcactattgaagaacaagcaaagactttccttgacaagtttaaccacgaggctgaggatctgttttaccagtcgtcgcttgcctcctggaattacaacactaacattaccgaagaaaatgtgcagaatatgaacaacgccggagataagtggagcgcatttcttaaggaacaatcgacgcttgcccaaatgtacccactccaagaaattcagaacttgactgtgaaacttcaactgcaggctctgcaacagaacgggtcatccgtcctgtcagaggataagtcaaagcgactgaacaccatactcaacaccatgtcaaccatctactccaccggaaaggtgtgtaacccggacaaccctcaagaatgtctgctcctggaaccaggacttaacgaaatcatggcaaattcactggactataacgagcgactctgggcatgggaatcctggaggagcgaggtcggaaagcagcttaggcccctttatgaagaatacgtggtgctgaagaatgaaatggcgcgcgcaaatcattacgaagattacggagattactggcgaggagattacgaagtgaacggtgtcgatggctacgactacagccggggacaactcattgaggatgtcgaacatacctttgaagaaatcaaaccgctttacgaacaccttcacgcatacgtgcgagccaaactcatgaacgcatacccttcctacattagccctataggatgccttcccgcacatctgctgggagacatgtggggaagattctggaccaatctgtacagccttacggtgcctttcggtcagaagccaaacattgacgtgaccgacgcaatggtggatcaagcatgggatgcgcagcggattttcaaggaagctgagaagttttttgtgtccgttggtctgcctaacatgactcaaggattctgggagaattccatgctgactgatcctggcaatgtccaaaaggccgtgtgtcatccaacggcatgggatctcggtaagggggattttagaatccttatgtgtaccaaagtcaccatggatgattttctgaccgcgcaccatgaaatggggcatatccagtatgacatggcctacgcggcacagccttttctgctgcggaacggtgctaacgaagggtttcatgaagctgtgggagaaatcatgtccctttcggcagccaccccaaaacatctcaaatcgatcgggcttctgtcacccgactttcaagaagataatgaaactgaaatcaatttcctcctcaagcaggcactcaccattgtcggcactcttccgtttacctacatgctcgaaaagtggagatggatggtgtttaaaggagaaattcccaaggaccaatggatgaagaagtggtgggaaatgaaaagagaaattgtcggcgtcgtggagccagtgccgcatgatgaaacctattgcgatcccgcatccctttttcatgtctccaatgattactcattcattcgttactacacgcgaactctttaccaatttcaattccaagaagccctgtgtcaggcggcaaagcatgaaggtcctcttcataagtgtgatatttcgaactcaactgaagcgggtcaaaaactgttcaacatgcttcgcctgggtaaatcagagccctggacgctggcgctcgaaaatgtggtgggagcaaagaatatgaacgtcagaccgctgctcaactacttcgaacccctgttcacttggctgaaggaccagaacaagaacagtttcgtgggatggtccactgactggtcgccctacgccgatcagtccatcaaggtgcgcatctccctgaagagcgccctgggagataaggcttacgagtggaacgacaacgagatgtaccttttccgcagctccgtggcatacgcaatgagacaatactttctgaaggtgaaaaatcagatgatactttttggtgaggaagatgtgagagtggcaaaccttaagcctagaatcagctttaactttttcgtcactgcaccgaagaatgtctcggacattatccctcggaccgaggtggagaaggccataagaatgtccagaagccgaattaacgacgcatttcgtcttaacgacaattcgttggagtttttgggtatccagccaactctgggcccacctaatcaaccacctgtgtcgatttggctgatcgtctttggcgtcgtcatgggagtgattgtcgtcgggattgtgattctcatcttcacgggaattcgcgatcgcaaaaagaagaacaaagcacgtagcggagagaacccctacgcgtccatcgatatctccaagggtgagaataatcctggctttcaaaacaccgatgacgtccaaacctcgttt

SEQ ID NO: 209587 - DNA, 2415 bp, Artificial Sequence
  derived and/or modified sequence
atgagctcatcgagctggctgttgctaagcttagtcgctgtgaccgcagcacaatctactattgaggagcaggcaaagacatttctagacaagttcaatcatgaagcggaggacctgttctaccagagtagccttgccagctggaactacaatactaacatcacagaggagaatgtgcagaacatgaataacgcaggggataaatggagcgcctttctcaaggaacaatcgacccttgcccagatgtaccctttgcaggagatccagaacctgaccgtgaagctacagctgcaggccctgcaacaaaacggtagtagcgtactgagtgaagataaatccaagaggctgaacactattctgaacaccatgtccacaatatattccacgggaaaagtctgtaacccagataacccccaggagtgtcttctgctagaacccggattgaacgagattatggccaattctctcgattataacgaacgcctgtgggcttgggagtcctggcgttcagaggtggggaagcaattgcggcccctttatgaagagtacgtggtgttgaagaacgaaatggcgcgagctaatcattacgaggactatggcgactactggaggggggactacgaagtcaacggagtggatgggtatgactatagtcggggtcaattgatcgaggatgtggagcatacatttgaggagataaaaccactatacgagcacctgcatgcatacgtgcgagcaaagctgatgaatgcttatccttcctacatttccccaatcggatgcttgcctgcccatttactgggtgacatgtggggccgcttctggacaaacctttatagcttgactgtgcccttcggacagaaaccaaacatagacgtcactgatgccatggtggaccaggcttgggacgcacaacggatcttcaaggaggctgaaaaattcttcgtttctgttggccttcctaacatgacccagggcttctgggaaaacagtatgctcaccgatcctggaaacgtccagaaggctgtatgccacccaactgcctgggacctgggaaagggtgattttcgcatcctcatgtgtactaaagtcaccatggacgattttctcacggcccaccacgagatgggccacattcagtatgacatggcgtacgccgctcaaccattcctactacggaacggcgccaatgaagggttccatgaagcagtgggggagattatgtcactgagcgcggccacgcccaaacacctgaaatctataggtctgttgagtcccgatttccaagaggacaatgaaacagaaattaacttcctgctgaagcaagccctcaccattgtgggcacgttacctttcacctacatgctcgaaaaatggaggtggatggtattcaagggtgaaataccaaaggaccagtggatgaaaaagtggtgggaaatgaaacgagaaatcgtgggcgtggtggagccagtacctcatgacgaaacatattgtgacccagcttccctgttccacgtctcaaacgactactccttcattcgctactacacacggaccttgtaccagtttcaatttcaggaggccctttgtcaggctgccaaacacgaaggtcccttgcataagtgcgatattagcaactctacagaggcgggacagaagctcttcaacatgctccgcttgggtaaatcggagccatggaccctcgccctggagaacgttgttggggcaaagaacatgaatgtacggcccctactcaactactttgaacctctgtttacgtggctgaaagaccagaacaaaaatagttttgttgggtggagcaccgattggtcaccttatgcagatcagtcaattaaagtacgcatcagcctgaagtccgccttaggcgataaggcctacgagtggaatgacaacgagatgtatctttttaggtccagcgtggcctacgctatgcgccagtattttttaaaggttaagaatcagatgatccttttcggcgaggaggatgtacgggtcgctaacttgaagccgcgcatctcatttaacttctttgttacagcacccaaaaacgtttcagatatcattccaagaacagaggtggagaaggctattcgtatgtctcgtagcaggattaacgacgccttccggcttaatgataatagtcttgaatttttggggattcagcctaccttggggcctcccaaccagcctccagtgagcatttggctgattgtttttggggtcgtgatgggggttatcgtggttggtatcgtgattctgatctttaccgggatcagagatagaaaaaaaaaaaataaagctcggtcaggcgagaatccttatgcttccatcgacatatccaaaggcgaaaacaatcctggttttcagaacacagacgatgtacagaccagcttc

SEQ ID NO: 209588 - DNA, 2415 bp, Artificial Sequence
  derived and/or modified sequence
atgtcaagctcgtcgtggcttctgctctcgctcgtcgccgtgaccgccgcccagtcaaccatcgaagaacaggccaagactttcctcgacaaattcaaccatgaagcagaagatctcttctaccagagctccctggcgtcttggaattacaacaccaacatcaccgaagaaaacgtgcagaacatgaacaatgccggagacaagtggtccgcgtttctgaaggaacagtcaaccctggcacaaatgtacccgctgcaagagatccagaacctcacggtgaagctccaactccaggcactgcaacaaaatggttcgtcggtcctgagcgaggataagtcgaaacggcttaacaccatcctcaatactatgtccacgatttactcgaccggaaaagtctgcaacccagacaatcctcaagagtgtctgctgctggaaccgggactcaacgaaatcatggctaactccctggactacaacgagagactgtgggcttgggagtcatggcggtcagaggtcgggaagcagctgcggccgttgtacgaagagtacgtggtgctcaagaacgagatggcgcgcgctaaccactacgaagattacggggattattggcgaggcgactacgaagtgaacggagtggacggctacgactactcccgggggcagttgatcgaagatgtcgaacatacgttcgaagaaatcaaaccgctgtacgaacacctgcatgcatacgtccgggcgaagctgatgaatgcttacccttcatacatctcaccaatcggctgccttccagctcacctgctgggagatatgtggggacgcttctggacgaacttgtactcgctgaccgtgccgtttggacagaaaccaaacatcgatgtcactgacgcgatggtcgatcaagcatgggatgcgcaacgcatcttcaaagaggccgagaagttcttcgtgtcggtgggactgcctaacatgacccagggcttctgggaaaacagcatgcttactgacccaggtaacgtgcaaaaggcagtctgccatcctaccgcttgggacctgggtaaaggcgatttcagaatcctgatgtgcaccaaggtgactatggacgattttctgactgcccatcacgaaatgggacacatccagtacgacatggcgtacgcggcacagcctttcctgcttaggaatggtgcaaatgagggattccatgaggccgttggagagatcatgtcactgtcggcggcgaccccgaaacatcttaagtctatcggactgctcagccccgactttcaagaagataatgagactgaaatcaacttcctgctcaagcaagcgctgaccatcgtggggactctgccattcacctacatgctcgaaaagtggcggtggatggtgtttaagggcgagattccaaaggatcagtggatgaaaaagtggtgggagatgaagagagaaatcgttggcgtggtggaaccagtgccgcacgacgaaacttactgtgaccctgcctcgctgttccacgtttcaaacgattactcatttatcagatactacactagaaccttgtaccagttccaattccaggaggccctgtgtcaggcagccaaacatgagggaccacttcacaagtgcgacatctcgaattcgaccgaggccggccaaaagctgttcaacatgctgagactggggaaatccgagccttggactctggcgttggagaatgtggtgggagccaaaaacatgaatgtgaggccgttgctgaactatttcgaaccgctgtttacctggctcaaggaccaaaacaagaactcctttgtgggatggtcaactgattggagcccgtacgcggatcagtccattaaggtgcgcattagcctgaagtcggctctgggagacaaggcttacgagtggaatgataatgagatgtacctcttccgctcgtcggtggcgtacgctatgaggcaatacttcctcaaagtgaagaaccagatgattttgttcggtgaggaggatgtgcgcgtggcaaatcttaagcctcgcatttcgtttaacttctttgtgaccgcccctaagaatgtttccgacatcatcccgagaaccgaagtcgaaaaggcgatccgcatgtccagatctcgtatcaacgacgcatttcgcctcaacgataactcactggaattcctgggcatccagccaactcttggaccaccgaaccagcctccggtcagcatctggctcatcgtgttcggcgtggtgatgggtgtgattgtggtgggtatcgtgatcctgatctttaccggcattcgggataggaagaagaaaaacaaggcacgctcaggagaaaacccctacgcatcgatcgatatttcgaagggcgagaacaatcctggattccagaacacggacgatgtgcagactagcttc

SEQ ID NO: 209589 - DNA, 2415 bp, Artificial Sequence
  derived and/or modified sequence
atgagctctagctcgtggctattacttagcctggtggcagttactgcggcccagtcaacaattgaggaacaggcaaagacattcctcgataagttcaatcatgaagccgaggatcttttctaccagtcttcactggccagctggaactataatactaatattaccgaggagaatgtgcagaatatgaataatgctggtgacaaatggtccgcattccttaaggaacagtccaccctcgcccagatgtacccattgcaagaaatccagaatttgactgtcaaactccagctgcaggcgctccagcaaaacgggtcgagtgtgctctcagaagacaaaagtaagcgactgaatacaatcctgaacaccatgagcacaatttatagcactggcaaggtgtgcaatcccgacaacccgcaggaatgcttgctgttggagcccggcttaaacgagataatggcgaactccctcgattacaacgaaaggctttgggcctgggagtcctggcgcagcgaagtcggtaaacagctcaggccgttgtatgaggaatatgtcgtgctgaagaatgaaatggcacgtgcgaatcactacgaggactacggcgactattggcggggcgactatgaagttaatggagtcgacgggtacgactatagtagagggcagctgatcgaggatgtagagcatacttttgaggagatcaagcctctctacgaacatctacatgcctacgtcagggccaaactgatgaatgcctacccgtcctatatctcccccatcggctgtctgcccgcccatctattgggggatatgtggggcaggttctggaccaacctatacagtctcactgtccccttcggacaaaagcctaacatcgacgtgaccgatgctatggttgaccaggcttgggacgcacagcggattttcaaagaggctgagaagttcttcgtttccgtgggactccctaatatgacacagggcttttgggagaacagcatgctcaccgacccgggtaacgtccagaaggctgtctgccaccccaccgcttgggatcttggcaagggagatttccggattctcatgtgtaccaaagtgacgatggatgactttctgaccgcccatcacgaaatgggacacatccagtatgatatggcttatgccgcccagccattcttgctccgaaacggcgctaacgagggattccacgaagccgttggtgaaattatgtccctcagcgcggcaactcccaagcaccttaaatcaataggtctgctgtctccagacttccaagaagataatgaaaccgaaattaacttcctgctcaaacaggcgctaaccattgtgggcacccttccattcacctatatgcttgagaagtggcggtggatggttttcaaaggagagatacccaaagaccaatggatgaagaagtggtgggagatgaaacgcgagatcgtcggtgtggtggagccagtgcctcatgatgagacatactgcgatcccgcatccctcttccacgtatcgaatgactactcttttatccgctattacactcgcaccctgtaccagttccagttccaggaagctttatgtcaagccgccaagcacgaaggcccgctgcacaaatgtgatatctctaactccacagaagcaggccagaaactgttcaacatgcttcgcttgggcaaatcagagccctggacacttgctctcgaaaatgtggtgggagccaaaaatatgaacgtgagaccacttttgaactattttgagccactgtttacatggttgaaggatcagaacaaaaactcattcgtaggatggtctaccgattggagcccttatgccgatcagagcataaaagtgcgcatctctttaaaaagcgccctaggagataaggcatatgaatggaatgataacgagatgtacctgttcagatcctccgtggcctatgctatgaggcagtacttcctgaaagttaagaatcagatgatcctcttcggtgaggaagatgtccgtgttgcaaacctgaagccccgaatcagttttaatttcttcgttactgccccaaagaacgtctcagatatcatccctagaacagaggtcgagaaggcgattaggatgtcaaggtcccgtatcaacgatgccttcagacttaatgataattccctcgagttcctcggaatccagcctaccctggggccaccaaaccaaccccctgtttccatctggttgatcgtctttggcgtggtcatgggcgttatagtggtgggcatagtgatcctgatcttcacaggcatccgggaccggaagaagaaaaacaaggccaggagcggcgagaacccttacgcatcaattgacatctcgaaaggtgagaataaccccggttttcagaatactgatgacgtgcagacctcgttc

SEQ ID NO: 209590 - DNA, 2415 bp, Artificial Sequence
  derived and/or modified sequence
atgtcctcctcgtcttggctgctgctgtcgctcgtcgcggtgaccgcagcccagtcgactattgaagagcaggccaaaacgtttctggacaagtttaaccacgaggcagaggacctcttttaccaaagctcgctcgcatcctggaactacaatacgaacattactgaggagaacgtgcagaatatgaataacgcaggggacaagtggtcggcgtttctgaaggagcagtcgactcttgctcagatgtaccctcttcaagaaattcaaaatctcaccgtgaagctgcaacttcaagcactgcaacagaatgggtcgtcggtgctttcggaagataagagcaagcggctgaacactatcctgaacaccatgtccacgatctattccaccggaaaggtgtgtaaccccgacaaccctcaggagtgtctcctgttggagcctggacttaacgagatcatggcaaattcgctcgattacaatgagagactttgggcgtgggaaagctggcgatcagaggtgggcaagcaacttcggcctttgtacgaagagtacgtggtcctgaagaacgagatggcaagagccaaccattacgaagattacggagattactggcgcggcgattacgaagtgaatggcgtggatggatacgactactcgcgggggcagcttattgaagatgtcgaacacaccttcgaggagattaaacccctttatgaacatctgcatgcatacgttagggcaaagctgatgaacgcctacccctcatacatcagccctatcggctgtctgcctgcccacctgctgggagatatgtggggacgcttttggacgaacctgtactcgctgaccgtcccattcgggcagaagcccaacattgatgtgaccgacgcaatggtggaccaagcatgggatgcgcaaagaatcttcaaagaggcagaaaagttttttgtgtcggtggggctccctaacatgacccaaggcttctgggaaaactcaatgctcactgaccctggcaacgtgcaaaaggctgtgtgccatcccactgcatgggatcttggaaagggagactttagaatactgatgtgtacgaaggtcactatggatgacttccttactgcccaccacgaaatgggtcatatccaatacgacatggcctacgcagcccaaccttttcttctcaggaatggggccaacgagggttttcacgaggcagtcggggagattatgtcactgtcggcagcaacccccaagcacctgaaatcgattggccttctctcgccagattttcaagaggataacgaaaccgagataaacttcttgttgaaacaggccctgactatcgtggggaccctgccattcacttacatgcttgaaaagtggagatggatggtgttcaaaggcgaaattccgaaggatcagtggatgaagaagtggtgggagatgaagcgcgaaatcgttggagtggtcgagcctgtgccacatgatgaaacttattgcgaccccgcatcacttttccacgtgtccaacgattactccttcataagatactacactagaactctgtaccagtttcaatttcaagaggcactgtgtcaagcagccaagcatgagggtcctctccataaatgtgacattagcaactccaccgaagcaggacaaaagttgtttaacatgcttcgccttgggaagagcgaaccatggaccctggcactcgaaaacgtcgtgggtgctaagaatatgaatgttagacccctcttgaactacttcgagcctctgttcacctggttgaaggatcagaataagaattcgtttgtgggttggtcgaccgactggtcaccttacgctgatcagtccattaaggtgaggatttcactcaagtcggctctcggcgataaggcgtacgaatggaacgataacgagatgtaccttttccgttcatccgtggcatacgcaatgcgacagtattttctgaaagtgaaaaaccaaatgattcttttcggagaggaggacgtcagggtcgcaaatctcaagcctagaatctcgttcaacttttttgtgaccgcacctaaaaacgtgtccgatatcatcccgagaactgaagtcgaaaaagcaattagaatgtctcggtcgcgcattaacgatgcattccgactgaatgacaactctcttgaattccttggaattcagcctaccttgggtccgccgaaccagcctcccgtctccatctggcttattgtgtttggggtggtgatgggtgtgatagtggtcggaatagtgattctcatctttacgggtatcagggatcgtaaaaagaagaataaggcacgatctggcgaaaacccatacgcttcgattgacatatcgaaaggagagaataacccagggtttcagaatactgacgacgtgcagactagcttc

SEQ ID NO: 209591 - DNA, 2415 bp, Artificial Sequence
  derived and/or modified sequence
atgagttcttccagctggctgctgctaagcctggtcgcggtgacggccgcccagagcaccatcgaagaacaagcgaaaactttccttgataaatttaaccatgaggccgaggatctgttttaccaaagctccctggcctcatggaactacaacacaaatattactgaggaaaatgttcagaatatgaacaacgcgggcgacaagtggagcgcttttctgaaggaacagtctaccctggcacagatgtacccactgcaggagattcagaacctaacagttaaactgcagctccaggctttgcagcaaaacggcagctccgttctcagcgaggataagagtaagagactgaacacgatactgaataccatgagcaccatctattccacgggtaaagtttgcaatcccgacaacccacaagagtgtctgctgctggagccaggcctgaatgaaattatggctaatagccttgattacaacgagcgactttgggcctgggaatcttggcgcagcgaggtgggtaagcagctgaggccgctctacgaagagtacgtggttttgaagaatgagatggcccgcgccaaccactatgaagattacggtgactattggcggggcgactatgaagtaaacggcgttgacggttatgattattcaaggggacaactgattgaggatgttgagcatacttttgaggagatcaagccactgtatgaacacctgcacgcgtatgtgcgcgccaagctcatgaacgcttacccaagctatatcagtcccattggatgtctgccagcccacctgctgggtgacatgtggggccgattttggacaaacctgtatagcctgactgtgccttttggccagaagccgaacattgatgtgaccgatgctatggtggaccaagcctgggacgcccagcgcatttttaaagaggcggagaagttctttgtttctgtaggactgccgaatatgacccagggtttttgggaaaacagcatgctgactgatccgggtaatgttcaaaaagcagtgtgccaccctaccgcgtgggatctgggcaagggcgacttccgcatcctgatgtgcaccaaggttaccatggatgatttcttaaccgcgcaccacgagatgggacacatccaatacgacatggcatacgccgcgcaaccatttcttttgcgcaatggagcaaacgagggcttccacgaggcggtcggtgagatcatgtctctgagcgccgcgacccctaaacatctgaaatctatcggtttgctaagccctgactttcaggaggataatgaaaccgaaatcaacttcctgctgaagcaggccctgacgatagttggaaccctgccttttacgtatatgttggagaagtggagatggatggtttttaagggcgaaattccgaaggaccaatggatgaaaaaatggtgggaaatgaaacgggagattgttggcgtggtggagccggtgccacatgacgagacctactgcgacccggcctctctgttccatgtttctaatgattactcgttcatccgctattacactaggacgctgtaccaattccagttccaagaggcgctgtgtcaggccgcgaagcatgagggcccactgcacaaatgtgatatatcgaacagcacggaggccggtcagaagctgttcaatatgttaagactgggcaagtctgaaccttggacgctcgcattggaaaatgtcgtgggtgcaaaaaacatgaacgttagaccactgttgaactattttgagcctttgttcacctggctgaaggaccaaaacaagaactcgttcgtaggttggtctactgactggtccccatacgccgatcaaagcatcaaagtccgtattagcttaaagagcgctctgggcgataaagcgtacgagtggaatgacaatgagatgtacctgttccgtagtagtgtggcctacgcaatgcgccagtatttcttaaaggttaaaaaccaaatgattttattcggtgaggaagacgtgcgtgtggccaacctcaaaccgcgcatcagcttcaactttttcgtgaccgcccctaagaatgtgtctgacattatccctcggacggaagttgaaaaagctatccgaatgagccgctcccgcatcaatgacgcatttcgcctcaacgataactctctggagtttctggggatccaaccgacccttgggcctcctaatcagccaccagtgagcatttggcttatcgtctttggcgtcgtgatgggtgttattgtcgtgggtatcgtaatcctgatttttaccgggatccgcgacaggaaaaaaaagaataaggctcgcagcggggaaaatccgtacgcctccattgacataagcaaaggggagaacaacccaggctttcagaataccgacgacgttcagacctccttc

SEQ ID NO: 209592 - DNA, 2415 bp, Artificial Sequence
  derived and/or modified sequence
atgtcgagctcatcatggctactgttatctcttgtcgccgtgaccgctgcccagtcgaccattgaggaacaggctaagacatttctggacaaatttaaccacgaggcggaggatttattctaccagtccagcttggcaagctggaactataataccaatattaccgaggaaaacgtgcaaaacatgaacaacgcgggtgacaagtggagcgcattccttaaagaacagagcaccctggctcaaatgtatccacttcaggaaatacagaacttgactgtgaaactgcagcttcaggcacttcagcagaacgggagttccgtcctttccgaagataagtcaaagcggctaaacactatactcaataccatgtccacaatatactctaccggtaaggtgtgtaaccctgataatccgcaagagtgtctgttacttgagcctggactgaatgagattatggccaattccctggactacaacgaacgactctgggcctgggagtcttggcggagtgaggtcggcaaacagcttcgcccgctgtacgaggagtatgtagtcttaaaaaatgagatggcccgggccaaccactacgaagattacggtgactattggcggggcgattacgaagtcaatggtgtggatggatacgattattcgcgcggccagctgattgaggacgtggagcacacattcgaggaaataaagcctttgtacgaacaccttcacgcgtacgtccgagctaagctaatgaatgcctatccgtcctatatctcgcccattggctgcctcccagcccacctgcttggcgatatgtgggggagattctggaccaacctatattcactgactgtcccatttggccagaaacctaacattgatgtaactgatgccatggtggatcaggcctgggatgctcaacgcatattcaaagaggcagagaaattttttgtatcggtgggcttgcccaatatgacccagggcttttgggagaattctatgctaacagatccagggaatgtacagaaggctgtgtgccaccccaccgcctgggacctcggtaagggggattttcgtatcttgatgtgcaccaaggttacaatggatgacttcctgactgcacaccatgagatgggacacatccaatatgacatggcctatgcagcccagccatttctgttacggaatggagcaaatgaaggtttccatgaagccgtaggcgagatcatgtctcttagcgctgcgacacctaaacacctcaaatctatcggcctactttccccggatttccaagaggataatgagaccgagattaacttcctgcttaagcaagctcttaccatcgttggaactctgccctttacttatatgctcgagaagtggagatggatggtgtttaagggcgaaattcccaaggatcaatggatgaaaaagtggtgggagatgaaacgagaaatagtcggagtggtcgagcccgtacctcatgatgaaacctactgcgatcctgcgagcctgtttcacgtatcgaatgattactccttcatcaggtattataccagaacgctgtaccagtttcagtttcaagaggccctctgccaggctgctaagcacgagggacccctgcacaagtgcgatatcagcaattccactgaggctggacaaaaactctttaatatgctcaggctgggaaaaagtgagccatggaccctagcgctagaaaatgtggtgggtgctaagaacatgaacgtccggcctctcctaaattactttgagcccctgttcacctggcttaaggaccaaaacaaaaacagcttcgttggctggtcgacagattggtccccctatgcggatcagagcatcaaagtccggatttcgctgaagagcgctctcggggacaaggcctacgaatggaacgacaacgaaatgtatctatttcggagcagtgtcgcctacgcaatgcgtcagtacttcctgaaagtgaagaaccagatgattctatttggagaagaggacgtgagagtcgccaacctgaagccccgaatctccttcaacttctttgtgacggccccaaagaacgtctccgacatcatcccaaggacagaagtggagaaagccattcggatgtctagatcccgaattaatgatgcatttcgactcaacgacaatagtcttgaattcctggggattcaaccaaccctgggccctcccaaccaaccgccagtttccatctggctgattgtgtttggcgtggttatgggcgtcatcgtcgtgggcatagttatcttgatttttactggcatacgcgatagaaaaaaaaagaataaggctcggagtggagaaaatccttacgcctctatcgacatcagtaaaggggagaacaaccctggatttcagaacactgatgacgtacaaacctccttc

SEQ ID NO: 209593 - DNA, 2415 bp, Artificial Sequence
  derived and/or modified sequence
atgtcatcctccagttggctgcttctatcgttggtcgcggttactgcagcccagtcgacaatagaggagcaggccaagacgtttctggataagtttaatcacgaggctgaggacctgttttatcagtcctcgttagcgagttggaactacaacactaacatcacagaggaaaacgtgcagaacatgaacaacgctggtgacaaatggtccgcgttcctcaaggagcaatcaacccttgcccagatgtacccgctccaggaaattcaaaacctcactgtgaaactccaactgcaagccctgcaacagaatgggagctcggtgttgtcggaggacaagagcaagcgcttgaacacaatactgaacaccatgtcaactatctactcaacgggtaaagtgtgtaacccagacaacccccaggagtgcctgctgttggagcccggcctcaacgagatcatggccaactccctggattacaatgaacgcctgtgggcgtgggagagctggaggtccgaggtgggcaagcaactgagaccgctgtatgaggaatacgtagtgttaaagaatgagatggcccgggccaaccactacgaagactacggcgactattggagaggagactatgaggtcaacggcgtggacggctatgactactcgcgaggccagctgattgaagacgtcgaacacacttttgaggaaatcaagccgctttacgagcatctacatgcctatgtccgagcaaagctaatgaatgcgtaccccagttatatctcgccgattggctgccttcccgcccatctactcggagatatgtggggccgtttttggacgaatctgtattcccttacggtcccctttgggcagaagccgaatatcgatgtgaccgacgcaatggtggatcaagcctgggatgcccagcgaatctttaaagaggcagagaaattctttgtttccgtgggactgccgaacatgacccaaggtttctgggagaatagtatgctgaccgatcctggaaacgttcaaaaggcggtatgccaccctacagcctgggacttgggcaagggcgacttccggatccttatgtgcacgaaagtcacaatggatgacttcctgacagctcaccacgagatggggcacatccagtacgatatggcgtacgctgcccaaccgttcttgctgcgcaacggcgcaaatgagggcttccatgaggccgtgggtgagattatgtccctgtccgcggccaccccgaagcatctcaagagcataggcctcctctcgcccgactttcaggaggataacgaaactgaaataaacttccttctgaagcaggccctaactatcgttggcactctaccctttacttatatgttggagaagtggagatggatggtgtttaaaggagagataccaaaggaccaatggatgaagaagtggtgggagatgaagagagagatcgtgggagtcgtagagccagttccgcatgacgaaacttattgcgacccagctagcctgttccacgtcagcaatgactattcgttcatccggtattatacgcgcacgttgtaccagttccagtttcaggaagccctgtgccaggccgccaagcatgagggtccgctccacaagtgcgatatatcgaacagtacggaggccggccaaaagcttttcaacatgctacgcctcggtaagagtgagccgtggacactcgcactagaaaacgttgtgggagcaaaaaacatgaatgtcagacctctcctgaactattttgagccgttgttcacctggctgaaggatcaaaacaagaactccttcgtgggctggtcaacggactggtccccctatgctgaccaaagtatcaaggtgcgcattagcctaaagtcggccctgggtgacaaggcatacgagtggaatgataatgagatgtacctgttccggagctccgttgcctacgccatgaggcaatattttctcaaggtaaagaatcagatgatattgttcggcgaggaagatgtgagggttgctaacctgaagccgcgtatttcattcaacttcttcgtcaccgccccaaaaaacgtttctgacattatcccacgcacggaagtggaaaaggctatccgaatgagccgtagcaggatcaatgatgcatttcgactgaacgataatagtctggaattcctgggcatacagccaacgttggggccccccaaccagccacccgtgtccatttggctgattgtgtttggcgtggtaatgggagtgatcgtggtcggcatcgtcatcctgatttttacaggaatccgggaccgaaaaaagaagaacaaggccaggagcggtgaaaacccgtatgccagcattgatataagcaaaggcgagaataatccaggttttcagaacactgatgatgtgcagacctcgttc

SEQ ID NO: 209594 - DNA, 2415 bp, Artificial Sequence
  derived and/or modified sequence
atgtcctccagcagctggctgctgttgagcctggtagctgtcaccgcagctcagtctacgattgaagagcaggctaagacctttctagataagttcaatcatgaggctgaggacctcttctaccagtcctccctggcttcatggaactacaataccaacataactgaagaaaatgtgcagaacatgaacaacgcaggagataagtggtccgcctttctgaaagagcagagtaccctggcacagatgtacccactccaagaaattcaaaacttgactgtgaagctccaacttcaggccttgcagcagaatggatcgtctgtgctttcagaagacaaatccaagcgacttaacaccatactcaatactatgtccaccatctacagcaccggcaaggtttgtaatcctgataacccacaagagtgtttactgctggaacccgggttaaacgaaatcatggcaaactctctcgactacaatgagcgactctgggcttgggaatcgtggcgcagcgaggtagggaaacagctgcgaccgctgtatgaggaatatgtggtgttgaagaatgaaatggcaagggccaaccactatgaagactacggcgattactggaggggtgattacgaggtgaatggcgtcgatggctacgactatagtcgcgggcagttaattgaggatgtggaacataccttcgaggagatcaagcccctatatgaacacctgcatgcatacgtgagagcaaagttaatgaacgcatatccttcatacatctccccaatcggatgcctgcctgctcacctgctcggggacatgtggggccggttctggaccaacctctacagcctgaccgtgccctttggccagaagcctaatattgacgtgactgatgcaatggtggatcaggcctgggatgcgcagcgaatttttaaagaagctgagaagttcttcgtgtccgtcggcctaccaaatatgactcaaggcttctgggagaattctatgctaactgatcctggtaatgtccagaaggcagtgtgccatccgacagcatgggatctagggaagggcgacttccgaattctaatgtgtaccaaagtgactatggatgactttctgaccgcccaccacgagatggggcatatccaatatgatatggcctacgcggcccagcctttcttgctgcgtaatggagccaacgaaggctttcacgaagccgtcggggaaattatgtccctcagcgccgctactcctaaacatctcaagtctatcgggctgttatccccagacttccaggaggacaacgaaacggagataaactttctattgaagcaagcgctcactattgtcggtaccctaccgttcacctatatgctcgagaagtggaggtggatggtgtttaagggcgagatccccaaagaccagtggatgaagaagtggtgggaaatgaagagggaaatagtgggcgtagtggaacctgtgccacatgatgaaacttactgcgatccagctagtctgtttcacgtgtccaacgactatagtttcatcaggtattatacaaggaccttataccagtttcagttccaggaggccctgtgtcaggccgctaagcacgaggggcctcttcataaatgtgacatttcaaactccactgaagcagggcaaaagctgtttaatatgctcagacttgggaaaagtgagccctggaccctcgctcttgaaaacgtggttggtgcaaagaacatgaacgtacgaccactgttaaattatttcgagccactttttacctggctgaaggatcagaacaagaactcatttgttggctggagtaccgattggagcccttacgccgaccagagtatcaaggtacggatttctctgaagagtgcgctcggcgataaagcttacgaatggaacgacaatgaaatgtatctcttccggtcctctgttgcctacgctatgaggcagtacttcctaaaagtgaagaatcagatgatcctgtttggagaagaggacgtgcgagtggccaatctgaagccacgaattagctttaattttttcgtaacagcgcccaaaaacgtaagcgatatcatacctcgaactgaggtggaaaaagcaatacgaatgagtagatctagaatcaacgacgcatttcgattgaatgataacagcctcgagttcttaggcatccagccaacgcttggcccgccaaatcagcctcctgtttcaatttggctcatcgtctttggggtggtgatgggcgttattgtcgttggcattgtgatattaatcttcaccgggattagagacagaaagaagaagaacaaggcaagaagtggggagaacccctatgccagtatcgacatttcaaagggtgaaaataatcccggctttcagaatactgatgacgtgcaaacgagcttt

SEQ ID NO: 209595 - DNA, 2415 bp, Artificial Sequence
  derived and/or modified sequence
atgtcgagttccagctggctccttctttcactcgtggcagtgaccgcagcacaatctactatcgaagaacaagcaaagacctttcttgataagttcaaccatgaagcagaagatttgttttaccaaagcagcctggcatcttggaattacaacaccaacatcacggaagagaatgtgcagaacatgaacaatgccggagacaagtggtccgcatttcttaaggaacaaagcaccctcgcgcagatgtacccactgcaggaaatccagaatcttactgtgaaactgcaacttcaggcgctgcagcagaacgggtcgagcgtgctctccgaggataaatcgaagcgtcttaataccattctcaacactatgagcaccatttacagcaccgggaaagtgtgtaaccccgataacccccaagagtgcctgctgcttgaacctgggcttaatgagataatggcaaactcactggattacaatgaaaggctttgggcttgggaatcatggagatcagaagtgggaaaacagcttagaccactttacgaagaatacgtggtgctgaaaaatgagatggccagggccaaccattacgaagattacggcgactactggcggggggactacgaggttaatggggtggatggatacgattattcacggggtcagctgattgaagatgtggagcacacttttgaagagatcaagccactgtacgagcatctgcatgcatatgtgcgagcgaaactcatgaacgcctacccaagctacatttcccccattggatgtctccccgcccatctgctgggcgatatgtggggcagattttggactaacctttactccctgaccgtgcctttcggtcagaagcctaacattgatgtgaccgatgcaatggtggatcaggcttgggatgcacaacgcattttcaaagaagccgagaagttttttgtctccgtcgggttgcctaacatgacccaaggattttgggaaaattcaatgttgacggaccctggaaacgtgcagaaggcagtgtgccacccaactgcctgggatctgggaaaaggtgactttagaattctgatgtgcactaaagtgactatggatgattttctgactgcacatcatgaaatgggtcacattcaatacgacatggcatacgctgctcaaccatttctcctgcgtaatggagcaaacgaaggctttcacgaggcagtcggtgaaatcatgtccctgtcagcagcaactcctaagcatctgaagtcgattggccttctgagccctgattttcaagaagataatgaaactgagatcaactttctgcttaaacaggctcttaccattgtggggactcttcctttcacctatatgttggaaaagtggcgctggatggtctttaagggcgagattccaaaggaccaatggatgaagaagtggtgggagatgaaaagggaaatcgtaggtgtggtcgaacctgtgccacacgacgaaacctactgcgaccccgcctccctgttccatgtgtcaaacgattatagctttattcgctactatactagaactctgtaccaatttcaatttcaggaggcactgtgtcaagcggcaaaacacgaaggtcctctccataaatgtgatatttcgaactcaactgaagctggccagaagctgtttaacatgcttagactggggaaaagcgaaccttggaccctcgccctggaaaatgtggttggcgcaaaaaacatgaacgtgcgcccccttctcaattactttgaacctctgtttacttggttgaaggatcagaacaagaattcatttgtgggttggagcaccgactggtccccctacgcagatcagagcatcaaggtgcgaatttcgttgaagtccgcactcggtgacaaagcatacgagtggaatgacaatgaaatgtacttgtttaggtcctccgtggcatacgcaatgaggcaatactttctcaaagtcaagaaccagatgatactttttggtgaagaagatgtcagagtggcgaaccttaaacccagaatctcatttaacttctttgtcactgcaccaaagaatgtgtctgatatcattcctcgcactgaagtggaaaaagcaataagaatgtcgaggtcccgcattaacgatgcatttcggctgaacgataattcgctggaatttctcggtattcagcctactctgggtccccctaatcagccaccagtgagcatttggctgatagtctttggcgtggtcatgggagtcatcgtcgtcgggatcgtcatcttgattttcacgggaatccgagatcgcaagaagaaaaacaaagcgagatccggtgaaaacccgtatgcgtccattgacatcagcaagggagagaacaacccaggattccaaaacactgatgatgtgcagactagcttc

SEQ ID NO: 209596 - DNA, 2415 bp, Artificial Sequence
  derived and/or modified sequence
atgtcctcttccagttggctcctgctctcactggttgcagtgacagccgcccagtctacaatcgaggagcaagccaaaactttcctggacaagtttaaccacgaggctgaggacctgttctatcagtcaagtttggcatcttggaactataatacgaatatcacagaggaaaatgtccagaacatgaataatgcaggtgataagtggtcagcatttttgaaagagcagtcaacccttgcccagatgtaccctctgcaggagattcaaaacttgactgtaaaattgcagcttcaagctctgcagcagaacgggagctcagttctgtccgaggataaatcaaagagactgaacaccattttgaacaccatgtccaccatttattccacgggcaaagtgtgtaacccggacaatccccaggaatgtcttctccttgagccaggtctgaacgaaatcatggctaatagcctggactacaacgagaggctgtgggcatgggagtcttggcggtctgaggtaggtaagcagttgcggcccctgtatgaggaatatgtggttctcaaaaacgaaatggcgcgggccaaccattacgaagattacggtgattactggcgcggagactatgaggtcaacggtgtcgatgggtatgattacagcaggggacagctcatcgaggacgtcgaacatacttttgaggaaataaagcccctgtacgagcacttgcacgcatacgtgcgggctaaactgatgaacgcctacccatcatacatctccccgattgggtgcctccctgcccacctgctgggtgacatgtggggaaggttctggaccaacctgtactctttgacagtcccctttgggcagaaacccaacatagatgtgacggacgccatggtggatcaggcctgggatgctcagcggatcttcaaagaggccgaaaaattcttcgtctctgtcggcctccccaatatgacacagggattctgggagaacagtatgctgactgatcccggtaatgtgcagaaggcagtgtgccaccctaccgcctgggatctgggcaaaggagacttccggattctgatgtgcactaaggtgacgatggatgacttcttgaccgctcatcacgaaatgggccatatccagtatgacatggcatatgccgcacaaccattcctgctgagaaatggagccaacgagggctttcacgaagctgttggggaaattatgtctctgtccgcagctacacctaaacatctgaaatccatcgggctcctttcacccgactttcaggaggacaatgaaaccgagatcaatttcctgttgaagcaggctctgaccattgtggggacgttgcccttcacatacatgttggagaagtggagatggatggtgtttaaaggggaaatcccaaaggatcagtggatgaaaaaatggtgggagatgaaacgcgaaattgtcggcgttgttgaaccagtgcctcatgacgagacctattgtgatccggcaagcctctttcatgtcagcaacgactacagtttcatccgatactacaccaggactctgtaccagtttcaattccaggaagctctgtgccaggctgccaagcatgaaggccccctgcataagtgtgacatatcaaacagcactgaagccggtcagaaactgtttaacatgctccgattggggaaaagcgagccttggacattggcactggagaatgtcgtcggggcgaagaacatgaacgttaggccacttctcaattattttgagcccctgtttacatggctgaaggatcaaaacaagaattcttttgttggatggtccaccgactggtctccctacgcagaccaatctatcaaggtccgaatatctcttaaatcagctctcggcgataaagcatatgagtggaacgataacgaaatgtatttgttcagatcctccgttgcctatgccatgcgacagtactttttgaaggtaaagaaccagatgatactgtttggtgaggaggatgtgagggtagccaacctgaagccgaggatttctttcaacttttttgtcactgctcccaagaacgtctcagacattatccctagaacggaagtcgagaaagcgattcgcatgtcccgctcacggattaatgatgcattccgcctgaatgataatagtttggaatttttggggatccagccaaccctgggccctccaaatcagccgcctgtctccatctggctgattgtctttggcgtcgtcatgggcgtaattgtagtgggcatcgtgatcctcatctttactgggatccgcgatcggaagaagaaaaacaaggcgaggagcggggaaaatccttatgcatcaatcgatatctccaagggcgaaaataatccaggctttcagaatacggacgacgtacagacaagcttc

SEQ ID NO: 209597 - DNA, 2415 bp, Artificial Sequence
  derived and/or modified sequence
atgtcctcgagctcctggctgctcctcagccttgttgcagtcaccgctgcccagtcgactatcgaagaacaggcgaaaactttcttggacaagtttaatcatgaggccgaggatctcttctaccagagctcactggcttcatggaattacaacaccaacattactgaagaaaacgtgcaaaacatgaacaacgcgggtgacaagtggtccgcattcttgaaggagcagtcgacccttgcacagatgtacccgctgcaggaaatccagaatctcaccgtcaaattgcaactgcaggccctgcaacagaacggctcgtcagtcctctccgaggacaaatctaagaggctgaacacgatcctgaacacgatgagcactatttacagcaccggaaaagtgtgcaatccggacaatccacaggaatgcctcctcctggaaccgggactgaatgaaatcatggcgaactctctcgattacaacgagagactctgggcatgggaatcatggcggtccgaggtgggaaagcagttgaggcctctgtacgaagaatacgtggtcctcaagaatgaaatggccagagctaatcactacgaagattacggagactactggcgcggagactacgaagtgaacggggtcgatggatacgactacagccgcggtcaactgatagaggacgtggaacacactttcgaagaaatcaaaccactgtacgaacacctgcacgcctacgtgcgcgccaaactcatgaacgcctacccaagctacatttcgccgatcggatgccttcctgcccacttgctgggagatatgtggggacggttctggactaacctgtactcgcttaccgtccctttcggtcagaaacctaatatcgacgtgactgatgccatggtcgatcaggcctgggatgcccagcggatcttcaaggaggccgaaaagttctttgtcagcgttggactcccaaatatgacgcaggggttctgggaaaactcaatgcttactgatccggggaatgtgcagaaagctgtctgtcacccgactgcatgggacttgggaaagggcgatttccgcatcctgatgtgtaccaaggtgaccatggatgacttcctgactgcccaccatgagatgggtcatatccaatacgacatggcgtacgccgcgcaaccattcttgctccgcaacggagctaacgagggatttcacgaggcagtgggagaaatcatgtccctttccgccgccacccctaagcatctgaagtcgatcggactgctcagcccggatttccaagaggataacgaaaccgagatcaacttcctcctgaagcaagcgctgactattgtgggtaccctgccattcacctacatgctcgagaaatggcggtggatggtctttaaaggagaaatccctaaggaccagtggatgaagaagtggtgggaaatgaaacgagagatcgtgggagtagtggaacccgtgccgcacgacgaaacctactgcgacccggcttcactgtttcatgtgtcgaacgactacagcttcatcagatactacactcgcactctctaccaattccagttccaggaagccctgtgccaggccgcgaagcacgagggacccctgcacaagtgcgatatctccaactccactgaagcaggacagaaactgttcaacatgctgcgcttgggaaaaagtgagccgtggactctggctcttgagaatgtggtgggagcgaagaacatgaacgtccgccctcttctgaactacttcgaacctctcttcacctggttgaaggaccagaataagaactcgttcgtcggctggtctactgactggagcccatacgcggatcagtcaatcaaagtgagaatctcccttaagtccgcgctgggggataaggcttatgagtggaacgataatgaaatgtacctgtttcggtcgtcagtggcttacgccatgaggcagtatttcctgaaggttaagaaccagatgatcctgttcggagaagaggacgttcgggttgccaaccttaaaccgcgcatctcctttaacttcttcgtgactgcaccgaaaaacgtctcggacatcattccgcgcaccgaagtggaaaaggcgatccgcatgagccgctcgcgcatcaatgacgcgttcagactgaacgataactccttggaatttctggggatccagccgaccctgggaccgcccaatcaaccgcctgtgtccatctggttgattgtgttcggcgtggtgatgggagtgattgtcgttggcatagtgatcctgatctttaccggcatccgggatcgaaagaagaagaacaaggcacggtccggtgaaaacccctacgcgtccatcgatattagcaaaggcgaaaacaacccagggttccagaacacggacgatgtgcaaacctccttc

SEQ ID NO: 209598 - DNA, 2415 bp, Artificial Sequence
  derived and/or modified sequence
atgtcatcatcctcatggctcctgctgtccctggtagccgtaacagcagctcagagcactattgaagaacaggcaaaaacttttcttgacaaatttaaccacgaagcagaagatctgttctaccagtcgagtctcgcctcgtggaattacaacaccaacattacagaggaaaacgtccagaacatgaacaatgctggggataaatggtccgccttcctgaaagaacaatccactctggctcaaatgtaccctctccaggagatccagaacctgacagttaagctgcagctccaggccctgcagcagaatggttcgtcagtcttgtctgaggataaatctaagaggctcaatacaatcttaaacaccatgtccactatttactcaaccggtaaagtgtgcaacccagacaatcctcaagagtgccttttgctcgaacccgggctcaacgagattatggcaaactctctggactacaatgaaagactgtgggcatgggagtcttggcggagcgaagtaggaaagcagctgcggcctctgtacgaggagtacgtggttcttaagaacgagatggctcgtgccaatcattacgaagactacggagattattggcgtggggattacgaagtgaatggagtcgacggttacgactattctagggggcagctgatcgaggacgtagaacatacatttgaggaaatcaagcccttgtacgagcatcttcacgcgtacgtgagggcaaaattgatgaacgcttaccctagttatatcagccctattggttgtttgccggctcacctgctcggggatatgtggggcaggttctggaccaatttgtactcattaacagtgcccttcgggcagaagcctaatatcgacgttaccgacgccatggtagatcaggcatgggatgcacaaaggatcttcaaagaagcagagaagttctttgtgagtgtagggctacccaacatgacccaggggttttgggagaactcaatgctgaccgaccccggcaacgtgcagaaggctgtgtgtcaccctactgcatgggacctgggaaagggtgacttcaggatactgatgtgtacaaaggtcacgatggacgattttctgactgctcatcacgaaatgggacacattcagtatgacatggcatatgccgcccagcccttcttgcttcgcaatggagctaatgaaggatttcacgaggctgtcggggaaattatgagcttgagcgcggctaccccaaagcatctgaagtccatcggcctgttgagccccgacttccaggaggacaacgaaacagaaatcaactttctgctgaagcaggcccttacaattgtagggacactccctttcacatatatgctggaaaaatggaggtggatggtgtttaagggggagattcccaaggatcagtggatgaagaaatggtgggagatgaagcgagagatcgtgggggtggtcgaacccgtgcctcacgacgagacctattgcgatccagcctcgctcttccatgtgagtaatgactattcttttattagatattacacgcgaactctctatcaatttcaatttcaagaggctctctgccaggcagcgaagcacgaaggacccctgcataagtgcgacattagtaactccacagaggcaggccaaaaactgttcaacatgctcagactggggaagtcagaaccctggactctcgcattggagaacgtcgtaggggcgaagaatatgaacgttaggcctttgttaaattacttcgaaccactctttacgtggctgaaagatcagaacaagaattctttcgttggctggtcgaccgattggtccccctatgcagaccaatcaattaaagtacgtatttccctcaagagtgctttgggggacaaggcctacgaatggaacgacaatgagatgtatctgttccggagttccgttgcttacgccatgcgtcagtactttctaaaagtaaagaaccagatgatcttatttggggaggaagatgtgagagtcgctaatctgaagcctagaataagctttaacttcttcgtgaccgcgccaaaaaatgtgagcgacataattccccgaactgaggtcgaaaaggctattcgcatgagcagatcccggatcaatgatgcgtttcggctgaatgataatagcctggagttcctcggcattcagccaactctgggccctcctaatcagcccccagtgagcatttggctcattgtgtttggcgttgtgatgggggtgatcgtggtgggaatcgtgattttgatcttcaccggcatacgcgataggaagaagaaaaataaggcacgaagtggcgagaacccgtatgcatcaattgatatcagtaaaggcgaaaacaaccccggattccaaaataccgatgacgtgcagacatcattc

SEQ ID NO: 209599 - DNA, 2415 bp, Artificial Sequence
  derived and/or modified sequence
atgagtagttcctcttggttattgctcagtctggtggctgtcaccgcagcccagtccacaattgaggagcaggccaagacattccttgacaagtttaaccacgaagcggaggacttgttttaccagtcttctctggcgtcctggaattataacacaaacatcactgaagagaacgtgcagaatatgaataacgccggcgataaatggagcgcattcctgaaagagcagtcgactctcgcccaaatgtatcccctgcaggagatccagaatctgacggtaaagctccagctgcaggccctgcagcagaacggctccagtgtgctgagcgaggacaagagcaagcgcctcaacacaatcctaaacaccatgtctaccatatattccacgggcaaggtgtgtaacccggataacccacaggagtgccttttgcttgaaccagggttaaatgaaatcatggctaacagtctcgattacaatgagaggttgtgggcctgggaatcgtggcgatccgaagtcggaaagcaactgaggccgctgtatgaagagtacgtcgtgctcaaaaatgagatggctagagccaaccactatgaagattatggagactattggcggggtgactacgaggtcaacggtgtggatggttacgactactcccgcgggcagctgatagaagacgtggaacatactttcgaggagatcaaacccctgtatgagcacctgcatgcctatgtccgcgccaaactcatgaacgcctacccatcctatatcagtccgattggctgtcttcctgcgcacctcctaggcgatatgtgggggagattctggactaacctgtactctctgaccgtgccctttggtcagaaacccaatatcgatgtaaccgacgctatggtcgatcaggcgtgggatgcgcagagaatttttaaagaagcagaaaagttcttcgtgagcgtcggactaccaaatatgacccaaggattctgggagaatagcatgttaaccgatcccggcaacgtgcagaaggcagtttgtcaccccaccgcttgggacctgggcaagggggactttcgtatattgatgtgcacgaaagtgaccatggatgacttcctgacagcccaccacgagatgggtcacatccaatacgatatggcctacgccgctcagccgtttcttctcagaaatggggctaatgagggctttcacgaggctgtgggggagatcatgagtttgtcagcagctacccccaaacatctaaagtcgatagggctgctctctcctgactttcaagaggacaacgagactgagattaatttcttactaaagcaagctctcaccatcgtgggaacgctccctttcacctatatgctggagaagtggcgatggatggtgtttaaaggcgagattccaaaagatcagtggatgaagaagtggtgggaaatgaagagagagattgttggcgtggttgagccagtcccgcacgatgagacctattgcgaccccgcatctctgtttcacgtgtcaaatgattactcctttatcaggtactatacacgaaccctatatcagttccagttccaagaggccctctgtcaggccgcaaagcatgaagggcctctgcataagtgtgacatcagcaacagcacagaggcaggacagaagctgttcaacatgctcagactgggaaaatcagaaccatggactctggcactcgaaaacgttgtcggtgcaaagaatatgaatgtccgcccccttcttaattattttgagcctctatttacatggttaaaggatcagaacaaaaactctttcgtggggtggtcaacggactggtcgccctatgcagatcagtcaattaaggttcgcattagtctgaagtcggctttaggagacaaggcatacgagtggaacgacaacgaaatgtatctttttaggagttcggttgcgtacgcgatgcgtcagtattttctaaaggtgaagaatcagatgattttgtttggggaggaagatgttagggtggctaatctgaagcccaggatctctttcaactttttcgtaacagccccaaaaaacgtgtctgatataatacccaggacggaggtcgaaaaagcaatccggatgtcccgcagccgtatcaatgatgcctttcggcttaatgacaattccctcgaatttctcgggatccagccaactctggggccccccaaccagcctcccgtgagtatctggctgatcgtctttggagtcgtgatgggtgtcatcgtggtcggcattgtgatcctcatctttactgggatccgagacaggaagaagaagaataaggctcgctctggagagaacccgtacgcctccattgatatatccaaaggggaaaataaccctggttttcagaacacggatgatgtgcaaacttccttt

SEQ ID NO: 209600 - DNA, 2415 bp, Artificial Sequence
  derived and/or modified sequence
atgtcaagtagcagttggttgctgctttcactggtagctgtgactgcagcccaatcaactattgaagagcaggcaaagaccttcctggacaagttcaatcacgaagccgaagatctgttctaccagagctcattggcctcttggaattacaacaccaatataaccgaagaaaacgtgcagaacatgaataacgctggtgacaagtggagtgccttccttaaggagcagagtacactggcccaaatgtacccgctgcaagaaatccagaacctgacagtaaaattgcagctgcaggctctccaacaaaatggatcatcagtccttagtgaggataagtccaaacgcctcaacacgatcttgaacacaatgtcaacaatctactctacgggtaaagtctgcaaccctgacaacccccaggagtgtctcctgttggaacccggcctgaacgaaatcatggccaacagcctcgattataacgaaagattgtgggcttgggaaagctggcgcagcgaggttggaaagcagctcaggccactttatgaagaatacgtggtgctgaaaaacgaaatggccagggctaaccactacgaagactacggagattattggcgcggcgactatgaagtgaatggtgttgacggctatgattactccaggggccagttgatcgaggatgttgaacataccttcgaggagattaagccattgtacgaacatctgcacgcctacgttcgcgcaaagttgatgaatgcatatccgagttacatctctcccatcggatgcttgcctgcccatcttttgggagacatgtggggtcgcttctggactaatctgtactccctcactgttcccttcggacaaaagccaaacatcgacgtcaccgatgctatggtggaccaagcttgggacgcacagaggatcttcaaggaggccgagaaatttttcgtgtcagtgggcctgccaaatatgactcagggattttgggagaactcaatgcttacagatcctggcaatgtgcagaaagctgtttgtcaccccactgcttgggacctcggtaagggagactttcgcattctgatgtgcacgaaggttacgatggacgatttcctgaccgcgcatcacgaaatgggacacatccaatacgatatggcctacgccgcccaaccatttcttctcagaaacggcgccaacgaaggctttcacgaggcagtgggcgaaattatgtcactttccgctgctacccccaaacacctgaagagtattggactgctcagtcccgacttccaggaagataatgagaccgagatcaacttcttgctcaaacaggccttgacgatcgtgggaaccctcccatttacctacatgttggagaagtggaggtggatggtcttcaagggcgagatccctaaagaccagtggatgaaaaagtggtgggagatgaaaagggaaatcgtgggagtcgtggagcccgttccacatgatgagacgtattgcgatcccgcctctctctttcacgttagcaacgactatagcttcatcaggtactatactagaaccctgtaccagttccagtttcaggaggccctgtgtcaggccgctaagcatgaaggacccctgcacaaatgcgatatctctaatagcacggaagccggccagaagttgttcaacatgctgagactgggcaagtcagagccctggactctggctctggagaacgtggtcggtgccaagaacatgaacgtacgccccctcctgaactacttcgagccactttttacatggctgaaggatcagaacaaaaattccttcgtgggatggtcaacagattggagcccatacgccgatcagtccattaaggtgaggatctctctcaaaagtgccctcggtgacaaagcctacgagtggaacgacaatgagatgtatctgttccgcagttcagtagcttatgccatgaggcaatatttcctcaaagttaagaatcagatgatactctttggcgaggaggatgtgcgcgtagccaacctgaaacctcgcatatcattcaatttcttcgtaacagcgccgaagaatgtctcagatatcataccaagaactgaagttgaaaaagctataaggatgtctaggtccagaatcaacgatgcttttaggctgaacgacaacagcctggaattcctgggaattcagcctactctcggccctcctaaccaacccccagtgagcatctggttgattgtgttcggagtggtaatgggtgtgatcgtggtgggcattgtcattcttatcttcacaggaattagggatagaaagaagaagaacaaggctagatccggcgaaaacccctatgctagtatagacatatccaagggtgagaataatcctggcttccagaatacagacgatgtgcagacatctttt

SEQ ID NO: 209601 - DNA, 2415 bp, Artificial Sequence
  derived and/or modified sequence
atgtcgtcgtcgtcgtggttattactatcgttagttgcggttacggcggcgcaatcgacgatagaagaacaagcgaaaacgtttctagataaatttaatcatgaagcggaagatttattttatcaatcgtcgttagcgtcgtggaattataatacgaatataacggaagaaaatgttcaaaatatgaataatgcgggtgataaatggtcggcgtttctaaaagaacaatcgacgctagcgcaaatgtatccgctacaagaaatacaaaatttaacggttaaattacaactacaagcgttacaacaaaatggttcgtcggttctatcggaagataaatcgaaacgattaaatacgatattaaatacgatgtcgacgatatattcgacgggtaaagtatgtaatccggataatccgcaagaatgtctattattagaaccgggtctaaatgaaataatggcgaattcgttagattataatgaacgattatgggcgtgggaatcgtggcgatcggaagttggtaaacaactacgaccgctatatgaagaatatgttgttctaaaaaatgaaatggcgcgagcgaatcattatgaagattatggtgattattggcgaggtgattatgaagttaatggtgttgatggttatgattattcgcgaggtcaactaatagaagatgtagaacatacgtttgaagaaataaaaccgttatatgaacatttacatgcgtatgtacgtgcgaaattaatgaatgcgtatccgtcgtatatatcgccgataggttgtttaccggcgcatttactaggtgatatgtggggtcgattttggacgaatctatattcgctaacggtaccgtttggtcaaaaaccgaatatagatgttacggatgcgatggtagatcaagcgtgggatgcgcaacgaatatttaaagaagcggaaaaattttttgtttcggtaggtttaccgaatatgacgcaaggtttttgggaaaattcgatgttaacggatccgggtaatgttcaaaaagcggtatgtcatccgacggcgtgggatctaggtaaaggtgattttcgtatactaatgtgtacgaaagtaacgatggatgattttttaacggcgcatcatgaaatgggtcatatacaatatgatatggcgtatgcggcgcaaccgtttctactacgaaatggtgcgaatgaaggttttcatgaagcggttggtgaaataatgtcgctatcggcggcgacgccgaaacatctaaaatcgataggtttactatcgccggattttcaagaagataatgaaacggaaataaattttttactaaaacaagcgttaacgatagtaggtacgctaccgtttacgtatatgttagaaaaatggcgttggatggtatttaaaggtgaaataccgaaagatcaatggatgaaaaaatggtgggaaatgaaacgtgaaatagtaggtgttgtagaaccggtaccgcatgatgaaacgtattgtgatccggcgtcgttatttcatgtatcgaatgattattcgtttatacgttattatacgcgaacgctatatcaatttcaatttcaagaagcgctatgtcaagcggcgaaacatgaaggtccgttacataaatgtgatatatcgaattcgacggaagcgggtcaaaaactatttaatatgttacgtctaggtaaatcggaaccgtggacgctagcgctagaaaatgtagtaggtgcgaaaaatatgaatgttcgtccgctattaaattattttgaaccgctatttacgtggttaaaagatcaaaataaaaattcgtttgtaggttggtcgacggattggtcgccgtatgcggatcaatcgataaaagtacgtatatcgctaaaatcggcgctaggtgataaagcgtatgaatggaatgataatgaaatgtatttatttcgatcgtcggtagcgtatgcgatgcgacaatattttttaaaagtaaaaaatcaaatgatactatttggtgaagaagatgtacgtgtagcgaatttaaaaccgcgaatatcgtttaatttttttgtaacggcgccgaaaaatgtttcggatataataccgcgtacggaagttgaaaaagcgatacgtatgtcgcgttcgcgaataaatgatgcgtttcgtctaaatgataattcgttagaatttctaggtatacaaccgacgttaggtccgccgaatcaaccgccggtatcgatatggctaatagtatttggtgtagtaatgggtgtaatagtagtaggtatagttatattaatatttacgggtatacgtgatcgaaaaaaaaaaaataaagcgcgatcgggtgaaaatccgtatgcgtcgatagatatatcgaaaggtgaaaataatccgggttttcaaaatacggatgatgtacaaacgtcgttt

SEQ ID NO: 209602 - DNA, 2415 bp, Artificial Sequence
  derived and/or modified sequence
atgtccagcagctcttggctcctgctgagcctcgtcgcagttaccgccgcgcagtcgaccatcgaagaacaggcaaaaactttcctggataagtttaatcacgaggccgaagatcttttctaccaatcctctctggcgtcctggaattacaacaccaacatcaccgaagagaacgtccagaatatgaacaacgcgggagacaaatggtccgcatttctgaaggagcagtcaaccctggcacagatgtatcccttgcaggaaatacaaaacctgaccgtgaagctccagttgcaggcgttgcagcaaaacggctcctcagtcctgagcgaggacaagtccaagcgcctcaatacgatcttgaacaccatgtctactatctattcaaccggaaaggtttgcaatccggacaacccgcaagaatgtctcctgctggaaccgggacttaatgaaatcatggctaactcgttggactacaacgagaggttgtgggcttgggagtcatggaggagcgaggtgggaaagcagcttaggccgctgtatgaagaatatgtggtgctgaagaacgaaatggcccgcgccaaccactacgaggactacggagactactggcggggagactacgaggtcaatggagtcgacggatacgattacagccgggggcagctgatcgaagatgtggaacatactttcgaagagataaaacctctctacgaacacctgcatgcgtacgtccgcgccaaacttatgaacgcctacccgtcatacatctcaccaatcggatgccttccggcccatctgctcggcgatatgtggggtcggttttggaccaatctctactcgttgaccgtccccttcggacaaaagcccaacattgacgtgactgatgcaatggttgatcaggcgtgggacgcccagcggatattcaaagaggcagagaagtttttcgtctcagtgggcctgccaaacatgacccagggcttctgggaaaatagcatgctcactgacccagggaacgtgcaaaaggccgtgtgccacccaactgcgtgggatctgggaaagggagattttcgcatcctgatgtgcaccaaggtgacgatggacgacttcctgactgcccaccacgagatggggcacattcagtacgacatggcgtacgctgcgcaaccctttttgcttagaaacggagcaaacgaggggttccatgaagctgtaggagagattatgtccctgtcagccgcgactcccaagcatcttaagtctatcggactgctctcgccggactttcaggaggacaacgagacggaaatcaatttcctgctgaaacaggccctgactatcgtcggcactcttcctttcacttacatgctcgaaaaatggaggtggatggtgtttaagggagagatcccgaaggatcagtggatgaagaagtggtgggaaatgaaacgggaaatcgtcggagtcgtggagccagtgccacatgacgaaacttactgcgatccagcttccctgttccacgtgtcgaacgattactccttcatccgctactacactagaactctctaccagttccagttccaggaagcactttgtcaagccgcgaagcacgaagggccgcttcacaaatgcgacattagcaattcaaccgaggcagggcagaaacttttcaatatgttgaggctgggaaagtcggaaccgtggacgttggcccttgagaacgttgtgggcgccaaaaacatgaacgtgcgccctctcctcaattacttcgagcccctcttcacctggctcaaggatcagaataagaattcgttcgtcggctggtccactgactggagcccgtacgccgatcagtccattaaagtaaggatctccctcaagagcgctctgggggataaggcctatgagtggaacgacaatgagatgtacctgtttaggagctcggtggcgtacgcgatgcggcagtacttcctgaaggtgaagaatcaaatgatcctgtttggagaggaagatgtgcgggtggccaacctcaagcctcgcatctcatttaacttcttcgtcactgccccaaagaatgtctcggatatcattccacgtaccgaagtggaaaaggctatcagaatgtcgagatcccgcatcaacgacgcctttcggctcaatgacaattccctggaattcttgggcatccaaccaaccctcgggcctcccaaccagccgcctgtgtccatctggctgattgtgttcggcgtggtgatgggggtgatagtggtgggcatcgtgatcctcatcttcactggtattagagacagaaagaaaaagaacaaggcacgctcgggagaaaacccttacgcatccatcgacatctcgaaaggagagaacaatccaggcttccaaaatacggacgatgtccaaacctccttc

SEQ ID NO: 209603 - DNA, 2415 bp, Artificial Sequence
  derived and/or modified sequence
atgagttctagttcatggttattgttatctttagtagcagtcactgcagcacaatctactatagaagaacaagctaaaacatttttagataagtttaatcacgaggctgaggatcttttttatcaatcaagtttagcttcttggaattataatacaaatattactgaagaaaatgttcaaaatatgaataatgctggagataaatggtcagcctttttaaaagaacaatctacgttagctcaaatgtatcctcttcaggaaatccaaaatcttactgttaaattacaattacaagctttacaacaaaatggatcttcagttttaagtgaagataaatcaaaaagacttaatactattttaaatactatgtcaactatttattctacaggaaaggtatgtaatccagacaatccacaagaatgtttattacttgaaccaggtttaaatgaaataatggcaaactctcttgattataatgaaagactttgggcatgggaatcatggagatcagaagttggaaaacaattaagacctttatatgaagaatatgtagtacttaaaaatgagatggcaagagcaaatcattacgaagattatggtgactattggagaggagattatgaagttaatggagttgatggttatgattacagtcgtggtcaattgattgaagatgtagaacatactttcgaagagattaaaccattatatgaacatttacatgcatatgttagagcaaagctaatgaatgcttatccatcttatatttctccaattggttgtcttccagctcatttattaggagatatgtggggtagattttggactaatttatatagtcttacagttccatttggacaaaaaccaaatattgatgttactgatgcaatggtagatcaagcatgggatgctcagagaatattcaaagaagcagaaaaattctttgtttcggttggattaccaaatatgactcaaggattttgggaaaattcaatgcttacagatccaggaaatgttcaaaaagcagtttgtcacccaacagcttgggatttaggaaaaggtgactttagaattcttatgtgtactaaagttacaatggatgattttttaacagctcatcatgaaatgggtcacatacagtatgacatggcatatgctgcacaacctttcctacttcgtaatggtgctaatgaaggatttcatgaagcagtcggagaaatcatgagtctaagtgctgctactccaaaacatttaaagtcaataggattattaagtccagacttccaagaagataatgaaacagaaattaattttttacttaaacaagctttgactattgtaggaacattaccatttacttatatgttagaaaagtggcgttggatggtattcaaaggagaaattccaaaagatcaatggatgaaaaagtggtgggaaatgaaaagagaaattgttggagttgtagaaccagttccacatgatgaaacatattgtgatccagcatcattatttcatgtaagtaatgattattcttttattcgttattatactagaacattatatcaatttcaatttcaagaagcactttgtcaagctgctaagcatgaaggaccattacataaatgtgatatttcaaatagtactgaagctggacaaaaattgttcaatatgcttagacttggaaaatcagaaccatggactttagcattagaaaatgtagttggagcaaaaaatatgaatgttagaccattattaaactattttgaaccactttttacttggttaaaagaccaaaataaaaattcctttgttggatggtctacagattggagtccatatgcagatcaaagtattaaagttagaatttcattgaaaagtgcattaggtgacaaagcatatgaatggaatgataatgagatgtatctttttagaagtagtgtagcttatgcaatgagacaatattttttaaaagtaaaaaatcaaatgatacttttcggtgaagaagacgtacgtgtagcaaatttgaaaccaagaataagtttcaattttttcgttacagctcctaaaaatgtttcggatataattccaagaacagaagttgaaaaagctatcagaatgtcaagatctaggattaatgacgcatttagattaaatgataattcattagaatttcttggaatacaaccaactttaggaccaccaaatcaaccaccagtttccatatggcttattgtatttggagtggttatgggtgttattgtagtaggtattgttattcttatatttactgggatacgagatagaaaaaaaaagaataaagctagatctggagaaaatccatatgcttctattgatatttcaaaaggagaaaacaatccaggttttcaaaacacagatgatgttcaaacttcattt

SEQ ID NO: 209604 - DNA, 2415 bp, Artificial Sequence
  derived and/or modified sequence
atgtcttcctcaagttggctgttgctttctctggtggcagttactgctgctcagtctactatcgaagagcaggcaaagacattcctggataagtttaaccatgaggcagaggatctgttctaccagtcatcacttgcttcttggaattataatactaacattactgaagaaaacgtgcaaaatatgaataacgccggagataagtggtccgcttttcttaaagagcagtccaccctcgctcaaatgtacccacttcaggaaatccagaacctgaccgtgaagctgcagctgcaagctctccagcagaatggctcatctgttctgagcgaggataagagtaaacgtttgaacacaatactgaacaccatgtccaccatttatagcaccggcaaggtgtgcaaccctgacaacccacaggagtgcttgctgctcgaacccggcctgaacgagatcatggcaaactccctcgattacaacgaacgcctctgggcatgggagtcctggagatctgaggtgggaaagcagttgcgccccctttacgaggaatacgtggtgttgaagaatgagatggctcgtgctaaccattacgaagattacggtgattactggcgtggtgattatgaggtaaacggagttgacggatacgattactcacgtggacaactcatcgaagacgtcgagcacacctttgaagaaataaagcccctttacgagcatcttcacgcctatgtgagggctaaacttatgaacgcatacccctcctacatctcccccatcggttgcctccctgcccatctcttgggagacatgtggggtaggttttggaccaacctctactcccttacagtccctttcggtcagaagcccaatattgatgtaaccgacgcaatggtcgaccaagcttgggacgctcagagaattttcaaggaggccgaaaagtttttcgtgtccgttggactgcctaacatgactcagggtttctgggagaatagtatgctcaccgacccaggtaacgtccagaaggctgtttgccatccaacagcctgggacttgggcaagggcgacttccgtatcctcatgtgcaccaaagtcaccatggatgattttttgacagcacaccacgaaatgggccatatccagtatgacatggcctacgccgctcaaccatttctgctgcgtaacggcgccaatgagggctttcatgaggctgtgggagaaatcatgagtttgagtgccgctacccctaaacacctgaagagcatcggactgctgtccccagacttccaagaagataatgagacagagatcaactttctgctcaaacaagctctcactatagttggtactttgcctttcacttacatgctggagaagtggaggtggatggtgtttaagggtgagattcccaaggaccagtggatgaagaagtggtgggaaatgaaaagagagatcgttggtgtggtggagccagtccctcacgatgagacttactgcgaccccgcatccttgttccatgtgtcaaacgactacagtttcattagatactacacccgcacactgtaccagttccagtttcaggaagctttgtgtcaggcagccaaacacgagggcccacttcacaagtgcgatatctccaacagtaccgaagccggccagaagttgtttaatatgctcaggttgggcaaatccgagccctggacactggctctggagaatgttgtaggagccaagaacatgaatgttaggcctcttcttaactatttcgaacccctcttcacttggctgaaggatcaaaacaagaactccttcgtaggatggtctacagactggtccccatatgccgatcaaagtatcaaggtgcgcatctcactcaaaagtgccctcggcgataaggcctacgaatggaacgataacgaaatgtacctctttaggagttcagtggcatatgcaatgcgccaatacttccttaaggtgaagaaccagatgatcctgttcggtgaggaggacgtgagggtggccaacctgaagcctcgtatcagcttcaacttttttgttactgcacctaagaacgtgtccgatatcatccccaggactgaggttgagaaagcaatacgcatgagcagaagccgtatcaacgacgccttcagattgaacgacaactccctcgaattcctcggtatccaacccacattgggcccccctaatcaacctccagtaagtatctggcttatcgtttttggagttgtgatgggagtgattgtcgtcggtatcgtgatcctgatttttactggcattcgtgacaggaagaagaagaataaagccagaagtggtgaaaatccctacgcaagcattgacatttctaagggtgagaataaccccggatttcaaaatactgacgatgtgcagactagtttt

SEQ ID NO: 209605 - DNA, 2415 bp, Artificial Sequence
  derived and/or modified sequence
atgtcttcaagctcatggctgctgctttctttagtggcagtcacggccgcccagagcacgatcgaggaacaagcgaagacattcctggacaagtttaaccatgaggcggaagacctgttctatcagagcagcctggcttcctggaattataataccaacataactgaggagaacgttcagaatatgaataacgcaggcgacaaatggtctgctttccttaaggaacagagtaccctcgctcagatgtaccctcttcaggagatacagaacctgaccgtcaagctgcagctacaggccctgcagcagaatggatcatccgtccttagcgaggacaagtccaagaggcttaacacaatcctcaacacaatgagcaccatctattcaaccggaaaagtatgtaatccagacaacccacaagagtgtttgttgcttgagccaggactcaatgagataatggccaactcgctggactacaatgagcgtctgtgggcctgggagagctggcgatcagaagtcggcaagcagctgcggccgctatacgaggagtacgtggtgttaaaaaatgaaatggcccgggccaatcactatgaggactacggggattactggagaggcgattacgaggtcaacggggttgatggctatgattactcgcgaggccagctgattgaggacgtggaacacaccttcgaggaaattaagccattatacgagcatcttcatgcctatgtccgggcgaaactcatgaacgcatatccgtcatatatatcccctattggatgtctgcctgctcatctcctgggtgatatgtggggccgcttctggacgaatctgtatagcctgacagtcccttttgggcagaaacccaacatcgacgtgaccgacgccatggtggaccaggcctgggacgctcaaaggatttttaaggaggcagaaaaatttttcgtctccgtgggcctgccaaacatgacacaggggttctgggaaaactcaatgctgactgaccccggcaatgtgcagaaagcagtatgccaccctaccgcctgggatctgggaaaaggagacttccgaatactaatgtgcaccaaagtgaccatggatgactttctgacggcgcaccatgaaatgggccacatacagtacgatatggcgtacgcagcccaaccatttcttctgcgcaacggcgcaaatgaaggcttccatgaggccgtgggggagataatgagcctgtcagcagcaacacctaaacatcttaaatccattggactcttgtcacccgatttccaagaggacaacgaaacggagattaattttctgttaaaacaggctctgacgatcgtaggcaccttgccatttacctacatgttggagaagtggcgatggatggtcttcaagggtgaaatcccaaaggaccagtggatgaagaaatggtgggagatgaagcgagagatcgttggcgtcgtcgagcctgtgccccatgacgaaacttattgtgatcctgcctcgctcttccacgttagtaacgactacagcttcatcaggtactacacccggactctgtatcagttccaatttcaggaagctctgtgccaggctgccaagcacgagggtcccctgcacaaatgcgatatcagcaattccactgaagcagggcaaaaactgttcaacatgcttagacttggcaaatctgagccctggaccttagcgttggagaatgtcgtaggggccaagaatatgaacgtaaggcccctgctcaactactttgagcccctgttcacctggctgaaggaccagaacaagaattccttcgtgggatggtcaactgattggagcccctatgcggaccagagcataaaggtgcgcatctctctgaaaagcgccttgggggataaggcctacgaatggaacgataacgaaatgtatctatttcgcagctcagtggcttacgcgatgcggcagtattttttaaaggtgaaaaaccagatgattcttttcggggaagaggatgtgcgggtcgcaaacttgaagcctaggatctctttcaacttctttgtgacagcacccaaaaacgtcagcgacataataccgcggaccgaggtagagaaggcaatcaggatgagccggtcccggatcaatgacgcctttagactgaatgacaatagtctggagtttctaggcatccagccaaccctgggaccccctaatcaaccacccgtttccatatggttgatcgtgttcggagtggtgatgggagtcatcgtggtcggtatagttattcttatatttacgggaatcagggaccgcaagaagaaaaataaggctaggagtggtgagaatccgtacgcgagcatcgatatttctaagggagaaaacaaccctggtttccagaacaccgatgacgttcagacctctttt

SEQ ID NO: 209606 - DNA, 2415 bp, Artificial Sequence
  derived and/or modified sequence
atgagctctagcagctggctgctcctgtcactcgtggcagtcaccgcagcccagtccaccatcgaagaacaggctaagaccttcctcgataagttcaaccatgaagctgaggacctgttctaccagtcatccctcgcgagctggaactacaacactaacatcacggaagaaaacgtgcaaaacatgaacaacgctggggacaagtggtccgctttcctgaaagagcagtcgactctggctcagatgtacccactccaggagatccagaatctgaccgtgaaactgcagctccaagccctgcaacagaacgggtcctctgtgctctcagaggataagtccaagcgtctgaacactatccttaatactatgtcaactatctactcaactggaaaggtctgcaaccctgataacccgcaagaatgcctcttgctcgaaccaggactgaacgaaattatggcgaactccctcgactacaacgagcgcctgtgggcctgggaatcatggagatcagaagttggaaaacaactgcggccgttgtatgaggaatacgtggtgctgaagaatgagatggcccgcgcgaatcattacgaggattacggtgactactggcgcggagactacgaggtgaatggggtcgacggctacgactacagccgggggcagctgatcgaggacgtcgaacacacctttgaggaaatcaaacctctctacgaacatctgcatgcctatgtcagagccaaattgatgaatgcatacccatcgtacatcagcccgattggctgcctcccggcccacctgctgggagatatgtggggacgcttttggaccaacttgtactcgttgactgtgcccttcggacagaagccaaacatagatgtcactgacgctatggtggatcaggcctgggacgcacaaaggatctttaaggaagccgaaaaattcttcgtgagcgtcgggctgccaaatatgacccaaggattctgggaaaactcaatgctgactgatccggggaacgtgcagaaggctgtctgccaccctaccgcttgggacctcggtaagggcgacttccgcatcctcatgtgcaccaaggtgacgatggacgacttcttgaccgcgcaccatgagatgggacacatccaatacgacatggcctacgcagcacagccttttcttctgagaaatggcgccaacgagggattccatgaggcggtgggcgaaatcatgtccctgagcgcggcaacgccaaagcacctgaaaagcatcggactgctgtctcctgacttccaggaggacaacgaaactgagatcaattttctgctcaagcaagccctcacgattgtcggaaccctcccgttcacttatatgctggagaagtggaggtggatggtgttcaagggcgagatcccgaaggaccagtggatgaaaaagtggtgggaaatgaagagggaaatcgttggtgtggtggagcctgtgcctcacgatgaaacttactgtgatccagcctcgctgttccacgtatccaacgattacagcttcatccggtactacactcgcaccctgtatcaattccaattccaagaagcattgtgtcaggcggcgaagcacgagggaccgctccacaaatgcgatatctccaactccaccgaggccggccagaagctgttcaacatgcttcgcctgggtaagtccgagccctggaccctcgccctggaaaacgtggtgggcgcgaaaaatatgaacgtccgccccctgcttaactacttcgagccgctgttcacctggctgaaggatcagaataaaaattcgttcgtgggatggtcgactgattggtcgccatacgctgaccagtcgatcaaggtgcgcatttcactcaagtccgccctcggcgacaaggcgtacgagtggaacgacaatgaaatgtacctgttccggtcgtcggtggcgtacgcaatgagacaatacttcttgaaggttaagaatcagatgatcctctttggagaagaggatgtccgggtcgcgaacctgaagccgaggatttccttcaattttttcgtgaccgccccgaagaacgtgtccgacatcatcccgcgcacggaagtcgaaaaagccattagaatgagcagaagccgaattaatgatgccttccggctgaatgacaactcgcttgaatttcttggcatccagccaacccttggcccgccgaatcagccccccgtgtcgatctggctgatcgtgtttggagtggtgatgggagtgatcgtggtcggaattgtgatcctgatcttcaccggaatccgggaccggaaaaagaagaacaaagcccggtcgggagaaaacccgtacgcaagtatcgacatctcaaaaggtgaaaacaatccagggtttcaaaatactgacgatgtccagacctcgttt

SEQ ID NO: 209607 - DNA, 2415 bp, Artificial Sequence
  derived and/or modified sequence
atgtcgtcgtcgagctggctgctgctgtcactcgtggctgtgactgccgcccagtccaccatcgaagagcaggccaagactttccttgataagttcaatcatgaagctgaggatctcttttaccaatcatcgctggcgtcatggaactacaacaccaacatcaccgaagaaaacgtgcagaacatgaacaatgcgggagacaagtggtccgctttcctcaaagagcagagcaccttggcccagatgtaccccctccaggaaatccagaatctgaccgtcaagctccaactgcaagccctgcaacagaatggatcgtccgtgctgtctgaggacaagtccaagcgcctcaacaccatcctgaacacgatgtccactatctattccacgggcaaagtgtgcaatccggacaaccctcaagaatgcctgctgctcgaaccgggtcttaacgaaatcatggccaattccttggactacaatgaaagactgtgggcgtgggagtcctggcggtcagaagtgggaaagcagctgcggccactttacgaagagtacgtcgtcctgaagaacgaaatggcccgtgccaaccactatgaggactacggagactactggcggggagattacgaagtgaatggagtggacggatacgactactcgcggggacagctgattgaggacgtggaacataccttcgaggaaatcaaaccactctatgagcacctccacgcgtacgtgcgcgcgaaactcatgaatgcctacccgagctacatttccccaattggatgccttccagcccatcttttgggagatatgtggggacggttctggactaatttgtactcgcttaccgtccctttcgggcagaagccaaacatcgatgtcactgacgcgatggtggaccaggcttgggatgcccagcgcatcttcaaggaggcggaaaagttcttcgtctcggtgggattgccgaacatgactcaaggattttgggaaaactcgatgctcactgatcctggaaatgtccagaaggcagtgtgtcacccgaccgcctgggaccttggaaagggagactttcggatactgatgtgtaccaaggtgactatggatgacttcctgaccgcccaccatgaaatggggcacatccagtacgatatggcctacgctgctcaacctttcctcctgcggaatggtgccaacgaaggttttcacgaggcggtgggtgagattatgtcgcttagcgccgctacgccgaaacacctcaagtccatcggcctgctgagccctgactttcaagaggataacgaaaccgagattaacttcctgctgaagcaagcattgaccatcgtcggaactctgccattcacctacatgttggagaagtggcggtggatggtctttaagggagaaatcccgaaggaccaatggatgaagaaatggtgggaaatgaagcgcgagattgtcggcgtcgtggagccagtgccgcacgacgaaacctactgcgatcctgcctcgctgttccacgtgtcgaacgattacagctttatccgctattacactcgcaccttgtaccaattccaatttcaggaagcactctgtcaggcggcgaaacacgagggccctctgcataagtgcgacatcagcaacagcactgaggctggccagaagttgttcaatatgctccggctgggcaagtcggagccgtggacccttgcgctggaaaatgtcgtgggagcgaaaaacatgaatgtaaggccgctgctcaattacttcgaaccgctctttacttggctgaaggatcagaacaaaaactcgttcgtgggctggtcaactgattggtccccttacgctgatcagagcatcaaagtgcggatatccttgaagtcagctctgggcgacaaggcttatgagtggaatgataatgagatgtacctctttcgctcctccgtggcatacgctatgcgccagtacttcctcaaggtgaaaaaccagatgatcctgttcggagaggaagatgtccgggtggcaaatctcaagccgcgcatctcctttaacttcttcgtgaccgccccgaaaaacgtgagcgacatcatccccaggaccgaagtggagaaggcaatcagaatgtcgcggtcgcggatcaacgacgccttccggctgaacgataactcgctcgagttcttgggaatccaaccgactctgggacctcccaatcagcctccggtgtccatctggctgatcgtgttcggagtggtgatgggagtgattgtggtcggcatcgtgatcctgatcttcaccggtatccgcgatagaaagaaaaagaataaggccagaagcggcgagaacccttacgcctccattgatatttccaagggcgagaataatccgggattccaaaacactgatgacgtgcaaacctcgttc

SEQ ID NO: 209608 - DNA, 2415 bp, Artificial Sequence
  derived and/or modified sequence
atgtcttctagtagttggttgctgcttagtctcgttgccgtaactgcagcccagagcaccatagaagagcaggcaaagacttttctcgacaagttcaaccatgaggctgaggatcttttctatcaaagcagcttggcttcctggaactacaacaccaacattacagaagagaatgtgcagaatatgaataacgcaggggacaaatggagtgcgttcctaaaagagcaatcaacactggcacagatgtatcccttgcaagagatccagaatctgactgttaagctccaactgcaggccctgcagcagaacggaagctctgtgctcagtgaggataaaagtaagcgcttaaataccattctcaataccatgtccactatttactctaccgggaaggtctgcaatccagacaaccctcaggagtgcttgcttctcgagccaggcctgaacgagataatggccaactctctggattataatgagcgactgtgggcctgggagtcatggcgcagcgaggtggggaaacaactacgaccgctgtatgaagagtatgtggtcctgaagaatgagatggccagggccaaccactacgaggactatggagattactggcggggcgattacgaggtgaatggggtggacggatacgactactccaggggtcagcttattgaggacgtggaacataccttcgaggaaatcaagccactgtacgagcatcttcacgcctatgtgcgagcgaaactgatgaacgcttacccttcatacatcagtccaattggatgtttgcccgcgcacctccttggcgatatgtggggcaggttttggaccaatctgtattcattgacagtcccattcggacagaaaccgaacattgatgtgactgacgctatggtcgaccaggcctgggacgcccagaggatcttcaaagaggctgaaaagttcttcgtcagcgtgggcctacccaatatgacccagggcttctgggaaaacagtatgctgaccgaccccgggaacgtgcagaaggctgtgtgtcatccgaccgcatgggaccttggtaaaggagatttccgtatactgatgtgtaccaaggtgacgatggacgactttctgacagcgcaccacgaaatgggtcacattcagtacgacatggcttatgcggctcagcccttcctgctcagaaacggagcaaacgaaggcttccacgaggcagttggcgagatcatgagcctttctgctgcgaccccaaagcatctgaagtcaatcggcctgcttagccctgattttcaagaagataacgagaccgagatcaatttcctgctcaagcaggctcttacaattgtcggcacactgcctttcacatatatgttggaaaaatggcggtggatggtcttcaagggcgagataccaaaggatcaatggatgaagaaatggtgggagatgaaacgggagattgtgggagttgtggaaccagtgcctcatgatgagacatactgcgatccagccagcctctttcacgtaagcaatgactattccttcatccgctactatacacggactctctaccagtttcagttccaggaagccctgtgtcaagctgcaaaacacgaaggacccttgcataagtgcgatatctcgaattccaccgaggccggccagaagctgttcaatatgctgcggcttggaaagtccgaaccctggaccctggccttggagaacgtcgtgggcgccaaaaatatgaacgttcgaccccttctgaactactttgagccgcttttcacttggttgaaggatcagaacaagaactccttcgtggggtggtcaacagattggtctccctatgccgaccagagcattaaggtccggatcagtctgaagtccgctctcggcgacaaagcctacgagtggaacgataacgagatgtacttgtttcgaagctctgtggcctacgctatgcgacagtattttctcaaagtcaagaatcagatgattctgtttggtgaggaggatgtgcgtgtggctaacttgaagcccagaattagtttcaattttttcgtgaccgcccccaagaacgtgtctgatatcatccccaggaccgaagtcgaaaaggccattcgcatgagccggtccaggatcaacgacgctttcaggctgaacgacaactccctggagtttctcggtatccagcctacgcttggcccccctaatcagccaccagtgtccatctggctgatcgtgttcggtgtggtcatgggagttatagtggtgggtatcgtgattctgatcttcaccggtattcgcgatcgcaagaagaaaaataaggcacggtctggggagaatccttacgcctctatcgatataagcaaaggcgagaacaatcctgggtttcagaacaccgatgacgtgcagaccagtttc

SEQ ID NO: 209609 - DNA, 2415 bp, Artificial Sequence
  derived and/or modified sequence
atgtctagttcctcctggctcctcctctccctggtggccgtgactgccgcacaaagcaccatcgaagagcaggcaaagacctttctggacaagttcaatcatgaggcggaagatctgttctaccagtcctccctggcctcctggaattacaacacgaatatcacggaggagaacgtgcagaatatgaataatgccggggataagtggtccgcctttctcaaggaacagtccactctggcccaaatgtacccgctccaagaaatccagaatttgaccgtgaagttgcaactgcaagcactccagcagaacggatcatcagtcttgagcgaggacaaatcaaagagactgaataccatcctgaacactatgtccaccatctacagcaccggaaaggtgtgtaacccagacaatccgcaggaatgcctcctgctggaaccgggcctgaacgaaatcatggcaaattcgctcgactacaatgagcggttgtgggcatgggaatcgtggcggtcggaagtgggcaagcaactgcgcccactctacgaagagtacgtggtgcttaagaacgaaatggcacgggcaaatcactacgaggactatggcgactactggagaggagattatgaggtgaacggggtggacggctacgactattctcggggccagctcatcgaggacgtggaacatactttcgaagaaatcaaaccattgtacgagcacctgcacgcgtacgtccgcgcgaagctgatgaacgcctacccttcctacatttcccccattggatgcctgccagcccacttgctgggagatatgtggggacggttctggactaacctctactccctgacggtgccgttcggccagaagccaaacatcgatgtgaccgatgcaatggtggaccaggcatgggatgcacaacgcatcttcaaggaagcagagaaattcttcgtgtcagtgggactccccaacatgacccaaggtttctgggaaaacagcatgctgaccgatccgggcaatgtccaaaaggctgtgtgccatccgaccgcctgggacctgggaaagggcgacttccgcatcctgatgtgcactaaagtgactatggacgacttcctgaccgctcatcacgagatggggcatatccagtacgacatggcatacgcggcacagcctttcctgcttcggaacggtgccaacgaaggcttccatgaggccgtcggggagatcatgtccttgtccgcggcaacccccaagcaccttaagtcgattggactcctgtcgccagacttccaggaggacaatgagactgaaatcaacttcctgctcaagcaggcgcttaccatcgttggaactctgccattcacctatatgctggaaaagtggcggtggatggtgttcaaaggagagattccaaaggatcaatggatgaagaagtggtgggaaatgaagagagagatcgtgggcgtcgtcgaaccagtgccccatgatgagacttactgcgatccggcctcgctttttcacgtgtcgaacgattacagcttcatcagatactacactaggactctgtaccagttccagttccaggaagctctgtgccaagctgccaagcacgagggtccactgcacaaatgcgacatctccaactcgactgaagccggccaaaagttgttcaacatgctcaggctgggaaaatctgagccgtggacccttgccctggagaacgtcgtgggcgcaaagaacatgaacgtccgaccgctgttgaattacttcgaaccgctgttcacttggttgaaggatcagaacaaaaactctttcgtggggtggtcaactgattggagcccgtacgccgatcagtcgatcaaagtgcgcatctcgctcaagtccgcactgggagataaggcatacgaatggaacgataatgagatgtacctctttcgctcgtccgtggcctacgctatgagacaatacttcctcaaagtcaaaaaccaaatgatcctctttggagaagaggacgtgcgcgtggccaacctgaagccgcggatctcatttaacttcttcgtgactgcgccaaagaatgtctcggacatcatcccgagaactgaggtggaaaaggctatcagaatgtcccgctcccggatcaacgacgccttccgcctcaatgataattccctcgagttcctggggatccaaccgactctgggaccgcctaatcagccaccagtctcaatctggctgatcgttttcggggtcgtcatgggtgttatcgtggtgggtattgtgattcttatcttcaccggaattagagacagaaagaagaaaaacaaggcacgctcaggcgaaaacccgtacgcgagcatcgatatctcgaagggagaaaacaacccgggattccagaacactgacgacgtgcagacttcgttc

SEQ ID NO: 209610 - DNA, 2415 bp, Artificial Sequence
  derived and/or modified sequence
atgtcgtccagctcctggctgttgctcagcctcgtagctgtcacagcggcgcagagtaccatcgaggagcaggcaaagacatttctggacaagtttaatcatgaagccgaagacctgttctaccagtcttccttggcttcttggaattacaacacaaatatcaccgaggagaacgtgcaaaacatgaacaacgctggcgataaatggagcgcttttctgaaggaacagagtaccctagctcagatgtatcccctgcaggagattcagaatcttaccgtcaagctgcagttgcaggccctgcaacagaacggttccagcgtgctgtccgaagataaatctaaaagactaaacaccattctgaacactatgagcacaatttattctaccggcaaggtgtgtaacccagacaatccacaggagtgtctcctattggagcccggtttaaacgagatcatggctaacagtctggattacaatgagaggctgtgggcctgggaatcctggagaagcgaagtaggtaaacagttgaggccactctacgaagagtacgtggtactgaagaacgagatggctcgggccaaccactatgaagactatggggactattggagaggtgattacgaggtcaatggggtggacggctacgactactctcgggggcaattgatcgaggacgttgagcataccttcgaagagatcaaacctctgtacgaacatctgcatgcctacgtcagggctaagctgatgaacgcttacccctcgtacatctcccctattgggtgtcttccagcgcaccttcttggcgacatgtggggacgcttctggaccaatctgtatagcttaacagtgcctttcggccaaaaacccaatatagatgtcactgatgcaatggtggatcaggcatgggatgcacagagaattttcaaagaagcagaaaagttttttgtatctgtcggtctgcctaatatgacccagggtttctgggagaattccatgctgaccgaccctgggaatgtgcaaaaagctgtatgtcatcccaccgcttgggatctgggtaaaggggattttaggatactgatgtgcaccaaggtaaccatggacgatttcctaactgcacaccacgagatgggccacatacagtacgatatggcttacgcggcgcaaccatttctgttgagaaacggtgcaaatgaaggtttccacgaggctgtcggagagattatgtccctctctgctgccacgcctaaacacctgaagagtattggacttctctcccccgattttcaggaggataacgagacagagattaatttcttgctcaaacaggccttgactattgtggggacgctgccgttcacttacatgcttgagaagtggaggtggatggtattcaagggggaaattcctaaggatcagtggatgaagaaatggtgggagatgaagagggaaattgtgggcgtggtggaacccgtaccccatgatgagacatactgtgaccctgcaagcctcttccacgtgagcaacgattacagcttcatccgatactacactagaactttataccagttccagttccaggaagctctgtgtcaagccgcaaagcacgagggccccctgcacaagtgcgacatatcaaactccacagaggctggccagaaactttttaacatgctgaggttgggcaaatctgagccctggactttggcgctcgaaaatgtagtcggcgctaaaaacatgaacgttcgacccctgctaaactactttgagcccttattcacttggttgaaggatcaaaataaaaacagttttgtaggctggtcaaccgactggtctccttatgctgaccaaagtattaaagtgcgcatcagtttgaaatccgctctgggcgataaagcgtacgaatggaacgacaatgagatgtacctttttagaagttctgtggcttacgccatgcggcaatactttctaaaggtgaagaatcagatgattctgttcggcgaggaggacgtgcgtgtcgccaacctaaaacctcgaatctcctttaacttctttgtgactgccccaaaaaatgtgtcagacatcatcccgcgcaccgaggtggaaaaagctatacgcatgtccagatccaggattaacgatgcgtttaggcttaacgataattcactggaatttctcggaatccagccaacattgggacctcccaaccagcctccagtgagtatctggctgatagtgtttggagtggtgatgggtgtcattgtggtagggatagtcatcctgattttcactggtatacgcgacaggaagaaaaaaaacaaagctaggtccggtgagaacccctatgcctctatcgacatctcaaaaggcgagaacaatccaggatttcaaaacaccgatgacgtgcaaacttccttt

SEQ ID NO: 209611 - DNA, 2415 bp, Artificial Sequence
  derived and/or modified sequence
atgagtagtagctcctggctcctgctgtctctggttgccgtgaccgcagcccagtccacgatcgaggaacaggccaaaaccttcctcgacaagtttaaccacgaggccgaggaccttttctaccagagcagtctggcctcctggaattataacaccaacataacggaggagaatgtccaaaacatgaacaacgctggcgacaagtggtccgctttcctgaaggaacagagcaccctcgcgcaaatgtaccctttgcaggagatccagaacctaaccgttaagctgcaacttcaggccctccagcagaacggttcgtccgtgttgagcgaggataagtcgaagcgtttgaatacaatcctgaacaccatgagtacaatctactccacgggtaaggtttgtaacccggacaaccctcaggagtgcttgctgcttgagcctgggctcaacgagatcatggccaactccctggactataacgagaggctgtgggcgtgggaaagctggcggtcggaggtgggcaagcagctgcgtcctctatacgaggagtatgttgtgctgaagaacgagatggctcgcgcgaaccactacgaagactatggtgactattggcgcggcgactacgaagtcaacggtgtcgacggatatgactattccagaggacaactaatcgaggatgtcgagcacaccttcgaggagatcaagccactttacgagcatcttcacgcttatgtgcgcgcaaagttgatgaacgcttacccttcctacatttctccgattgggtgtttgcccgctcacctgttgggcgatatgtggggacgcttttggacaaacctctattccctgaccgtccctttcggacaaaagcccaacatcgatgtcaccgatgccatggtcgatcaggcctgggatgcgcagaggatcttcaaggaagctgagaaattctttgtctcagtgggtctccccaacatgactcagggtttctgggagaactctatgctgaccgacccgggcaacgtccagaaggcggtttgccaccctaccgcttgggacttgggaaagggtgattttcgaattttgatgtgtaccaaggtcacgatggatgacttcctgaccgcccaccacgaaatggggcatatccagtatgacatggcctacgctgctcaacctttcctcctgaggaacggcgccaatgagggtttccacgaagccgtcggcgaaatcatgagcctctctgccgccacacccaagcatttgaagtctatcggtctgctgtctcccgattttcaggaggacaacgagaccgaaattaacttcctgctaaagcaggccttgaccattgtcggtacactcccgttcacctacatgctcgaaaagtggcgttggatggtgttcaagggggagattccgaaggaccagtggatgaaaaagtggtgggagatgaagcgcgagatcgtcggcgtcgtggagcccgtcccccatgatgaaacatactgtgatcctgccagtctcttccacgtatctaacgactacagcttcattcggtactacacgagaaccctgtaccagtttcagttccaggaagccctgtgccaggctgctaagcacgagggtccgctccacaagtgcgacatttcaaactccacggaggccggccagaagctgtttaacatgctgcgcctgggtaagtccgagccatggaccttggccctggagaacgttgtcggcgcgaagaacatgaacgtccggccgctgcttaactacttcgaacctttgtttacttggctcaaggatcagaacaagaattcgtttgtgggttggtctacggattggtccccctatgctgatcaaagcataaaagtccgtatctcactgaaatccgcgctgggagataaggcgtacgaatggaacgataacgagatgtatctgttccgtagctcggtggcatacgccatgcgtcagtacttcctgaaggtgaagaaccaaatgattctgtttggtgaggaggacgtgagggtcgcaaacctaaaaccccgtatcagctttaacttcttcgtcaccgcgcccaagaacgtttccgacatcataccacggaccgaggtggagaaagcaatccggatgagccgttcccgtatcaacgatgccttccggctgaacgacaacagcctcgagttcctggggatccagcccaccttaggaccgcccaatcagcccccggtctctatttggcttatcgtcttcggtgttgtcatgggtgtcatcgtggtcggtattgtaatcctgattttcaccggcatccgagaccgtaagaagaagaacaaggcccgctcaggtgagaacccgtacgcctcgattgacatttccaagggagaaaacaatcctggtttccagaacactgacgacgtccaaacttcattc

SEQ ID NO: 209612 - DNA, 2415 bp, Artificial Sequence
  derived and/or modified sequence
atgtcatcatcttcctggctgctgctgtcgctcgtcgctgtgactgccgctcagtcgaccatcgaggaacaggccaaaaccttcttggataagttcaaccatgaggcggaagatttgttctaccagagctccttggcaagctggaattacaacactaacattacggaagaaaacgtccaaaacatgaacaatgcgggcgataagtggtctgcgttccttaaagagcaatcgaccctcgcgcagatgtatccactccaggaaatccagaacttgactgtcaaattgcagctgcaggccctccagcagaacggctcgtcagttctgtccgaggacaaatcgaagcgcctcaacacgatcctgaatacgatgtcgaccatctactcgaccgggaaggtctgcaatccagataatccacaagagtgcctcctgcttgaaccggggcttaacgaaatcatggcaaactccctggattacaacgaacggctctgggcttgggagtcatggcgaagcgaagtgggaaaacagctccgccctttgtacgaagaatacgtggtcctcaagaatgaaatggctcgcgcaaatcattacgaggactacggagactactggcgcggcgactacgaagtgaacggagtcgacggctacgattacagcagaggtcagctgatcgaggatgtggaacatacctttgaggagatcaaaccactttacgaacacctgcatgcgtacgtgagagccaagctcatgaacgcgtacccatcatacatctccccgatcgggtgcctccctgcccacctgcttggggacatgtggggacgcttctggaccaatctttacagtcttaccgtgccgttcggtcagaagcctaatatcgacgtgacggacgcgatggtggaccaggcttgggatgcccagaggatcttcaaggaggccgagaaattctttgtgtcggtgggccttccaaatatgacccagggattttgggaaaactcaatgctgactgatccgggcaacgtgcagaaggcggtctgccacccgaccgcttgggaccttgggaaaggtgatttccggatcctgatgtgtactaaggtgactatggacgacttcctgacggctcaccacgagatgggtcacattcagtacgacatggcctacgccgcgcaaccgtttctcctccggaatggggcaaacgagggattccatgaggcggtcggcgagatcatgtccctgagcgccgccaccccgaagcacttgaaatcaatcggactgctgtccccagatttccaagaggacaatgagactgagatcaacttcctgctcaaacaagctcttaccattgtcggtacgctgccgtttacctacatgctggaaaagtggcggtggatggtctttaagggagaaatccccaaagaccaatggatgaagaagtggtgggagatgaagagggaaatcgtgggagtggtcgagccagtgccacacgatgagacgtactgcgatccggcgtcgctctttcacgtgtccaacgattactcgtttattcgctactatacccggactctgtaccaatttcagtttcaggaagctctttgccaagccgcgaagcacgagggacctcttcataagtgtgacatctcgaactccactgaggcaggacaaaaactgtttaacatgctcagactgggaaaatccgagccttggactctggccctggagaatgtggtcggggcgaagaatatgaacgtccggccactcctcaactactttgaaccgctgttcacttggctgaaagatcaaaacaagaactcgttcgtcggctggtctacggactggtcaccatacgctgaccaatcgatcaaggtgcgtatctcgctgaagagcgcgttgggagacaaggcttacgaatggaacgacaacgagatgtacctgttccggtcaagcgtggcatacgcaatgcggcagtacttcctgaaggtcaaaaaccagatgatcctgttcggggaggaggacgtgagggtggcgaacctgaagccgcgcatctcgttcaatttcttcgtgaccgctcccaagaacgtgagcgacattatcccgaggactgaagtcgaaaaagcgatcaggatgtctcggtcacgcatcaatgatgcgttccggctgaacgacaactcgctcgaattccttgggatccagccgaccctgggacctccgaaccagcctccggtgtccatctggttgatcgtctttggcgtggtgatgggagtgatcgtcgtggggatcgtcatcctgattttcaccggtatccgcgaccggaagaaaaagaataaggcgcgcagcggagaaaacccgtacgcctccatcgacatctccaaaggagagaacaatcccgggtttcagaacactgacgatgtgcaaacttccttt

SEQ ID NO: 209613 - DNA, 2415 bp, Artificial Sequence
  derived and/or modified sequence
atgtcctcatcttcatggttgctgctgagcttggtggcagtgaccgcagcccagtccacaatcgaggagcaggcaaagactttcctcgataaatttaaccacgaggcggaggacttattctatcagtcatcactcgcgagctggaactacaacaccaacatcacggaggagaatgtccagaacatgaataatgcaggagataaatggagcgcatttctgaaagagcagtctaccctggcgcagatgtaccctctgcaggagattcagaacctgactgtgaaattacaactgcaggccctgcagcagaacggtagctcagtgctcagcgaggacaaaagcaagcgtctgaatacaattctcaataccatgagcactatctacagtacgggaaaggtgtgcaatccagacaaccctcaggaatgcctgttgttggagcctggactgaatgagattatggcaaatagtctggattacaacgagagactgtgggcttgggaatcctggagatccgaggtgggcaagcagttacgccctctgtatgaagagtacgtcgttctgaagaatgaaatggctagggccaatcattatgaagactacggggactattggcgtggagattatgaagtcaacggcgtggacggttacgattactctagagggcagctaattgaggacgtggaacacacattcgaggagattaagccactctacgagcacctgcacgcttatgtccgggctaaattgatgaatgcctatccaagctatatctccccaattggatgcctccctgctcatctgctcggagacatgtggggacgcttttggactaacctttatagtttaaccgtaccctttggccagaagccaaatattgatgtgacagacgccatggtagaccaggcttgggatgcacaaaggatctttaaggaagccgagaagtttttcgtgagcgtcggactgccaaatatgactcagggcttctgggaaaattctatgttgaccgatccaggaaacgtgcagaaggcagtctgccaccctactgcttgggacctaggaaaaggcgacttccggattttgatgtgcacaaaggttacaatggacgatttccttacagcacatcatgagatggggcatatccaatacgacatggcctatgccgctcagccatttctgctgagaaatggcgcaaacgaagggtttcacgaggccgtgggcgagattatgtctcttagtgcggccactccaaagcacctcaagagtattggactgctttcccccgatttccaggaggacaacgagactgaaatcaattttctactgaaacaggccttgacaattgtcggcacactcccctttacatacatgctggaaaagtggaggtggatggtattcaagggcgaaattcctaaagatcagtggatgaaaaagtggtgggaaatgaagagggagatcgtgggagtagtggagccagtcccccacgatgaaacttactgcgaccccgcaagtctgtttcacgtcagtaatgattactcgtttataagatactatacacggacattgtatcagtttcagtttcaggaggccctatgccaagcagctaagcacgaaggccctctacacaaatgcgacatatctaatagtacagaagccggccagaagcttttcaatatgctgagattagggaagtcagaaccctggacgctcgccctggaaaacgtggtgggggccaaaaacatgaacgtccgcccacttctaaactattttgaaccactgttcacgtggctgaaagatcagaataagaacagtttcgtgggatggagtacggattggtcaccatacgccgatcaatccattaaagtgcgcatctctttaaagtcagccctgggcgacaaagcttatgagtggaacgacaacgaaatgtacctgttccggagctctgtggcttatgcaatgcggcagtacttcctgaaggtgaagaaccaaatgatcctgtttggagaggaggacgtgagagttgctaaccttaaacctaggatttcatttaactttttcgttacagcacctaaaaacgtctcagatatcatccctaggaccgaggtcgagaaagccataaggatgtcccgctcccgcatcaatgatgctttccgactgaatgacaattcgctggagtttctgggaatccagcctactctaggcccccccaaccagccccctgtgtctatctggttaatcgtgtttggggtggtgatgggcgtgattgtcgtggggatcgtgatcctgatctttaccggcatcagggatagaaaaaagaaaaacaaggccaggtcaggcgaaaatccctatgctagtatcgatataagcaagggcgaaaacaatcccggctttcagaatacggacgatgtgcaaactagtttc

SEQ ID NO: 209614 - DNA, 2415 bp, Artificial Sequence
  derived and/or modified sequence
atgagctcgtccagctggttacttctcagcctcgtcgctgtgacagcagcccagtctactatcgaggaacaggctaaaacgttcctggacaaatttaaccacgaagcggaggacttgttctatcagtcctccttagcaagttggaactataacactaacatcactgaagagaacgtccagaatatgaacaacgctggggacaaatggagcgctttcctgaaggaacagtctactctggctcaaatgtaccccctgcaagagattcagaatctcactgtcaagctccagctgcaggccttgcaacagaacggatcaagtgtgttgtctgaggacaaatcgaagcgtctcaatactatcctgaacactatgagcactatttattctacaggcaaagtatgcaatccagataatccacaggaatgtctcctgctagaaccaggccttaacgagatcatggccaatagcctggattataacgagcggctatgggcgtgggaatcgtggcgaagcgaagtcggcaagcagctacggcccctgtacgaggagtacgtcgtcctcaagaatgagatggcccgagccaatcactatgaggattacggtgactattggcgcggtgattatgaggtgaacggcgttgatggttacgattatagccggggtcagctgatcgaagacgtggaacatacattcgaagaaatcaaaccactttatgagcatctccatgcatacgtccgggccaaactgatgaatgcctacccctcttatatatctcccattggctgtctgcccgcacatctactcggcgacatgtggggacgcttttggaccaacctttacagcctgacggtgccctttggtcaaaagcctaatatcgatgtaactgacgcaatggtggaccaggcttgggatgctcagcggatctttaaggaagcagagaagttctttgtgagcgtcgggctacccaatatgacgcaggggttttgggaaaattccatgctgacagaccctggaaatgtgcagaaggccgtttgtcacccgaccgcatgggacctcgggaagggcgacttccgcattcttatgtgcaccaaggtgacaatggatgacttcctgactgcgcatcacgagatgggccacattcaatatgacatggcgtacgctgcccaaccatttctgctccggaatggcgcaaatgagggtttccacgaggctgtcggcgagattatgagtctgtctgcggcgactcccaagcacctaaagtcaatcgggttgcttagtccagactttcaggaggacaacgagacggagatcaactttctactcaaacaggcccttacaatcgtggggaccttgccgttcacatatatgctggaaaaatggcggtggatggtgttcaaaggcgagattcccaaggatcagtggatgaagaagtggtgggagatgaagagagagatcgtgggtgtcgtcgagcccgttccacacgacgagacctactgcgatccggcttccctgtttcacgtgtctaatgattactctttcatccgatactacacgcgcaccctataccagttccagtttcaggaggctctttgtcaggccgcaaaacatgaggggccactgcacaagtgtgacatcagcaattctacggaggcaggacagaagctgtttaacatgctaaggcttggtaagtctgagccctggacactcgctctggaaaacgtggtcggcgctaagaatatgaacgtgcgtcctcttctgaactacttcgagcccctgtttacctggttgaaggaccagaataagaactcatttgttggatggagtactgattggtcgccgtatgctgaccagtcaataaaggtcagaataagtcttaaatcggcgctgggcgacaaagcctacgagtggaatgacaacgagatgtatctctttaggtcatccgttgcgtacgcaatgagacaatactttttaaaagttaagaatcaaatgattttgtttggcgaagaggatgtccgcgtagcgaacctgaaaccgcgcatcagttttaatttttttgttacggcacccaaaaacgtgagtgatattatcccaaggacagaggtggaaaaagcaattaggatgagccgaagcagaatcaacgacgcttttagactaaacgataactctctagagtttcttggaatccagcccactctcgggccacctaatcagcctcccgtgtctatttggctgatcgttttcggtgttgtgatgggcgtgatcgttgtcggtatcgtcatccttatcttcaccggcatccgggatcggaaaaaaaaaaacaaagctcggtcaggcgagaacccatatgcttcaattgatatctcaaaaggcgagaataatccaggctttcagaataccgacgatgttcagactagtttt

SEQ ID NO: 209615 - DNA, 2415 bp, Artificial Sequence
  derived and/or modified sequence
atgtcctcttcctcatggttattgttatcactggttgcagtgaccgcagcacagtcgaccatcgaggaacaagcgaaaactttcttggataaatttaatcatgaggcagaggacctattctatcaatcgtctttagcatcttggaattataatacaaatattacagaagagaatgtgcaaaatatgaacaatgctggggataagtggtcggcatttttaaaagaacaaagtacattggcccaaatgtatccattgcaagagatccaaaaccttactgtcaagcttcagcttcaagccctacagcaaaacggctctagtgtactttcagaagataaatcgaaaagactgaatacgattttaaatactatgtccactatatacagtacggggaaggtgtgtaacccggataatccacaagaatgtctcctactggaaccaggcctaaatgaaattatggcaaactcgctcgattataacgaacgactgtgggcttgggaatcttggcgctctgaagtaggcaagcaattgcgacccttgtatgaagaatatgtagttctaaaaaatgagatggcacgggccaatcattatgaggactacggggattattggcgcggggattacgaagtaaacggtgttgacggatacgactactcccgaggacagctgattgaagatgttgaacatacttttgaagagatcaaaccattgtatgagcacttacatgcctatgtaagagcgaagctgatgaatgcttacccgtcctatatctctccaattggttgtcttcccgcacatctcctcggtgatatgtggggccggttttggactaacctttactctttaacagttccgtttggccaaaagccaaacattgacgttactgatgctatggttgaccaagcgtgggacgcgcaaagaattttcaaagaggctgaaaagttttttgttagtgtgggtcttccaaacatgactcagggattctgggagaactctatgctcactgatccaggaaacgtgcaaaaggctgtttgtcatccgactgcatgggacttgggaaaaggtgattttagaattttgatgtgtactaaagtgaccatggacgacttcttaacagctcaccatgaaatgggccatattcagtatgatatggcatacgcagcgcagccatttcttttgcgaaacggagctaatgaaggatttcatgaagctgttggtgaaattatgtcactctctgcagccacccccaagcatctgaaatctattggacttttgagtccagacttccaagaagataatgaaacagaaattaattttttgctgaagcaagccttgacaatcgttggaacattaccatttacatatatgttagagaagtggcgatggatggttttcaagggagaaataccgaaagatcaatggatgaagaaatggtgggaaatgaaaagagagatcgttggagtcgtcgaaccggttccgcacgacgaaacatactgtgatccagcttctctttttcatgtatcaaacgactactcatttattagatactacacgagaactttgtaccaatttcaattccaagaagccctctgtcaagctgcaaagcatgaggggccgctccataagtgtgatatttcgaactcgactgaagcaggacaaaagcttttcaatatgttgcgccttggaaaatctgaaccatggacactggctctggagaatgttgttggagcaaagaatatgaatgtccggcctttgttaaactacttcgaaccactctttacttggctaaaggatcaaaataagaattcatttgttggatggagtacggattggtctccatatgcggaccaatcaatcaaagtccgaatttctttgaaaagtgctctaggagacaaagcttatgaatggaatgacaatgagatgtacctctttaggtcctcagtcgcatacgctatgagacaatacttccttaaagtcaaaaatcaaatgattctgtttggagaagaagatgtcagagttgctaacctgaaacccaggatttcttttaatttctttgtcaccgctccaaaaaatgtttccgacatcattccacgaactgaggtcgagaaagctatacgcatgagccgtagccgaatcaacgatgcatttagacttaacgataactctttagaattcttgggtattcagccaacactgggaccccctaaccagccaccggtctctatctggttaattgtctttggcgttgttatgggagttattgtggttgggatcgttatactgatttttacaggcattagggacagaaagaagaaaaataaggcccgtagtggcgagaatccgtatgcttcaattgacatctccaagggagaaaataatccgggatttcaaaataccgatgatgttcaaacatccttt

SEQ ID NO: 209616 - DNA, 2415 bp, Artificial Sequence
  derived and/or modified sequence
atgtccagcagctcgtggcttttgctgagccttgtcgctgttacagctgcgcagtccacaatagaagagcaagcaaagacatttctggacaaatttaatcatgaagctgaagatttgttttatcagtcatctcttgcaagttggaactacaacacaaatattactgaagaaaatgttcaaaatatgaataatgcaggtgataagtggagcgcttttcttaaagaacagtctaccttggcacagatgtatccattacaagagattcaaaatcttacagtgaaacttcagttacaggcattgcagcagaatggctcgtccgtacttagcgaagataaaagcaaacgcttaaacacgattctgaatacgatgtctactatctactcaacgggaaaagtttgcaatccagataatcctcaagagtgtctcctccttgaaccgggcctgaatgaaattatggccaatagcctggactacaatgagcgcctctgggcttgggaatcatggcgaagcgaagtcggtaaacaacttcgtcctctgtatgaagagtacgttgtccttaaaaatgaaatggcacgggccaaccattatgaagactacggagattattggcgcggggactacgaagtaaatggtgtagacggatatgactatagcagaggacagttaatcgaagacgtggaacatacctttgaagaaatcaaaccgctctatgaacatttgcatgcttacgtgcgggcgaagctcatgaatgcatatccgtcatacatatctccgatcggatgccttccagcacatcttttgggggatatgtggggacggttttggacaaacttatattcattaactgtaccgtttggacaaaaaccgaacatagatgtaacggatgcgatggttgatcaagcatgggatgcacaacggatctttaaagaagcggagaagttttttgtaagtgttggacttcctaacatgactcagggattttgggagaattcaatgttgacagatcccggtaacgtacaaaaagcggtttgccatccgacagcgtgggatttaggcaaaggggattttcgtatcctcatgtgtacgaaagtaaccatggatgattttctgacggctcatcatgaaatgggacacatccagtatgatatggcctacgcggcgcagccgtttctgctgcgcaatggagccaatgaaggctttcatgaagcggttggagagataatgagcctttctgccgccactccaaaacatctcaaatcaattgggcttttaagccccgattttcaggaagataatgaaactgagattaattttcttcttaaacaagcattaacgatcgtaggcacactcccttttacatatatgcttgaaaagtggagatggatggtatttaaaggagagattccgaaggatcagtggatgaaaaaatggtgggaaatgaaaagagaaatcgttggtgtcgtggaaccggtacctcatgacgaaacatactgcgatccggcaagtctctttcatgtgtccaacgactattcgttcatccggtattatacacgcacgctgtaccaatttcaatttcaagaagctttatgccaggcagccaaacatgaaggaccgttacataagtgtgacatctctaacagcacagaagctggacaaaaactttttaatatgttgcgccttggcaaatcggaaccatggacgctggctctcgaaaacgtagtcggtgcgaaaaacatgaacgtgcgcccgctacttaattactttgaaccacttttcacttggctgaaagatcaaaataagaactcatttgtgggctggtccacagactggagcccgtacgcagaccagagtataaaagttcgaatctcccttaagagcgctctcggtgataaggcttacgagtggaacgataacgaaatgtacctctttagatcctctgtagcctatgcaatgcggcaatactttttaaaggtcaaaaaccaaatgatactctttggagaagaggatgtgcgtgtcgcaaaccttaaaccgcgtatatcatttaatttttttgtaacggccccgaaaaatgtgtccgatatcattccacgtacagaggttgagaaagccatccgcatgagtcgctcacgtattaatgacgcctttcgtttgaacgataatagcctagagtttctgggaattcagcctactttgggcccgcctaaccagccgcccgtttccatttggctaattgtcttcggggtggtcatgggcgtgatcgttgttgggatcgttatcctaatctttacggggatccgggatcgcaaaaaaaagaataaggcaaggtcgggagagaacccttacgcgtcaatcgatatctcaaaaggtgagaacaatccgggcttccaaaatacagatgacgtgcaaacgtcattt

SEQ ID NO: 209617 - DNA, 2415 bp, Artificial Sequence
  derived and/or modified sequence
atgtcctcttcttcctggctgctgctgagtctcgtcgctgtgaccgcggctcagagcacaatcgaagagcaggccaagacttttctggacaagttcaatcacgaggccgaggacctgttctatcaatcctcactcgcctcctggaactataataccaatattacggaggagaatgtacaaaatatgaataatgcgggggataagtggtccgctttcctaaaggaacagtcgaccctggcccagatgtatcccctgcaggagattcagaacctcaccgtaaaactgcagttgcaagcgctgcagcagaatggtagctccgttctgtctgaggacaagtccaaacgcctaaatacaattctcaacaccatgtccacgatctactcaaccggaaaggtctgcaaccccgataaccctcaggagtgtctgctgctcgagcccgggctgaatgagatcatggcgaattctttggattataacgaacgtctctgggcctgggagtcttggcgcagtgaggtcggaaagcaactaaggcctttatacgaagagtacgtcgttttaaagaacgaaatggcaagggctaatcattacgaagactacggggattattggagaggagattatgaggtaaacggcgtagacggatatgattactctcggggccagctcatcgaagacgtcgagcacacctttgaggaaatcaaaccactatacgagcacctccatgcatacgtccgcgctaaattgatgaatgcatacccttcttacatcagtcctataggatgtctcccagcgcaccttctgggagatatgtgggggcgcttctggactaacttgtactcgcttaccgttcccttcggacaaaaacccaacatcgacgttacggacgctatggtcgaccaggcctgggacgctcaacggatctttaaggaggccgagaagttttttgtgtctgtgggtctaccaaatatgacgcaaggattctgggaaaattcaatgctgactgatccaggtaatgtccaaaaggccgtgtgtcatcctactgcctgggacctaggaaagggtgacttccgtattctgatgtgcacgaaggtgacaatggatgacttcctcactgctcatcacgagatgggtcatattcagtatgatatggcttatgccgctcaaccatttttacttcgcaatggagccaatgagggttttcatgaagccgtcggcgaaataatgtcactaagtgccgccactcccaaacacctaaagtccattggtctgctatcccctgattttcaggaggataatgagacagagatcaactttttgctaaagcaagccctgacgatagtcgggacattgccctttacctacatgctggagaagtggcgctggatggtgttcaaaggtgaaatcccaaaagatcagtggatgaagaagtggtgggagatgaagagagagatcgtgggagtggtggaaccagtcccgcacgatgagacgtattgcgaccccgccagtctcttccacgtgtccaacgattactccttcattagatattataccagaacactgtaccagtttcagtttcaggaggcactctgccaggccgcaaagcacgaaggtcccctgcataaatgcgatattagcaactccactgaagcaggacaaaagcttttcaacatgctaagattgggcaagtctgaaccgtggacactggccctggagaacgtagtcggagcaaagaatatgaacgttcggccactgctgaactattttgaacccctgttcacatggctcaaggatcagaataagaactccttcgtaggttggtctacggactggtccccctatgctgaccaatccataaaagtgagaatcagccttaagagcgcgctgggcgacaaagcatacgagtggaatgacaacgagatgtaccttttcagatcatccgtggcatacgcgatgcgccagtatttcctgaaagttaagaatcaaatgatactgttcggggaggaagatgtgcgagtagcgaatttgaagccacgcatcagcttcaatttcttcgtgacagccccaaagaacgtgagtgacattatcccgagaactgaagttgaaaaggccatcagaatgtcaaggagcaggattaacgacgccttccgcctaaatgataactccctggagtttctcgggattcaacccactctgggacccccaaatcagcccccagtttccatctggcttatcgtcttcggggttgtgatgggggtgatagttgttgggatagtaatactgatctttacaggtattagagaccgcaaaaagaagaataaagccaggtcgggtgagaatccttatgcatctattgacatctccaagggagagaataacccgggcttccagaacaccgacgacgtccagacttcgttc

SEQ ID NO: 209618 - DNA, 2415 bp, Artificial Sequence
  derived and/or modified sequence
atgtcttcttcctcgtggctgctcctgtcacttgtggcagtgacagcggcgcagagcactatcgaggaacaggctaagacctttctcgacaaattcaaccatgaggccgaggatctgttctatcagagcagcctagcgtcctggaattacaacacaaacatcacggaggagaacgtgcagaacatgaacaacgctggcgataagtggtccgcttttctgaaggagcagtctaccctcgcccagatgtaccctctgcaagagatccagaacctgacagttaaactccaactgcaggcccttcaacagaacggatcatctgtgttgagtgaggacaaaagtaagaggctcaatacgatcctcaacaccatgtcgactatctattctaccggcaaggtgtgtaaccctgacaatcctcaggagtgtctgttgcttgagcccggacttaatgagatcatggcaaacagtctggactacaatgaacggctctgggcctgggagtcatggagaagtgaggtgggcaagcagctgagaccgctgtacgaagagtacgtggtcctcaagaatgagatggctcgagcaaaccactacgaggactacggggactattggcggggggactacgaggtgaatggagtcgatggctatgactattctagaggacagctgattgaagatgtcgaacacacgtttgaggagattaaacccttgtacgaacacctgcatgcttacgtgcgcgcgaaactgatgaacgcataccctagctatattagcccgatcgggtgcctacctgcacatttactcggcgatatgtgggggcgattttggaccaacttgtattctctgacagttcccttcggacaaaagccaaatatcgacgtcacagacgcaatggttgaccaggcttgggacgcccagcgcattttcaaggaagccgagaagttttttgtaagcgtgggcctgcccaacatgacccaggggttctgggaaaattcaatgttgaccgaccccgggaatgtgcagaaggccgtctgccaccctactgcatgggatctgggtaagggggatttccggattctgatgtgcactaaagtgactatggacgacttcctgaccgcccatcacgagatggggcatatccaatacgatatggcgtatgcagctcaaccgtttttactgcgaaacggcgctaatgagggcttccatgaggctgtgggcgagattatgagtcttagtgctgctaccccgaagcacctgaagagcatcggcttgctcagtcccgactttcaggaagataatgagaccgaaatcaacttccttctgaagcaggccctcactatagtggggacgctccctttcacttacatgctggagaaatggcgttggatggtcttcaagggcgagatacctaaagatcagtggatgaagaaatggtgggaaatgaagagagagatcgtgggggtggtagaacctgttccacacgatgaaacatattgcgatccagccagcctttttcatgtatccaacgattacagcttcatcagatactacacgagaacgctgtaccagtttcagtttcaagaggccttatgtcaggcagctaagcatgagggacctttacacaaatgtgatatatcaaacagcactgaagcaggacagaagctgttcaatatgctgcgcctcgggaagtctgagccatggacgctggcccttgagaatgtcgtgggggccaaaaatatgaacgttaggccactactgaactatttcgaaccactcttcacgtggttgaaagatcagaataaaaactcatttgtgggctggtccactgattggtctccttacgcagatcagtccattaaggtccggattagtttaaagagtgctctgggtgataaggcttatgagtggaacgacaacgaaatgtacctattccggtcctcagtggcctatgctatgcgccagtacttcttgaaggtgaagaatcagatgattctttttggggaggaggatgtccgcgtggccaacttaaagccccggatcagcttcaatttctttgtgacagctccgaagaatgtgtccgacattattccacgcactgaagtggagaaggccattcgaatgagtagaagcaggatcaacgacgcattccgcctgaatgataattccctggagtttttgggcattcagcctaccctcgggccacccaatcagccacccgtctctatctggctcatcgtgtttggcgtggtcatgggagttatcgttgtgggcatcgtaatcctcatcttcaccgggatcagggaccggaagaaaaaaaataaggcccgttcaggcgagaatccatacgcgtccatcgatatttctaagggcgaaaacaatccagggtttcagaacacagacgatgtgcagaccagtttc

SEQ ID NO: 209619 - DNA, 2415 bp, Artificial Sequence
  derived and/or modified sequence
atgtcaagcagttcttggctgctgctctcccttgttgcggtgacggccgctcagagcactattgaagagcaggccaaaacgtttctcgataagtttaaccatgaagcggaagatcttttttaccagtcatccctggcatcttggaattataataccaacatcaccgaagaaaatgtccagaacatgaacaacgctggggataaatggtccgccttccttaaggaacagagcacgcttgcgcagatgtacccactccaggagatccaaaacctgactgtgaaactgcagctccaagctcttcaacagaacggaagcagcgttctgtctgaggataagtccaaacggctgaatacaattctaaacactatgtccacgatctactcaacaggaaaggtttgtaatcctgacaacccacaagagtgcttgctactggagccaggccttaatgaaatcatggccaactcattagactacaatgagcgcctgtgggcctgggagtcatggcgctctgaggtcggaaagcagctccgcccactatatgaggagtacgtggtgctgaagaacgaaatggccagggcaaaccactatgaggactatggagactactggaggggagattacgaggtgaacggcgtggacggctacgactattcgagaggacaactcattgaggatgtggagcacacatttgaggagattaaaccactatacgagcatcttcacgcctatgtgcgggcaaagctaatgaacgcctacccaagctacatttcccccatcggttgtctccctgcccacctcctgggtgacatgtggggacgattttggacaaacctatatagcctgacggtgccgttcgggcagaaacctaatatcgatgtaacagacgcaatggtggaccaggcatgggacgcacagaggatcttcaaggaagccgagaaatttttcgtttcagtgggcctgccgaatatgacacagggattctgggagaactctatgctcacagatccagggaacgtacaaaaagcggtctgccaccccaccgcctgggacctggggaagggagactttaggattcttatgtgcactaaggtgaccatggacgacttcctgaccgctcaccacgagatgggacacattcagtatgatatggcctacgccgcgcagccatttctgctgcggaatggggcgaatgagggcttccacgaggccgtgggggagatcatgtccctcagcgccgcaacaccaaagcacctgaagtccataggactgctctcgccagacttccaggaagataatgaaactgagataaactttttgttgaagcaggctctgacgatcgtcggaaccttaccatttacctatatgctggagaaatggaggtggatggtgttcaagggcgagattccgaaggatcagtggatgaaaaaatggtgggagatgaaacgggagatcgtcggggtggtggagcctgtgccacatgatgaaacctactgtgatccagcgagcctgttccacgtgtcaaacgattatagcttcattagatattacactcgaaccctgtaccagttccaatttcaggaagccctgtgtcaagctgccaagcatgagggccctttacataagtgtgacatttccaatagtacagaggccggacagaaactgtttaatatgctccggctagggaaatccgagccctggaccctggctctagaaaacgtagttggcgccaagaacatgaacgtgaggccactgctgaattatttcgagcccctgtttacttggctgaaagaccagaacaaaaactcatttgtcggatggagtacagactggtccccgtacgctgatcaaagcatcaaggttcggatctcgctgaaatcggcccttggggataaggcctatgaatggaatgataacgagatgtatttgtttcggtcatctgtggcttatgcaatgagacagtacttcctgaaagtcaagaatcagatgatcttgtttggagaagaagatgttagagttgcaaatctgaaacccagaatctcttttaattttttcgttacagcaccaaagaatgtgagcgatatcatccccagaacagaagtcgagaaagccataaggatgagccgctcccgcattaatgacgcctttagactcaacgataactcgctagaatttctcggcatccagcctactttgggtccacccaaccagccaccagtgagcatctggctgattgtgtttggagtggtgatgggagttattgtcgtgggtatagtgatcctgatctttaccggcatccgagacaggaagaagaagaacaaggccaggtctggggagaacccttatgctagcatagatatttccaagggggaaaacaacccaggtttccagaacaccgacgacgttcaaacatctttc

SEQ ID NO: 209620 - DNA, 2415 bp, Artificial Sequence
  derived and/or modified sequence
atgagcagctcaagctggctgcttctgagccttgtggcagtgaccgcagcgcaatcgaccatagaggaacaagctaaaacctttctggataagtttaaccatgaagctgaagatctcttctaccaatcgtctctggcaagctggaactacaataccaacataaccgaagagaacgtgcagaatatgaataacgctggcgataagtggagcgcatttcttaaggaacaatcaactcttgcccagatgtacccactccaggagatccaaaacctcaccgtgaagttgcaattgcaggcactgcagcaaaacggatcatcggtgctttcggaagataagtccaagagacttaataccattctcaacactatgtcgactatttactccactggtaaggtgtgtaacccggacaatcctcaggaatgtctgcttcttgagcccgggctgaacgagattatggcaaactctttggattacaacgaacgactgtgggcatgggagtcgtggcgctccgaggtggggaagcaacttcgtccgctctatgaggagtacgtggtcctgaagaacgaaatggcacgggcaaaccactacgaagattacggagattattggagaggggattacgaagtgaatggagttgacggatacgactacagccgtggacaattgatcgaagatgttgaacacacctttgaagaaatcaagcctctctacgagcaccttcatgcttatgtgcgcgccaaacttatgaacgcatacccgtcgtacatcagccctattggttgtctgcctgcacacctgcttggagatatgtggggcaggttttggactaacctgtactcccttacggtgccatttggacaaaaaccgaatattgatgttaccgacgcaatggtcgatcaggcgtgggacgcccaaagaatattcaaggaggcagagaagtttttcgtgagcgtcggactccccaatatgactcagggcttttgggaaaacagcatgcttacggacccaggcaatgtgcaaaaggcagtgtgccacccaactgcatgggatcttggaaagggagacttcaggattctgatgtgcaccaaggtgaccatggatgacttcttgacggcacatcacgaaatgggccatatacagtacgatatggcttacgccgcgcagccttttctgctccgcaacggtgcaaacgaaggttttcatgaagccgtcggagagattatgtcactttcagccgccacccctaagcacctcaagtcgattggactgctttcgccggattttcaggaggataacgaaaccgagattaactttcttttgaagcaagcccttactattgtgggaaccttgccatttacctacatgctggaaaagtggaggtggatggtgttcaagggtgaaattcccaaggatcaatggatgaaaaagtggtgggagatgaagcgcgaaatagtgggagtggtcgaacctgtgcctcatgatgaaacctactgtgacccagcgtcacttttccatgtgtcaaacgattactcgtttattcggtactacactagaactctgtaccagtttcaatttcaagaggccctgtgccaggctgcgaagcatgaaggaccccttcataagtgtgacatctcgaattccactgaagcaggacagaaacttttcaatatgcttagacttgggaagagcgagccgtggactctggcactggaaaatgtggtgggtgcaaaaaacatgaacgtacgaccactgcttaactactttgagccgctttttacttggcttaaagatcaaaacaaaaactcgtttgtgggttggagcaccgattggtccccatacgcagaccagtccattaaagtcaggatatcacttaaatcagcacttggggataaggcgtacgaatggaacgacaatgaaatgtatctgtttagaagctcagtggcatacgcaatgcggcagtacttcctgaaagtgaagaatcagatgatcttgtttggggaggaagatgtcagagttgcaaacctgaagcctaggatttcatttaacttttttgtcaccgcgccgaaaaacgtgtcggatatcatacccagaacggaagtggaaaaggctatccgcatgtcgcgcagtcggatcaacgacgcctttagattgaatgataactcgcttgagttccttgggattcaaccaacccttggtccccctaaccaaccacctgtgtccatttggcttattgtctttggggtggtgatgggggtgattgtggtgggtattgtgatcctgatcttcactgggatccgggatcgcaagaaaaagaacaaggcgaggtcaggagagaatccttatgcaagcatcgatatcagcaaaggcgagaacaatccgggttttcaaaatactgatgatgtccagactagcttt

SEQ ID NO: 209621 - DNA, 2415 bp, Artificial Sequence
  derived and/or modified sequence
atgtctagtagctcctggttgctgttgagtctcgtggctgtgaccgccgcccagtctactatcgaggagcaagctaaaacttttttggataagttcaaccatgaggccgaggatctgttttatcagagctctttagcgtcctggaactataacactaacatcactgaggaaaacgttcagaatatgaacaatgcaggggataagtggtccgctttcttaaaggaacaaagcactttagctcagatgtacccgttacaggagatacagaaccttaccgttaagctccagctccaggccctacaacagaatggctcttccgtcctgtcagaagacaaaagcaagaggcttaataccattctgaacactatgagtaccatatattccacaggcaaggtctgcaaccctgataacccccaggaatgtctgctcttggagcctggactgaatgagataatggctaattcccttgactacaacgagaggctgtgggcatgggagagctggcgatccgaagttgggaaacagctgaggcccctgtatgaggagtacgtcgtgctgaagaatgagatggcacgagccaaccactatgaggattacggggactactggagaggggactatgaagtcaacggagtggacgggtacgattattcccgagggcaactgattgaagatgtggagcatacctttgaagagatcaagccactttacgagcacttgcatgcatacgtgcgcgccaaattgatgaacgcctacccttcctacatctcacccatcgggtgcctgcccgcccacctactgggagacatgtggggcagattttggactaacctgtactctctcacggtcccatttggtcaaaagcctaacatcgatgtgactgacgccatggtggaccaggcctgggacgcacaaagaatctttaaagaggccgagaaattcttcgtgagcgttggtttaccaaacatgacccagggattttgggagaatagcatgctcacagacccaggtaacgtccagaaggccgtgtgtcatccgaccgcatgggacctaggaaagggagactttaggatactgatgtgtaccaaggttactatggacgacttcctcacagcacatcacgagatgggacatatccagtatgacatggcgtatgccgcgcagccgtttctcctccggaacggggctaacgaggggttccatgaagccgtaggcgaaatcatgagcctgtctgccgccacacctaagcaccttaagtctataggcctcttgtcgccggacttccaggaggacaacgaaacagaaatcaactttctgctgaagcaggcgctaaccattgttggaactctgccctttacatatatgctagagaagtggcgatggatggtgttcaagggagagattcccaaagaccagtggatgaagaagtggtgggagatgaagcgcgagatcgtgggggtcgtcgagcccgtgccacacgacgaaacgtactgtgacccagcctcactctttcacgtcagcaatgattactcattcatccggtactatacccgcacgctctaccaattccagttccaggaagcgctctgccaagccgctaagcacgagggaccactccataagtgcgacatatctaattcgactgaggcaggacagaagttgtttaacatgctgaggctgggaaaaagcgagccatggacgcttgctttggagaacgttgtgggcgctaagaacatgaacgtgcgccccctgttaaactacttcgaacccctgttcacgtggttgaaggaccagaataagaattcctttgtcggatggtctaccgactggtctccatacgccgaccagtccatcaaagtccgaatctcccttaaaagcgcactgggggataaggcctatgaatggaacgacaatgagatgtacctgttcaggtccagcgtggcttacgccatgagacaatactttttgaaggtgaaaaaccagatgatcctgtttggcgaggaagatgttcgagtggctaatttaaagccccgaataagtttcaatttctttgtcacggcaccaaaaaatgtgtcagacattatccccaggacagaggtcgaaaaggctatccggatgagtcggagccggatcaatgatgctttcagactgaatgacaacagcctagaattcctgggaattcagccaacgctgggcccacccaaccaacctccggttagcatttggcttatagtattcggggtggtcatgggcgtgatcgttgtaggtattgtgatcctgatcttcaccggcatacgggacagaaagaagaaaaacaaggcacggtctggagagaatccttacgccagtatagacatctctaagggagaaaacaatcctgggtttcagaatacagatgacgttcagacaagcttc

SEQ ID NO: 209622 - DNA, 2415 bp, Artificial Sequence
  derived and/or modified sequence
atgagcagcagcagctggctgctgctctccctggttgctgtgaccgctgcacagagcactatcgaagaacaggccaagacttttttagataagtttaaccatgaggccgaagatctgttttaccagtccagcctggcgtcctggaactacaataccaacatcacagaagagaacgtgcaaaatatgaacaacgcaggagataaatggagcgctttcttaaaggagcagtccacactggctcagatgtacccgcttcaggaaattcaaaaccttacggttaagttgcaactgcaggcactgcagcagaacggctcctcagtattgagtgaggacaaatcaaaaaggcttaacacaatcctcaatacaatgagcaccatctactcaactggaaaagtgtgtaatcctgataacccacaggagtgcctgctgctggaaccaggtcttaatgaaatcatggccaactctctcgactataatgagaggctgtgggcctgggagtcctggaggagtgaggtcggtaagcagctcagaccactgtacgaggaatatgttgttttaaaaaacgaaatggctagagcaaaccactacgaggattatggagattactggcgaggggactacgaggtcaacggagtcgatgggtacgactattcacgcggacaactcattgaggatgtggagcatacttttgaagagatcaaacctctgtacgaacacttgcacgcatacgttagggcaaaactcatgaacgcttatcctagctacatcagtccgattggttgtttacccgcgcatctgctgggtgatatgtggggcaggttttggaccaatttgtacagcctcactgtgcccttcggccaaaaaccaaatatagatgtcaccgatgccatggtggatcaggcatgggacgctcagcgaatctttaaggaagcagagaaatttttcgtgtccgtaggcctgcctaacatgacacagggtttttgggaaaatagcatgctgactgatcccggcaatgtgcaaaaagctgtgtgccaccccactgcatgggaccttgggaaaggcgattttcgcattttaatgtgcactaaagttacaatggatgatttcctgaccgcccatcacgaaatgggacatatccaatacgatatggcctatgctgcgcaaccatttctgctgcggaatggcgcaaacgaggggttccacgaggctgtcggcgagataatgagtctgagtgcagcaactcctaaacacctgaaaagcattgggctcctctcaccggattttcaagaggataatgagaccgaaataaacttcctcctgaagcaagctctcacaattgtggggaccctaccctttacctacatgctggaaaagtggaggtggatggtgtttaaaggcgagatccctaaagatcaatggatgaagaagtggtgggaaatgaagcgcgaaatcgttggggtggtcgaacccgttccacacgacgaaacctactgcgatcccgcgtcactgttccatgtgagtaatgattacagctttatcagatactacacccggaccctttatcaattccagtttcaagaggccctttgccaggccgctaagcacgaaggccctttgcacaaatgtgatatcagcaacagtactgaggctggtcagaagttgttcaacatgctgaggctggggaagagtgaaccctggacccttgctctggaaaacgtggtgggagcaaagaacatgaatgtccgcccgctccttaactatttcgaacccctgtttacttggcttaaagatcagaataaaaactcatttgtcggctggtccaccgattggagcccatacgctgatcaatctatcaaagtgagaatttccctgaagtctgccctcggagacaaggcttacgaatggaacgataacgaaatgtatctgtttcgttctagcgtggcatacgcaatgagacagtactttctgaaggtgaagaatcaaatgatcttgttcggtgaggaagatgtaagagttgccaatttgaagcccagaatttcgtttaactttttcgtgaccgcccctaaaaacgtgagcgatatcattccaagaacagaggtagaaaaggctatacgcatgagtagatccagaattaacgacgcgttccgcctcaacgataacagtctggagtttcttggaatccagcctacactggggccccccaaccagcctcccgtgagcatctggctcatcgtctttggcgtggtgatgggcgtgatcgtggtggggattgtcatcctcatcttcacaggaataagagataggaagaaaaagaataaggccaggtccggggaaaacccgtacgcaagcattgacatcagtaagggggagaataacccaggctttcaaaacacagatgacgtgcaaactagcttt

SEQ ID NO: 209623 - DNA, 2415 bp, Artificial Sequence
  derived and/or modified sequence
atgtcctcgagctcctggttgcttctgtcgctggtcgcagtgactgcagcccaaagtactatcgaagaacaagccaagacctttctcgacaagttcaaccatgaggcagaggatctcttctaccaatcgtccctggcttcgtggaactacaacactaacattactgaggagaatgtgcagaacatgaataacgcgggagacaagtggtcagcgttcctgaaagaacaatccactctcgcacagatgtaccccctgcaagaaattcaaaaccttaccgtgaaactgcaactgcaggctctgcagcaaaacggatcgtccgtgctgtctgaagataaatccaagcgacttaacaccattctcaacactatgtcgaccatatactcgactggtaaggtgtgtaacccagataaccctcaagaatgtctcctgcttgagcccggcttgaatgagataatggcaaactcattggattacaacgagagactgtgggcgtgggagtcatggcggtcggaagtcggaaagcagctcagaccactgtacgaggaatacgtggtgcttaagaacgagatggcacgggcgaaccattacgaagattatggagattactggcgcggcgactacgaagtgaacggcgtcgacgggtacgactactcccgcggtcagcttatcgaggacgtggaacacacttttgaagagataaaacccctctacgaacatttgcatgcatacgtccgtgcaaaacttatgaacgcctacccaagctacatttcgcctattggatgtctcccagcacatctcttgggagatatgtggggacgcttttggaccaacctttactcgctcacggttccatttggccagaagccgaacatcgatgtgactgatgcaatggtcgatcaggcatgggatgcacaacgaattttcaaggaggccgagaagttttttgtgtcagtgggtctgcctaacatgacccaagggttttgggaaaactcaatgctgaccgatcccggaaacgtgcaaaaggcagtgtgtcatccaactgcatgggatctgggtaaaggtgattttagaatcctgatgtgtactaaggtcactatggatgattttcttacggcacaccacgagatgggccatatccagtacgatatggcctacgccgcacaaccttttctgcttagaaatggtgcaaacgagggctttcatgaggcagtgggagaaatcatgtccctctcggcagcgacgcctaaacatcttaaaagcattgggctcctttcccccgattttcaagaggataacgaaactgaaatcaacttcctccttaagcaggcactcactattgtgggaaccctgcctttcacttacatgctggaaaaatggcgctggatggtgttcaagggagagattccaaaggatcaatggatgaagaagtggtgggagatgaagcgagaaattgtcggagtggtggaaccggtgcctcatgatgaaacctactgcgatcctgcatccctttttcatgtatcaaacgattattcattcattaggtactacactcgcactctgtatcagttccaattccaagaggccctttgtcaagccgcaaaacatgagggacctcttcacaagtgcgacattagcaacagcaccgaggcaggtcagaagttgttcaacatgctccgtctgggaaagtcagagccgtggactcttgctctcgaaaatgtcgtcggagcgaagaacatgaacgtgaggcctctgcttaactattttgagccgcttttcacgtggttgaaggatcagaacaagaactcgtttgtggggtggtcgacggactggtccccctacgcggatcagtcaattaaggtgcggatatccctgaagtccgcactgggtgacaaggcatacgaatggaacgataatgagatgtaccttttccgctcgagcgtcgcgtacgcaatgcggcagtactttctgaaggtcaaaaatcaaatgattctgttcggtgaagaagatgttcgcgtggcgaacttgaagcctcggatatccttcaatttctttgttactgctccaaagaatgtgagcgacattattcctagaaccgaggtggagaaggcaattcggatgtcccggagccgtataaacgatgcattccgcctgaacgacaacagccttgagttccttggtattcaacctactctgggcccgcccaaccaaccacctgtctctatttggctgatcgtctttggcgtcgtgatgggagttattgtcgtcggaattgtcatactgatctttaccgggatcagagacagaaagaagaagaataaggccaggtccggagaaaatccttatgcttccatcgatatttccaagggggaaaacaatcctggattccaaaacactgacgacgtccagacttcattt

SEQ ID NO: 209624 - DNA, 2415 bp, Artificial Sequence
  derived and/or modified sequence
atgtcctcgtcctcctggctgcttcttagcctggttgcggtgactgcagcccaaagcaccatcgaagaacaggcaaagacttttctcgacaaattcaaccatgaggcagaagatctcttttaccagagctctcttgcttcatggaactacaacaccaatatcacggaggaaaacgtgcaaaacatgaataacgcaggcgacaagtggtctgcatttttgaaggagcaatcaactcttgcgcaaatgtacccactgcaggagatacagaatttgactgtgaagctgcaactgcaagcactccaacagaacggatcctcggtcctgtcggaagataaatcgaagcgccttaacacgattcttaacactatgagcaccatttactcaactggtaaggtgtgtaatcctgacaacccacaggaatgcctcctccttgaacccggactcaacgaaatcatggcaaacagccttgattacaacgaacgactctgggcatgggagtcgtggcgctccgaggtcggaaagcagctgcggcccctctacgaagaatacgtcgtgcttaagaacgaaatggcacgtgcaaaccactacgaagattacggagattactggagaggtgactacgaagtgaatggagtggatggttacgactactcgcgaggtcaactgatcgaggacgtcgaacacactttcgaggagataaagcctctctacgaacacctccatgcctacgtccgggcaaaacttatgaacgcgtatcctagctacatctcccctataggttgtctgccagcgcatcttctgggagatatgtggggacgcttctggacgaacctgtactcgcttactgtgccgtttggccagaaaccaaacatcgacgtgactgatgccatggtcgatcaggcctgggatgcacagcgtattttcaaggaagctgagaagttttttgtctcggtggggctgccaaacatgactcaaggtttctgggagaacagcatgctgacggaccctggcaatgtgcagaaggcggtatgtcaccctaccgcgtgggatctgggaaaaggtgactttagaatcctgatgtgtaccaaggtgaccatggacgatttccttaccgcacaccatgagatgggccacattcagtacgatatggcatacgccgcacagcccttcctgctgaggaacggtgcgaacgagggttttcatgaggccgtgggggagattatgtcgctttccgccgcaacgccaaaacatctgaagtcgattggacttctgtcgccagattttcaggaggataatgaaaccgagattaactttctccttaagcaagcactgaccattgtgggcactcttccattcacgtacatgctggaaaagtggagatggatggtgtttaaaggtgagatacctaaagatcagtggatgaagaagtggtgggaaatgaagagagaaatcgtcggagtcgtggaaccagtgcctcatgatgaaacgtactgtgatcccgcgagtctctttcatgtgagcaacgattactcattcataagatactacaccaggactctgtaccagttccagtttcaagaagcactgtgtcaagcagcgaagcacgaaggacccctccataagtgcgatataagcaactctaccgaagcaggacagaagctgtttaacatgctgcgactgggcaaaagcgaaccttggactctcgcacttgaaaacgtggtgggagcaaagaacatgaatgtgcgccccctgctgaactacttcgagcctctgttcacctggctgaaggatcaaaacaagaactcgtttgtgggctggtccactgattggtccccgtatgcagatcaatcgatcaaggtgcggatttccctgaaatcagccctgggtgataaggcttacgagtggaacgataatgaaatgtacctgttcagatcatctgtggcctacgctatgagacaatacttccttaaagtcaagaatcagatgattcttttcggtgaggaggacgtgagagtcgcaaacctgaagccacggatttcgtttaacttttttgtcaccgcacccaagaacgtcagcgatatcattccgcgcaccgaggtcgaaaaggcaatccgtatgtcaagaagcagaataaacgacgcctttcggctgaacgacaactctcttgaatttctgggtattcagcctaccctcggacccccgaatcaaccgcctgtgtcgatctggcttattgtgtttggagtcgtgatgggggttattgtcgtcggaattgtgatcctgatctttactggtatccgggatcgtaaaaagaagaataaagcccgcagcggtgagaacccttacgccagcattgatatctcgaaaggcgaaaacaatcctggtttccaaaacaccgatgatgtgcagacttcgttc

SEQ ID NO: 209625 - DNA, 2415 bp, Artificial Sequence
  derived and/or modified sequence
atgtctagttcaagctggctgctcctgtccctggtggcagtgaccgccgcccaatcgactatcgaagagcaggctaaaactttcctggataagttcaatcatgaggcagaagatctgttctaccaatccagcctggccagctggaattacaatacgaacatcacggaagaaaatgtgcagaacatgaataacgctggagacaaatggtcggcctttctgaaagaacaatctaccctggcgcagatgtacccgcttcaggaaatccagaatctgaccgtgaaactccagctccaagcgctgcaacaaaacggcagcagcgtcctctccgaggataagtcaaagcgtcttaacaccatcctgaacactatgtcgacgatctactcaaccgggaaagtctgcaacccggataatccgcaggaatgcctgctgctcgagccgggactgaatgagattatggccaactccctggactacaacgaaagactctgggcgtgggagtcttggaggtcggaagtaggtaagcagctgcgcccactgtacgaggaatacgtggtcctgaaaaatgaaatggcgagagcaaaccactacgaggactacggagattactggcggggagactacgaggtgaacggagtggatgggtacgactacagtagagggcagttgatcgaagatgtcgaacataccttcgaagagatcaagccgctctacgagcacttgcacgcctacgttcgggcgaagctcatgaacgcttacccgtcatacatcagcccgatcggttgcctgcctgcccacctgctcggggatatgtggggtcgcttttggactaacttgtactcgcttactgtgcctttcgggcagaagcccaatattgacgtcaccgacgccatggtcgatcaggcctgggacgcccagcgaatcttcaaggaggccgaaaagttcttcgtgtccgttggactccctaatatgacccagggcttctgggaaaactcgatgctcactgacccgggcaatgtccagaaagcggtttgtcaccctacggcctgggatttgggcaagggagatttcagaatcctgatgtgcactaaggtgaccatggacgactttttgaccgcacaccatgaaatggggcacattcaatacgatatggcatatgctgcacagccattcctgttgcgcaatggcgctaacgaaggttttcacgaagccgtcggcgagataatgtcactttcggcagctactccaaagcatttgaaatcgatcggactgctctcacccgacttccaggaagataacgaaactgagatcaatttcctgctgaaacaagctctcactatcgtgggaaccctcccgtttacttatatgctggaaaagtggcgctggatggtgttcaaaggagagatcccgaaggatcaatggatgaagaaatggtgggagatgaagcgcgaaatcgtgggagttgtggagccggtcccgcacgacgaaacctattgtgaccctgcttctctcttccatgtgtcaaatgattattcgttcatccgctactacacccggaccctgtaccaattccaattccaagaggcactctgccaggcagccaagcacgaaggaccgcttcataagtgcgatatctcgaactccacggaggcaggccagaagttgttcaatatgctgagacttggaaagagcgaaccgtggaccctggccttggaaaatgttgtcggagcgaagaatatgaacgtgcggcctcttctgaattactttgaaccactgttcacctggctcaaggatcaaaacaaaaacagcttcgtcggatggtctactgactggagcccgtacgcagaccagagcatcaaggtgcgcatctcgctgaagagcgccttgggagacaaggcatacgagtggaacgataatgagatgtatttgttccgcagcagcgtagcttacgcgatgagacagtacttcctgaaggtcaagaaccagatgatcctctttggagaagaagatgtgcgcgtggcaaacctgaagcctcggatctccttcaacttttttgttaccgccccaaagaatgtgtcagacatcatcccgcgcaccgaagtcgaaaaggcgatccgaatgtcccgctcgagaatcaacgacgccttcagattgaacgacaactcgctggaattcttgggcattcagccaaccctgggaccgccaaaccagcctcctgtctccatttggttgattgtgttcggagtggtgatgggtgtgatcgtcgtcggcatcgtcattctgatcttcactggaatcagggatcggaagaagaagaacaaggcgcggtccggagagaatccgtacgcttcgatcgatatctctaagggagagaacaacccagggttccagaacaccgatgacgtgcaaacctcgttc

SEQ ID NO: 209626 - DNA, 2415 bp, Artificial Sequence
  derived and/or modified sequence
atgagctccagctcgtggttgctgctgtctctcgtcgccgtgactgcagcgcagtccaccatcgaagagcaagcgaaaacgttcctggacaagttcaaccacgaagccgaggatctgttttaccagtccagcctggcgtcatggaattacaacaccaacatcacggaagagaatgtgcagaacatgaacaacgccggagataaatggtccgccttcctcaaagagcagtcaacccttgcacagatgtacccactgcaagaaattcagaacctcaccgtcaagctgcagttgcaagccctccagcaaaacggttcgtctgtcctgagcgaggacaagtcgaaacggttgaataccattttgaatactatgtccaccatctactcgaccgggaaggtgtgcaacccggacaatccccaagaatgtttgctcctcgagcctgggctgaatgaaatcatggccaattccctcgactataacgaaagactgtgggcatgggagtcgtggcgctcagaggtgggtaagcagctccggccactgtacgaggagtacgtcgtgctgaagaacgaaatggccagagctaaccactacgaggactacggagactactggcggggagactacgaggtgaacggcgtggacggatacgattacagccgcgggcagcttatcgaggatgtagaacatacctttgaggagatcaagcccctttacgagcatctccatgcctacgtgcgcgcaaagctgatgaacgcatacccttcgtacattagcccgatcggatgtctgcccgcccacttgctcggagatatgtggggacggttttggactaacctgtacagcttgactgtgccgttcgggcaaaaaccgaatatcgacgtgaccgatgcgatggtggaccaggcctgggacgcgcaacggatcttcaaggaagctgaaaagtttttcgtgtccgtcggactcccaaatatgacccaggggttctgggagaacagcatgctcaccgacccaggaaacgtccagaaggcagtgtgccatcctactgcgtgggacctgggaaaaggagacttccgtatcctgatgtgcacgaaagtgactatggatgatttcctgaccgcgcatcacgagatggggcacatccagtacgacatggcctacgccgcccaaccgtttctcctgcgaaacggtgcgaatgagggatttcacgaagctgtgggagagatcatgagcctgtcggcagcaacgccaaagcacctcaaatccattggcctgctttcgccagacttccaggaggataatgagactgagatcaacttcctgctcaaacaagcactgactatcgtcggaaccctccctttcacgtacatgctcgagaagtggagatggatggtgttcaaaggcgagatcccgaaggaccagtggatgaagaagtggtgggagatgaagagagagatcgtcggcgtggtggagcccgtcccacatgacgaaacctactgcgatccggcgtcgctcttccacgtgtcaaatgactactccttcatccgctactacacccggactctctaccagttccaattccaggaagctctgtgtcaagctgccaaacacgaaggacctctgcataaatgcgacattagcaactccactgaagccggacaaaagctcttcaacatgctgcggctggggaaatccgagccatggaccctggcgctggaaaatgtggtgggagcgaagaatatgaacgttagacccctgctcaattacttcgagccgctctttacttggttgaaggaccagaacaaaaacagcttcgtgggatggtcgaccgattggagcccgtacgcggatcagtcgatcaaggtccgcatctcgctgaagagcgccttgggagacaaggcctacgaatggaacgataacgaaatgtacttgttccgctcgagcgtggcttatgcaatgcgccagtacttccttaaggtgaaaaaccaaatgattctctttggagaggaggatgtcagagtcgccaacctgaaaccgagaatctcgttcaacttcttcgtcactgctcctaagaatgtgtcggacatcatcccacgcactgaggtggagaaggccattcgtatgtcgcgctcgcggatcaacgatgcatttcggctcaacgacaattccctggaattccttggaatccaaccaaccctcggacccccaaaccagccgccggtgtctatctggctgatcgtgttcggagtggtcatgggtgtgatcgtggtgggcatcgtcatcctgattttcaccggcatccgcgatagaaagaagaagaacaaagctagatcaggagagaatccgtacgcgagcatagatatatccaagggagaaaacaacccgggatttcagaataccgacgacgtgcagacgagcttt

SEQ ID NO: 209627 - DNA, 2415 bp, Artificial Sequence
  derived and/or modified sequence
atgtcatcttcttcatggctgcttctgtcactggtggcagtgaccgcggcacagtctactattgaagaacaggctaaaaccttcctggacaagtttaatcacgaagccgaggacctcttttaccagtcgagcctcgcatcctggaattacaacaccaatatcactgaagaaaatgtgcaaaacatgaataatgcaggcgataagtggtcagcatttcttaaagaacaatccaccctcgctcaaatgtaccccctgcaagagatccagaacttgactgtcaaacttcaactgcaggcgctgcagcagaatggcagctccgtgctgtcagaggacaaatcgaagcggctgaacactatcctcaacaccatgtccactatctactccactggaaaagtgtgcaatcccgataaccctcaagaatgtctcctgttggagcccggcttgaacgagataatggctaatagcctggattacaatgaaaggctgtgggcctgggaatcgtggaggtcagaagttgggaagcaacttcggcccctgtacgaagagtacgtagtgcttaagaacgagatggcacgcgccaatcactacgaggactacggcgactattggagaggtgattacgaagtgaatggtgtggacggatacgattacagccgcggtcaacttatagaggacgtcgagcatacctttgaagagatcaaacctctttacgaacatctccatgcatacgttcgcgcaaagctcatgaacgcatatccatcctacatttcccctattggatgcttgcccgctcacctgctgggcgatatgtggggccgcttctggactaatctctactcactgaccgtgccttttggtcagaagccaaacatcgacgtgactgacgcaatggtggatcaagcatgggatgcacaaaggattttcaaagaagcagaaaagttctttgtgtccgttggactgcctaacatgacgcaggggttctgggaaaactccatgctgacggaccccgggaacgtgcaaaaggcggtctgtcatcctaccgcttgggatttgggaaaaggtgactttaggattctgatgtgcaccaaggtcaccatggacgatttcttgaccgcccaccacgaaatgggacatattcaatacgacatggcctacgccgcgcagccttttttgcttcgtaatggtgcaaatgagggcttccatgaggcagtgggtgagattatgtccctgtccgcggcaacccctaagcatcttaagagcattggcttgctttccccggattttcaagaagataacgaaactgagataaacttcctgctcaagcaagcgcttactattgtgggaacgttgcctttcacgtacatgctggaaaagtggagatggatggtctttaaaggcgaaatcccgaaggatcagtggatgaagaagtggtgggagatgaagcgggagatagtgggtgtcgtggaaccagtgccccacgatgaaacctactgcgatccagccagcctgtttcatgtgagtaatgattacagctttattcgttactacactcgtaccctgtaccagtttcagtttcaagaagccctctgtcaggctgccaagcatgagggtccactccataagtgtgatatatcgaatagcactgaagcagggcagaagctcttcaatatgctgcgtctgggcaagtcggaaccttggacgctggctcttgagaatgtcgtgggcgccaaaaacatgaacgtgcggcctctgctgaattactttgagccgctctttacctggctgaaggatcagaataagaactcttttgtgggatggtcgaccgactggtcaccttacgccgaccagtccatcaaggtgagaatttcccttaagtccgcactgggggataaggcatacgagtggaacgataacgaaatgtacctgttcaggtcatccgtggcatacgcaatgcgccagtactttctcaaagtgaagaatcaaatgatcctgtttggagaagaggacgtcagagtggcaaatcttaagccaagaatttcatttaactttttcgtcaccgccccaaagaatgtttcggacataatcccgcgaaccgaggtggagaaagcaatccgaatgtcgcgctcacggattaatgatgctttccgcctgaacgataattcgttggagttccttggaatccaaccaacccttggacctcccaaccagcctccagtcagcatttggctcatcgtgtttggtgtcgttatgggagtgattgttgtgggaattgtgatcttgatctttactggcattcgggatcgcaagaaaaagaacaaggctcgatcgggagaaaatccatacgcatcgattgatatttccaagggagaaaacaaccccggatttcagaatacggatgacgttcagacttcgttc

SEQ ID NO: 209628 - DNA, 2415 bp, Artificial Sequence
  derived and/or modified sequence
atgtcatcatctagctggttgctgctgtcactcgtcgccgtgactgcagcgcaaagcaccatagaggagcaggccaaaaccttccttgataagttcaatcacgaagctgaggatctcttctaccagtcttccctcgcctcttggaactataacacaaacataaccgaggaaaatgtccagaacatgaacaatgccggggataagtggtcagccttcctgaaagagcagtccacactggcccagatgtacccactacaagaaattcaaaacctgactgtgaagctacagctgcaagcattacagcaaaatggttccagcgtgctgtcagaggacaaatcaaaacgacttaacactattctgaacacgatgtcaactatttattccacgggcaaagtctgtaacccggataatcctcaggagtgtttgctgttggagcctggccttaacgagattatggcaaactccttagactataatgagcggctgtgggcgtgggagtcctggcggtctgaagtcggaaaacagttaagacccctgtatgaagagtatgtggtcttgaagaacgagatggctcgtgccaaccactacgaagattatggggattattggcgcggggactacgaagtaaacggtgtcgacggctacgattatagccgcggccagttgatcgaagatgtggagcacacttttgaggaaatcaaacccttgtatgagcatctgcacgcctatgtacgagcgaagttgatgaacgcttatccgtcctacatttctccaatcggctgtctaccagcgcatttgctgggagacatgtgggggcgattctggacaaatctgtattctctgacggtgccttttggacagaagccgaacatcgacgtaaccgatgcaatggttgatcaggcgtgggacgcgcagcgcattttcaaggaggcggaaaaattctttgtcagcgttggactgccaaacatgactcaggggttttgggaaaactccatgctgaccgatccgggaaacgtgcagaaggcagtttgccaccccacagcatgggatttgggaaagggcgatttccggatcctgatgtgtactaaggttacaatggacgattttctgacagcccaccacgagatgggacatattcagtacgacatggcctatgccgcccaacctttcttgcttagaaatggagctaatgaggggttccatgaggctgtgggggagatcatgtcactgtctgccgctacacccaagcacctaaaaagcattggactgctgagcccggattttcaggaagataatgaaacagagatcaattttctcctgaagcaggccttgaccatagttggcacgctccccttcacgtatatgcttgaaaaatggcggtggatggtctttaagggagagatacccaaagatcagtggatgaaaaagtggtgggagatgaagcgggagattgtgggagtggtcgagccggtgccacatgacgagacttattgcgaccccgcatctctctttcacgtgtctaacgactactctttcatacgatactacactcggactctgtatcagttccaatttcaggaggcactgtgccaggccgctaagcatgaagggcctctgcacaaatgcgatatttccaattccacggaggccggacaaaagttgtttaatatgctccgccttggaaagtctgagccctggacactcgccctggaaaacgtggttggtgctaagaatatgaatgtaagacctcttcttaactatttcgagcctctgttcacctggctgaaggaccagaataaaaacagctttgtcgggtggtcaaccgattggtccccttatgccgatcagagcattaaggtgcgcatctcgctaaaatccgcactgggggataaggcgtatgaatggaacgacaacgagatgtacctcttccgaagttccgtggcctacgccatgcggcaatactttctcaaggtaaaaaatcagatgatcctgttcggggaggaagacgtccgagtcgctaacctgaaaccacggatttcctttaatttcttcgtgacagcacccaaaaacgtctccgatataatccctcgtaccgaggtggaaaaggcgatccgaatgtcccggagtaggataaatgacgccttccgccttaatgataactctctcgaattcctcggtattcagccaacactggggccgcctaatcagcctcctgtgtcaatttggctcatcgtatttggtgtagtgatgggggtaatcgtcgttggtatcgtgatactcatctttacagggatcagggaccgtaaaaaaaagaacaaagccagatcaggcgaaaacccctacgcaagtattgacattagcaaaggcgaaaacaacccaggttttcaaaacacagatgacgtccagacatccttc

SEQ ID NO: 209629 - DNA, 2415 bp, Artificial Sequence
  derived and/or modified sequence
atgtcatcgtcgtcctggctgctgctgtcgctcgtcgccgtcaccgcagcccaatcgacgatcgaagaacaggctaagacttttctggataagtttaaccatgaagcagaagatttgttttaccagtctagcctggcctcgtggaactataacaccaacatcactgaggagaacgtgcaaaacatgaacaacgccggggacaagtggtccgcgttccttaaggagcaaagcacgctcgctcagatgtaccccctccaggagatccagaacctgactgtgaaactccagctccaggcgctgcagcagaacggttcgtccgtactctcagaagataaatcaaagcgtctcaatacgatccttaacactatgtcgacgatctactcaaccggcaaggtgtgtaaccctgataacccacaagaatgtctgctcctggaaccgggattgaacgaaatcatggcgaattccctggattacaacgaaagactttgggcgtgggagagctggcgcagcgaggtgggaaaacagctgcgcccgctgtacgaggaatacgtggtgctgaaaaacgaaatggcccgcgcgaaccactacgaggactacggagactactggcggggggactacgaagtcaatggcgtggacggatacgactactcaaggggccagctcatcgaagatgtcgaacataccttcgaagagataaagccgctctacgagcatttgcatgcctatgtccgggccaagctcatgaacgcatacccgtcctacatttcaccgatcggatgccttccggcgcacctgctgggagacatgtggggacggttttggactaacctctattccctgaccgtcccattcgggcaaaagcctaacatcgatgtgaccgacgcaatggttgaccaagcctgggacgctcagaggatcttcaaggaggccgagaaattctttgtctccgtgggactgcctaacatgactcaaggattctgggaaaactcgatgctcactgaccctggaaacgtgcagaaagcggtgtgccatcccaccgcctgggacctgggaaaaggcgatttccgaatcctgatgtgcaccaaggtcacgatggacgactttctcactgcacatcacgagatgggtcatatccagtacgacatggcatacgcggcccaaccattcctcctcagaaacggcgcaaacgaagggttccacgaagccgtgggcgaaatcatgtccttgtccgctgcaaccccgaagcatctgaagtccatcggcctgctgtccccggatttccaagaggataatgaaaccgaaatcaatttcctgctgaagcaggctttgactatcgtcggtactctcccgttcacttacatgctggaaaagtggcgatggatggtctttaagggagagattcccaaagatcagtggatgaaaaagtggtgggaaatgaagcgggaaatcgtgggcgtcgttgaaccagtgccgcacgacgaaacctattgtgacccggcgtcgctgttccacgtgtccaacgattactccttcatccgctactacaccagaactctttaccaattccaattccaggaagcgttgtgccaggcagccaagcacgagggaccccttcacaaatgcgacatctccaatagcactgaagctggccagaaattgttcaatatgcttcgcctcggaaagtcagaaccgtggacgctggcacttgagaacgtggtcggcgcgaagaatatgaatgtgcgccctctgctcaactacttcgaaccactctttacctggctgaaggatcagaacaagaactcctttgtggggtggtcaacggactggtccccgtacgccgaccagtccatcaaagtgaggatctcgctcaagtccgcgctcggagacaaggcttatgagtggaacgataacgaaatgtacctgtttcgctcgtcggtggcgtacgcgatgagacagtacttcctgaaggtcaaaaatcaaatgatcctgtttggcgaggaggacgtgcgcgtggcaaacctgaagccgcgcatcagttttaacttcttcgtgactgcgcccaagaacgtgtcagacattattcctaggaccgaagttgaaaaagcgatccgcatgtccagatcgcgaatcaacgatgcctttaggctcaatgacaacagccttgaattcctggggatccaaccgaccctgggcccaccaaaccagccgcccgtctccatctggctcatcgtctttggcgtggtgatgggcgtcatcgtcgtgggcatcgtgatactgattttcaccggtatccgcgacagaaagaagaagaacaaggctcggtccggagaaaacccatacgcatccatcgacatctctaaaggagaaaacaatcccggcttccagaatactgacgacgtgcagacctcgttt

SEQ ID NO: 209630 - DNA, 2415 bp, Artificial Sequence
  derived and/or modified sequence
atgtcctcatcaagctggctcctcctctcgctggtggcagtcactgcagcacagtccaccatcgaggagcaggccaaaacctttctggacaagttcaaccacgaagcggaagatctgttctatcaatcatccttggcatcgtggaattacaacactaatatcaccgaagagaacgtacagaacatgaacaatgcgggtgataagtggagcgcatttcttaaagaacagagcactttggctcagatgtaccctctccaggaaattcagaacctgaccgtgaagctgcaactgcaggcacttcagcaaaacggatcctcagtcctgtccgaggacaagtcgaagagattgaataccatcctgaataccatgtcaactatctactcaaccggaaaagtctgtaaccctgataatccgcaggaatgcctcctcctggaacctggattgaatgaaatcatggcaaattccctggattacaacgagagactgtgggcgtgggagtcatggcggtctgaagtgggcaagcagctccgccctctgtatgaggaatatgtcgtcctgaagaacgagatggctcgggccaaccactacgaagattatggcgattactggcgcggagattacgaggtgaacggcgtggacggttacgactacagccgcggacaattgatcgaggacgtcgagcacaccttcgaggaaatcaaaccactgtatgaacatttgcatgcatacgtccgcgcgaagctgatgaacgcataccctagctacatatccccgatcggatgcttgccggcgcacctcttgggagacatgtggggccgcttctggacgaatctgtacagccttactgtgccattcggccaaaaacctaacattgatgtgaccgacgctatggtggaccaggcttgggacgcacagcggatctttaaggaagccgaaaagttctttgtgtcggtgggcctgcccaacatgactcaaggattctgggagaacagtatgctgaccgaccccggcaacgtccaaaaggccgtctgtcatccaaccgcatgggatctggggaagggtgattttcgcatactgatgtgcacgaaggttactatggacgactttttgacggctcaccatgagatgggccacattcaatacgacatggcctacgccgcgcaaccgttcctgctccgtaacggcgcgaatgaagggttccatgaagcggttggagagataatgtcgctgtctgcagccaccccgaaacatctcaagagcatcggcctcctttcccctgatttccaggaggacaatgaaacggaaatcaatttcctcctgaagcaggcacttacgatcgtgggaactcttccgtttacctacatgctggaaaagtggcgctggatggtctttaaaggagaaatccctaaggaccagtggatgaagaaatggtgggagatgaaacgggagatcgtgggagtggtcgaaccggtgccacacgatgagacgtactgcgatccggcatcgctcttccacgtgagcaacgactacagcttcatccggtactacaccagaactctctaccaattccagtttcaggaagctctctgtcaagctgccaagcacgaaggaccgttgcacaagtgcgacatctcgaattcaaccgaggccggacagaagctgtttaacatgcttcggttgggcaaatctgaaccgtggactctggcgctcgaaaacgtggtcggtgccaaaaacatgaacgtgcggccgttgcttaactattttgagccattgttcacttggctcaaagatcaaaacaagaactccttcgtgggatggagcactgactggagcccatacgccgatcagtcgatcaaagtccggatcagcctgaagagtgccttgggcgacaaggcatacgaatggaatgacaacgaaatgtacttgttcagatcctccgtggcttacgccatgagacagtactttctgaaggtgaagaaccagatgatcttgttcggagaagaggatgtgagggtcgccaacctgaagccacgcatcagcttcaacttcttcgttactgcgcccaagaatgtgtcggacatcattccaagaaccgaggtggaaaaagcgatcaggatgagcaggtcgaggattaacgacgctttccgtctcaatgataattcactggaattcctgggtatccaacccactctcggtccgccgaatcaacccccggtgtccatctggctgatcgtctttggggtggtgatgggagttattgtcgtgggtatcgtcatcctgatcttcaccggcattcgcgatcgaaagaagaaaaacaaggccaggtccggagagaacccatacgcctccatcgacattagcaagggagagaataatccgggattccagaacactgatgacgtccaaacgtctttc

SEQ ID NO: 209631 - DNA, 2415 bp, Artificial Sequence
  derived and/or modified sequence
atgtcatcttctagttggttattactctctctggtggcagtgacagctgctcagtccacaatagaagaacaggcaaaaacatttttggacaaattcaatcacgaagccgaagatctcttttatcagtcttccttggcttcatggaattacaacacaaatatcacagaagaaaacgttcagaatatgaataatgctggggataagtggtccgctttccttaaagagcagagtactctggctcagatgtatcctttacaggaaatccagaatctcacagtaaaactccagcttcaggcccttcagcagaacggatcctcggtattatcagaagacaagagtaaaagacttaatactatactgaatactatgtccactatctactccactggaaaagtgtgcaatcccgataatcctcaggaatgtctgctgctcgagcccggactgaacgagatcatggctaattccttagattataatgaaaggctctgggcctgggaatcatggcgctccgaagttgggaagcagttacggcctttgtatgaggaatacgttgtcttgaaaaatgaaatggcaagggctaatcattatgaagattatggggattattggaggggggactatgaagttaacggggtagatgggtacgattattcacggggacaacttatcgaggatgttgaacatacattcgaagaaataaaacctctgtatgagcatttgcacgcttatgttagggcaaaactaatgaacgcctacccctcctacatatcgcccatcgggtgtctcccagcacatctgcttggggacatgtgggggcgtttctggacaaatctctactcgctcacggttccttttggacagaaaccaaacatcgatgtcactgacgccatggtagatcaggcctgggatgctcagaggatctttaaagaggccgaaaaattttttgtgtctgtggggcttcctaacatgactcagggattttgggaaaactctatgctcactgatcctgggaatgtccagaaagctgtgtgtcatcctacagcgtgggatcttggaaaaggagatttcagaattctaatgtgtactaaggtgacaatggatgattttctgacagctcatcatgaaatgggacatattcagtacgacatggcttacgccgctcaacccttcctacttcggaatggagctaacgaaggattccacgaggccgtgggagaaattatgagtctatctgcagcaactcccaagcatcttaaatccatcggactcttatctcctgactttcaagaagataacgaaactgagataaacttcttattaaaacaggccttaacaatagtggggactttgccttttacatatatgctcgaaaaatggcgctggatggtgtttaaaggggagatacctaaagatcagtggatgaaaaaatggtgggaaatgaaaagggaaattgtcggagtggtcgagcccgttccacacgatgaaacttattgtgaccctgcttcactgttccacgtttccaacgattattcgttcatcagatattacacgcgcactctgtatcagttccaattccaggaagctctgtgtcaggctgccaaacatgagggacctcttcataagtgtgatatttctaacagtacagaggctgggcagaaactcttcaacatgttgagattaggaaagagtgaaccctggacgttggccctagagaacgtagttggggctaaaaacatgaatgtaagaccattactgaactactttgaacctctcttcacttggctcaaagatcagaacaaaaactcttttgttggatggtctactgattggtccccttacgccgatcagtctatcaaagtcaggatctctctaaaatctgcccttggagataaagcatatgaatggaacgataatgaaatgtatctgtttcggtccagtgttgcctatgccatgaggcagtattttctgaaagtcaaaaatcagatgatactctttggggaagaggatgtgcgcgtggccaacctaaaaccacggatttcttttaatttctttgttacagcaccaaaaaacgtctcagatatcatcccacgaacagaagtcgaaaaagctataaggatgtccaggtcacgcatcaatgatgctttccgattaaacgataactcactcgaatttctagggatccagcctacattagggccgcccaatcagcctcccgtcagtatatggctcatagtattcggagtagtgatgggggtgatagtggtgggaatcgtcatcctgatattcacaggaatcagagatagaaaaaaaaaaaataaggcacggtcgggggaaaatccctacgcttctatagacatctccaaaggagaaaataacccaggattccagaatacagatgatgtgcagacatctttc

SEQ ID NO: 209632 - DNA, 2415 bp, Artificial Sequence
  derived and/or modified sequence
atgtccagctcctcatggttacttctttcattggtggccgtgaccgcagcccagtccaccatcgaggaacaagccaagacgtttctcgataaattcaaccacgaggccgaagatcttttttaccagtccagcctggctagctggaactacaacaccaacatcacagaggagaatgtgcagaatatgaacaatgcaggagacaaatggtctgcattcttgaaggaacagtcgactctagcgcagatgtacccacttcaggaaatccagaaccttaccgttaaattgcagcttcaggcgttgcagcaaaatgggagctcagtgctttctgaggacaagtctaaaaggctgaatacaatcctcaacaccatgtccacgatttactccacagggaaggtatgcaatccagataatcctcaggaatgcctgctgcttgagcccgggctaaatgaaatcatggcaaatagcctcgactataacgaacgtctctgggcttgggagagttggcgctccgaagtgggaaagcagctccggcccctatatgaggagtacgttgtgctcaagaacgagatggcccgcgctaatcactatgaggactacggcgactattggaggggcgactacgaggtaaacggggtggacggctacgattacagtagagggcagcttatcgaggatgtggaacatacattcgaagagataaaacctctgtacgagcacctacacgcatacgtgcgcgcaaagttgatgaacgcctatcccagctatatttcccctatcggctgtctgcccgctcatctgctcggagatatgtgggggcgcttctggaccaacctttactctctgaccgtgccgttcggtcagaagcccaacatagatgtgaccgatgccatggtcgaccaggcttgggacgcacaaagaatctttaaagaagcagagaagttcttcgtgtcagtgggtcttcctaacatgacacagggtttttgggagaacagcatgctgactgacccaggaaatgttcagaaagctgtgtgtcacccaactgcttgggaccttggcaagggagatttcagaattctgatgtgcaccaaggtcacgatggatgatttcctgaccgcacatcatgagatggggcatattcagtatgacatggcatacgccgctcaacccttccttttgcggaacggggctaatgagggcttccatgaggctgtgggtgagatcatgagtctgtctgcagccacaccaaagcacttaaaatcaattggactgctgtctcctgatttccaggaggacaatgagaccgaaattaatttcctactgaaacaggccttaactattgtgggaacacttcctttcacttatatgctggaaaaatggcgctggatggtgttcaagggagagatccccaaggaccagtggatgaaaaagtggtgggaaatgaagagggagatcgttggcgtggttgagccagttccacatgatgagacctattgcgatcccgcttctctgttccatgtgagcaatgattattcctttatacgttattatacacgaaccctgtatcagtttcagtttcaggaggccctctgtcaggcagctaagcatgagggacccctccacaagtgtgatataagcaattccactgaggcaggccaaaagctgttcaatatgttgcgtttggggaaaagtgaaccctggactcttgctttagagaatgttgtgggagcaaaaaatatgaacgttaggcctcttctaaattactttgaacccctcttcacttggctgaaggaccagaacaaaaacagttttgtgggctggagtaccgactggagcccctacgccgaccagagcataaaggtgcgcatctctcttaaatcagcactgggcgacaaagcctacgaatggaatgataatgagatgtatttgtttagatcttcggtcgcctatgccatgcgacagtacttcctcaaggttaaaaatcagatgatcctcttcggagaggaagatgtacgcgttgccaatctcaaaccgcgtatctcattcaacttctttgtgaccgctcctaaaaatgtgtctgatataatacctcgcacggaagtcgaaaaggctatccgcatgtcacgttcccgaatcaatgacgcatttagactaaacgacaattcacttgaattcctgggaatccagcccacactaggacctccaaaccagccccccgtctcaatctggctgattgttttcggcgttgttatgggcgtaatagtcgttggcattgtgatactgatcttcacggggatccgagacagaaaaaagaagaacaaggcacgctctggggaaaacccctacgcttccatcgatatctctaaaggggagaacaatccggggtttcagaatacagacgacgtccaaacatcattc

SEQ ID NO: 209633 - DNA, 2415 bp, Artificial Sequence
  derived and/or modified sequence
atgtcctcatcctcctggctgctgctttcactggttgccgtgactgctgcacaaagcaccatcgaggagcaagccaaaaccttcctggacaaatttaatcacgaagcagaggatttattctaccagtcttccctcgcctcctggaactacaacacgaatataaccgaggagaacgtgcagaacatgaataacgctggcgataagtggagcgcctttctgaaagaacagagcacgctggcgcaaatgtatccactgcaggaaatacagaacctcacagtaaagctacagctgcaggcgttgcaacagaatggttcttctgttttgagtgaggacaaaagtaagcgcctgaacactatcctgaacactatgagcacaatctactctactggaaaagtctgtaatcccgataatccacaagagtgcctcctcctcgagccaggcctcaatgagatcatggccaacagcctggattacaatgagcggctctgggcctgggagtcatggcgttcggaggttggcaagcaactcagaccactgtatgaggagtacgtggttctgaagaatgagatggccagggctaatcactacgaggattatggagactactggcgcggagattacgaagtgaacggcgtggatggctacgactactcccggggtcagctgatagaagatgttgagcacacgtttgaggagatcaagcccttgtacgagcatctgcacgcttacgtccgcgcgaagttaatgaatgcgtacccatcctatatctcccccataggatgtcttcccgcgcacctactaggagacatgtggggtagattttggacaaatctctactccctgaccgttcctttcggacagaaaccgaatatcgacgttactgacgctatggtggatcaagcctgggacgcccaacgcatttttaaggaagctgagaagttctttgtttctgtgggcctgcctaatatgacacagggattctgggaaaatagtatgctcacggatccgggaaatgtacagaaagcagtgtgtcatcccaccgcctgggatctaggtaaaggggattttcggatcctgatgtgcacaaaagtcaccatggatgattttctcaccgctcaccacgaaatgggacacattcagtacgacatggcctatgccgcccagccatttctgctccgtaatggcgcgaatgaaggatttcacgaggccgttggagagataatgtctctttccgccgccacaccgaagcatctgaaatcaatcggactgctgtctcccgatttccaggaggataatgaaactgagattaacttccttctgaaacaggccctcacaattgttggaaccctgccattcacatatatgctggagaaatggaggtggatggtgtttaagggggagatcccaaaggatcagtggatgaagaaatggtgggaaatgaagagagaaatcgtgggtgttgtagagcctgtgccccacgatgaaacctactgtgacccggccagcctattccacgtgagcaatgactacagtttcattcgttattataccagaaccctgtaccagttccagtttcaggaagccctgtgtcaggctgcaaagcacgagggtccattacacaagtgcgacatcagcaattctacagaagcaggtcagaagctctttaatatgcttcggctgggcaagtccgagccttggaccctcgcattggaaaatgtggtgggagcaaagaatatgaacgtccggccactactgaactactttgagcccctttttacgtggcttaaggaccagaataagaacagctttgtgggctggtcaaccgattggagcccatacgctgaccagagcattaaggtgcggataagcctaaagtcagctttaggtgataaagcttacgagtggaatgacaacgagatgtacttgttcaggtcgtccgttgcctatgcaatgagacagtacttcctgaaagttaagaaccaaatgatactctttggagaggaagacgtgcgggtcgctaatctgaagcccagaatatcttttaattttttcgtgacggcccccaaaaacgtgagcgacatcatccccagaaccgaggtggagaaagccatacgcatgtccaggtccaggatcaatgatgcctttagattgaatgataattcactggaatttcttggtattcagcccaccctcggtcccccaaaccagccaccagtctctatttggctgattgtttttggtgtggtcatgggggttattgtggtggggatcgtgattctgatattcacaggtatccgtgaccggaagaaaaaaaataaggcccgcagtggagaaaatccatacgctagcatcgatatctctaagggcgaaaacaatcctggttttcagaatactgatgatgtccagacatctttt

SEQ ID NO: 209634 - DNA, 2415 bp, Artificial Sequence
  derived and/or modified sequence
atgtcgtcgtcctcgtggctcctgctttcattggtcgcagtgaccgctgcacagtccacgattgaggaacaagcaaaaacgtttctggataagtttaaccacgaggccgaggacctgttctaccagagctcccttgcatcctggaattacaacaccaacattaccgaggaaaatgtgcagaatatgaataatgcgggagataagtggtccgcgtttcttaaggaacagagcacgctcgcacaaatgtaccctctgcaagagattcagaatctgactgtgaaactccagcttcaggctctgcagcagaatggttcaagcgtactgtccgaagataagtcgaagagactcaacactattctcaacactatgtcgactatatactcaactgggaaggtgtgtaatcctgataacccgcaggagtgcctgctgctcgaacctggacttaacgagattatggccaactcgcttgactacaacgaacgattgtgggcatgggaatcctggcgctccgaagtgggcaaacagctgcggcctttgtatgaagaatacgtggtgctgaagaacgaaatggcccgggcaaaccactatgaagattacggagattactggcggggtgattacgaagtgaacggtgtggacggttacgattacagccgaggtcaactgattgaggatgtggaacacactttcgaagagatcaaaccactgtacgaacatctccatgcctacgtgagggcgaagctcatgaacgcctacccatcctacatctccccaataggatgtttgcccgcacacctgcttggagatatgtggggaagattttggactaacctgtactcgctcaccgtccctttcgggcaaaagcccaacatagatgtcaccgacgcgatggtggatcaagcatgggatgcacaacgcatattcaaagaagccgaaaagttttttgtgtcagtgggccttcccaatatgactcaaggtttttgggaaaactcaatgctgaccgatccaggaaacgtccagaaagcggtctgccaccctactgcatgggaccttgggaagggtgatttcagaattctcatgtgtaccaaggtgactatggatgattttctgactgcacatcatgaaatgggtcacattcagtacgacatggcttacgccgcacaaccatttctccttcgaaacggggcaaacgaaggatttcatgaagcagtaggggaaatcatgtctctttcagccgcaactcctaagcacctcaagagcattggccttttgagccctgatttccaagaggataatgaaacggagatcaacttcctgctgaagcaggctctgacgatcgtcggtactcttccttttacttacatgctcgaaaagtggagatggatggttttcaagggagagattcctaaggaccagtggatgaagaaatggtgggaaatgaagagagaaattgtgggtgtggtcgagcctgtgccacatgatgaaacctactgcgatcctgcatcgctgttccacgtgtcaaacgactactcgtttattcgctactacaccagaaccctgtaccaattccagtttcaggaagcgctttgtcaagctgcaaagcatgaaggacctcttcacaagtgcgatatatcaaactcaactgaagccggacaaaaactgtttaacatgctgagactgggtaagtctgaaccatggaccctggcgcttgaaaacgtggtcggagccaagaatatgaacgtccggccactgctcaactacttcgaacctctttttacctggctgaaggaccaaaacaagaattcgtttgtgggatggtcgactgattggtccccttacgcagatcagagcatcaaggttcgcatttcacttaagtcggcccttggcgacaaggcgtacgaatggaacgacaacgaaatgtaccttttcaggtcatcggtggcctacgcaatgaggcaatactttctgaaggtgaaaaatcaaatgattcttttcggggaagaggacgtccgggtggctaacctgaagcctcgtattagctttaactttttcgtgaccgcccccaaaaacgtgtcggatatcatcccaagaaccgaagtggagaaggcaattagaatgagccggtcccgcatcaacgacgcttttcgccttaacgataatagcctggaatttctgggtatccagcccacccttgggcctccgaaccaaccgccggtgtcgatctggcttatcgttttcggagtcgtcatgggagtgatagtcgttggaattgtgatccttatcttcactggaattcgtgacagaaagaaaaagaacaaggccagatcgggcgaaaatccatacgcgtcaatcgacatctcgaaaggcgagaataaccccgggtttcagaataccgacgatgtgcaaacctccttt

SEQ ID NO: 209635 - DNA, 2415 bp, Artificial Sequence
  derived and/or modified sequence
atgagcagctcttcctggcttcttttgagtctggtggctgtgacagctgcccagtctacgatagaagagcaggccaaaactttcctggataagtttaaccacgaggctgaggatttgttctatcagtcctcgctggccagttggaattacaacaccaacattacagaagagaacgttcagaacatgaacaatgccggggataaatggagtgcgttcctaaaagagcaaagtacactcgcacagatgtaccctttgcaggagattcagaacttaacggttaagctacagctgcaagccctgcagcaaaacggcagttcagtattgtctgaagacaagagcaagagattgaacacaattctgaacaccatgtcaacaatttactcaactggcaaagtgtgtaaccctgacaacccgcaagagtgtctgttattggagcctggtctgaatgaaatcatggctaatagtctggactacaacgagcgcctgtgggcatgggaaagctggcgatctgaggtgggaaagcagctacggcccttatatgaggaatatgtggtattgaagaacgagatggccagggccaaccattatgaagattacggcgactactggagaggggactatgaggtaaacggggtagacggatatgattattctcgcggacagttgatcgaagacgtggagcacacgtttgaagagatcaaaccattatatgagcatctccacgcatacgttagggcaaaactgatgaatgcctacccgtcatacatatcccccattgggtgtttgcccgcccatttgctgggagatatgtgggggaggttctggaccaacctgtatagcctcactgtccctttcggtcagaaacccaatatagatgttacagacgcgatggtggaccaggcttgggatgcgcagcgcatatttaaggaggcagagaagttcttcgtatccgtggggttgcctaacatgacccaaggattctgggagaattctatgcttaccgaccctggcaatgtacagaaagcagtctgccatcccaccgcgtgggacctgggcaagggcgactttcgcattctgatgtgtactaaggtaaccatggatgactttcttaccgcccaccacgagatgggacatatccagtatgatatggcatacgctgcgcagcctttcctgctgcgaaatggcgcaaatgaaggattccacgaagcagtgggcgagattatgtcactgtctgctgctacacccaaacatctcaaatctatcggcctcttaagccccgattttcaggaagacaacgagactgagatcaattttcttctgaagcaagcattgaccatagttggcactctgccctttacatatatgctggagaagtggcgctggatggtcttcaaaggggagatacctaaagatcagtggatgaaaaaatggtgggagatgaaacgtgagatagtgggagtggttgagcccgtgccgcacgatgaaacgtactgcgacccggccagtctgtttcacgtttctaacgactatagcttcatccgctactacacccgaacattgtatcaattccagtttcaggaggctctttgccaggcggccaaacacgaagggcccctccataaatgcgacatttcaaacagtactgaggccggacaaaaactgtttaacatgctccggctgggaaagagcgaaccatggactttggcattggagaacgtggttggggctaaaaacatgaacgtgaggccgttgttgaattactttgaacctctcttcacctggctaaaagaccagaataagaattcatttgtgggatggagcaccgattggagcccctatgcggaccagtccatcaaggtcagaatctccctgaaaagtgcacttggagataaggcctatgagtggaacgacaacgaaatgtacctcttccgcagtagcgtggcatatgctatgcgacaatattttctcaaagtgaagaaccagatgattctttttggtgaggaggacgtgcgtgttgcgaatttaaagcccaggatttccttcaatttcttcgtcacagctccgaaaaacgtgtctgacatcatacctagaaccgaggtggagaaagcaatacggatgtcccgttcgcggattaatgatgcgtttcggctcaatgacaactccctggagtttttgggcatccagcccacgctggggcccccaaaccagccacccgtttcgatatggcttattgtttttggcgtggtgatgggcgtgattgtggtgggcatcgtgattctcatttttactgggatcagagacaggaagaagaagaataaggccaggagtggtgaaaacccctatgcctcgattgatatatcgaagggggagaataatcctggcttccagaacactgacgatgttcagactagcttt

SEQ ID NO: 209636 - DNA, 2415 bp, Artificial Sequence
  derived and/or modified sequence
atgagttcttcctcatggctcctcttatcactcgttgccgtaaccgccgctcaatccaccatcgaggagcaggcgaagacgttcctggacaagtttaatcacgaagccgaggacttgttttaccagagtagtttggcgtcatggaactacaacaccaacatcaccgaggagaatgtgcagaacatgaataatgctggggacaaatggagcgcttttctgaaggagcagtctacgttagcccagatgtatccactgcaggaaatccagaacctcacagtcaagttgcagttgcaggccctccagcaaaatggcagcagcgttctctctgaagataagtccaaaaggcttaatactatcctgaatactatgagcaccatctatagtacaggaaaggtctgcaacccagacaacccccaggagtgtctgctgttggaacctggattgaacgaaattatggcaaactctctggactacaacgagcgcttgtgggcatgggaaagttggcggtctgaggtaggtaagcaattacggcccttatacgaagaatacgtcgtgctgaagaacgagatggcgcgtgctaatcattacgaggactacggggattactggaggggggactatgaggttaacggcgtggacggttacgactactcacgggggcagctaatcgaggatgtcgagcatacttttgaggagattaagcccctttatgagcatcttcacgcctacgtgcgcgccaaactaatgaacgcttatccaagctacatcagccccatcggctgcctcccggcgcacctgttgggagacatgtggggtcggttttggacaaatctttactctctcaccgtgcctttcggccagaaaccaaacattgatgtgacggatgcaatggtggatcaggcttgggatgctcagagaatcttcaaggaggcagagaagttcttcgtcagtgtcgggctccccaacatgactcagggattctgggaaaactccatgctcaccgatcccggcaacgtccagaaggccgtgtgtcatcctacagcctgggacctggggaaaggcgatttccgcatcctcatgtgtaccaaggtcactatggatgacttccttactgcgcatcatgagatgggacacatccagtatgatatggcttacgccgctcaaccatttctgctcaggaatggggctaatgagggatttcacgaggctgtgggggaaattatgtctctgtcagccgccactccgaaacacctcaagtctatcggtctcttaagccctgatttccaagaagataacgagacagagattaattttctcctgaagcaggcactaacgattgttggcacactgccatttacatatatgctcgagaaatggagatggatggtctttaagggagagatcccaaaggaccagtggatgaaaaaatggtgggagatgaagcgggagatagtgggggtcgtagagccagtccctcatgatgagacttattgtgatcccgcttctcttttccatgtgtcgaacgactactcatttatccgttactacactcggacactgtaccaattccagttccaggaagcactgtgccaggcagcaaagcacgagggaccgctgcacaagtgcgacatttcgaattccacagaagctgggcagaaactctttaacatgttacgactcggcaaaagcgaaccctggacactggcattggagaacgtagtgggagctaagaatatgaatgttaggcctttgctcaattattttgagccgctgttcacttggctgaaagatcagaacaagaactctttcgtgggatggtcaacagactggagcccatacgctgatcagtcaattaaggtccgcatctcactcaaaagtgccttgggggacaaggcatacgaatggaatgacaacgagatgtacctgttccggtcctctgtcgcttacgcgatgcggcagtatttcctaaaggtcaaaaatcagatgatcctgttcggcgaagaagatgttcgggtggcaaacctgaaacctcggatcagttttaactttttcgtgacagcacctaaaaatgtctcagacatcatcccacgcactgaggtagagaaggctatcaggatgagccgctcacgaattaatgacgcctttagactcaatgataatagtctagaattcctggggattcaaccgacactcggaccgccgaatcaacctcccgtgtcaatttggttaatcgtctttggagtggtcatgggagttatcgtagtagggattgtgattcttatctttactggaatccgcgaccgtaagaaaaaaaataaggctcggtccggagaaaatccctacgcttctatcgacataagtaaaggagaaaataatcccggatttcagaacaccgatgatgtccagactagcttt

SEQ ID NO: 209637 - DNA, 2415 bp, Artificial Sequence
  derived and/or modified sequence
atgagcagtagctcctggctattgctgtccttagtggcagtgactgcggcccagagcaccatcgaggaacaggctaagactttcctcgacaaatttaatcacgaggctgaggatctattttatcagagctcacttgcttcttggaattataacacgaatattacagaagagaatgttcaaaatatgaataatgccggggataaatggtccgcttttttgaaagagcaatcgaccctcgcccagatgtatccgctccaggaaatccagaacctgactgtgaaattgcagctgcaagccctacaacagaacggaagttcagtattatcggaagataagagtaaaaggctcaacaccatcctaaataccatgagcaccatttattctacagggaaggtgtgtaacccagataacccccaggagtgccttctcctcgaaccaggcttgaacgagatcatggccaatagccttgactacaacgaaaggctgtgggcctgggagtcttggaggtcagaggtcggaaaacagctgcggccactttacgaggaatacgtggttttaaagaacgaaatggcccgggccaatcactacgaggactatggcgactattggcgtggagattacgaggtcaacggcgtggacggttatgactatagtcgtggacagctcatcgaggatgttgagcatacatttgaggagatcaaacccctctatgagcacctgcatgcatacgtgcgcgccaaactaatgaatgcctatccttcatatataagtccaataggatgtctgccagctcacctgttaggcgatatgtggggacggttttggactaacctgtattcgctcaccgtgccttttggccagaaaccaaatattgatgtcactgacgctatggtcgatcaggcttgggatgctcagagaattttcaaagaggcagaaaagttctttgtgagtgtcggcctgcctaatatgacgcaggggttctgggagaatagtatgctgactgacccgggaaacgttcagaaggccgtgtgtcatcccaccgcctgggatttaggtaagggggatttcaggatcttaatgtgcacgaaggtaactatggacgacttcttaacggcccaccacgagatggggcatatccagtacgacatggcctacgctgcacaaccttttctgctgagaaatggagccaacgagggctttcacgaggccgtgggggaaattatgtctctgtccgcggctacgcctaaacacctcaagtccattggtctgctaagccccgatttccaggaggataatgagacagagatcaatttcctgctaaagcaggctctgaccatagttggcacactaccctttacgtatatgttggaaaagtggcgatggatggtgtttaaaggcgagattcccaaagatcagtggatgaagaaatggtgggagatgaagcgggagattgtcggagtggttgagcctgttccacatgatgaaacatactgcgatcctgctagtctctttcacgtttccaatgactatagtttcatacgctactacactagaacactgtatcagtttcagttccaagaggccttgtgtcaggccgccaaacacgaaggacctctgcacaagtgcgacatctccaattcaacggaggcaggccagaagttgttcaatatgctaaggttagggaagagtgaaccttggacattagctctcgaaaatgtggttggtgcgaaaaacatgaacgtaaggccactgctcaactatttcgaacctttgtttacttggctcaaggatcagaacaagaactcttttgtgggttggtcaactgactggagcccgtatgcggaccagtcgataaaggtgcgcatcagcttgaagtccgcactgggtgacaaggcctatgagtggaacgacaatgagatgtacctgtttaggtcaagtgttgcatatgccatgaggcaatatttcctcaaagttaagaatcagatgatcctatttggggaggaggacgtgcgggtagctaatctgaagcccagaatttccttcaactttttcgtgacagctccaaaaaatgtgtcagacataatacccagaacagaggtggagaaggcgatccggatgagtaggtctcggatcaatgatgctttcagattgaatgacaacagcttggagtttcttggaattcagcctactttgggaccgccaaaccaacctccggtcagcatttggctcatcgttttcggggtagtgatgggcgttattgtcgtgggcatcgtcatcctgattttcacagggatcagggatcgcaaaaagaagaataaggcacgctccggcgagaacccatacgcctctatcgatataagcaagggggagaataaccccgggtttcagaacaccgatgatgtccagacatccttc

SEQ ID NO: 209638 - DNA, 2415 bp, Artificial Sequence
  derived and/or modified sequence
atgagttccagttcttggctcctgttgtccttagtcgccgtgacagcagcacagtctacaatagaagaacaagctaagaccttcttggataaatttaaccatgaggccgaagacctgttttaccagtcttctctggcttcctggaactacaataccaacataacagaagaaaacgtgcagaacatgaacaacgcgggagacaaatggtcagcgttcctgaaagagcagtcaactttagctcagatgtaccccctccaggagattcagaatttgaccgtgaagctgcagttacaggcacttcagcagaatgggtctagcgtcctgtcagaagacaaatctaagaggctcaacacaattttaaacacaatgtcaacaatctattcaaccggcaaagtctgcaatccagacaacccccaagagtgccttctcttggaacccggactgaatgagattatggccaacagtctggactataacgaaagactttgggcatgggaaagctggcggagtgaggtgggtaaacagttgcgacccctctatgaggagtacgttgtgctcaaaaacgaaatggcccgagccaaccactatgaggactacggcgactactggcgaggggattatgaggtgaatggtgtggacggctacgactactcccgcggacagctgatagaagacgtagagcacacctttgaggaaatcaaaccactttacgagcacttacacgcatatgttagggccaagcttatgaatgcttatccttcttatattagcccaatcgggtgtttgccagctcacctgcttggtgatatgtggggcaggttttggacaaacctgtattccctcaccgttcctttcggccaaaaacccaacattgatgttaccgacgccatggtcgaccaggcgtgggacgcccagcggatcttcaaagaagccgagaagttctttgtgtccgtgggtctccccaacatgacccaggggttttgggaaaactcaatgctgacggacccggggaatgtccagaaggccgtctgtcaccctacagcttgggatttaggaaagggagatttcaggatcttaatgtgtactaaggtcaccatggatgatttcctgacggcccatcatgagatgggacacatccagtatgatatggcatatgccgcgcagccttttctcctcagaaacggggccaacgagggattccatgaggcagtcggtgagattatgtcgctgagtgcagccacacctaaacaccttaagagtatcggtctgttgtcacccgacttccaggaggacaacgagaccgagataaacttcttactgaaacaggcgctaacaattgtaggcaccctgccctttacatacatgctcgagaagtggcgatggatggtttttaagggggagatccccaaggatcagtggatgaagaagtggtgggagatgaagcgagaaatcgtcggagtcgtagagcccgtgccccacgatgagacttactgcgatcctgcctccttattccatgtgagtaacgactactcctttataaggtactacacgcgaaccctctaccagttccagttccaagaggctctgtgccaggcagctaaacacgaaggtcccttgcataaatgtgacattagtaatagcaccgaagcaggacagaaactattcaacatgctccgactgggaaagtctgagccctggaccctcgccttggagaacgtggtgggagcaaagaacatgaatgtaagacctctgttgaactattttgagccgctgtttacgtggctgaaggatcagaataaaaactccttcgttgggtggtccaccgattggagtccgtacgcagaccaatctatcaaagtacgaattagcctaaagagcgctttgggggacaaggcatatgaatggaatgataatgaaatgtacttgttccgcagcagtgtggcgtacgccatgcgacagtatttcctgaaggttaagaatcagatgattctatttggcgaagaagacgtccgtgtagctaacctaaagcctaggatttctttcaattttttcgtcaccgcaccaaaaaatgtcagtgacatcatcccgcgaaccgaggttgaaaaggctatccgcatgagtaggtccaggataaacgacgccttccgccttaacgataactcgctggaattccttggaatacagccaactcttggtccccctaaccagcctcctgtgtctatctggctcattgtctttggggtggttatgggagtaatcgtcgtcgggatcgtcatcctgatttttacgggtatccgagaccgtaagaaaaaaaataaggccagatcaggggaaaatccctacgctagtatcgacattagtaagggagaaaataacccgggattccaaaacacagacgacgttcagacctcattt

SEQ ID NO: 209639 - DNA, 2415 bp, Artificial Sequence
  derived and/or modified sequence
atgtcgtcctcctcatggctgctcctgtccctcgtggcagtgaccgccgcccaatcgactatcgaagaacaagcaaagactttcctcgataagttcaaccatgaagcggaggaccttttctaccaatcgtcattggcctcctggaactacaacactaacatcactgaagaaaatgtgcagaatatgaataatgccggcgacaagtggtccgcgtttctgaaagaacaatcaaccctggcacaaatgtaccccctccaagagattcaaaaccttactgtgaagctccagctgcaagctctgcagcagaatggaagcagcgtgctctccgaagataagtcgaagcgactgaatactatccttaacactatgtccactatttactcaaccggtaaggtgtgcaacccagataaccctcaagaatgtctgctcctcgaacctggtcttaacgagattatggccaactcgcttgattacaatgaacggctttgggcatgggaaagctggcgttccgaagtcggaaaacaactgcgccctctctacgaagaatacgtggtgcttaagaacgagatggccagagcgaatcattacgaagattacggggactactggagaggtgattacgaggtgaacggggtggacggatatgactactctcgcggacagcttatagaagatgtggagcatacttttgaggagatcaagccactgtacgaacacctccatgcgtacgtgagagcaaaactgatgaatgcatatccttcgtacatttccccgattggttgcctgccagcacatctcttgggagatatgtggggccgattctggactaacctttactctctgaccgtgccgttcggccaaaagccaaacattgatgtgacggatgctatggtcgatcaagcctgggatgcacagcgcattttcaaagaggccgaaaagtttttcgtgtcggtgggcctgcctaatatgactcagggtttctgggaaaacagtatgctgaccgatccgggtaacgtacagaaagcggtctgccaccctaccgcctgggacctggggaagggagattttcggattctgatgtgtactaaggtgactatggatgactttctcactgcacaccatgaaatggggcacatccaatacgatatggcctacgcagcccaaccatttctccttcgcaacggagccaatgaaggatttcacgaggcggtgggcgagattatgtcactgtcagcagcaaccccaaagcatcttaagtctatcgggctgctctccccagactttcaagaagataatgaaaccgaaatcaattttctgctcaaacaagctctgactatcgtcgggaccctcccctttacctatatgcttgaaaagtggagatggatggtgtttaaaggagaaatacccaaggatcaatggatgaagaaatggtgggaaatgaaacgggagatcgtcggagtcgtggagcctgtcccacatgatgagacttactgtgacccggcatccctcttccatgtctccaatgattactcgttcattaggtactacaccagaaccctttaccaatttcagtttcaagaggccctgtgtcaagccgccaaacatgaaggtccgcttcacaagtgtgacatttccaactcaaccgaggcaggacagaaacttttcaatatgctgaggctgggaaagtcagagccttggaccctggcactggagaacgtggtcggcgctaaaaacatgaatgtccgccctctcctgaattactttgagccattgttcacgtggctgaaagatcagaacaaaaactcgtttgtgggttggtccacggactggtccccatatgctgaccagtccattaaggtgcgcatttcgctgaagtcagcactgggtgacaaggcatacgaatggaacgacaacgaaatgtacctcttcagatcctcggtggcgtacgcaatgcgtcagtactttcttaaagtcaagaaccaaatgatactgtttggtgaagaggacgtcagggtcgctaacctcaaacctcgaatctcctttaacttttttgtgactgctccgaagaatgtgtccgatatcatcccgaggaccgaagtggagaaggcaattagaatgtcgcggtcgaggattaacgatgcctttcggctgaacgataactccctcgagtttctgggaatacagccaaccctcggtcctcccaatcagcctccggtgtcgatttggctgatagtctttggagttgtcatgggagtcattgtggtgggtattgtcatcctgattttcactggaattcgcgaccgtaaaaagaaaaacaaagctcggagcggagagaacccttatgcctccatcgacatctcgaagggagaaaacaacccaggctttcagaacaccgatgatgtgcagacctccttc

SEQ ID NO: 209640 - DNA, 2415 bp, Artificial Sequence
  derived and/or modified sequence
atgagcagctcaagctggctgctcttgtctctggtggctgtgacagctgcacagagcacgatagaggagcaggccaagacctttttggataagtttaaccatgaagccgaagatctcttttatcagagctcactggctagctggaattacaacacgaacatcacagaggaaaatgtacagaacatgaataacgcgggtgacaaatggtctgccttccttaaggaacagtctaccttggcccagatgtaccccctgcaggaaatccaaaaccttaccgtgaagctgcagctccaggccctgcaacagaatggttccagcgtattgagtgaggataaatctaagagattgaacaccatccttaatacaatgtccacgatctacagcaccggtaaagtatgtaaccccgacaatccccaagagtgtctcctgttggagccgggcctgaacgagattatggctaatagcttggattacaatgaaaggctctgggcctgggaatcttggaggagcgaggtggggaagcagttgcggcctttgtacgaggagtatgtcgtacttaaaaatgagatggctagagctaatcattatgaggactatggagactattggcgcggggactatgaagtgaatggtgttgacggttacgactactcccgcgggcagctgatcgaggacgtggaacacacattcgaagaaatcaaacccctctacgagcacttgcatgcctatgtccgagccaaacttatgaacgcctatccttcctacatttcccccatcggttgtctgcccgcacatctcctgggcgatatgtgggggagattctggacaaacttgtatagcctgacagtacctttcggccagaaacctaatatcgatgttaccgatgccatggtggatcaggcatgggacgcccagaggatcttcaaggaagccgaaaaattcttcgttagcgtgggcctccctaacatgacccaggggttttgggagaactccatgctcacggaccctggcaacgttcagaaggctgtctgccatccaaccgcgtgggacttgggtaagggagatttcaggattctcatgtgcactaaagtgaccatggatgacttcctgacggcccaccatgagatgggccacatacagtatgacatggcctatgccgcgcagccattccttctgcgaaacggtgctaacgagggcttccatgaagccgtgggagagattatgtcactgtccgccgcgacaccgaagcacctgaagagcattggactgctttcccctgattttcaggaagacaacgagactgaaatcaacttcctgcttaagcaggccctgaccatagttggcacattgcctttcacatacatgcttgaaaaatggcgatggatggtctttaagggggagattcctaaagaccagtggatgaagaagtggtgggagatgaagagggaaatagtcggggtggtagaacccgtgccacacgacgaaacctactgcgaccctgcgtctttgtttcatgtaagcaacgactactcttttatcaggtattacacccggaccctgtaccagttccagtttcaggaagcgttgtgccaggcggccaaacacgaggggccactccacaagtgtgatatatccaattcaacagaagctggccagaaactgtttaatatgctgcggctgggaaagtctgaaccatggacactggcactggagaacgtcgtgggagctaagaatatgaacgtccggcccttgctgaactatttcgaaccattgtttacatggctcaaagatcaaaacaaaaactccttcgtcggctggtccacagattggtctccctacgcagatcagagcattaaggttagaattagtctcaagtccgcattgggtgataaggcctacgaatggaacgacaacgagatgtatctgttcagaagcagtgtcgcttatgcaatgcggcaatacttcttgaaggttaagaaccagatgattctcttcggtgaggaggacgtgcgcgttgccaatctgaaaccgagaatcagcttcaacttttttgtcacagccccaaaaaacgtctccgatattattcctaggacagaagtcgagaaagccattaggatgagccgcagtcgaattaacgacgcattccggctcaatgataacagcttggagttcctgggcatacagcctacgcttggaccgcccaatcagcctccagtatcaatctggctgatcgtctttggagtggttatgggcgtgattgtggttggaatcgttatcctcatatttacaggcatccgggatcgaaaaaagaagaataaggcacgcagcggagaaaacccttatgcttctatagacatatccaagggtgaaaataaccctgggttccagaacacagatgacgtgcagacctctttc

SEQ ID NO: 209641 - DNA, 2415 bp, Artificial Sequence
  derived and/or modified sequence
atgtcatcttcatcctggctgctgctgtcattggttgcagtcactgctgctcagtccaccatcgaagaacaagcgaaaacttttctcgacaagttcaaccacgaagcagaggacctgttttaccaaagctccctggcttcctggaattacaatacgaacatcactgaggaaaacgtgcagaacatgaacaacgcgggagacaaatggtcggccttcttgaaagaacagtcaactctcgctcagatgtaccctctccaggaaatccaaaacttgacggtgaagctccagctccaagcacttcagcaaaacggatcatcagtgctgtcggaggacaaatccaagagactcaacaccattcttaacaccatgtcaactatctactcaaccggtaaggtgtgcaacccggataatccacaggagtgtctcctgctcgagcctggactgaacgaaatcatggcgaacagccttgattacaacgagagactctgggcttgggagtcctggcgatcggaggtcggtaagcagcttagacccctgtacgaggagtatgtggtgctgaagaatgaaatggcacgcgctaaccattacgaggactacggcgactattggagaggcgattacgaagtcaacggagtggatggctatgattacagccgcggacagctgatcgaggacgtcgaacacactttcgaagaaatcaagcctctctacgaacacctgcacgcatacgtccgcgccaaactgatgaacgcgtacccgtcctacatctctcctatcggatgcctgccggcacatctgctcggagacatgtggggcagattctggaccaatttgtactccctcaccgtgcccttcggacagaaacccaatatcgacgttaccgacgccatggtcgatcaagcctgggatgcacagcgcatattcaaggaagccgagaaattcttcgtgagcgtggggcttccgaacatgactcaaggcttttgggaaaattccatgctgactgacccgggtaacgtgcagaaggcggtgtgtcatccaaccgcctgggatctgggaaagggcgacttccggatcctgatgtgtactaaagtcaccatggacgatttccttaccgcccaccacgaaatggggcatatccaatacgacatggcctatgccgcccagccgttcttgctccgcaacggcgccaacgagggctttcatgaagccgtgggggagatcatgtccctgtctgccgctaccccgaaacaccttaagagcatcggactgctgagcccagatttccaggaggataacgaaacggaaatcaacttcttgttgaagcaagccctcaccattgtcggaaccctcccgtttacttacatgctcgagaagtggcgctggatggtgttcaagggtgaaattccgaaagaccagtggatgaaaaagtggtgggagatgaagcgcgaaatcgtgggagtggtggagcccgtgccacacgatgaaacctactgcgatccggcgagcctctttcacgtgtctaacgactattcctttatccgatactacaccaggactctttaccagtttcagtttcaagaagcactgtgccaggcggctaagcacgaaggacccctccacaagtgtgacattagcaactccactgaggccggacagaaactctttaacatgctgaggctcggaaagtcagagccatggacccttgcactggagaacgtcgtgggagccaagaacatgaatgtgaggccgctgctcaactactttgaaccgctgtttacgtggctgaaggatcagaacaaaaactcgttcgttggctggtcgactgactggtcaccttacgcggaccagagcattaaggtgcgcatcagcctcaagagcgccctcggagacaaggcgtacgaatggaacgataacgaaatgtacctgttcagatcatccgtggcctacgcaatgcgacaatacttcctgaaggtgaagaaccagatgatcctcttcggagaggaagatgtgcgcgtggcgaacctgaagccgagaatctcctttaacttcttcgtcaccgccccgaaaaatgtatctgacatcattccacgcactgaggttgaaaaggccatcagaatgagcagaagccggattaacgacgcctttcgcctgaacgacaattcgttggagttcctcggcatccagcccaccctgggtccgccgaaccaacccccggtcagcatttggctgatcgtgttcggggtcgtgatgggggtgatcgtggtgggaattgtcatcctgatcttcaccggaatccgcgatcgcaaaaagaagaataaggcgcggtccggtgaaaatccctacgcaagcatagacatctccaagggagagaacaatccgggatttcaaaacactgacgacgtgcagacttcgttc

SEQ ID NO: 209642 - DNA, 2415 bp, Artificial Sequence
  derived and/or modified sequence
atgtcgtcatcgagctggctgcttcttagccttgtggcagtgacggccgcacagagcactatcgaggaacaggcaaagacttttctggataagttcaaccatgaagccgaagatcttttctaccaatcctcccttgcatcgtggaactacaataccaacattacggaagaaaatgtccagaacatgaataacgccggagacaagtggtcggcttttctgaaggagcagtcgaccctcgctcaaatgtatcctctccaggagatccaaaatctcaccgtgaagctgcagctgcaagcacttcagcaaaatggatcctcggtgctttcggaagataagtcaaagcgcttgaatacgatacttaacaccatgtcaaccatatactccacgggtaaggtgtgtaatccagataatccgcaagagtgcctgctgcttgaacctggattgaacgagataatggcaaactcactggattacaacgaacggctttgggcatgggaatcatggcgttcagaagtcggaaagcaactcagacccctgtacgaggaatacgtggtgctcaagaacgagatggcacgagccaaccattacgaagattacggcgattactggcgcggagactacgaagttaatggagtggacggttacgattacagccgggggcaactgatagaagatgtagaacacactttcgaagagattaagccgctctatgaacacttgcatgcatacgtccgggcaaagctcatgaacgcgtacccgtcctacatctccccgattggctgccttcctgcacacctgcttggtgatatgtggggccgcttttggaccaatctgtactccctgaccgttccatttggacagaagcctaacatcgacgtgaccgacgctatggtggaccaagcgtgggatgcccaacgtatctttaaggaagcggagaaattctttgtaagcgtgggactccctaatatgactcaagggttttgggagaattccatgctcaccgacccgggtaacgtccagaaggcagtgtgtcacccaaccgcgtgggatctcggcaagggagactttcgaatactgatgtgtactaaagtgaccatggatgacttccttacggcccaccacgaaatgggacatattcagtacgatatggcatacgcagcacaaccgtttcttcttcggaatggggccaacgaaggattccatgaggcagtcggagagattatgtcgctctcagcagcgacgccaaaacacttgaagtcaattggcctgctgtcgcctgactttcaagaggataacgagactgagatcaactttcttcttaagcaggcgctcactattgtgggtaccctgccattcacctacatgcttgagaagtggagatggatggtgtttaaaggagagatcccaaaagatcaatggatgaagaagtggtgggagatgaaaagagaaattgtcggggtggtggaacccgtgccccatgatgaaacctactgtgacccagcctccctgtttcacgtgtccaacgattacagctttattcgatactacactcgtaccctgtaccaattccaattccaggaagccctttgtcaagcagccaagcatgaagggcctcttcacaagtgcgacattagcaacagcactgaggcaggtcaaaagctcttcaacatgcttcgccttgggaaatccgaaccctggactcttgcattggaaaacgtcgtcggggcgaagaatatgaacgtgcggcctctgcttaactactttgaacccctctttacttggttgaaagaccagaacaaaaactcttttgttggttggtcgaccgattggtccccttatgccgatcaatcaatcaaagtcagaatttccctgaaatctgctttgggcgacaaggcatacgaatggaatgacaacgaaatgtacctctttagaagctccgtggcatacgcaatgaggcaatactttcttaaggtcaaaaatcaaatgattctgtttggtgaagaggatgtgcgcgtggcaaacctgaagccacgtatttcgtttaactttttcgtgaccgccccgaagaacgtgtcggatatcatcccacggactgaagtggagaaggccattcgtatgtcgcgtagccgcattaacgatgcgttccggctcaacgataattcgctggaattcctcgggattcagcctaccctgggtccacccaatcagcctcccgtgtccatttggcttattgtgtttggagtggtcatgggagtgatcgtggtggggatcgtgattctgatattcaccggcataagagatagaaagaagaagaataaagcccggtccggagaaaatccttacgcatcgattgatatcagcaagggggagaacaacccaggatttcagaacactgatgacgtgcagacctcgttc

SEQ ID NO: 209643 - DNA, 2415 bp, Artificial Sequence
  derived and/or modified sequence
atgtcgagcagctcgtggttgctgctttcgctcgtggctgtgaccgcggctcagtcaacgattgaagaacaagcgaaaaccttccttgataagtttaaccacgaggccgaggatctgttttatcaatcgtccctcgcatcatggaattacaacaccaacatcactgaagaaaacgtgcagaacatgaacaacgccggtgacaagtggtcggcctttcttaaagagcaatcgaccctggcccaaatgtaccccctccaagaaatccagaaccttactgtgaagttgcaactgcaagctctccagcagaatggatcttcagttttgtcggaagataaatcgaagagactgaacactattctgaataccatgtcaaccatatactcgaccggaaaggtctgtaatccggataacccacaagaatgtctcctgctcgaacctggtcttaacgagattatggctaactccctggattacaacgaacgactctgggcatgggagtcgtggcgatccgaagtcggcaaacagcttagaccactgtacgaggaatacgtcgttctgaaaaacgaaatggctagagctaatcactacgaggattacggtgactactggcgcggtgattacgaagtgaacggcgtggacggttacgactactcaagggggcagcttattgaggacgtggaacatacttttgaagagattaagcctctttacgagcatcttcatgcctacgtgcgggcaaaacttatgaatgcatacccatcatacatttctccaatcggatgcttgccagcacatctgctgggtgatatgtggggacgcttttggaccaatttgtactccttgaccgtgccctttggacagaagcccaatatcgatgtgaccgacgcgatggttgatcaagcctgggatgcacaacgtatctttaaagaagcagagaaattctttgtgtctgtggggcttcctaatatgactcagggcttttgggaaaattcaatgctgacggacccggggaacgtgcaaaaagccgtttgtcatcctaccgcatgggatcttggaaagggtgatttccgaatcctgatgtgcaccaaggtcactatggatgactttcttactgcccatcatgaaatgggtcatatccaatatgatatggcttatgccgcgcaaccctttcttctccggaatggagcaaacgaaggctttcatgaagcagtcggagagatcatgtcgctctccgcggcaactccaaagcacctgaagtccatcggacttctctcgcctgattttcaagaggacaacgaaactgagatcaatttccttctcaaacaagcactcactattgtgggcaccctcccttttacctacatgcttgaaaagtggagatggatggttttcaagggtgaaatcccgaaggaccaatggatgaagaaatggtgggagatgaaaagagagatcgtcggagtggtggaacctgtgccccacgacgaaacttactgtgaccccgcatctttgtttcacgtgtcaaatgattactccttcatcagatactacacccgtactctttaccagtttcagtttcaggaggcactttgtcaagccgcaaagcacgaaggtcctctgcataagtgcgatattagcaactccacggaggcgggccaaaagctcttcaatatgctgcgtctcggcaagtccgaaccgtggacccttgcccttgagaacgtggtgggtgccaagaatatgaacgtccggcccctgctgaattacttcgaacctctcttcacgtggttgaaagaccagaataagaactcgttcgttggctggagcactgattggtcgccatacgcagaccaatccattaaggtgagaatttcccttaaaagcgcattgggagataaggcttacgagtggaatgataacgaaatgtacctctttagaagctccgtggcctacgctatgagacagtactttcttaaggtcaagaaccagatgatccttttcggagaagaggacgtccgtgtggcaaacttgaagccgaggatctcatttaactttttcgtcacggcaccaaagaacgtgtccgacattattccaaggaccgaggtcgaaaaggcaatccggatgagcaggtcacggattaacgatgcatttcgccttaacgataactcgcttgaatttctggggattcagccaactttgggaccacccaatcagcctcctgtctccatatggcttattgtgttcggagtggtgatgggagtgattgtggttggaatagtgattttgatattcactgggattagagatcgcaagaaaaagaacaaggcacgtagcggcgaaaatccatacgcatccattgatatatccaagggcgaaaacaaccctggatttcagaacactgatgacgtccaaacctcgttc

SEQ ID NO: 209644 - DNA, 2415 bp, Artificial Sequence
  derived and/or modified sequence
atgtcctcaagcagctggctgctgctctcacttgtggcggtgaccgcggctcagagcaccatcgaagagcaagcaaagacgttcctggacaaattcaatcatgaagccgaagatctcttctaccagagctcacttgctagttggaattataacactaacatcactgaagagaacgttcagaacatgaataatgcaggagataaatggagcgccttcctcaaggaacaaagcaccctggcacagatgtatccactgcaggagattcagaacctcaccgtaaaacttcagcttcaagccctgcagcagaacggctcaagcgtcctctcagaagacaagagcaaaagactgaataccatcttgaacaccatgtccaccatctactctacaggcaaggtctgcaacccggacaaccctcaagaatgtctcctgctcgagcccggtctgaacgagattatggccaactctctggactataatgagaggctgtgggcatgggaatcttggaggtccgaagtcggaaagcagttgaggccactgtatgaagaatatgtggtccttaaaaacgaaatggcgcgggcgaaccattacgaggattatggagactattggagaggagattacgaggtcaatggcgtagatggctacgactactctagaggacagcttatagaggatgtagagcatacgtttgaggagattaaacctttgtatgagcacttgcacgcctacgtgagagctaagttgatgaacgcatatccgtcgtacatcagccccataggatgccttcctgcccacctcctcggtgacatgtggggaaggttctggaccaacctttatagtctcactgtccccttcggacagaagccaaacatcgatgtgactgatgccatggtggaccaagcatgggacgctcagcggatcttcaaagaagctgaaaagttcttcgtgagcgtggggctcccaaacatgacccagggcttttgggagaattcaatgctgactgaccctggcaacgttcagaaggctgtgtgtcacccaacagcctgggatctcggaaaaggggactttaggatacttatgtgtaccaaggttacaatggacgatttcctgacagctcaccacgaaatgggtcacatacagtacgacatggcatacgctgcgcaaccatttctgctccgcaacggcgctaacgagggatttcacgaggctgtcggcgaaattatgtctctgagcgctgccacacctaagcatctcaagagcataggcctgctgagcccagatttccaggaagacaacgagacagaaattaactttttactgaagcaggctctgacaatcgtgggcaccctgccgtttacttacatgctggagaaatggcgatggatggtctttaaaggcgaaatccctaaggatcaatggatgaagaagtggtgggagatgaaacgcgagattgttggcgtagtggagccggtgccacatgatgaaacttattgcgaccccgcctctcttttccatgtgtcaaacgattactctttcatccggtattatacccgcactctttatcaatttcagtttcaggaggcactctgtcaggccgctaagcacgagggtcctctccacaagtgtgatatctccaactccactgaggccgggcaaaagctgttcaatatgctccgccttgggaagagcgaaccatggacacttgccctggaaaacgttgtgggcgcaaagaatatgaacgtgcgcccactgttgaactattttgagccactttttacctggctcaaggaccaaaacaaaaacagcttcgtaggatggagcaccgactggtctccgtacgccgaccagtcaatcaaggttaggatcagtctgaagtcagctttgggagacaaagcctacgaatggaatgacaacgagatgtacctgttcaggagcagcgtcgcatacgctatgcggcaatactttttgaaggtcaagaaccagatgatactgtttggagaggaggatgtgagggtcgctaacctgaagcctagaatctcttttaatttctttgtgactgcacccaaaaacgtgtcggatatcatcccacgcacagaagtggaaaaagctattaggatgtcacgctcacgaattaacgatgcctttcgcttgaacgacaactcattggaatttcttggcatacaaccaacccttggcccacccaaccaacctcctgtgagcatctggttgattgtctttggagtggtcatgggagtgatcgttgtgggtatcgtcatactgatttttacaggcattcgcgacaggaagaagaaaaacaaggccaggagcggcgaaaacccctacgcttctatagacattagcaagggagaaaacaacccgggcttccagaacactgatgatgtgcaaaccagtttc

SEQ ID NO: 209645 - DNA, 2415 bp, Artificial Sequence
  derived and/or modified sequence
atgtcctcgtcgagctggcttttgcttagccttgtcgcagtcactgccgctcagagcaccattgaagagcaagcgaaaacctttctcgataagtttaaccatgaagcagaggacctgttctaccaatcgtcgctcgcatcctggaactacaacactaacatcaccgaagagaacgtgcagaatatgaacaacgcaggtgataagtggtcggcgttccttaaagagcaatcgactctggcacagatgtaccccctgcaagaaattcaaaacctgacggtgaagctgcaactgcaagccctgcaacagaatggttcgtcggtgttgtcggaagataagtcaaagcgcctgaacactattttgaatactatgtccacgatttactccacgggaaaagtgtgtaacccagacaatccacaagaatgtctgttgttggagcctggactgaacgagataatggcaaactcccttgattacaatgaaagactctgggcatgggaatcttggcgatccgaagttggaaagcagcttaggcctctctacgaagagtacgtggtcctgaagaatgagatggcaagagccaaccattacgaggactatggagattactggcgcggagactacgaagtgaatggcgtggacggttacgactacagcagaggacagctcattgaggacgtggaacataccttcgaagagataaaaccactttacgaacacttgcatgcgtacgtgcgggccaaactcatgaatgcctacccttcatacataagcccgataggttgcctcccagcacatctcctcggtgatatgtggggccgcttttggactaacctgtacagcctgaccgtccctttcggtcaaaaacctaatatcgatgtgactgacgcgatggttgatcaggcgtgggacgcacagcgcatctttaaggaggcagaaaagttttttgtctccgtggggctgcctaacatgacccaaggtttttgggaaaacagcatgctcactgatccaggtaatgtgcagaaagctgtgtgtcaccccaccgcatgggaccttggcaagggcgactttaggattctcatgtgtacgaaagtgaccatggacgatttcctcaccgcgcatcatgagatgggacacattcagtacgatatggcttatgcggcacaaccgtttcttcttagaaatggggccaacgagggatttcatgaagcggtgggcgaaatcatgtctctgtcggctgcaacgccaaagcacctgaagagcattggactcctctcccctgatttccaagaggacaacgaaaccgagattaactttttgctgaagcaagcacttaccatcgtggggactctgccgtttacttacatgctggaaaagtggaggtggatggtgttcaaaggagaaattcctaaggaccagtggatgaaaaagtggtgggaaatgaaaagagagattgtgggagtcgtggaacctgtgccacacgatgaaacctactgcgatcctgcgtccctcttccatgtgtcaaatgattattcctttatccggtactacacgaggactttgtaccagttccagtttcaagaggcactctgccaagcagcaaagcatgaaggccccctccacaaatgtgatattagcaacagcaccgaagcgggacaaaagttgtttaacatgcttaggctcggcaagtcggaaccatggaccctggcacttgaaaacgtcgttggggccaaaaacatgaacgtaagacctttgctgaactacttcgagccccttttcacctggctcaaggatcagaataagaattcatttgtcggctggtccactgattggtcgccctatgccgatcagtcgattaaggtccgaatctcgcttaagtcagcactcggtgataaggcatacgagtggaatgacaatgaaatgtacctgtttaggtcatcagtcgcctacgcaatgcgtcaatactttcttaaggtgaagaatcaaatgatcctctttggtgaggaggacgtgagagtggcaaacctgaagcctcgaatatcctttaacttcttcgtcaccgctcccaagaacgtgtcggacataattccacgtactgaagtagagaaggcaatccggatgtcgaggtccagaattaacgatgcattccggcttaacgataactccctcgaatttctcggcattcagccgacccttggacctccgaaccaaccacctgtgagtatatggctcattgtgtttggagtggtcatgggtgtgattgtcgttggcatagtcatcctgattttcaccggaattcgcgaccgcaaaaagaagaataaggcacgatcaggagagaatccgtacgcctcgattgatatctcgaagggagagaacaacccgggattccagaacaccgacgatgtacaaacgtccttt

SEQ ID NO: 209646 - DNA, 2415 bp, Artificial Sequence
  derived and/or modified sequence
atgtcttcctcctcgtggcttctgcttagcttggtcgccgtgaccgccgctcagtcaacaatagaggagcaggcgaaaacctttctggacaaatttaatcacgaagccgaagacctgttctatcagtcatcgctggcgtcctggaactacaatacaaacatcaccgaggagaatgtgcaaaatatgaataatgccggggacaaatggtcagcgttcctgaaggagcagagcacgctggcccagatgtaccccctgcaggagatccaaaacctgaccgttaagctgcaattgcaggccttgcaacagaacggatcctcagtcctgtccgaagataagtcaaaacgactgaacacaattttgaatacaatgagtactatttactccaccggaaaggtgtgcaaccccgacaacccgcaggagtgtctcctcctggagccaggcctgaacgaaatcatggccaactcccttgactataacgaacggctatgggcatgggagtcttggcggagcgaggtgggcaagcagctgagaccactgtatgaagaatacgtggtgttaaagaacgagatggcacgggccaatcactatgaggattacggggactactggcgaggtgattatgaagtcaacggcgtcgacgggtatgactattcgcgtggccagttgatcgaggatgttgagcacacatttgaggagattaaaccactatatgaacacttacatgcatacgttagggccaaactcatgaacgcatatccaagctacatcagccctattgggtgcctcccagctcacctgcttggagacatgtggggcaggttttggactaacctttactctctgacagtgcccttcgggcaaaaacccaatatcgacgtcacagatgccatggtggaccaggcctgggacgctcagcgtattttcaaagaagctgagaagttcttcgtctcagtgggcctaccgaacatgacgcagggcttctgggagaattccatgctgacagaccctggaaacgtccagaaagcggtgtgtcatcctacagcttgggacctgggaaagggggatttccgtattctaatgtgtacaaaagtcaccatggatgactttctgacagcacaccacgagatgggacacattcagtatgatatggcttacgccgcacaaccattcctgctgcgtaacggggctaacgaaggtttccatgaggcagtgggagagataatgagtctatccgcagcgacgcctaaacaccttaagtcaattggactgcttagcccagactttcaggaggacaacgagaccgagattaattttttgttgaaacaggctctgactatcgtgggcaccctgccattcacttacatgttggagaagtggcggtggatggtcttcaaaggggagatccccaaggaccagtggatgaaaaaatggtgggagatgaagagagaaatcgttggagttgttgagcctgttccacatgatgagacttattgcgacccagcctctctttttcacgtgtccaacgattattctttcatcagatactacacgagaacgctctatcagtttcagtttcaggaggcgctgtgtcaggcagccaagcatgaagggcctttgcacaaatgcgacatcagcaactcaacagaagcaggccaaaagttgtttaacatgttgaggctcggtaagtctgagccctggaccctggcactggagaatgtcgtcggagcaaaaaatatgaatgtgcgtccactgctgaactattttgaaccactattcacatggttaaaagatcaaaataagaattcattcgtgggatggtctaccgactggtcaccatacgccgaccaaagcatcaaggtaaggatatccttgaagtcggcacttggcgacaaggcttatgagtggaatgataatgaaatgtacctgtttcgatcgagcgtcgcctacgcgatgaggcagtatttcctgaaggtgaaaaaccaaatgattctgttcggtgaggaagacgtcagggtggcaaacctgaagcctcgcatcagctttaactttttcgttaccgcccccaaaaacgtgtcagacataattccccgcacagaagtcgaaaaggccatacggatgagcaggtccaggataaatgacgccttcaggctaaacgacaattctttggagtttctggggatccagcctacccttggcccccccaatcagccccccgtgagtatatggctcattgtgtttggcgtagtaatgggagtgatcgtcgtgggtattgtcattctgatcttcacaggcatcagggatagaaagaaaaaaaataaggctagaagcggcgagaatccttacgcgtccatcgacatatcaaagggtgaaaataacccaggttttcaaaataccgacgacgtgcagacttctttc

SEQ ID NO: 209647 - DNA, 2415 bp, Artificial Sequence
  derived and/or modified sequence
atgtcctccagtagttggctgctgctgagtctagtagcagtaaccgcggcccagtccaccatagaggagcaagccaaaacatttctcgacaagtttaaccatgaggctgaagatctgttctaccagtcatctttggccagttggaactacaataccaatatcaccgaagagaatgtacagaacatgaataatgcgggcgacaagtggtccgctttccttaaggagcagtccacactcgcgcagatgtatccattgcaagagattcagaatcttaccgtaaagctgcagctgcaggctctccagcagaacggcagctccgttctgtctgaggacaaatccaagcggttgaacaccatcttaaacacaatgtctactatttattctaccggcaaagtctgtaaccctgataaccctcaagaatgcttgcttctggaaccaggcctgaatgaaataatggccaactcactagattacaatgagcgtttatgggcctgggaatcgtggagatcggaggtgggaaagcagttgaggcctttatacgaggagtatgttgtgctgaagaatgaaatggctcgcgccaatcattacgaggactacggcgattactggaggggtgattacgaagtgaacggagtggacgggtatgattacagccgggggcaacttatcgaggacgttgagcataccttcgaagaaattaagcccctgtatgaacacttgcatgcctatgtgcgtgccaagctaatgaacgcataccccagttatatttcacctatcggatgcctcccggctcacctgctgggcgacatgtggggtagattctggactaatttgtactccttaaccgtcccctttggacaaaaacccaacatagatgtgacagacgcgatggtggaccaagcatgggacgctcaaaggatattcaaagaggccgagaagttctttgtgagtgttggcctgcctaatatgacacaagggttctgggagaacagcatgctgacggatcccgggaatgtacagaaggccgtgtgtcatcctaccgcttgggacctcggcaaaggggacttccggattctgatgtgcacgaaggtgaccatggacgacttcctgaccgcacatcacgagatgggccatatccagtacgatatggcgtacgcagctcaacccttcctgttgcgcaatggggccaacgaggggtttcacgaggctgtgggcgagatcatgtcactgtcagctgctacacccaagcacctcaagtctattgggcttctcagccctgatttccaggaggacaacgagaccgagataaattttctcttgaagcaggccctgacaattgtcggaacactgccattcacgtatatgctagaaaagtggcgttggatggtgttcaaaggagaaattcccaaggaccaatggatgaagaagtggtgggaaatgaaaagagaaatcgtcggagtggtggaacccgtaccccacgatgaaacgtactgcgatccagcgtctcttttccacgtatccaacgactactcttttatcaggtactacactagaacactatatcagttccagtttcaggaagccctctgtcaggccgcaaagcacgaggggccgctgcacaaatgcgatatttcgaactcgaccgaggctggtcagaagttgttcaatatgctgagacttggaaagtctgaaccttggacactggcacttgaaaacgtggtcggggccaaaaacatgaatgttcgccctctcctgaactacttcgaaccactctttacctggttaaaggaccagaataaaaactcttttgtaggctggtcaaccgactggagtccttatgcagaccagtctatcaaagttcgcatcagtcttaaatctgctctgggagataaggcatacgagtggaatgataatgagatgtacctgtttcgctcctctgtggcctacgccatgcggcagtatttcctcaaggtgaaaaatcaaatgatccttttcggtgaagaggacgtgagggtggcaaatctgaagcctcgcataagcttcaatttctttgttacagctccaaaaaacgttagcgatatcattccacgcactgaggtggaaaaagcaatccgaatgtctcgctctaggatcaatgacgcctttcggctgaatgataattccctagaattcctggggatacagcccactctcggcccacctaatcagcccccagtgagcatctggcttattgtcttcggcgtggtcatgggggtgatcgtagtcgggatcgtgattctcatcttcacaggaattagagataggaaaaagaagaacaaggctaggagtggggagaacccttacgcctcgatcgacatctccaagggtgagaataacccgggctttcagaacaccgacgacgtccagacttccttc

SEQ ID NO: 209648 - DNA, 2415 bp, Artificial Sequence
  derived and/or modified sequence
atgtctagttcgtcctggctcctgctttcgctcgtggcagttaccgcagcacagtccaccattgaagaacaagctaagacgtttctcgataagttcaaccatgaagccgaggacctcttttatcagtcgtcgctcgcttcgtggaactacaacaccaacatcactgaagagaacgtgcaaaacatgaataacgcgggtgataaatggagcgcatttttgaaagaacaatccaccttggcccagatgtaccctctccaggaaattcagaaccttactgtcaagctccagcttcaagctcttcagcaaaacggctcctcggttctgtccgaggacaagtcaaagcgcctgaacaccatactgaatacgatgtccactatatactcaacgggcaaggtttgtaacccagataatccacaggagtgcctcctgctcgaacctggtcttaatgaaatcatggcaaactcactcgactacaacgagagactctgggcatgggaatcatggcggtccgaagtcggtaagcagctgcgtccactttacgaagaatacgtggtgttgaaaaacgaaatggcgagagcaaatcattacgaggactacggggattactggcgcggtgactatgaagtaaacggcgtggacggatatgattactcaagaggacagctgatcgaggacgtcgaacatacttttgaagagataaagcctctgtacgagcacctgcatgcctacgtccgggctaaacttatgaacgcatacccatcatacatcagccccatcggctgcctgcctgcccacctgctgggcgacatgtggggtcggttttggacgaacctttactctctgactgtgcccttcgggcagaagccaaacattgatgtgactgatgccatggtggaccaggcctgggatgcacaaagaatattcaaagaagcagaaaagttctttgtcagcgtcggtctgccgaacatgactcagggattctgggaaaattcaatgcttaccgaccctggaaacgtccagaaggcagtgtgtcatccaaccgcatgggatctcgggaagggggattttcggatccttatgtgcaccaaggtcactatggatgattttcttacggcgcatcatgagatgggacacattcaatacgatatggcatacgcagcccaaccgttccttcttcgcaacggagcaaacgaaggctttcacgaagctgtgggagagatcatgtcactgtcggcggcaacccccaaacatcttaagtccattgggctgctgtcgcctgactttcaagaagataacgaaactgagattaactttctgctgaagcaggcacttactattgtgggaacgttgcctttcacctatatgctggagaagtggcgctggatggtattcaagggagagatccctaaggatcaatggatgaagaaatggtgggaaatgaagcgggaaattgtgggagtcgtggagcccgtccctcacgatgaaacctactgtgatccagcatccctgtttcatgtgtccaatgactactcattcatccgctactatactcggaccctttaccagtttcagtttcaagaggcattgtgtcaagccgccaagcacgaaggcccccttcacaagtgtgatatctcgaacagcacggaggcaggtcaaaagttgtttaacatgcttcgactgggaaaaagcgaaccctggaccctcgcgttggagaatgtggtaggcgcaaaaaacatgaacgtgaggcccctgttgaattactttgaacctctctttacttggctcaaggatcagaataagaattcgtttgtgggttggtcaactgactggagcccttacgccgatcagtccattaaggtgcggatttccctgaagtcggctctgggtgataaggcatacgagtggaatgataatgaaatgtacttgtttagatcgagcgtcgcatacgcgatgcgacagtactttttgaaggtgaaaaaccaaatgattctttttggggaagaggacgtgcgtgtcgcgaacctgaaacctcggattagcttcaacttctttgtgactgcgccaaaaaacgtgagcgacattatccctagaaccgaagtggagaaggctatcagaatgtcccgtagcagaatcaatgacgcgtttcgcctgaacgataactctcttgagtttcttggaatccaaccgacgctgggcccaccaaaccagcccccagttagcatctggctgattgtgttcggggtggtgatgggagtgattgtggtcggaattgtcattcttatctttaccggcatcagggaccgtaagaagaagaacaaggccaggtcaggagaaaacccttacgcgtcgatcgatatctcaaagggagaaaacaaccccgggtttcaaaacactgatgacgtgcagacttcgttc

SEQ ID NO: 209649 - DNA, 2415 bp, Artificial Sequence
  derived and/or modified sequence
atgtccagctcatcctggctccttctctcactcgtggccgtgactgcagcccaatcaaccattgaagagcaagctaaaacgtttttggataagtttaaccatgaggccgaggatctgttttaccaatcctccctggcgtcttggaactacaatacgaacataacggaggaaaacgtccagaatatgaacaatgctggggataaatggtcggcattcctgaaagagcaatcgacgttggcacaaatgtatcctctgcaggagatccagaacctgaccgtgaaactgcagcttcaggctctgcaacaaaacggatcgagcgtgctgtccgaggataaatcgaagcgccttaacactattcttaacaccatgagcaccatatactcgacgggaaaggtgtgtaacccagataacccacaagaatgtctgctgctcgaaccgggccttaatgagattatggcaaactctctcgactacaacgagaggttgtgggcctgggagagctggaggtcagaggtcggtaagcagctcagacctctgtacgaagagtacgtggtgctgaaaaatgagatggcccgggcaaatcattacgaagattacggtgactactggagaggtgattacgaagtcaatggagtcgatggttacgattactccagaggacaactgatcgaagatgtggaacatacctttgaggagattaaaccgctttacgaacatctgcacgcatacgtgagggcaaagctgatgaacgcgtatccttcgtacatttccccaataggatgtctgcccgcacacctgctcggggatatgtggggcaggttctggaccaacctttacagcctcactgtcccatttggccaaaagccaaacattgatgtgaccgatgccatggtcgatcaagcatgggacgcacaacgcattttcaaggaggccgaaaagttttttgtgtcggtgggtctgccaaatatgactcaggggttttgggagaattcaatgctcaccgacccaggaaatgtccaaaaggcggtctgtcatcccaccgcatgggatttgggtaaaggagacttcagaattctcatgtgtaccaaagtcactatggatgacttccttacggcccaccatgaaatgggccacattcaatacgatatggcctacgccgcacagccatttttgctgaggaatggggccaacgaaggattccatgaggcagtgggcgagattatgagcctgagcgcagcaaccccaaagcatctgaaatcaattgggctgctttcgcccgactttcaagaggacaacgaaaccgagataaactttctgctgaagcaggctcttaccattgtcggaactcttcctttcacctacatgctcgagaagtggaggtggatggtgttcaagggagaaattccgaaggaccaatggatgaaaaagtggtgggagatgaagcgagaaatagtgggggtggtcgaacctgtcccgcacgatgagacttactgcgatccggcctcgttgtttcacgtgtccaacgattactcgttcatccggtactacactagaactttgtaccaattccaattccaggaggcactctgccaggcagcgaaacacgaaggcccactgcataagtgcgacatctcgaattccaccgaggcaggacaaaagctgtttaacatgcttcgcctgggcaagtccgaaccctggactctggcacttgaaaatgtcgtgggagcaaagaacatgaatgtgcggccgcttctcaactactttgaaccccttttcacgtggcttaaggatcagaataagaacagctttgttggctggtccactgactggagcccctacgcagatcaatcaattaaggtgagaatctctcttaagagcgcactgggagacaaggcgtatgagtggaacgataatgaaatgtacctctttcgttcgtcagtcgcatacgcaatgcgtcagtacttcctgaaggtgaagaaccaaatgattctgtttggggaagaagatgtgcgtgtcgcgaaccttaagccccgtatctcgtttaacttctttgtcactgcgccaaagaatgtgtcggatatcatacctcgaactgaggtggagaaggcaattcggatgagcagaagcagaatcaacgatgcatttcgtcttaatgataattcgctggaattcttgggaattcaacctactctcggaccaccaaaccagccacctgtgtccatttggctgattgtgttcggagtggtgatgggagtgatcgtggtgggaattgtgattctcatcttcactggtatccgcgacagaaagaaaaagaataaagcgaggtccggcgaaaacccttacgcatcgattgatataagcaagggagaaaacaacccaggtttccagaatactgatgatgtgcaaacctcgttt

SEQ ID NO: 209650 - DNA, 2415 bp, Artificial Sequence
  derived and/or modified sequence
atgagcagctcaagctggctgctcctgagcctggtggcggtgactgcggcacaatcgactatcgaggagcaggccaagactttcctggacaagttcaaccacgaagccgaagatctgttctaccaaagctctcttgcctcgtggaactacaacactaatatcactgaagaaaatgtgcagaatatgaacaatgccggcgacaagtggagcgcattcctgaaggaacagagcaccctcgcccagatgtaccctctccaggaaatccagaacctgaccgtgaagctccaacttcaggcactgcaacagaacgggtcgtcagtgctctctgaggataagtccaaacggctgaatactattctgaacaccatgagcacgatctactcaactgggaaggtgtgtaacccggataacccacaggagtgcctcctgctggaacctgggctgaacgagatcatggccaatagcctcgactacaacgagcgcctttgggcttgggaatcatggagatcggaagtcggcaagcagttgaggccactgtacgaagagtatgtggtgctcaaaaacgaaatggctcgggctaatcactacgaggattacggagactactggagaggagactacgaagtgaatggagttgacggatacgactactccagggggcagctcatcgaggacgtggaacacactttcgaagagatcaagccgctctacgagcacctgcacgcctacgtgcgcgcaaaactcatgaatgcttatccgagctatatctcgcccatcggatgcttgccagctcatttgctgggagatatgtggggacggttctggactaacctctactcgcttaccgtccctttcggacaaaagcccaatatcgacgtgactgacgctatggtggaccaagcctgggacgcacagcggatctttaaggaggccgaaaagttcttcgtgtcggtggggctcccaaacatgacccagggcttttgggagaactcgatgctgaccgacccgggcaatgtgcagaaagccgtctgccatcctaccgcctgggatcttgggaagggagatttccgcatcctcatgtgcactaaggtgaccatggacgacttcctgactgcccatcacgaaatgggccatatccaatacgatatggcctacgcagcgcagccttttctgctccgcaacggggcgaacgagggattccatgaggcggtaggagagattatgtccctgagcgcagctacgccgaaacacctcaagtcaataggactcctctcaccggacttccaagaggacaatgaaactgagatcaatttccttcttaagcaagccctcaccatcgtgggtaccctccccttcacctacatgctcgaaaagtggcgctggatggtctttaagggtgagatccctaaggaccagtggatgaagaaatggtgggagatgaagagggagattgtcggagtggtggaaccagtcccgcacgatgaaacgtactgtgacccggcttcgctgttccacgtgtccaacgattacagctttattcggtactacacgcggactctttaccagtttcagttccaagaggctctttgccaggctgcgaaacacgaaggccccctgcataagtgtgacatcagcaactcaactgaggcaggacaaaagctgttcaacatgctccggttgggaaaatccgagccttggaccctggcgctcgagaacgtcgtcggcgctaaaaacatgaatgtgaggccgcttctgaattactttgaaccgctgttcacttggctcaaggatcagaataagaattctttcgtgggttggtcgactgactggagtccgtacgcagaccaatcaatcaaggtacgcatctcgctgaaatccgcattgggcgataaagcgtacgagtggaatgataacgaaatgtatctttttagatccagcgtggcttacgctatgcgccaatacttcctgaaggtgaagaaccagatgatcctcttcggcgaggaggatgtccgtgtggcaaacttgaagcctcgcatcagcttcaatttcttcgtgactgcaccgaaaaatgtgagcgacatcatcccgcgcactgaggtcgaaaaagcgatcagaatgtcccgctcccggattaacgacgccttcagactgaacgacaacagcctggaatttctcggcatccagccgaccctgggacctcctaaccagccgccggtgtccatctggcttatcgtgttcggtgtggtcatgggagtgatcgtggtcggcatcgtgatcctgatctttactggaatccgggatcggaaaaagaaaaacaaggcgcgcagcggggaaaacccctacgcctcgatagacatctcgaagggagagaacaatccaggttttcaaaatactgatgacgtgcagacttccttt

SEQ ID NO: 209651 - DNA, 2415 bp, Artificial Sequence
  derived and/or modified sequence
atgtcgagttctagttggctgctgctttcactggttgctgtgactgctgcacagagcaccattgaggaacaggccaaaaccttcctggacaaatttaatcacgaagccgaagacctgttttatcagagtagtctcgcctcctggaactacaacaccaatataactgaggagaatgtgcagaatatgaataatgctggcgataaatggtcagcttttctgaaagagcagtccaccttggcccagatgtatcctctgcaggaaatccagaacctgaccgtcaagctgcagttgcaggccctgcagcagaatgggtcttccgtgctcagtgaggacaaaagtaagagattgaacactatcctgaatacgatgagtactatttactctactggaaaggtgtgtaacccagataacccccaggagtgcctgttgcttgagccgggtctgaatgagattatggcaaactcactcgattacaacgaacgcctgtgggcctgggagtcgtggcgctctgaagtgggcaagcagctccgccccctatatgaggagtatgtggtccttaagaatgagatggctcgagccaaccattacgaggactatggtgattactggagaggtgactacgaggtgaatggcgtcgacggctatgactattcgcgtggccaactaatcgaggatgtggagcacacatttgaggaaatcaagccactatacgagcatcttcacgcctatgtgcgcgcaaagctgatgaatgcatacccctcatatatttcccccattgggtgcctgcctgctcacttactgggcgatatgtggggcaggttctggacaaacctgtattctttgactgtaccgttcggtcaaaagcctaacattgatgtgacagacgcgatggtcgatcaggcttgggacgcccagcgaatatttaaggaagcagaaaagttctttgtctcggtagggcttccaaatatgacccagggtttctgggaaaacagcatgctgacagaccccggcaatgttcagaaggcagtttgccatcctacagcatgggacctgggaaagggcgattttcggatcctcatgtgtaccaaggtgactatggacgattttctgaccgctcaccacgagatgggccacatacagtatgacatggcatacgctgcacagcccttcctgttgagaaacggtgctaatgaggggtttcatgaggcagtgggcgagatcatgtctctgtccgccgctactccaaaacaccttaagagcataggacttctatctcctgatttccaggaagacaacgagacagagattaacttcttgctcaagcaggccttgactatcgtcggaaccttgcccttcacttacatgttggagaaatggcgctggatggtctttaagggagagatccctaaggatcagtggatgaagaagtggtgggagatgaagagggagattgtgggagtcgtggaaccagtgcctcacgatgaaacttattgcgaccccgcgtctctgttccacgtatccaacgactacagcttcatccgatattacaccagaacactgtatcagtttcaattccaggaggctctgtgtcaggcggcgaaacatgaaggtcctcttcacaaatgtgacatctccaactctacggaggccggccaaaagctctttaatatgctgcggctcggtaaatccgaaccgtggacactggccctggagaacgtcgtgggcgctaagaatatgaacgtgcgtcccctgttgaactattttgaaccattatttacctggctgaaagatcagaataaaaatagcttcgtgggctggagcacagattggagcccctacgccgaccagtcaatcaaggtgcgcatttcactgaaaagtgcgctgggggataaagcctacgaatggaacgataacgagatgtacctatttaggagttcggtagcgtacgcaatgaggcagtactttttaaaggtcaagaatcagatgatcctgttcggagaggaggacgtgcgcgtggccaatctcaaacctcgtatttctttcaactttttcgtaacggctcctaagaacgtgtccgacatcatcccacgaacagaagtggaaaaggccattcggatgagccggagcaggattaatgatgcttttaggttaaatgacaacagcttggaattcctagggatccagcccactctcggcccgccaaaccagccccctgtgtctatctggctcatagtattcggcgtagtgatgggcgttatagtggtcggcatcgtgattctcatttttaccggaattcgtgataggaagaagaaaaacaaggcccgaagcggcgagaatccctatgcgagcatcgatataagtaagggagagaataaccctggatttcaaaacactgatgatgtgcagacttcattt

SEQ ID NO: 209652 - DNA, 2415 bp, Artificial Sequence
  derived and/or modified sequence
atgagctccagctcgtggcttcttctctcgcttgtggcggtgactgcagcacagtcgacgattgaggagcaagcaaagactttcctggataagtttaatcatgaggcggaagatctcttttaccagtcgtcacttgcttcatggaactacaacaccaacatcaccgaagaaaatgtgcagaatatgaacaacgccggagataagtggtctgcattcctgaaagaacaatctacccttgcacaaatgtaccctttgcaagaaatccaaaacctgactgtgaaactccagctgcaggcattgcagcagaacggatcctcagtcctctcggaagataaatccaagagactgaacactattcttaacacgatgagcactatttactcaactggtaaggtgtgtaacccagataaccctcaagagtgcctgctgttggaaccaggactcaatgagataatggcaaactccctggactacaatgagcgcctttgggcatgggagtcctggcgatcggaagtgggtaagcagcttcgaccactctacgaggaatacgtggtgctgaagaacgaaatggcccgggcaaaccattacgaagattatggagactactggcgcggagactacgaggtgaacggcgtggacggttacgactattctcggggacagcttattgaagatgtggaacacacttttgaagaaatcaagcccctgtacgagcatctgcatgcctacgtgagagccaaactgatgaacgcgtacccctcctacatatcgccaatcggctgtctgcccgcacacctcctcggtgatatgtggggccgattttggaccaacctttactcccttaccgtcccatttggacaaaagccaaacattgatgtcaccgacgccatggtcgatcaagcatgggatgcacaacgcatctttaaggaagcagaaaagttttttgtgagcgtgggacttccaaacatgactcaaggattctgggaaaattccatgctgactgatccaggaaatgtgcaaaaggccgtgtgccatcccaccgcatgggatctgggaaagggagattttcgaattttgatgtgcactaaggtcactatggacgattttctgaccgcccatcacgaaatgggacatatccagtacgacatggcatacgcagcgcaaccatttttgctgaggaatggagcaaacgaaggttttcatgaggcagttggggagatcatgtcattgagcgcagctacccctaagcatctcaagtccattggactgctgtcccctgacttccaagaggataacgaaaccgagataaactttcttctcaagcaggcgctgactatcgtgggtactctccctttcacttacatgcttgaaaagtggagatggatggtgtttaagggtgaaatccctaaggaccaatggatgaagaaatggtgggaaatgaagcgggaaattgtgggtgtcgtcgaacccgtgccacatgacgaaacgtactgtgaccctgcatcgctgttccatgtgtcgaacgactactcctttatccgttactacactcgtaccctctaccaatttcagttccaggaagccctctgccaggctgccaagcatgaaggacctttgcacaagtgtgatatatcgaactccaccgaagcagggcagaaacttttcaatatgctgaggctgggaaagtccgaaccttggaccctggcacttgagaacgtggtcggagctaagaatatgaacgtaagaccgctgctgaattactttgaacccctgttcacttggcttaaagatcaaaacaagaatagcttcgtgggctggtcaaccgactggtcgccctacgcggatcagagcattaaggttcggattagccttaagtcggcactgggagacaaagcatatgaatggaatgataatgaaatgtacctctttaggtcatccgtggcatacgccatgcggcaatactttcttaaagtgaagaaccagatgatactctttggtgaagaggacgtccgggtggccaaccttaaacctcgcatatcgtttaacttcttcgtgactgcaccaaaaaacgtgtcggacattatccctcggaccgaagtggaaaaggcaattcgcatgtcgagaagcagaattaacgatgcatttcgacttaacgacaattctctggagttcttggggattcaaccaaccctgggaccgccgaatcaaccaccagtcagcatctggctgatcgtctttggagtggtcatgggggtgatcgtggtggggatcgtgattctgattttcacgggaattagagatcgtaaaaagaagaataaagcgcgttccggagaaaacccatacgcttccatagatatctccaaaggagagaacaaccctggttttcaaaataccgatgacgtgcagacctcattt

SEQ ID NO: 209653 - RNA, 2564 nt, Artificial Sequence
  derived and/or modified sequence
gggaaauaagagagaaaagaagaguaagaagaaauauaagagccaccaugucgucauccucauggcucuugcugucauugguggccgucacagcggcacaaagcacgaucgaagaacaggcuaagacguuucucgacaaauucaaccacgaagccgaagaucucuucuaccaguccagccucgcgagcuggaacuacaacaccaacaucacugaagaaaaugugcagaacaugaauaacgcuggagacaaaugguccgccuuucucaaagaacaaucgacgcucgcacagauguacccgcuucaagaaauucagaaccuuacagugaaacuccagcuucaggcacuccagcagaaugggucaucgguauugucagaggacaagucaaaacgcuugaacacgauuuugaauacgaugucgacaaucuacucgacgggaaagguguguaauccugauaauccucaagagugucuccugcuugaacccgggcuuaacgagaucauggccaauagccuugacuacaacgagcgacugugggcaugggagucauggcgcucagaagucgggaagcagcugcgccccuuguacgaggaauaugucgugcugaaaaacgaaauggcccgagccaaccauuacgaggacuacggcgauuauuggaggggugauuacgaggucaauggggucgacggguaugacuacagccgaggucaguugaucgaagauguggagcacaccuucgaggagaucaaaccccuguacgagcaccuccaugcguaugucagggcgaaauugaugaaugccuauccgagcuacaucucgccaaucgguugccugccagcgcaccuucuuggggauauguggggucgauucuggacuaaucucuauucguugacggucccguuuggacaaaagcccaauaucgacguaacggaugccaugguagaccaagcgugggaugcgcagaggaucuuuaaggaagcggagaaauucuucguauccgucgggcugcccaacaugacacagggauuuugggagaacuccaugcucacugaucccggcaauguccaaaaggcagucugccacccuaccgcuugggaccuuggaaagggagauuuucggauucugauguguacaaaagugacaauggacgauuuccugacagcucaccaugaaaugggacacauccaguaugacauggccuacgcagcgcagccguuuuugcuucgcaacggugcgaaugagggguuucacgaggccgugggagagauuaugucgcucuccgcugcgacacccaagcauuugaaguccaucggacugcugucacccgacuuucaagaggacaacgaaacggaaaucaauuuccugcucaagcaagcgcuuacuaucguaggcacacuccccuucaccuauaugcuugaaaaguggagguggaugguguucaagggcgagaucccuaaagaucaguggaugaagaaauggugggagaugaagagagagaucgugggugucgucgagccggugccccaugaugagacuuauugugacccggcgucacucuuccacguguccaacgauuauagcuuuauccgguacuauacuagaacguuguaccaguuccaauuccaagaggcccucugccaggcggcgaagcacgagggaccccugcauaagugcgacaucucaaauuccaccgaagccggucagaagcuuuucaauauguugcgcuugggaaagucggaaccuuggacucuggcucucgaaaaugugguaggagcgaagaauaugaacgucagaccccugcugaacuauuuugagccccuuuuuacguggcugaaggaccagaacaaaaacucauucgucggcuggucaacggauuggagccccuacgcagaucagagcauuaagguccgaaucucguugaagucggcucucggugacaaggcguacgaguggaaugacaaugagauguaucucuuccgcucguccguggcguaugcgaugaggcaguacuuccucaaaguaaagaaccagaugauuuuguucggggaggaggauguccggguagccaaucuuaaaccucggaucucguuuaacuucuuugucacggcgccuaaaaacgugucggacaucauuccgcggaccgaaguagagaaagcgaucagaaugagccggucgaggauuaaugacgcguucaggcugaacgacaacagcuuggaauuucucgggauucaaccgacgcuugggccuccgaaccagccacccguauccauuugguugauuguguucggaguagugaugggugugaucguggucggcauugucaucuugaucuucaccgggauuagagaucggaagaagaagaacaaagcgagaucgggagaaaacccguaugccucgauugacaucucgaaaggagagaauaacccaggguuucagaauacugaugacgugcagacaucauuuugauaauaggcugccuucugcggggcuugccuucuggccaugcccuucuucucucccuugcaccuguaccucuuggucuuugaauaaagccugaguaggaag

SEQ ID NO: 209654 - protein, 974 aa, Artificial Sequence [sequence omitted]

SEQ ID NO: 209655 - protein, 873 aa, Artificial Sequence
  derived and/or modified sequence
MLLHCKRDELRKLWIEGIEHKHVLNLLDEIENIKQVPQKLEQCMASKHYLSATDMLVSAVESLEGPLLQVEGLSDLRLELHSKKMNLHLVLIDELHRHLYIKSTSRVVQRNKEKGKISSLVKDASVPLIDVTNLPTPRKFLDTSHYSTAGSSSVREINLQDIKEDLELDPEENSTLFMGILIKGLAKLKKIPETVKAIIERLEQELKQIVKRSTTQVADSGYQRGENVTVENQPRLLLELLELLFDKFNAVAAAHSVVLGYLQDTVVTPLTQQEDIKLYDMADVWVKIQDVLQMLLTEYLDMKNTRTASEPSAQLSYASTGREFAAFFAKKKPQRPKNSLFKFESSSHAISMSAYLREQRRELYSRSGELQGGPDDNLIEGGGTKFVCKPGARNITVIFHPLLRFIQEIEHALGLGPAKQCPLREFLTVYIKNIFLNQVLAEINKEIEGVTKTSDPLKILANADTMKVLGVQRPLLQSTIIVEKTVQDLLNLMHDLSAYSDQFLNMVCVKLQEYKDTCTAAYRGIVQSEEKLVISASWAKDDDISRLLKSLPNWMNMAQPKQLRPKREEEEDFIRAAFGKESEVLIGNLGDKLIPPQDILRDVSDLKALANMHESLEWLASRTKSAFSNLSTSQMLSPAQDSHTNTDLPPVSEQIMQTLSELAKSFQDMADRCLLVLHLEVRVHCFHYLIPLAKEGNYAIVANVESMDYDPLVVKLNKDISAIEEAMSASLQQHKFQYIFEGLGHLISCILINGAQYFRRISESGIKKMCRNIFVLQQNLTNITMSREADLDFARQYYEMLYNTADELLNLVVDQGVKYTELEYIHALTLLHRSQTGVGELTTQNTRLQRLKEIICEQAAIKQATKDKKITTV

SEQ ID NO: 209656 - protein, 262 aa, Artificial Sequence
  derived and/or modified sequence
MHESLEWLASRTKSAFSNLSTSQMLSPAQDSHTNTDLPPVSEQIMQTLSELAKSFQDMADRCLLVLHLEVRVHCFHYLIPLAKEGNYAIVANVESMDYDPLVVKLNKDISAIEEAMSASLQQHKFQYIFEGLGHLISCILINGAQYFRRISESGIKKMCRNIFVLQQNLTNITMSREADLDFARQYYEMLYNTADELLNLVVDQGVKYTELEYIHALTLLHRSQTGVGELTTQNTRLQRLKEIICEQAAIKQATKDKKITTV

SEQ ID NO: 209657 - protein, 584 aa, Artificial Sequence
  derived and/or modified sequence
MANLVTASKTKMSKGEDPNNPRSIKRISQGGRDNHLAIAKCDLTQLKKKQSEVSNGSRETISMKTCCQHGDRGYWSTGYYWRGGPDDNLIEGGGTKFVCKPGARNITVIFHPLLRFIQEIEHALGLGPAKQCPLREFLTVYIKNIFLNQVLAEINKEIEGVTKTSDPLKILANADTMKVLGVQRPLLQSTIIVEKTVQDLLNLMHDLSAYSDQFLNMVCVKLQEYKDTCTAAYRGIVQSEEKLVISASWAKDDDISRLLKSLPNWMNMAQPKQLRPKREEEEDFIRAAFGKESEVLIGNLGDKLIPPQDILRDVSDLKALANMHESLEWLASRTKSAFSNLSTSQMLSPAQDSHTNTDLPPVSEQIMQTLSELAKSFQDMADRCLLVLHLEVRVHCFHYLIPLAKEGNYAIVANVESMDYDPLVVKLNKDISAIEEAMSASLQQHKFQYIFEGLGHLISCILINGAQYFRRISESGIKKMCRNIFVLQQNLTNITMSREADLDFARQYYEMLYNTADELLNLVVDQGVKYTELEYIHALTLLHRSQTGVGELTTQNTRLQRLKEIICEQAAIKQATKDKKITTV

SEQ ID NO: 209658 - protein, 593 aa, Artificial Sequence
  derived and/or modified sequence
MADVWVKIQDVLQMLLTEYLDMKNTRTASEPSAQLSYASTGREFAAFFAKKKPQRPKNSLFKFESSSHAISMSAYLREQRRELYSRSGELQGGPDDNLIEGGGTKFVCKPGARNITVIFHPLLRFIQEIEHALGLGPAKQCPLREFLTVYIKNIFLNQVLAEINKEIEGVTKTSDPLKILANADTMKVLGVQRPLLQSTIIVEKTVQDLLNLMHDLSAYSDQFLNMVCVKLQEYKDTCTAAYRGIVQSEEKLVISASWAKDDDISRLLKSLPNWMNMAQPKQLRPKREEEEDFIRAAFGKESEVLIGNLGDKLIPPQDILRDVSDLKALANMHESLEWLASRTKSAFSNLSTSQMLSPAQDSHTNTDLPPVSEQIMQTLSELAKSFQDMADRCLLVLHLEVRVHCFHYLIPLAKEGNYAIVANVESMDYDPLVVKLNKDISAIEEAMSASLQQHKFQYIFEGLGHLISCILINGAQYFRRISESGIKKMCRNIFVLQQNLTNITMSREADLDFARQYYEMLYNTADELLNLVVDQGVKYTELEYIHALTLLHRSQTGVGELTTQNTRLQRLKEIICEQAAIKQATKDKKITTV

SEQ ID NO: 209659 - DNA, 4185 bp, Artificial Sequence
  derived and/or modified sequence
ggagcctagcggctctccccgcgtccaagatggcggcagaagcagctggtgggaaatacagaagcacagtcagcaaaagcaaagacccctcggggctgctcatctctgtgatcaggactctgtctactagtgacgatgtcgaagacagggaaaatgaaaagggtcgccttgaagaagcctacgagaaatgtgaccgtgacctggatgaattgattgtacagcactacacagaattgacgacagccattcgcacataccagagcatcacagagcgcatcactaactcccgaaataaaataaagcaggtaaaagagaacctgctttcatgcaagatgctgctgcactgcaaacgggatgagcttcggaaactgtggattgaaggaattgagcataagcatgtcctgaacttgttggatgaaattgagaatatcaagcaagtgcctcaaaagctggaacagtgcatggccagcaagcactatctcagtgccactgacatgttggtgtcagcagttgagtctttggagggccccctgctccaggtggaaggactgagtgaccttcgactagagcttcacagcaagaagatgaaccttcacttggttctcatagatgaactacaccggcacctgtacatcaaatcgactagccgagttgtgcagcgtaacaaggaaaaagggaaaatcagctccctcgtgaaagatgcttctgttcctctgattgatgttacaaacctccctactcctcgaaaattccttgatacctctcactattctactgctggaagctcaagtgtgagggagataaatctgcaggacatcaaggaagatttagaattggatccagaggaaaacagcaccctgtttatgggtatcctcattaagggcttggcgaaactgaagaagatcccagaaacagttaaggcaatcatagagcgcttggagcaggagttgaagcaaattgtgaagaggtctacaacccaggtggcagacagtggctatcagcggggggagaacgttactgtggagaaccaaccaaggttgcttctagaactgctggagttactgtttgacaagtttaatgctgtagccgctgcacactctgtggtcctgggatacctgcaggacactgtagtgactccactgactcagcaggaagatatcaaactgtatgatatggcagatgtatgggtgaagatccaagatgttctacagatgctattaactgagtacttggatatgaaaaatactcgtacggcctctgaaccatcagctcaactaagctatgccagcactggacgagagtttgcagccttttttgccaagaagaaacctcaaaggccaaaaaattctcttttcaagttcgaatcgtcctcccatgccatcagtatgagcgcctatctgcgagaacagagaagggagctctatagtcggagtggagaactgcaagggggtcctgatgacaacttaattgaaggtggaggaacaaaatttgtctgcaaacctggagccagaaacattaccgtcatattccacccattactaagatttattcaggagattgagcatgctctgggtcttggcccagccaaacagtgtcctcttcgagagtttctcaccgtgtacatcaaaaacatctttctcaatcaagtcttggctgagatcaacaaggagattgaaggagtcactaaaacatctgaccctttgaagattctggccaacgcagacaccatgaaggtgctgggagtgcagcggcctctcctacagagcacaatcattgtggagaagacagttcaagacctcctgaacctgatgcatgacttgagtgcatattcagatcaattcctcaacatggtgtgcgtgaagctccaggagtacaaggacacctgcactgcagcttacaggggtattgtccagtcagaagaaaaacttgtcatcagtgcatcctgggcaaaagatgatgatatcagcagactcttgaaatctctaccaaactggatgaatatggctcaacccaaacagctgaggccaaaaagagaggaggaagaagatttcataagggcagcttttggcaaggagtctgaagttcttattgggaacctgggtgataaattaatccctccacaagacatccttcgtgacgtcagtgacctcaaagccttggccaacatgcatgaaagcctggaatggttggcaagtcgaacaaagtcagctttctccaatctttctacatcccagatgctttctcctgctcaagacagccacacgaacacggatctccccccagtgtcagagcagatcatgcagactctcagtgaacttgccaaatcgttccaggatatggctgaccgctgcttgcttgtcttacatctggaagtgagggttcactgtttccactatcttatccctcttgcaaaggaggggaactatgccattgtggctaatgtggaaagtatggattatgaccccctggtggtcaagctcaacaaagatatcagcgccattgaagaggccatgagcgccagccttcagcagcacaagttccagtatatcttcgaaggcctgggccacctgatctcctgcatcctcattaatggtgcccagtacttcaggcgcatcagtgagtctggcatcaagaaaatgtgtaggaacatttttgttcttcagcagaatttgaccaacatcaccatgtcgcgggaggcagacctggactttgcaaggcagtactacgagatgctttacaacacagctgacgagctcctgaacctggtggtggaccagggtgtgaagtacacggagctggagtacatccacgctctgaccctgctgcaccgcagccagactggggtgggggaactgaccacccagaacacgaggctgcagaggctcaaagagatcatctgcgagcaggctgccatcaagcaagccaccaaggacaagaagataactaccgtttagcagggcgtactgcggttggtgacgggggtcccctcagtcacactcacttttttccttggtatgttattgagtatattctgagcttagttttctctacagtgatactttagtggagaggaggtgtaaggattctttctctctggttttggcttttcatataaatgctaaaggaaggcgacagtacagagtgttttggttgaacaactactttaatgcagtcaaatctaacgggactagggtgggatagggaggaaggtggtatcaaattgttggactctgaaaaacaagtggatggattactaatatttgatttattactcaatatatatataattccagccttggaaagtaggaaagtaggctgctacctaacttttagtcccttccaaaaccatttagtagggttctattacataaacagtagggtttttcctctcctgaccttatccgtttacagttcaatgaaataagtgtatgtgcattgctgtctgtctctattgccaaaatcaaataaatggcttctcagctgctgtttacaacaaacttccctaaccaaaacagaacctctaatttagggctaggaatagaagtcttttgatcccagtccctgggacagttttgtatgctgtatcttgtacacaggttgtaggttggtttattgccattttgttttatttctgctgtataaaaaccaagagccagacaattagacaactatggaggaatgaaaggcaattcaaacatctgcttgattcccgccccgccacccctaatttctgagagaataatggttagagaacattgcatctcacttgaaacatcctttgggggtaaatgattcttaggtgctcacttggtctgagctcagctgaatgcagggaagatgggacagagtgacatttctcctctgtgcggcctccagctgagcctgtctctgaattgttccctcccccgcaatgtgggcacttaccatgttcctggcacactggacctcaccatgtcccccggtcaccagtcctcttgctgcccatggttcataggtcatagaaggcagcaatgcactgactgggccacatcttgaaaactcgtggaaagggaaaggggaggagatgggactttgaccacacacagtgatgcctcacaccctgaaggtgggggattttgtacctgtttgtacaactttggtcttgatgggaaaaatggagaattaaaaagtgttttgagaagctta

SEQ ID NO: 209660 - DNA, 3020 bp, Artificial Sequence
  derived and/or modified sequence
ggggttagctatagagagaggagccccgcctcagtcttttctttaggggcagcaccttctattacagtctcgggaccccaaagcacgctatttgggtttggtagagaaaaccaggtgtaaaggactctgtctactagtgacgatgtcgaagacagggaaaatgaaaagggtcgccttgaagaagcctacgagaaatgtgaccgtgacctggatgaattgattgtacagcactacacagaattgacgacagccattcgcacataccagagcatcacagagcgcatcactaactcccgaaataaaataaagcaggtaaaagagaacctgctttcatgcaagatgctgctgcactgcaaacgggatgagcttcggaaactgtggattgaaggaattgagcataagcatgtcctgaacttgttggatgaaattgagaatatcaagcaagtgcctcaaaagctggaacagtgcatggccagcaagcactatctcagtgccactgacatgttggtgtcagcagttgagtctttggagggccccctgctccaggtggaaggactgagtgaccttcgactagagcttcacagcaagaagatgaaccttcacttggttctcatagatgaactacaccggcacctgtacatcaaatcgactagccgagttgtgcagcgtaacaaggaaaaagggaaaatcagctccctcgtgaaagatgcttctgttcctctgattgatgttacaaacctccctactcctcgaaaattccttgatacctctcactattctactgctggaagctcaagtgtgagggagataaatctgcaggacatcaaggaagatttagaattggatccagaggaaaacagcaccctgtttatgggtatcctcattaagggcttggcgaaactgaagaagatcccagaaacagttaaggcaatcatagagcgcttggagcaggagttgaagcaaattgtgaagaggtctacaacccaggtggcagacagtggctatcagcggggggagaacgttactgtggagaaccaaccaaggttgcttctagaactgctggagttactgtttgacaagtttaatgctgtagccgctgcacactctgtggtcctgggatacctgcaggacactgtagtgactccactgactcagcaggaagatatcaaactgtatgatatggcagatgtatgggtgaagatccaagatgttctacagatgctattaactgagtacttggatatgaaaaatactcgtacggcctctgaaccatcagctcaactaagctatgccagcactggacgagagtttgcagccttttttgccaagaagaaacctcaaaggccaaaaaattctcttttcaagttcgaatcgtcctcccatgccatcagtatgagcgcctatctgcgagaacagagaagggagctctatagtcggagtggagaactgcaagggggtcctgatgacaacttaattgaaggtggaggaacaaaatttgtctgcaaacctggagccagaaacattaccgtcatattccacccattactaagatttattcaggagattgagcatgctctgggtcttggcccagccaaacagtgtcctcttcgagagtttctcaccgtgtacatcaaaaacatctttctcaatcaagtcttggctgagatcaacaaggagattgaaggagtcactaaaacatctgaccctttgaagattctggccaacgcagacaccatgaaggtgctgggagtgcagcggcctctcctacagagcacaatcattgtggagaagacagttcaagacctcctgaacctgatgcatgacttgagtgcatattcagatcaattcctcaacatggtgtgcgtgaagctccaggagtacaaggacacctgcactgcagcttacaggggtattgtccagtcagaagaaaaacttgtcatcagtgcatcctgggcaaaagatgatgatatcagcagactcttgaaatctctaccaaactggatgaatatggctcaacccaaacagctgaggccaaaaagagaggaggaagaagatttcataagggcagcttttggcaaggagtctgaagttcttattgggaacctgggtgataaattaatccctccacaagacatccttcgtgacgtcagtgacctcaaagccttggccaacatgcatgaaagcctggaatggttggcaagtcgaacaaagtcagctttctccaatctttctacatcccagatgctttctcctgctcaagacagccacacgaacacggatctccccccagtgtcagagcagatcatgcagactctcagtgaacttgccaaatcgttccaggatatggctgaccgctgcttgcttgtcttacatctggaagtgagggttcactgtttccactatcttatccctcttgcaaaggaggggaactatgccattgtggctaatgtggaaagtatggattatgaccccctggtggtcaagctcaacaaagatatcagcgccattgaagaggccatgagcgccagccttcagcagcacaagttccagtatatcttcgaaggcctgggccacctgatctcctgcatcctcattaatggtgcccagtacttcaggcgcatcagtgagtctggcatcaagaaaatgtgtaggaacatttttgttcttcagcagaatttgaccaacatcaccatgtcgcgggaggcagacctggactttgcaaggcagtactacgagatgctttacaacacagctgacgagctcctgaacctggtggtggaccagggtgtgaagtacacggagctggagtacatccacgctctgaccctgctgcaccgcagccagactggggtgggggaactgaccacccagaacacgaggctgcagaggctcaaagagatcatctgcgagcaggctgccatcaagcaagccaccaaggacaagaagataactaccgtttagcagggcgtactgcggttggtgacgggggtcccctcagtcacactcacttttttccttgg

SEQ ID NO: 209661 - DNA, 1333 bp, Artificial Sequence
  derived and/or modified sequence
aaagtaacatgctgctttgcagttagctttttgcttagtttctagtatcagttttcatggaattttttcattgtctttacccactgatacatcagtgtactcttctgcttggtaccaaaaacggggatacaaaacgtggagaaaccctgggactgagccttgggttcctgccctctgtgccactaactccccgtgtatcccctcctcctctgcacctccagctcttcctctgtaaacgacaacctggcagcttttggcaaggagtctgaagttcttattgggaacctgggtgataaattaatccctccacaagacatccttcgtgacgtcagtgacctcaaagccttggccaacatgcatgaaagcctggaatggttggcaagtcgaacaaagtcagctttctccaatctttctacatcccagatgctttctcctgctcaagacagccacacgaacacggatctccccccagtgtcagagcagatcatgcagactctcagtgaacttgccaaatcgttccaggatatggctgaccgctgcttgcttgtcttacatctggaagtgagggttcactgtttccactatcttatccctcttgcaaaggaggggaactatgccattgtggctaatgtggaaagtatggattatgaccccctggtggtcaagctcaacaaagatatcagcgccattgaagaggccatgagcgccagccttcagcagcacaagttccagtatatcttcgaaggcctgggccacctgatctcctgcatcctcattaatggtgcccagtacttcaggcgcatcagtgagtctggcatcaagaaaatgtgtaggaacatttttgttcttcagcagaatttgaccaacatcaccatgtcgcgggaggcagacctggactttgcaaggcagtactacgagatgctttacaacacagctgacgagctcctgaacctggtggtggaccagggtgtgaagtacacggagctggagtacatccacgctctgaccctgctgcaccgcagccagactggggtgggggaactgaccacccagaacacgaggctgcagaggctcaaagagatcatctgcgagcaggctgccatcaagcaagccaccaaggacaagaagataactaccgtttagcagggcgtactgcggttggtgacgggggtcccctcagtcacactcacttttttccttggtatgttattgagtatattctgagcttagttttctctacagtgatactttagtggagaggaggtgtaaggattctttctctctggttttggcttttcatataaatgctaaaggaaggcgacagtacagagtg

SEQ ID NO: 209662 - DNA, 3038 bp, Artificial Sequence
  derived and/or modified sequence
tttatagagggcatctgtcggttgcatttgatttatttaaaacgttttcttacatggccaatttagtaacagcaagcaaaaccaaaatgagcaaaggagaggatcccaataatcccagatctataaagcggatttctcaagggggtagagataaccacctagctattgctaaatgtgatctcactcagttgaaaaagaaacaatcagaagtgagcaatgggagccgtgaaaccatctcaatgaagacttgttgccaacatggagatagaggatattggtctacagggtactattggagagggggtcctgatgacaacttaattgaaggtggaggaacaaaatttgtctgcaaacctggagccagaaacattaccgtcatattccacccattactaagatttattcaggagattgagcatgctctgggtcttggcccagccaaacagtgtcctcttcgagagtttctcaccgtgtacatcaaaaacatctttctcaatcaagtcttggctgagatcaacaaggagattgaaggagtcactaaaacatctgaccctttgaagattctggccaacgcagacaccatgaaggtgctgggagtgcagcggcctctcctacagagcacaatcattgtggagaagacagttcaagacctcctgaacctgatgcatgacttgagtgcatattcagatcaattcctcaacatggtgtgcgtgaagctccaggagtacaaggacacctgcactgcagcttacaggggtattgtccagtcagaagaaaaacttgtcatcagtgcatcctgggcaaaagatgatgatatcagcagactcttgaaatctctaccaaactggatgaatatggctcaacccaaacagctgaggccaaaaagagaggaggaagaagatttcataagggcagcttttggcaaggagtctgaagttcttattgggaacctgggtgataaattaatccctccacaagacatccttcgtgacgtcagtgacctcaaagccttggccaacatgcatgaaagcctggaatggttggcaagtcgaacaaagtcagctttctccaatctttctacatcccagatgctttctcctgctcaagacagccacacgaacacggatctccccccagtgtcagagcagatcatgcagactctcagtgaacttgccaaatcgttccaggatatggctgaccgctgcttgcttgtcttacatctggaagtgagggttcactgtttccactatcttatccctcttgcaaaggaggggaactatgccattgtggctaatgtggaaagtatggattatgaccccctggtggtcaagctcaacaaagatatcagcgccattgaagaggccatgagcgccagccttcagcagcacaagttccagtatatcttcgaaggcctgggccacctgatctcctgcatcctcattaatggtgcccagtacttcaggcgcatcagtgagtctggcatcaagaaaatgtgtaggaacatttttgttcttcagcagaatttgaccaacatcaccatgtcgcgggaggcagacctggactttgcaaggcagtactacgagatgctttacaacacagctgacgagctcctgaacctggtggtggaccagggtgtgaagtacacggagctggagtacatccacgctctgaccctgctgcaccgcagccagactggggtgggggaactgaccacccagaacacgaggctgcagaggctcaaagagatcatctgcgagcaggctgccatcaagcaagccaccaaggacaagaagataactaccgtttagcagggcgtactgcggttggtgacgggggtcccctcagtcacactcacttttttccttggtatgttattgagtatattctgagcttagttttctctacagtgatactttagtggagaggaggtgtaaggattctttctctctggttttggcttttcatataaatgctaaaggaaggcgacagtacagagtgttttggttgaacaactactttaatgcagtcaaatctaacgggactagggtgggatagggaggaaggtggtatcaaattgttggactctgaaaaacaagtggatggattactaatatttgatttattactcaatatatatataattccagccttggaaagtaggaaagtaggctgctacctaacttttagtcccttccaaaaccatttagtagggttctattacataaacagtagggtttttcctctcctgaccttatccgtttacagttcaatgaaataagtgtatgtgcattgctgtctgtctctattgccaaaatcaaataaatggcttctcagctgctgtttacaacaaacttccctaaccaaaacagaacctctaatttagggctaggaatagaagtcttttgatcccagtccctgggacagttttgtatgctgtatcttgtacacaggttgtaggttggtttattgccattttgttttatttctgctgtataaaaaccaagagccagacaattagacaactatggaggaatgaaaggcaattcaaacatctgcttgattcccgccccgccacccctaatttctgagagaataatggttagagaacattgcatctcacttgaaacatcctttgggggtaaatgattcttaggtgctcacttggtctgagctcagctgaatgcagggaagatgggacagagtgacatttctcctctgtgcggcctccagctgagcctgtctctgaattgttccctcccccgcaatgtgggcacttaccatgttcctggcacactggacctcaccatgtcccccggtcaccagtcctcttgctgcccatggttcataggtcatagaaggcagcaatgcactgactgggccacatcttgaaaactcgtggaaagggaaaggggaggagatgggactttgaccacacacagtgatgcctcacaccctgaaggtgggggattttgtacctgtttgtacaactttggtcttgatgggaaaaatggagaattaaaaagtgttttgagaagctt

SEQ ID NO: 209663 - DNA, 2263 bp, Artificial Sequence
  derived and/or modified sequence
ctagcggctctccccgcgtccaagatggcggcagaagcagctggagttactgtttgacaagtttaatgctgtagccgctgcacactctgtggtcctgggatacctgcaggacactgtagtgactccactgactcagcaggaagatatcaaactgtatgatatggcagatgtatgggtgaagatccaagatgttctacagatgctattaactgagtacttggatatgaaaaatactcgtacggcctctgaaccatcagctcaactaagctatgccagcactggacgagagtttgcagccttttttgccaagaagaaacctcaaaggccaaaaaattctcttttcaagttcgaatcgtcctcccatgccatcagtatgagcgcctatctgcgagaacagagaagggagctctatagtcggagtggagaactgcaagggggtcctgatgacaacttaattgaaggtggaggaacaaaatttgtctgcaaacctggagccagaaacattaccgtcatattccacccattactaagatttattcaggagattgagcatgctctgggtcttggcccagccaaacagtgtcctcttcgagagtttctcaccgtgtacatcaaaaacatctttctcaatcaagtcttggctgagatcaacaaggagattgaaggagtcactaaaacatctgaccctttgaagattctggccaacgcagacaccatgaaggtgctgggagtgcagcggcctctcctacagagcacaatcattgtggagaagacagttcaagacctcctgaacctgatgcatgacttgagtgcatattcagatcaattcctcaacatggtgtgcgtgaagctccaggagtacaaggacacctgcactgcagcttacaggggtattgtccagtcagaagaaaaacttgtcatcagtgcatcctgggcaaaagatgatgatatcagcagactcttgaaatctctaccaaactggatgaatatggctcaacccaaacagctgaggccaaaaagagaggaggaagaagatttcataagggcagcttttggcaaggagtctgaagttcttattgggaacctgggtgataaattaatccctccacaagacatccttcgtgacgtcagtgacctcaaagccttggccaacatgcatgaaagcctggaatggttggcaagtcgaacaaagtcagctttctccaatctttctacatcccagatgctttctcctgctcaagacagccacacgaacacggatctccccccagtgtcagagcagatcatgcagactctcagtgaacttgccaaatcgttccaggatatggctgaccgctgcttgcttgtcttacatctggaagtgagggttcactgtttccactatcttatccctcttgcaaaggaggggaactatgccattgtggctaatgtggaaagtatggattatgaccccctggtggtcaagctcaacaaagatatcagcgccattgaagaggccatgagcgccagccttcagcagcacaagttccagtatatcttcgaaggcctgggccacctgatctcctgcatcctcattaatggtgcccagtacttcaggcgcatcagtgagtctggcatcaagaaaatgtgtaggaacatttttgttcttcagcagaatttgaccaacatcaccatgtcgcgggaggcagacctggactttgcaaggcagtactacgagatgctttacaacacagctgacgagctcctgaacctggtggtggaccagggtgtgaagtacacggagctggagtacatccacgctctgaccctgctgcaccgcagccagactggggtgggggaactgaccacccagaacacgaggctgcagaggctcaaagagatcatctgcgagcaggctgccatcaagcaagccaccaaggacaagaagataactaccgtttagcagggcgtactgcggttggtgacgggggtcccctcagtcacactcacttttttccttggtatgttattgagtatattctgagcttagttttctctacagtgatactttagtggagaggaggtgtaaggattctttctctctggttttggcttttcatataaatgctaaaggaaggcgacagtacagagtgttttggttgaacaactactttaatgcagtcaaatctaacgggactagggtgggatagggaggaaggtggtatcaaattgttggactctgaaaaacaagtggatggattactaatatttgatttattactca

SEQ ID NO: 209664 - DNA, 2925 bp, Artificial Sequence
  derived and/or modified sequence
atggcggccgaggcagcgggcggcaagtacagatcaacggtgtccaaatcaaaagatccatctggattactgatctctgtcattcgcaccctttctacatctgacgatgtagaggacagagagaacgaaaagggtcgcttggaagaagcatatgaaaaatgcgaccgagacctagacgaacttatagtgcagcattacactgaattgaccactgcgatcaggacttatcagagcatcactgaacgcattaccaactccagaaacaaaatcaagcaggtcaaggaaaatctactcagctgcaagatgctgctgcactgcaaaagagatgagcttcgtaaactgtggatcgagggcatagaacacaagcatgtgctcaacctgctggatgagatcgagaatataaagcaggtgcctcagaagctcgagcaatgcatggcttcaaagcactacctgtctgcaaccgacatgctcgtgtcagccgtcgaaagcctggaaggccctctgctgcaggttgaggggctgagcgacctgcgcctggagctgcactctaagaagatgaatcttcatttagttcttatagatgagttgcacaggcatctgtatatcaagtctaccagtagggtagtccagaggaacaaagagaagggcaagatttcaagccttgtgaaggacgcctctgtcccactcattgacgtcaccaaccttcctactcccagaaagtttctggacacttcccattatagcactgccggctccagttcagtgcgcgaaatcaacctccaggacattaaggaagaccttgagcttgaccccgaagagaactccacactctttatgggcatcctaatcaagggcctcgctaagctgaaaaagattccggagacagtgaaggctattatcgagcgactggagcaagaactgaaacagatagtcaaacgcagcaccactcaagtagccgattcaggctatcagcgtggggagaatgtcaccgtggaaaatcagcctcggttgctattagagctcctcgagctcctgttcgacaagtttaatgctgtggccgccgctcatagtgtagtcctgggatatctccaggatactgtagtgacacctctgactcagcaggaggacattaagttatatgatatggccgatgtctgggtcaagatacaggatgtcctccagatgcttcttacagagtatctggatatgaaaaataccagaacagcctctgagccatcggctcagctgagctatgcatccaccggtagagaattcgctgctttcttcgccaagaagaaaccgcagagaccgaagaacagtctgtttaagtttgagtccagcagccatgcaattagcatgagcgcttatctgcgtgagcaaagaagggagctgtacagtaggagcggagagctgcagggcggcccagatgataatctgattgaaggcgggggtacaaaattcgtgtgtaaacctggtgcccgcaatataaccgtgatttttcatccactgctcaggttcattcaggagattgagcacgccctggggctgggcccagccaaacagtgccctctgcgcgagttccttacagtgtatattaaaaatatattccttaaccaggttctcgcggagatcaacaaagagattgagggcgtgactaagacatctgaccccctgaagattctggccaatgctgataccatgaaggtgctgggcgttcagaggccactccttcaatccaccattattgttgagaagacagtgcaggatttgctcaatctcatgcacgatctgtccgcttattcagaccagttcctgaatatggtatgtgtaaagttacaggagtacaaggatacgtgcacggctgcttaccgtggtatcgtgcagtctgaggagaagcttgtcatctctgcatcttgggctaaggacgatgacatcagtcgcctgctgaagtcactgcccaactggatgaacatggcccagcctaagcaactgcgaccaaagcgcgaagaagaagaggattttattcgcgcagcatttggaaaggagagcgaggtactgatcggcaaccttggagacaaacttattccgccacaggacatcctacgcgatgtgtccgacctgaaggccctagcaaacatgcatgaatccctggaatggctggcatctcggacaaagtccgccttttccaatctgagtacctctcagatgctgagccccgcccaggacagccataccaacaccgatctgcctcctgtgagcgagcaaatcatgcaaacacttagtgaactggccaaaagcttccaggacatggctgatagatgtctcttggtactccatttagaggtgcgggtgcattgcttccactacctgatcccactcgcaaaagaaggcaattatgcaatcgttgcaaatgtcgagagtatggattatgacccactggtggtgaagctgaacaaggatatttcagcaattgaggaggcaatgtctgcctctctgcagcagcacaagtttcaatatatcttcgaaggtctcggccatctgatctcctgcatactaatcaatggcgctcagtacttcaggcgcatatccgagtcaggaattaaaaaaatgtgcaggaatatctttgtcctgcagcagaacttgacaaacattaccatgtccagggaagcagacctcgatttcgctcgtcagtactatgagatgttgtacaatacagccgacgagctcttgaatctggtggttgatcaaggggtgaaatatactgagctggagtacattcacgccttaacattattgcacaggtcgcagaccggagtgggtgagctgacaacacagaacacgcggctccagagattgaaagaaataatttgtgagcaggccgccatcaaacaggccacgaaagataaaaagatcacaaccgtgtag

SEQ ID NO: 209665 - DNA, 2622 bp, Artificial Sequence
  derived and/or modified sequence
atgttactgcactgtaagcgggacgaacttcgcaaactttggatcgagggcattgagcacaaacacgtgctgaaccttttggatgagatagagaacatcaaacaggtgcctcagaagctggagcagtgcatggcctcaaagcactacctctctgccaccgacatgctggtgtccgcggtggagtcactggaaggcccactgctccaggtggagggtctcagcgatctgagattagagcttcatagcaagaaaatgaatctccacctagtgttgatagacgagctccacagacatttgtatattaagagcactagtagggttgtgcagcgcaataaagaaaaggggaagattagctcgttggtgaaagatgcaagcgtgccactcatcgatgtgacaaatctcccaacgcctagaaaatttctcgatacctcacactactcaactgctgggtctagtagtgtccgcgaaataaacctacaggacataaaagaagatctggaactggatccagaggaaaacagcacgctgtttatgggtatattaatcaagggcttagccaagctaaagaagatcccagaaacagtgaaggccatcattgaacgcctagaacaagagctcaaacagatcgtgaaacgcagtactactcaagtcgctgattccggatatcaacggggtgagaatgtgacagttgagaaccagccccgattgctgctagagctcttagaactattatttgataagtttaatgccgttgccgcagcccacagcgtagtcctgggatacctccaggataccgttgtgacgcccctgactcaacaggaggatataaaactttatgatatggccgacgtgtgggtgaaaatccaagacgtgctgcagatgctgctgaccgagtatctcgacatgaagaatacgagaacagcgtctgagccaagcgcccaactctcatacgccagcacaggccgcgagtttgccgctttcttcgcaaagaaaaaacctcaacggcctaaaaactccttatttaaatttgaaagtagtagtcacgcaatttcaatgtcagcatatctgcgagagcaacgtcgggagttgtactcacgcagtggcgagctgcaggggggccccgacgacaacttgatcgaagggggaggaaccaaatttgtgtgtaaacctggcgcccgcaatataaccgtgatctttcatcctctgctccggttcatccaagagatcgaacatgccctcggactgggaccggccaagcagtgcccgctgagagagttcctcacagtgtacattaagaacatctttctgaaccaggttctggccgagataaataaggagattgaaggggtgaccaagacttccgatccactgaaaatactagctaatgcagatactatgaaagtcctcggagtccagcgacctctcctgcagtcgaccattattgtggaaaaaactgtgcaggacttgcttaaccttatgcatgacttgagtgcatactccgatcagtttttaaatatggtgtgcgtgaagttacaggagtataaggacacatgcactgcagcctatcgtggcatcgtgcagtccgaagagaagctcgttatctctgcaagctgggccaaagatgacgatatttctcggctgctgaagtccttgccaaactggatgaacatggcacaaccaaaacagctgaggccaaaacgagaggaggaggaggactttatccgggctgccttcggcaaggagagcgaggtgcttattggcaatctcggggacaagctgataccaccacaagacatccttcgggatgtttcagatcttaaagctttggccaacatgcacgaatccctggagtggctggcctcccgcacaaagtctgctttttcaaacctgtcgacgagtcagatgttatctccagcacaagattcacatactaatacagacctgccaccagtctcagagcagattatgcagacactcagtgagctcgctaaaagttttcaggacatggcagatagatgcctcttagttctccacttggaggtgcgcgtgcactgtttccattacctgattccactggcaaaagaaggcaactacgccattgttgccaatgttgagtctatggattatgatccgctggtagtgaaacttaacaaagacatctctgctatcgaggaagccatgtccgcatctctccaacaacacaaatttcagtacatctttgaaggactcggccacctgatcagctgcattctcattaatggggctcagtacttcaggcgtatctctgagtcaggaatcaaaaagatgtgtaggaatatctttgtattacagcaaaatcttacaaacatcactatgagtcgtgaggctgatctcgacttcgccagacaatactacgagatgctctataatacggcagatgaactgcttaacctggtcgtggaccagggcgtaaagtacaccgagctggaatacattcacgcgctaaccctgttacaccgaagccaaaccggggtgggggagttaaccactcagaacacgagactgcagaggctcaaggagatcatttgcgaacaggcggccataaagcaggccaccaaggacaaaaaaatcaccactgtgtag

SEQ ID NO: 209666 - DNA, 789 bp, Artificial Sequence
  derived and/or modified sequence
atgcacgagagcctcgaatggctcgcatctaggaccaagagcgcctttagcaatctgtctacttcccagatgctgtccccggcccaggatagtcacactaacacagacttaccccccgtatccgagcaaataatgcagaccctctctgagttggcgaagagttttcaggacatggccgataggtgtttgctggtattgcatctggaagtgcgcgttcattgtttccattacctcatccctctggcgaaggaaggtaactatgccatagtagccaacgtggagtcgatggattatgacccgttagttgtgaaattgaacaaggacatttccgccatcgaagaggctatgtcggccagcctgcagcagcacaagtttcagtatatttttgaggggttgggccacctcatttcatgtattctgataaacggagctcagtatttccggcgcatctccgagtccgggatcaagaagatgtgtcgcaatattttcgtgctgcagcagaacctgactaacattaccatgagtagagaggcagatttggactttgctcgccagtactacgagatgctctacaacactgcagatgagctcctcaacctcgtcgtcgaccagggcgtgaaatacaccgagctggaatatattcacgcgctcaccctgttgcatcggtcccagaccggcgtcggcgaattgaccactcagaatacccgacttcagaggcttaaagaaatcatttgcgagcaggccgcaatcaaacaggccaccaaagataaaaagatcaccacagtgtag

SEQ ID NO: 209667 - DNA, 1755 bp, Artificial Sequence
  derived and/or modified sequence
atggcgaatctcgtgacagctagtaagaccaaaatgtcgaagggcgaggacccgaacaatcccaggagcattaagcggatatcccaggggggtagggacaaccatctagcgatcgccaagtgcgacttgacacagctgaagaaaaaacagagcgaggtctccaatggcagcagagagacgatcagtatgaagacatgttgccaacacggcgatcggggctactggtctactgggtactactggagaggaggccccgatgacaacctcatcgagggggggggcactaagtttgtctgtaaacccggcgcacgcaacattacagtcatttttcaccccttgcttcgcttcatccaagagatcgagcacgctctggggctcgggccagccaaacagtgtcctctgcgcgagttccttacagtgtacattaagaatatattcctgaatcaggtgctcgcggagattaataaagagatcgagggggttacgaagacttctgacccattgaagattctggctaacgcagataccatgaaagttctgggcgtgcaacgaccattacttcaatccactatcatagtcgagaaaacagtgcaggatcttctgaatctgatgcacgacctgtccgcctactctgatcagtttttgaatatggtgtgcgtgaaactgcaggagtacaaggacacttgtaccgcggcatacaggggaattgtgcaaagcgaagagaagttggtcatctctgcatcatgggctaaagatgatgatatcagcaggctgttgaagtcactcccaaattggatgaatatggcccaacccaaacagcttagacccaaacgcgaagaggaggaggacttcattagagccgctttcggcaaagagagtgaggtcttaatcggcaatttgggcgacaagttgattccgcctcaggacatactacgcgatgtgtccgatctaaaggccctcgcaaatatgcatgagtccttggagtggctcgccagtcgtacaaaatccgcttttagtaatctttcaacatctcaaatgctatcaccggcgcaagattcccatacaaacaccgaccttccacccgtgagtgaacagattatgcagactctgagcgagctggctaagtcttttcaggacatggccgacaggtgcctgttggtattgcacctggaggtacgggtccactgtttccactaccttatccctctcgcaaaagaggggaattatgccatcgtcgccaatgtcgaaagtatggattatgaccctctggtcgtcaagctgaacaaggacatttctgccattgaagaggctatgagcgccagtcttcaacaacacaaatttcaatacatcttcgaggggctcggccaccttatttcctgtattcttatcaatggtgcccagtattttagaaggatatctgagagcgggattaaaaaaatgtgtcggaacatctttgtcctgcagcagaacttaactaatattacaatgtcaagggaggctgacctggacttcgcaagacaatactacgagatgctgtacaatactgcagacgagctgctgaatttagtcgtggaccagggagtgaaatacaccgaactggagtatattcatgcgctgaccctgttgcatcgaagccaaacaggggtgggggaattaacaacacagaacacccgcctgcaacgcctcaaggaaatcatctgcgagcaggccgccatcaagcaagccacaaaggacaaaaagataacgaccgtgtag

SEQ ID NO: 209668 - DNA, 1782 bp, Artificial Sequence
  derived and/or modified sequence
atggctgacgtctgggtgaaaatacaggacgtcctgcagatgctgctcactgagtatttggatatgaagaacaccagaactgcttccgagccctcagctcaactgtcatatgcttccaccggtcgggagtttgcagcatttttcgctaagaagaagccccagcgccccaagaattctttgtttaagtttgagagctctagtcacgctatttctatgagtgcctatctcagggagcaacgtcgggagctctacagcagaagcggcgagttgcagggggggcctgacgataacctaatcgaaggaggtggcactaagttcgtgtgtaaaccaggtgcaagaaacattaccgtcatcttccaccctctgctgcggtttatccaggagattgagcacgcgctcggcctcggccccgctaaacagtgccccctgcgcgaattcctgaccgtatacataaagaacatatttctgaatcaggtccttgcagaaattaataaagagattgaaggggtaaccaagacaagtgacccactgaagatactggccaacgctgatactatgaaagttctgggtgtacagcgcccactactgcagtctaccatcatagtggagaaaaccgtacaggatttattgaacctcatgcacgatctctccgcctattccgaccagtttctaaatatggtttgtgtcaaactacaggagtacaaagacacttgcaccgctgcttacagaggcatagtgcagagcgaagaaaagttggtgatctccgcctcctgggctaaagatgatgacatctccagactgctcaaatccctacctaactggatgaacatggcacagccgaaacagctccgacccaagcgggaggaggaagaggattttattagagccgcctttgggaaagagtctgaagttctcatagggaatctaggagacaaacttatcccaccgcaggacatcctgcgggacgtgagcgacctgaaggcactggcaaatatgcacgagtctctggagtggttggcaagtcgtacgaaaagcgcattctccaatctctccactagccagatgctatccccagctcaggactctcacaccaacaccgacctcccgcccgtgtcagagcagatcatgcaaacattgtctgaactcgccaaaagttttcaagacatggccgaccggtgcctgctggtactccacctagaagtcagggtgcactgttttcattacctgatcccgctggccaaggaaggaaactacgcaatcgtggccaacgttgagagcatggactacgacccattggttgtgaaactcaacaaagatatctctgctatcgaagaagccatgtctgcatcactgcaacagcacaaattccaatatatattcgaaggcttggggcatctcatcagctgcatacttattaacggcgcacagtattttcgaaggatctccgaatccgggattaagaagatgtgtaggaacatcttcgtcctccaacagaatctaaccaacattacaatgagtcgtgaagcagatctggactttgcacgccaatactacgagatgttatacaacacagcagatgagttgctgaacttggttgtcgatcagggggtaaagtatacagaactggaatatatccacgccctcactctcttgcaccgctcacagactggcgtgggtgagctgactacccagaacacacggcttcaaaggctgaaggaaatcatctgcgaacaggccgcgattaagcaggccaccaaagacaagaaaatcaccacagtgtag

SEQ ID NO: 209669 - DNA, 2925 bp, Artificial Sequence
  derived and/or modified sequence
atggctgctgaggccgccggcggcaagtaccgcagcacagtgtccaagagcaaggaccccagcggcctgctgatcagcgtcatccgcaccctgagcaccagtgatgatgtggaggacagagaaaatgagaagggccgcctggaggaggcctatgaaaaatgtgaccgggacctggatgagctgattgtgcagcactacacagagctgaccacagccatccgcacctaccagagcatcacagagcgcatcaccaacagcaggaacaagatcaagcaggtgaaggagaacctgctgagctgcaagatgctgctgcactgcaagagagatgagctgaggaagctgtggattgagggcatcgagcacaagcacgtgctgaacctgctggatgaaattgagaacatcaagcaggtgccccagaagctggagcagtgcatggccagcaagcactacctgagcgccacagacatgctggtgtctgctgtggagagcctggagggccccctgctgcaggtggagggcctgagtgacctgcggctggagctgcacagcaagaagatgaacctgcacctggtgctgattgatgagctgcaccgccacctgtacatcaagagcaccagccgggtggtgcagaggaacaaggagaagggcaagatcagcagcctggtgaaggatgcctctgtgcccctgattgatgtgaccaacctgcccacccccaggaagttcctggacaccagccactacagcacagctggcagcagctctgtgcgggagatcaacctgcaggacatcaaggaggacctggagctggaccctgaggagaacagcaccctcttcatgggcatcctgatcaagggcctggccaagctgaagaagatccctgagaccgtgaaggccatcatcgagcggctggagcaggagctgaagcagatcgtgaagaggagcaccacccaggtggccgacagcggctaccagagaggagaaaatgtgacagtggagaaccagccccggctgctgctggagctgctggagctgctgtttgacaagttcaatgctgtggccgccgcccacagcgtggtgctgggctacctgcaggacacagtggtgacccccctgacccagcaggaggacatcaagctgtatgacatggctgatgtgtgggtgaagatccaggatgtgctgcagatgctgctgacagagtacctggacatgaagaacaccaggacagccagcgagcccagcgcccagctgtcctatgccagcacaggccgggagtttgctgccttctttgccaagaagaagccccagaggcccaagaacagcctcttcaagtttgagagcagcagccacgccatctccatgtctgcctacctgcgggagcagaggcgggagctgtacagccgcagcggggagctgcagggcggcccagatgacaacctgattgagggcggcggcaccaagtttgtgtgcaagccaggggccaggaacatcaccgtcatcttccaccccctgctgcgcttcatccaggagattgagcacgccctgggcctgggccctgccaagcagtgccccctgcgggagttcctgactgtgtacatcaagaacatcttcctgaaccaggtgctggccgagatcaacaaggagattgagggcgtgaccaagaccagtgaccccctgaagatcctggccaatgctgacaccatgaaggtgctgggcgtgcagaggcccctgctgcagagcaccatcatcgtggagaagacagtgcaggacctgctgaacctgatgcatgacctgagcgcctacagcgaccagttcctgaacatggtgtgtgtgaagctgcaggagtacaaggacacctgcacagctgcctaccggggcatcgtgcagagcgaggagaagctggtgatcagcgcctcctgggccaaggatgatgacatcagccggctgctgaagagcctgcccaactggatgaacatggcccagcccaagcagctgcggcccaagcgggaggaggaggaggacttcatccgggccgccttcggcaaggagagcgaggtgctgattggcaacctgggggacaagctgatccccccccaggacatcctgagagatgtgtctgacctgaaggccctggccaacatgcatgagagcctggagtggctggccagcaggaccaagagcgccttcagcaacctgagcaccagccagatgctgagccctgcccaggacagccacaccaacacagacctgccccctgtgtctgagcagatcatgcagaccctgtctgagctggccaagagcttccaggacatggctgaccgctgcctgctggtgctgcacctggaggtgcgggtgcactgcttccactacctgatccccctggccaaggagggcaactatgccatcgtggccaacgtggagagcatggactatgaccccctggtggtgaagctgaacaaggacatcagcgccatcgaggaggccatgtctgccagcctgcagcagcacaagttccagtacatctttgagggcctgggccacctgatcagctgcatcctgatcaacggggcccagtacttccgccgcatcagcgagagcggcatcaagaagatgtgcaggaacatctttgtgctgcagcagaacctgaccaacatcaccatgagccgggaggccgacctggactttgcccggcagtactatgagatgctgtacaacacagcagatgagctgctgaacctggtggtggaccagggcgtgaagtacacagagctggagtacatccacgccctgaccctgctgcacaggagccagacaggagtgggggagctgaccacccagaacacccggctgcagaggctgaaggagatcatctgtgagcaggccgccatcaagcaggccaccaaggacaagaagatcaccaccgtgtag

SEQ ID NO: 209670 - DNA, 2622 bp, Artificial Sequence
  derived and/or modified sequence
atgctgctgcactgcaagagagatgagctgaggaagctgtggattgagggcatcgagcacaagcacgtgctgaacctgctggatgaaattgagaacatcaagcaggtgccccagaagctggagcagtgcatggccagcaagcactacctgagcgccacagacatgctggtgtctgctgtggagagcctggagggccccctgctgcaggtggagggcctgagtgacctgcggctggagctgcacagcaagaagatgaacctgcacctggtgctgattgatgagctgcaccgccacctgtacatcaagagcaccagccgggtggtgcagaggaacaaggagaagggcaagatcagcagcctggtgaaggatgcctctgtgcccctgattgatgtgaccaacctgcccacccccaggaagttcctggacaccagccactacagcacagctggcagcagctctgtgcgggagatcaacctgcaggacatcaaggaggacctggagctggaccctgaggagaacagcaccctcttcatgggcatcctgatcaagggcctggccaagctgaagaagatccctgagaccgtgaaggccatcatcgagcggctggagcaggagctgaagcagatcgtgaagaggagcaccacccaggtggccgacagcggctaccagagaggagaaaatgtgacagtggagaaccagccccggctgctgctggagctgctggagctgctgtttgacaagttcaatgctgtggccgccgcccacagcgtggtgctgggctacctgcaggacacagtggtgacccccctgacccagcaggaggacatcaagctgtatgacatggctgatgtgtgggtgaagatccaggatgtgctgcagatgctgctgacagagtacctggacatgaagaacaccaggacagccagcgagcccagcgcccagctgtcctatgccagcacaggccgggagtttgctgccttctttgccaagaagaagccccagaggcccaagaacagcctcttcaagtttgagagcagcagccacgccatctccatgtctgcctacctgcgggagcagaggcgggagctgtacagccgctctggagagctgcagggcggcccagatgacaacctgattgaaggaggcggcaccaagtttgtgtgcaagccaggggccaggaacatcaccgtcatcttccaccccctgctgcgcttcatccaggagattgaacatgccctgggcctgggccctgccaagcagtgccccctgcgggagttcctgactgtgtacatcaagaacatcttcctgaaccaggtgctggccgagatcaacaaggagattgaaggagtgaccaagaccagtgaccccctgaagatcctggccaatgctgacaccatgaaggtgctgggcgtgcagaggcccctgctgcagagcaccatcatcgtggagaagacagtgcaggacctgctgaacctgatgcatgacctgagcgcctacagcgaccagttcctgaacatggtgtgtgtgaagctgcaggagtacaaggacacctgcacagctgcctaccggggcatcgtgcagagcgaggagaagctggtgatcagcgcctcctgggccaaggatgatgacatcagccggctgctgaagagcctgcccaactggatgaacatggcccagcccaagcagctgcggcccaagcgggaggaggaggaggacttcatccgggccgccttcggcaaggagagcgaggtgctgattggcaacctgggggacaagctgatccccccccaggacatcctgagagatgtgtctgacctgaaggccctggccaacatgcatgagagcctggagtggctggccagcaggaccaagagcgccttcagcaacctgagcaccagccagatgctgagccctgcccaggacagccacaccaacacagacctgccccctgtgtctgagcagatcatgcagaccctgtctgagctggccaagagcttccaggacatggctgaccgctgcctgctggtgctgcacctggaggtgcgggtgcactgcttccactacctgatccccctggccaaggagggcaactatgccatcgtggccaacgtggagagcatggactatgaccccctggtggtgaagctgaacaaggacatcagcgccatcgaggaggccatgtctgccagcctgcagcagcacaagttccagtacatctttgagggcctgggccacctgatcagctgcatcctgatcaatggagcccagtacttccgccgcatcagcgagagcggcatcaagaagatgtgcaggaacatctttgtgctgcagcagaacctgaccaacatcaccatgagccgggaggccgacctggactttgcccggcagtactatgagatgctgtacaacacagcagatgagctgctgaacctggtggtggaccagggcgtgaagtacacagagctggagtacatccacgccctgaccctgctgcacaggagccagacaggagtgggggagctgaccacccagaacacccggctgcagaggctgaaggagatcatctgtgagcaggccgccatcaagcaggccaccaaggacaagaagatcaccaccgtgtag

SEQ ID NO: 209671 - DNA, 789 bp, Artificial Sequence
  derived and/or modified sequence
atgcatgagagcctggagtggctggccagcaggaccaagagcgccttcagcaacctgagcaccagccagatgctgagccctgcccaggacagccacaccaacacagacctgccccctgtgtctgagcagatcatgcagaccctgtctgagctggccaagagcttccaggacatggctgaccgctgcctgctggtgctgcacctggaggtgcgggtgcactgcttccactacctgatccccctggccaaggagggcaactatgccatcgtggccaacgtggagagcatggactatgaccccctggtggtgaagctgaacaaggacatcagcgccatcgaggaggccatgtctgccagcctgcagcagcacaagttccagtacatctttgagggcctgggccacctgatcagctgcatcctgatcaacggggcccagtacttccgccgcatcagcgagagcggcatcaagaagatgtgcaggaacatctttgtgctgcagcagaacctgaccaacatcaccatgagccgggaggccgacctggactttgcccggcagtactatgagatgctgtacaacacagcagatgagctgctgaacctggtggtggaccagggcgtgaagtacacagagctggagtacatccacgccctgaccctgctgcacaggagccagacaggagtgggggagctgaccacccagaacacccggctgcagaggctgaaggagatcatctgtgagcaggccgccatcaagcaggccaccaaggacaagaagatcaccaccgtgtag

SEQ ID NO: 209672 - DNA, 1755 bp, Artificial Sequence
  derived and/or modified sequence
atggccaacctggtgacagccagcaagaccaagatgagcaagggggaggaccccaacaaccccaggagcatcaagaggatcagccagggcggccgggacaaccacctggccatcgccaagtgtgacctgacccagctgaagaagaagcagagcgaggtgtccaatggcagccgggagaccatctccatgaagacctgctgccagcacggggaccggggctactggagcacaggctactactggaggggcggcccagatgacaacctgattgagggcggcggcaccaagtttgtgtgcaagccaggggccaggaacatcaccgtcatcttccaccccctgctgcgcttcatccaggagattgagcacgccctgggcctgggccctgccaagcagtgccccctgcgggagttcctgactgtgtacatcaagaacatcttcctgaaccaggtgctggccgagatcaacaaggagattgagggcgtgaccaagaccagtgaccccctgaagatcctggccaatgctgacaccatgaaggtgctgggcgtgcagaggcccctgctgcagagcaccatcatcgtggagaagacagtgcaggacctgctgaacctgatgcatgacctgagcgcctacagcgaccagttcctgaacatggtgtgtgtgaagctgcaggagtacaaggacacctgcacagctgcctaccggggcatcgtgcagagcgaggagaagctggtgatcagcgcctcctgggccaaggatgatgacatcagccggctgctgaagagcctgcccaactggatgaacatggcccagcccaagcagctgcggcccaagcgggaggaggaggaggacttcatccgggccgccttcggcaaggagagcgaggtgctgattggcaacctgggggacaagctgatccccccccaggacatcctgagagatgtgtctgacctgaaggccctggccaacatgcatgagagcctggagtggctggccagcaggaccaagagcgccttcagcaacctgagcaccagccagatgctgagccctgcccaggacagccacaccaacacagacctgccccctgtgtctgagcagatcatgcagaccctgtctgagctggccaagagcttccaggacatggctgaccgctgcctgctggtgctgcacctggaggtgcgggtgcactgcttccactacctgatccccctggccaaggagggcaactatgccatcgtggccaacgtggagagcatggactatgaccccctggtggtgaagctgaacaaggacatcagcgccatcgaggaggccatgtctgccagcctgcagcagcacaagttccagtacatctttgagggcctgggccacctgatcagctgcatcctgatcaacggggcccagtacttccgccgcatcagcgagagcggcatcaagaagatgtgcaggaacatctttgtgctgcagcagaacctgaccaacatcaccatgagccgggaggccgacctggactttgcccggcagtactatgagatgctgtacaacacagcagatgagctgctgaacctggtggtggaccagggcgtgaagtacacagagctggagtacatccacgccctgaccctgctgcacaggagccagacaggagtgggggagctgaccacccagaacacccggctgcagaggctgaaggagatcatctgtgagcaggccgccatcaagcaggccaccaaggacaagaagatcaccaccgtgtag

SEQ ID NO: 209673 - DNA, 1782 bp, Artificial Sequence
  derived and/or modified sequence
atggctgatgtgtgggtgaagatccaggatgtgctgcagatgctgctgacagagtacctggacatgaagaacaccaggacagccagcgagcccagcgcccagctgtcctatgccagcacaggccgggagtttgctgccttctttgccaagaagaagccccagaggcccaagaacagcctcttcaagtttgagagcagcagccacgccatctccatgtctgcctacctgcgggagcagaggcgggagctgtacagccgctctggagagctgcagggcggcccagatgacaacctgattgaaggaggcggcaccaagtttgtgtgcaagccaggggccaggaacatcaccgtcatcttccaccccctgctgcgcttcatccaggagattgaacatgccctgggcctgggccctgccaagcagtgccccctgcgggagttcctgactgtgtacatcaagaacatcttcctgaaccaggtgctggccgagatcaacaaggagattgaaggagtgaccaagaccagtgaccccctgaagatcctggccaatgctgacaccatgaaggtgctgggcgtgcagaggcccctgctgcagagcaccatcatcgtggagaagacagtgcaggacctgctgaacctgatgcatgacctgagcgcctacagcgaccagttcctgaacatggtgtgtgtgaagctgcaggagtacaaggacacctgcacagctgcctaccggggcatcgtgcagagcgaggagaagctggtgatcagcgcctcctgggccaaggatgatgacatcagccggctgctgaagagcctgcccaactggatgaacatggcccagcccaagcagctgcggcccaagcgggaggaggaggaggacttcatccgggccgccttcggcaaggagagcgaggtgctgattggcaacctgggggacaagctgatccccccccaggacatcctgagagatgtgtctgacctgaaggccctggccaacatgcatgagagcctggagtggctggccagcaggaccaagagcgccttcagcaacctgagcaccagccagatgctgagccctgcccaggacagccacaccaacacagacctgccccctgtgtctgagcagatcatgcagaccctgtctgagctggccaagagcttccaggacatggctgaccgctgcctgctggtgctgcacctggaggtgcgggtgcactgcttccactacctgatccccctggccaaggagggcaactatgccatcgtggccaacgtggagagcatggactatgaccccctggtggtgaagctgaacaaggacatcagcgccatcgaggaggccatgtctgccagcctgcagcagcacaagttccagtacatctttgagggcctgggccacctgatcagctgcatcctgatcaatggagcccagtacttccgccgcatcagcgagagcggcatcaagaagatgtgcaggaacatctttgtgctgcagcagaacctgaccaacatcaccatgagccgggaggccgacctggactttgcccggcagtactatgagatgctgtacaacacagcagatgagctgctgaacctggtggtggaccagggcgtgaagtacacagagctggagtacatccacgccctgaccctgctgcacaggagccagacaggagtgggggagctgaccacccagaacacccggctgcagaggctgaaggagatcatctgtgagcaggccgccatcaagcaggccaccaaggacaagaagatcaccaccgtgtag

SEQ ID NO: 209674 - DNA, 2925 bp, Artificial Sequence
  derived and/or modified sequence
atggccgccgaggccgccggcggcaagtaccggagcaccgtgagcaagtccaaagacccgtcaggtctgctgattagtgtcatccgcacactctccaccagtgacgatgtggaggaccgtgaaaacgagaaagggcggttggaggaagcatatgagaaatgcgacagggatctggacgagcttattgtgcagcattacaccgaacttacaacagctattagaacctatcaatcaatcacagaaaggatcaccaattcaaggaacaagatcaagcaggtgaaggaaaatctcctatcctgtaagatgttgctccactgcaaacgagatgaactcaggaagctgtggattgagggcattgagcataagcacgtactgaatctcctggatgagatcgaaaatatcaagcaggtgccacagaagctggaacagtgcatggcttccaagcattatctgtctgcaaccgatatgctggtatctgctgttgaatctctcgagggtcccctgttacaagtggaaggtctgtctgatttacggctggagctgcactccaaaaagatgaatcttcacctcgtcctcattgacgaattacatcgccacttgtatatcaaaagcacatctcgagtggtccagcggaacaaagagaagggaaagatcagttctctagtgaaagacgcctctgtacccctgatcgacgtgacgaaccttcccaccccccgtaaatttctcgataccagtcactattcaacggcaggttcctcctctgtccgtgaaataaatctgcaggatataaaggaagacctggagttggatcctgaggaaaatagcacgctcttcatgggcatcctgattaaggggctggccaaactgaagaagatccctgaaacagtgaaagcgatcatagaacggctggagcaggagctgaagcagattgtcaagcgttctaccactcaggttgctgacagcggataccaacgcggagagaatgtgactgtggagaatcagccccgactgctgctcgaacttctcgaactcctgttcgataagtttaacgccgtggccgcagcccattccgtcgtgctaggatatctacaggacaccgtggtgactcctttgacacagcaagaggatatcaagctctatgatatggctgacgtgtgggtgaaaatacaggacgtgttgcagatgctccttaccgaatacctcgacatgaaaaatacacggacggccagtgagccaagtgcacagctgtcctacgcgtcaaccgggagggagtttgctgctttttttgcaaaaaagaaacctcaaaggccaaagaattcgctgtttaagttcgaatcatcctctcacgccatcagtatgtccgcatacctacgcgagcagaggcgcgaactctattcgcgctctggcgaattgcagggaggcccagatgacaacttaattgaaggaggtgggacaaaattcgtgtgtaaacccggggcaaggaatattactgtaattttccaccccttactgcgtttcatccaagaaattgagcatgctctcggacttgggccagccaagcagtgccctctccgagaatttctgaccgtgtatatcaaaaatatcttcttgaaccaggtcctggcagaaattaacaaggaaattgaaggggtcaccaagacatccgatccgctgaaaattctggctaacgcagatactatgaaggtccttggcgtacagaggccccttcttcagagcaccattattgtggaaaaaaccgtgcaggacctgctgaatcttatgcacgacctttccgcatattccgaccaattcctgaatatggtatgtgtgaaactgcaggaatataaggacacttgtactgccgcctatagaggcatcgtacaatctgaagagaagctggtgattagtgcatcttgggcaaaagacgacgatatcagtaggcttctgaagtccttgcccaattggatgaacatggcccagccgaaacaactaagacccaagcgcgaagaggaagaggacttcattagggccgccttcggcaaggagtctgaagttctcatcggcaatctgggcgacaagttaattcctccccaggatattttaagagacgtctctgatctcaaagccctcgccaatatgcacgaaagcttggagtggctcgcttctcgcactaaatccgcgttctcgaatctttccacatcccagatgttatcaccggcacaagactcccacacgaatacagatctaccccctgtgagtgagcagataatgcagacactgtctgagctggccaaatcttttcaagatatggcagatcgctgcctcctggtgctccatctcgaggtgagggtacactgctttcactaccttattccccttgccaaggagggcaattacgccatagtcgctaatgtggaaagcatggattacgatccactcgtagtgaagttgaataaggatatctccgctatagaagaggcgatgtcagcttcattgcagcagcacaagttccaatatatcttcgaaggcttagggcaccttatttcatgtattctgatcaatggggcgcagtatttccgaaggatctccgagagcggcatcaagaagatgtgccggaatattttcgtactgcaacagaacctaacaaacatcactatgagccgagaggccgatttggatttcgcccgacagtactacgagatgctgtacaataccgcggacgagcttctgaatcttgtcgtggaccaaggtgtaaaatacactgagctcgaatacatacacgctcttaccctcctccaccggtcacagacgggtgtgggtgaactcaccacacaaaatacgcgactacagcgcctgaaggagataatctgcgagcaggccgcaattaagcaagccaccaaggacaaaaagatcactacagtttag

SEQ ID NO: 209675 - DNA, 2622 bp, Artificial Sequence
  derived and/or modified sequence
atgctgctgcactgcaagcgggacgagctgcggaagctgtggatcgagggtatagagcacaaacacgttttgaacctactggacgagatagaaaatattaagcaggttccccaaaaacttgagcagtgcatggcctctaaacactacctgagcgctactgacatgctcgtaagcgccgtggagagtctcgaaggcccacttctccaggttgagggcctctcagacctgcgactcgagttgcacagtaagaaaatgaatctgcacctggttctgatcgacgaattacacagacacctctatatcaagagcacctcaagagtggtccagagaaataaggagaagggcaagatttcaagcctggtcaaggatgcctccgtgcccctaatagatgtgaccaacctgccaactcccaggaagtttctggacacttcacactactccacagccggatcgagcagtgttcgcgaaattaacctgcaggatatcaaggaggatctcgagctagatcctgaagagaacagtacactgtttatggggatcctgattaagggcctggccaagctcaagaagatcccagaaacggtgaaggcgattatcgagcgactggagcaggagctgaagcagattgttaagagatccacaacacaggtggcagactccgggtaccagcgcggtgaaaatgtcactgtggaaaatcaaccccggctgctgttagagctgttggaacttctgttcgataaattcaatgctgtcgccgcagcccactccgttgttttaggttacctgcaggacactgtggtcactcctctcacccaacaggaggacattaagctttacgatatggccgatgtgtgggtgaaaattcaggacgtgctgcaaatgctgctaacggaatatctggatatgaaaaacacccgaactgcctcagagccaagcgcccagttatcctacgccagcaccgggagagagtttgccgctttcttcgccaagaaaaaaccgcagagacccaaaaattcgttattcaaattcgaatctagtagccatgctatctcgatgtccgcttatctccgggagcagcggcgggagctgtacagtcgctccggcgaactgcaggggggaccagacgacaacttgatcgaaggtggcggcaccaaattcgtgtgcaaaccaggtgcacggaatattacggttattttccaccccctcctgagatttattcaggagattgagcacgccctaggcttaggacccgctaagcaatgccccttgcgcgaattcctgaccgtctacattaagaatatcttccttaatcaggtcctggccgagattaacaaagagatagagggggtgactaaaacttctgatccgctgaagatcctggctaatgccgatacaatgaaggtgctcggcgtgcagaggccgctgctccagtcaactattatcgtagaaaagaccgtccaagacctcttgaacctgatgcatgatctgtcagcgtactcagaccaattcttgaatatggtatgcgtgaagttacaagagtacaaagacacttgcactgccgcatacaggggtatcgtccagagtgaagaaaagttagttatcagcgcatcgtgggcaaaagacgatgacatcagtaggctgttaaagtccctacctaactggatgaatatggctcagccaaaacagttacgcccaaagagggaggaagaagaagattttattcgcgccgcatttgggaaggagagcgaagttttgattggaaacctcggcgacaaactcataccaccgcaggacattctgagggatgtgtccgaccttaaggcactcgctaatatgcacgaaagccttgagtggctggcttctaggacgaagagcgcgttcagcaatctgtctacttctcagatgctctcacctgcacaagatagccatactaacacagacctccctccggtctccgaacagattatgcagactttgtccgaactagctaagagttttcaagatatggcagatcgttgtctgctggtcttacatttagaggtgcgggtccattgctttcactatctcatcccactggctaaagaaggtaactatgcgatcgttgctaatgttgagtccatggattacgatcccctcgtcgtgaaacttaacaaggatatcagcgccatcgaagaggccatgagtgcatctctgcagcagcacaagttccagtacattttcgaggggctgggtcatcttatctcatgcatcctcattaacggagcacagtactttcgcagaattagcgaaagcggcattaaaaaaatgtgtcggaacatcttcgtccttcagcagaacttgaccaatataacaatgtcacgcgaggccgacttggatttcgccaggcagtattacgaaatgctctacaataccgcagatgagttattgaatcttgtggtggatcaaggagtcaaatatactgaactggagtatatccacgccctgacacttcttcacaggtcacagactggggttggagaacttacgacgcagaatacgcggctccaacggcttaaagagatcatttgtgagcaggctgccattaagcaggcgaccaaagacaagaagattaccacagtgtag

SEQ ID NO: 209676 - DNA, 789 bp, Artificial Sequence
  derived and/or modified sequence
atgcacgagagcctggagtggctggccagccggaccaagagcgccttctctaacttgagcacatcccagatgctcagccctgctcaagattctcatactaacaccgacctgcctcctgttagtgagcagatcatgcaaacactgagcgagctggcaaaaagcttccaggacatggctgaccgctgccttctagtgctacatctcgaagtcagggtgcattgtttccactatcttatccccttagctaaggaagggaactatgcgatcgtagctaatgtggaatccatggattacgatcctctcgtcgtgaagcttaataaggacataagcgcgatcgaggaagccatgtctgccagcttacagcagcataagttccagtatatcttcgagggcttagggcaccttatttcgtgcattctgattaacggcgcacaatactttcgacggattagcgagagtggaattaagaaaatgtgtaggaacatcttcgtgctgcagcagaacctgacaaatatcaccatgtcacgagaggcagatcttgactttgcgcgacagtactatgagatgctttataacacagcagatgagttgctgaatctggttgttgaccaaggtgtcaagtacaccgaactggaatacatccatgccctcaccctgctacacagaagtcagacgggtgtgggcgaactaacaacccagaacacccgcctgcagcgactgaaggagattatatgcgaacaggcggctattaagcaggccaccaaagataaaaaaatcacgactgtgtag

SEQ ID NO: 209677 - DNA, 1755 bp, Artificial Sequence
  derived and/or modified sequence
atggccaacctggtgaccgccagcaagaccaagatgagcaagggcgaggatccaaacaatcctaggtccatcaaacggatttcccagggtggacgcgacaaccacctggccattgctaaatgtgatctcactcagttgaagaaaaaacaatccgaggtgtctaacggctcccgggaaaccataagtatgaaaacctgctgtcaacacggcgacagagggtactggagtacggggtactattggaggggcgggccagacgataacttaatcgaaggtgggggaaccaagttcgtgtgcaaaccaggagctcgcaatataacagttatttttcacccgctgctgagattcatccaggaaatcgaacacgccctaggtttaggccccgctaaacagtgcccattacgcgagttccttaccgtgtacattaaaaatatatttctgaaccaggtcctggcagaaatcaacaaggaaattgaaggggtgaccaagacatccgatccgttgaaaattctggccaatgcggatacaatgaaggtgctaggcgtacagcggcccctcctccaatctacaatcatagtcgaaaagaccgtgcaggacctgctgaacctgatgcacgacctttctgcatatagcgatcagtttttaaatatggtgtgcgtgaagctgcaggagtataaggacacttgcactgcagcctaccgcgggattgttcagtcggaggagaagttggtgatcagcgcatcttgggcaaaggacgatgatatttctaggctcctaaagtctctccccaactggatgaatatggcccagcccaaacagcttagacccaaaagagaagaggaagaagacttcatcagggctgctttcgggaaggagagcgaggtgcttattggcaatttaggagataaattaatacctcctcaggacattctcagggacgtctcagacctgaaggcccttgctaatatgcacgaaagccttgaatggttggcaagccgaacaaaatcagccttctcaaatctgtctactagtcagatgctctctcccgcccaggattctcacaccaacaccgatttgccccctgttagtgaacaaataatgcagactctctcggaactcgcaaaatcctttcaggatatggccgacagatgtctgctggtgcttcatctggaggtccgcgtacactgctttcactatctcatccctttagctaaggagggcaactacgctattgttgccaacgttgagtctatggactatgaccctcttgtcgtgaaattgaacaaggatatctctgccatcgaagaagcgatgtctgccagcctccagcaacataagttccagtatatatttgagggactgggacacctgatctcttgcatcctgattaatggagcccagtactttcggcgcatcagcgagtcgggcattaagaaaatgtgccggaacatcttcgtcttgcaacaaaacctaaccaatatcaccatgtcaagagaggcggatcttgatttcgccaggcagtactacgagatgctttacaacaccgccgatgaacttcttaatctcgtggtagaccagggggtcaaatacacagaactcgagtatattcatgcgctcaccctgctgcacagatctcagaccggggttggcgagttgactactcagaataccaggctccagcgtctaaaggagattatctgtgaacaggcagctattaaacaagccaccaaggacaaaaaaattactaccgtgtag

SEQ ID NO: 209678 - DNA, 1782 bp, Artificial Sequence
  derived and/or modified sequence
atggccgacgtgtgggtgaagatccaggacgtgctgcagatgctgctaaccgaatatctcgatatgaaaaataccaggaccgcatccgagccttcagcccaactctcctatgcctcgacaggccgagaattcgccgccttctttgcaaaaaagaagcctcagaggcctaaaaactcgctcttcaaatttgagtctagttcccacgccataagcatgtccgcctatttgcgtgagcaaagacgagagttgtactctaggtctggcgagctgcagggaggtcccgatgataacctgatagaaggcggtggcactaagttcgtttgtaaaccaggcgcgaggaacatcaccgtcattttccaccctctcctccgcttcattcaagaaatcgagcatgctctgggcctaggacccgcaaagcagtgtccgctaagagaattcctgaccgtctatattaagaacatatttctgaaccaggtcctggccgaaatcaataaagagattgaaggcgttactaaaacttccgaccccctgaaaattctggccaatgccgacacgatgaaagtcctgggcgtgcagcgccccctgctgcagtccaccattatcgtggagaaaaccgtgcaggacctgcttaaccttatgcacgatctgtccgcatattctgatcagttcttaaatatggtgtgcgtgaagcttcaggagtataaagacacctgcacggcggcctacagagggatcgtgcaatccgaggagaagcttgtaatctcagcttcatgggccaaagacgacgacatttccagactcctgaaatccctcccgaattggatgaatatggcgcagcctaaacagttgagaccaaagcgggaggaagaggaggactttattcgggccgcctttggcaaagaatccgaggtgttgatcggaaatttgggcgacaaactgatccctcctcaggatattttacgggacgtgtctgatttgaaagcccttgcaaacatgcacgaatcgttggagtggctcgctagtaggaccaagagcgccttcagtaacctgagtacgtctcagatgctgagccctgcgcaggattcccacactaacaccgacctcccccctgtcagcgagcagatcatgcagactctctccgagctcgctaagagctttcaggacatggccgatcgctgtctgttggtgctccatctggaagttcgagtgcactgttttcactatttaataccactagccaaagaaggcaactacgctatagtggctaatgtggagtctatggactatgacccacttgtagtgaaactcaacaaggatatcagcgctatcgaagaagcaatgtccgcttccctccagcagcacaaattccaatacatatttgaaggcctgggacatctcatttcctgtatcctgatcaatggagcccagtacttccgtcgcatctctgaaagtggaatcaaaaaaatgtgccgtaacatcttcgtcttgcagcagaacttgaccaacataaccatgtcccgtgaggccgacctcgacttcgctcgacagtattacgaaatgctctataatacagcagacgagctgttgaacttggtggtcgaccaaggagttaagtacactgagttggaatacattcatgcgcttacactcctccaccgctctcagacaggcgtgggcgaactaacaactcagaatacccgtttgcagcgcctgaaggagatcatatgtgaacaggccgccatcaagcaggcgaccaaagataaaaagattaccactgtgtag

SEQ ID NO: 209679 - DNA, 2925 bp, Artificial Sequence
  derived and/or modified sequence
atggccgctgaggctgccggtgggaaataccgatctacagtctcaaaatccaaggacccctctggactactgattagcgtgattagaaccctgtcaacatccgacgatgtggaagatagagagaatgaaaaaggcagattggaagaagcctacgaaaagtgtgatcgtgacttggacgagcttatagtccaacattatactgaactgacaaccgccatccgcacttaccagtcaatcaccgagcggatcacaaacagcaggaacaaaattaaacaggttaaggaaaacctgctgtcttgcaaaatgctacttcactgtaagcgagacgagttacgcaaactctggattgagggcattgagcacaaacacgtactgaacctgctggacgagattgagaacatcaagcaagtgccccagaagctcgaacaatgtatggcatccaaacactatctgtccgctacagacatgctggtgagcgccgtggaatccctggaggggccactcttacaggtggaggggctcagtgacctcagattggaactccactccaaaaaaatgaatctgcacctcgtgctgatcgatgagctacatagacatctttatatcaagagtacatctcgggtggtgcagcgtaacaaggagaaagggaagataagttctcttgtaaaagacgcctccgtccctttgatagatgtcacaaacctgccaacaccaaggaagtttctggacactagccactattctacagccggatcttccagtgtgcgtgagattaacctgcaggacatcaaggaagacctagagcttgatccagaagaaaattctacattgttcatgggaattctgatcaagggtctcgccaaactgaagaaaatccctgaaacagtgaaagctatcatcgagagactcgagcaggagttgaaacagattgtgaaaagatcaactactcaggtggcagattccggctatcagagaggcgaaaatgtgactgtcgagaaccaaccgagactgcttttggagttgttagaactgttgtttgacaaatttaatgctgtcgctgctgcccactccgtggtgctgggttacctgcaagacactgtggtgactccacttacccagcaagaggatatcaagctgtatgacatggccgatgtctgggtgaagatccaggatgtactgcagatgctgctcaccgaatatcttgacatgaaaaacactcgcactgcttcagaaccttccgcgcaactgtcctatgccagcacgggaagagagtttgccgcttttttcgccaagaagaaaccccagcgacccaagaactcattgttcaagttcgagtctagctcacatgcgattagtatgtccgcctacctgcgggaacagagaagggaactgtacagtaggtctggggagttacaaggcggacccgacgacaacctgattgaagggggaggaaccaagtttgtgtgcaaaccaggcgctagaaatataacggttattttccaccctctcctgaggttcattcaggaaattgagcatgccctgggcctggggcctgccaagcagtgtcccttgcgcgagttcctgactgtttacattaagaacatctttctcaaccaggtgctcgcggaaatcaataaggaaatcgagggagtaacaaagacatctgatcctttgaagattctggcaaatgctgacacaatgaaggtgctcggtgtgcagagaccccttctccagagtacgatcatcgtggagaagacagtacaggacctactcaatcttatgcacgatctgtccgcctactctgaccagtttctgaatatggtatgcgtgaaacttcaggagtataaggatacatgcacagcagcctatcgtgggatagtgcaaagtgaggagaaactcgtcatctcagccagttgggccaaggacgatgacatctcccggctcctgaagtccctgcccaattggatgaatatggctcagccaaagcagctgcgtccaaaacgcgaggaggaagaagatttcatcagggccgcattcggcaaggagtccgaggttcttataggaaatctgggcgacaagcttatcccgccacaggatatcctgagagacgtgtcagacttgaaagcactcgccaacatgcatgagagcctcgagtggcttgctagcagaactaagagcgctttcagcaatctgtctacatctcagatgttatctcctgcccaggattcacatacaaacacagatttacctccagtgtctgaacaaatcatgcagacactgagcgaacttgccaaatcattccaggatatggctgaccggtgcctcctagtgctacacctcgaggtgcgggtccactgttttcattatcttatacctctcgcaaaggaagggaactatgcaatagtagccaacgtggagtccatggactatgatccactggtagtcaagcttaataaggatatcagcgccatagaggaggctatgagtgctagtctgcagcagcacaagttccaatacattttcgaagggctggggcatcttatctcctgcattcttataaacggagcccagtatttcagaagaataagtgaatccggaatcaagaagatgtgtagaaacatcttcgttctccagcaaaacttaaccaatattactatgagtagagaggcggacctggacttcgcccgacagtattatgagatgctttacaacacagcggatgaacttctcaacctcgtggtagatcagggagtcaaatatacagaactcgaatacattcatgctctcaccctgctgcaccgcagtcaaacaggggtgggggaactgactactcaaaacacgcggcttcagcgattaaaagaaatcatatgcgaacaggctgctatcaagcaggccacaaaggacaaaaaaatcactaccgtttag

SEQ ID NO: 209680 - DNA, 2622 bp, Artificial Sequence
  derived and/or modified sequence
atgctgctgcactgcaaacgcgacgaactgaggaaattatggatcgagggaatcgagcataaacacgttctcaacctgctggatgagatcgaaaatatcaaacaagtgccccaaaagctggagcagtgcatggccagcaagcattatctgtcagctacagatatgctcgttagtgctgtcgaaagcctggagggtccacttttgcaagtagaaggactgtcagatctccggctcgaattacattctaagaagatgaacctgcacctagtactgattgatgaactgcaccggcatctgtatatcaagtcaacctcacgggtggtccagcgaaacaaagagaagggcaagatttcctccctggtcaaggatgcctcagttcctctgatcgatgttaccaatttaccaaccccacggaagtttctggacaccagccactactccaccgccggatcatctagtgttagagaaatcaatttacaggacatcaaggaggacctggagttagacccagaagaaaattccaccctgttcatgggaattctaattaaaggactggccaagttgaagaagataccagagaccgtaaaagccattattgagagactcgaacaggaactgaaacagatcgtgaaaaggtcaacgacccaggtggcagattctggttatcagcggggtgagaacgtcacagttgagaatcaacctcggttgctactggagctccttgaactgctatttgacaaatttaatgctgtcgccgctgcccactcggtggtgctgggatacctccaggatacagtggtgacccccttgacacagcaggaggacatcaaactttacgacatggccgatgtatgggttaaaattcaggatgtgctgcaaatgctgttgactgaatacctcgatatgaagaacacccgtacggcttcagagccttctgcccaattatcctatgcaagcactggccgagaatttgcagctttttttgctaaaaaaaagccccaacgccctaaaaattccctcttcaaatttgagagctcaagccacgccatcagcatgagcgcctaccttagggaacagcggagggagctgtacagccggagcggggaattgcagggaggcccagacgataaccttatagagggcggtggcaccaagtttgtttgtaagccaggcgctaggaacataaccgttatctttcatcccctcctgaggtttatacaggaaatcgagcatgcactcggcctgggtcccgcaaagcagtgtcccctccgcgagttcctcactgtttacattaaaaacatttttttgaaccaggtactcgcagagatcaacaaggaaatcgaaggagtcacaaaaacaagtgatccattaaagattctggccaatgctgacactatgaaggtcctcggcgtgcagaggcccctgctacaatctactatcattgtcgaaaaaacagtgcaggatttgttaaatctaatgcatgacctgtctgcttactccgatcaattcctaaacatggtatgcgtgaagctccaggagtataaggatacatgcaccgcagcctacagaggcatagtgcagtcagaagaaaaactcgttatttccgcttcttgggcaaaagacgacgacatcagtagactgctaaaaagcttgcccaactggatgaacatggctcagcctaagcagttgagaccaaaaagagaggaagaagaggactttattagagccgcattcgggaaggaatccgaggtgctcatcggtaatctaggcgataagctcattcctcctcaagatatcttgcgtgacgtgtcagacttaaaagcactcgcaaacatgcacgagtcattggaatggctggcatcaaggaccaagagcgccttttctaacttgtccacatcccagatgctgtcccctgcccaggatagccacacgaatacagatctgcctcctgtgtccgaacagataatgcagaccctctcagaactggccaagagttttcaagacatggcggatagatgtctgttagtgctccatcttgaggtgcgggtgcattgtttccattaccttatcccactcgctaaagaaggaaactacgcaattgttgccaacgtggaaagtatggactacgacccactggtcgttaagttgaataaggatataagcgccatagaagaggctatgtcggcttccctgcagcagcataaattccaatacattttcgaaggcctcgggcacctaatttcctgcatcctcattaatggggctcagtatttcaggagaatatccgagtctggaatcaaaaaaatgtgccgtaacatctttgttctgcaacaaaatctgacaaacatcacgatgtccagggaagccgatctggattttgctagacaatactacgaaatgctttacaacactgccgacgagttgctgaatctggtcgtggaccaaggtgtgaaatatacagagctggagtacatccatgccctgaccttgctgcacagatctcagacaggtgtgggtgagctgactacacagaacacacgtctgcagcgactgaaggaaatcatttgcgaacaagctgctatcaagcaggccactaaagataaaaagattacaaccgtgtag

SEQ ID NO: 209681 - DNA, 789 bp, Artificial Sequence
  derived and/or modified sequence
atgcacgagagcctggagtggctcgcctcgcgcaccaagtctgctttttccaatctgtctacttcccaaatgctatctccagcccaagatagccacaccaatactgatctcccacctgtctcagaacagatcatgcagacattgtccgagctagctaaatcgtttcaagacatggcggaccggtgcttgctcgtgttgcacctggaggtccgagtgcattgttttcactaccttatccctttggcgaaggagggcaattacgccatagtcgccaatgtagaatctatggattatgacccacttgtggtgaagctgaacaaggatattagcgccatcgaagaggccatgtccgcttctctgcagcagcataaattccaatatattttcgagggcctgggccatctcatctcatgcatactcattaacggagctcagtacttccgacgaatttcagagagtggaatcaaaaaaatgtgtcgaaatatctttgttttacagcagaacctcaccaatattaccatgtcccgtgaggcagacttggatttcgccagacagtattacgagatgctgtacaatacagccgatgagctgctgaacttggtagtcgaccagggagtgaagtatacagagctcgaatacatccacgccctgaccctacttcatcgctctcagaccggggtgggcgaactgactacacaaaacactagattacagcggttaaaagagataatctgcgagcaagccgcaatcaaacaagcaacaaaggataaaaagatcaccactgtctag

SEQ ID NO: 209682 - DNA, 1755 bp, Artificial Sequence
  derived and/or modified sequence
atggcaaatctcgtcacggcatccaagacaaaaatgtcaaaaggagaggatcctaataatccaagaagtatcaagcggattagtcaagggggtagagataaccaccttgctatcgccaagtgcgatttgacccagttaaagaaaaaacagagcgaggtttccaacgggagtagagagaccatcagtatgaagacatgctgtcagcacggagatcgcggttactggagtacgggctactactggcgcggaggcccagatgataatttgatcgaaggaggcggaaccaaatttgtgtgcaagccaggagccaggaatattaccgtgatctttcatcctttgttgcgtttcattcaagaaattgagcacgccctaggactcgggccagcgaagcagtgccccttgcgtgagtttctgaccgtttacattaaaaatatcttcttgaatcaggtgttggccgagatcaacaaagaaattgaaggtgttacaaaaacctccgatcccttgaagatattggcgaatgccgataccatgaaggttctaggcgttcagcgtcccctgctccaaagtaccatcattgtcgagaagactgtacaggatctcctcaatctgatgcacgacctttcggcctattctgatcaattcctgaatatggtgtgcgtcaaacttcaggagtataaagatacgtgtactgcggcatatagaggcatcgtgcagagtgaagaaaaattggtgatatctgcttcttgggccaaggacgatgatatttcaaggctcttaaaatccttacctaattggatgaatatggcccaacccaaacagctacgaccgaaacgagaggaggaggaggattttattcgcgcagcattcggaaaggagtccgaggtgctgattgggaacctgggggataagctcattcccccacaagatattctgcgtgatgtgtctgatctgaaggcgctggccaatatgcacgagagccttgagtggctggcatccagaaccaaaagtgccttttctaatctgagtaccagtcagatgctgagcccagcgcaggattctcacaccaacactgacctaccgcctgtgtccgagcagatcatgcagacactgagcgagttggctaaatcctttcaagatatggccgataggtgtctgcttgtcctgcatttagaggttcgtgtccattgttttcattatctgattcctctcgccaaggagggaaactacgcaattgtcgcaaatgtggagagcatggactacgatccgctggtcgtgaaattgaacaaagatatctccgctattgaggaagctatgtcggcttctctacaacagcacaaatttcaatacatctttgaaggtctcggccatctaatctcatgcattttgattaacggggctcagtatttccggagaatcagtgagtccggaatcaagaagatgtgcaggaatatattcgtactgcagcagaacctgactaacattacgatgagtcgtgaagcagatcttgactttgcacggcagtattacgagatgctgtacaacacggccgacgaactgctgaacttagtggtagatcagggagtgaagtataccgaacttgagtatattcacgctctcacgctgctccacagaagtcagaccggtgtcggcgagctgacaacccagaacactagactgcagagactgaaagaaattatatgtgagcaggccgcaatcaaacaagccacaaaggacaagaagattactaccgtgtag

SEQ ID NO: 209683 - DNA, 1782 bp, Artificial Sequence
  derived and/or modified sequence
atggccgacgtgtgggttaagatccaagatgtccttcagatgcttctgacagaatatctggacatgaaaaacacaaggaccgcttcggaacccagcgcccaactgtcttatgcaagcactggaagagagtttgcggcattctttgcaaagaaaaagccgcagaggcccaaaaattctctgtttaagtttgaaagttcatcgcatgccatttcaatgagcgcctacctgagggagcagcgcagagagctgtattcaaggagcggcgagttgcagggcggacccgatgataacctaatcgaagggggaggaactaagtttgtgtgcaaacctggcgcaagaaatatcaccgttatcttccaccctttgcttcgtttcatacaagaaatcgagcacgcccttggcctgggcccagctaagcagtgcccattaagggagttcctaaccgtgtacataaaaaatatctttcttaatcaggtgctggccgaaatcaacaaagagatcgaaggggtcactaagactagtgatccactaaagattttagctaatgctgatactatgaaagtactgggcgtccagcgcccactcctccagagtaccataattgttgaaaagaccgtccaggacctgctgaacctcatgcacgatctgtcagcttattccgatcagttcctgaacatggtgtgtgttaaactgcaggagtacaaggacacttgtacagccgcttatagaggtatagtgcagtccgaggaaaagctggttattagcgcgtcttgggctaaggacgacgatatctcaagactccttaagtccttaccaaactggatgaacatggcgcagcccaagcaactcaggcctaaacgcgaagaagaagaggattttattagggccgcattcgggaaggagtccgaggtgctgatagggaatctaggggacaaattgattcctccacaggacatcctaagggacgtgtcagatttaaaggccctcgcaaacatgcacgagtcgcttgagtggctggcttcgcggacgaaaagcgccttctctaacttatcaactagccagatgctttcccctgctcaagattcacacaccaatacagacttaccacctgtatcggaacagatcatgcaaactttatccgagttggctaaaagttttcaggatatggcagatcgatgtctgttggtacttcacttagaggtgagagtgcattgcttccattatttgattcctcttgctaaggagggcaattacgctattgtggccaacgtcgaatctatggactacgatcctctagtagtgaagttgaataaggacatttcagccatcgaggaagcgatgtcggcttccctgcaacaacataagtttcagtacatcttcgagggcctgggccacctaatctcttgcatcctgatcaatggagcccagtacttcaggaggataagcgaatccgggattaagaaaatgtgccggaacatttttgtattgcaacaaaacctgaccaacattacaatgtccagggaggcagatcttgacttcgcccgtcagtattatgaaatgctgtacaacactgcagatgagttgctcaacctcgtggtagatcagggagtgaagtacaccgaactggaatatattcacgccctcaccttgcttcaccggagccagaccggagttggagagttaaccacacagaatactcgtctgcagcgcctcaaggagatcatctgcgaacaggcggcaatcaaacaagcaactaaagacaagaagattactacggtctag

SEQ ID NO: 209684 - DNA, 2925 bp, Artificial Sequence
  derived and/or modified sequence
atggccgccgaggccgccggcggcaagtacagaagcaccgtgagcaagagcaaggaccccagcggcctgctgatcagcgtgatcagaaccctgagcaccagcgacgacgtggaggacagagagaacgagaagggcagactggaggaggcctacgagaagtgcgacagagacctggacgagctgatcgtgcagcactacaccgagctgaccaccgccatcagaacctaccagagcatcaccgagagaatcaccaacagcagaaacaagatcaagcaggtgaaggagaacctgctgagctgcaagatgctgctgcactgcaagagagacgagctgagaaagctgtggatcgagggcatcgagcacaagcacgtgctgaacctgctggacgagatcgagaacatcaagcaggtgccccagaagctggagcagtgcatggccagcaagcactacctgagcgccaccgacatgctggtgagcgccgtggagagcctggagggccccctgctgcaggtggagggcctgagcgacctgagactggagctgcacagcaagaagatgaacctgcacctggtgctgatcgacgagctgcacagacacctgtacatcaagagcaccagcagagtggtgcagagaaacaaggagaagggcaagatcagcagcctggtgaaggacgccagcgtgcccctgatcgacgtgaccaacctgcccacccccagaaagttcctggacaccagccactacagcaccgccggcagcagcagcgtgagagagatcaacctgcaggacatcaaggaggacctggagctggaccccgaggagaacagcaccctgttcatgggcatcctgatcaagggcctggccaagctgaagaagatccccgagaccgtgaaggccatcatcgagagactggagcaggagctgaagcagatcgtgaagagaagcaccacccaggtggccgacagcggctaccagagaggcgagaacgtgaccgtggagaaccagcccagactgctgctggagctgctggagctgctgttcgacaagttcaacgccgtggccgccgcccacagcgtggtgctgggctacctgcaggacaccgtggtgacccccctgacccagcaggaggacatcaagctgtacgacatggccgacgtgtgggtgaagatccaggacgtgctgcagatgctgctgaccgagtacctggacatgaagaacaccagaaccgccagcgagcccagcgcccagctgagctacgccagcaccggcagagagttcgccgccttcttcgccaagaagaagccccagagacccaagaacagcctgttcaagttcgagagcagcagccacgccatcagcatgagcgcctacctgagagagcagagaagagagctgtacagcagaagcggcgagctgcagggcggccccgacgacaacctgatcgagggcggcggcaccaagttcgtgtgcaagcccggcgccagaaacatcaccgtgatcttccaccccctgctgagattcatccaggagatcgagcacgccctgggcctgggccccgccaagcagtgccccctgagagagttcctgaccgtgtacatcaagaacatcttcctgaaccaggtgctggccgagatcaacaaggagatcgagggcgtgaccaagaccagcgaccccctgaagatcctggccaacgccgacaccatgaaggtgctgggcgtgcagagacccctgctgcagagcaccatcatcgtggagaagaccgtgcaggacctgctgaacctgatgcacgacctgagcgcctacagcgaccagttcctgaacatggtgtgcgtgaagctgcaggagtacaaggacacctgcaccgccgcctacagaggcatcgtgcagagcgaggagaagctggtgatcagcgccagctgggccaaggacgacgacatcagcagactgctgaagagcctgcccaactggatgaacatggcccagcccaagcagctgagacccaagagagaggaggaggaggacttcatcagagccgccttcggcaaggagagcgaggtgctgatcggcaacctgggcgacaagctgatccccccccaggacatcctgagagacgtgagcgacctgaaggccctggccaacatgcacgagagcctggagtggctggccagcagaaccaagagcgccttcagcaacctgagcaccagccagatgctgagccccgcccaggacagccacaccaacaccgacctgccccccgtgagcgagcagatcatgcagaccctgagcgagctggccaagagcttccaggacatggccgacagatgcctgctggtgctgcacctggaggtgagagtgcactgcttccactacctgatccccctggccaaggagggcaactacgccatcgtggccaacgtggagagcatggactacgaccccctggtggtgaagctgaacaaggacatcagcgccatcgaggaggccatgagcgccagcctgcagcagcacaagttccagtacatcttcgagggcctgggccacctgatcagctgcatcctgatcaacggcgcccagtacttcagaagaatcagcgagagcggcatcaagaagatgtgcagaaacatcttcgtgctgcagcagaacctgaccaacatcaccatgagcagagaggccgacctggacttcgccagacagtactacgagatgctgtacaacaccgccgacgagctgctgaacctggtggtggaccagggcgtgaagtacaccgagctggagtacatccacgccctgaccctgctgcacagaagccagaccggcgtgggcgagctgaccacccagaacaccagactgcagagactgaaggagatcatctgcgagcaggccgccatcaagcaggccaccaaggacaagaagatcaccaccgtgtag

SEQ ID NO: 209685 - DNA, 2622 bp, Artificial Sequence
  derived and/or modified sequence
atgctgctgcactgcaagagagacgagctgagaaagctgtggatcgagggcatcgagcacaagcacgtgctgaacctgctggacgagatcgagaacatcaagcaggtgccccagaagctggagcagtgcatggccagcaagcactacctgagcgccaccgacatgctggtgagcgccgtggagagcctggagggccccctgctgcaggtggagggcctgagcgacctgagactggagctgcacagcaagaagatgaacctgcacctggtgctgatcgacgagctgcacagacacctgtacatcaagagcaccagcagagtggtgcagagaaacaaggagaagggcaagatcagcagcctggtgaaggacgccagcgtgcccctgatcgacgtgaccaacctgcccacccccagaaagttcctggacaccagccactacagcaccgccggcagcagcagcgtgagagagatcaacctgcaggacatcaaggaggacctggagctggaccccgaggagaacagcaccctgttcatgggcatcctgatcaagggcctggccaagctgaagaagatccccgagaccgtgaaggccatcatcgagagactggagcaggagctgaagcagatcgtgaagagaagcaccacccaggtggccgacagcggctaccagagaggcgagaacgtgaccgtggagaaccagcccagactgctgctggagctgctggagctgctgttcgacaagttcaacgccgtggccgccgcccacagcgtggtgctgggctacctgcaggacaccgtggtgacccccctgacccagcaggaggacatcaagctgtacgacatggccgacgtgtgggtgaagatccaggacgtgctgcagatgctgctgaccgagtacctggacatgaagaacaccagaaccgccagcgagcccagcgcccagctgagctacgccagcaccggcagagagttcgccgccttcttcgccaagaagaagccccagagacccaagaacagcctgttcaagttcgagagcagcagccacgccatcagcatgagcgcctacctgagagagcagagaagagagctgtacagcagaagcggcgagctgcagggcggccccgacgacaacctgatcgagggcggcggcaccaagttcgtgtgcaagcccggcgccagaaacatcaccgtgatcttccaccccctgctgagattcatccaggagatcgagcacgccctgggcctgggccccgccaagcagtgccccctgagagagttcctgaccgtgtacatcaagaacatcttcctgaaccaggtgctggccgagatcaacaaggagatcgagggcgtgaccaagaccagcgaccccctgaagatcctggccaacgccgacaccatgaaggtgctgggcgtgcagagacccctgctgcagagcaccatcatcgtggagaagaccgtgcaggacctgctgaacctgatgcacgacctgagcgcctacagcgaccagttcctgaacatggtgtgcgtgaagctgcaggagtacaaggacacctgcaccgccgcctacagaggcatcgtgcagagcgaggagaagctggtgatcagcgccagctgggccaaggacgacgacatcagcagactgctgaagagcctgcccaactggatgaacatggcccagcccaagcagctgagacccaagagagaggaggaggaggacttcatcagagccgccttcggcaaggagagcgaggtgctgatcggcaacctgggcgacaagctgatccccccccaggacatcctgagagacgtgagcgacctgaaggccctggccaacatgcacgagagcctggagtggctggccagcagaaccaagagcgccttcagcaacctgagcaccagccagatgctgagccccgcccaggacagccacaccaacaccgacctgccccccgtgagcgagcagatcatgcagaccctgagcgagctggccaagagcttccaggacatggccgacagatgcctgctggtgctgcacctggaggtgagagtgcactgcttccactacctgatccccctggccaaggagggcaactacgccatcgtggccaacgtggagagcatggactacgaccccctggtggtgaagctgaacaaggacatcagcgccatcgaggaggccatgagcgccagcctgcagcagcacaagttccagtacatcttcgagggcctgggccacctgatcagctgcatcctgatcaacggcgcccagtacttcagaagaatcagcgagagcggcatcaagaagatgtgcagaaacatcttcgtgctgcagcagaacctgaccaacatcaccatgagcagagaggccgacctggacttcgccagacagtactacgagatgctgtacaacaccgccgacgagctgctgaacctggtggtggaccagggcgtgaagtacaccgagctggagtacatccacgccctgaccctgctgcacagaagccagaccggcgtgggcgagctgaccacccagaacaccagactgcagagactgaaggagatcatctgcgagcaggccgccatcaagcaggccaccaaggacaagaagatcaccaccgtgtag

SEQ ID NO: 209686 - DNA, 789 bp, Artificial Sequence
  derived and/or modified sequence
atgcacgagagcctggagtggctggccagcagaaccaagagcgccttcagcaacctgagcaccagccagatgctgagccccgcccaggacagccacaccaacaccgacctgccccccgtgagcgagcagatcatgcagaccctgagcgagctggccaagagcttccaggacatggccgacagatgcctgctggtgctgcacctggaggtgagagtgcactgcttccactacctgatccccctggccaaggagggcaactacgccatcgtggccaacgtggagagcatggactacgaccccctggtggtgaagctgaacaaggacatcagcgccatcgaggaggccatgagcgccagcctgcagcagcacaagttccagtacatcttcgagggcctgggccacctgatcagctgcatcctgatcaacggcgcccagtacttcagaagaatcagcgagagcggcatcaagaagatgtgcagaaacatcttcgtgctgcagcagaacctgaccaacatcaccatgagcagagaggccgacctggacttcgccagacagtactacgagatgctgtacaacaccgccgacgagctgctgaacctggtggtggaccagggcgtgaagtacaccgagctggagtacatccacgccctgaccctgctgcacagaagccagaccggcgtgggcgagctgaccacccagaacaccagactgcagagactgaaggagatcatctgcgagcaggccgccatcaagcaggccaccaaggacaagaagatcaccaccgtgtag

SEQ ID NO: 209687 - DNA, 1755 bp, Artificial Sequence
  derived and/or modified sequence
atggccaacctggtgaccgccagcaagaccaagatgagcaagggcgaggaccccaacaaccccagaagcatcaagagaatcagccagggcggcagagacaaccacctggccatcgccaagtgcgacctgacccagctgaagaagaagcagagcgaggtgagcaacggcagcagagagaccatcagcatgaagacctgctgccagcacggcgacagaggctactggagcaccggctactactggagaggcggccccgacgacaacctgatcgagggcggcggcaccaagttcgtgtgcaagcccggcgccagaaacatcaccgtgatcttccaccccctgctgagattcatccaggagatcgagcacgccctgggcctgggccccgccaagcagtgccccctgagagagttcctgaccgtgtacatcaagaacatcttcctgaaccaggtgctggccgagatcaacaaggagatcgagggcgtgaccaagaccagcgaccccctgaagatcctggccaacgccgacaccatgaaggtgctgggcgtgcagagacccctgctgcagagcaccatcatcgtggagaagaccgtgcaggacctgctgaacctgatgcacgacctgagcgcctacagcgaccagttcctgaacatggtgtgcgtgaagctgcaggagtacaaggacacctgcaccgccgcctacagaggcatcgtgcagagcgaggagaagctggtgatcagcgccagctgggccaaggacgacgacatcagcagactgctgaagagcctgcccaactggatgaacatggcccagcccaagcagctgagacccaagagagaggaggaggaggacttcatcagagccgccttcggcaaggagagcgaggtgctgatcggcaacctgggcgacaagctgatccccccccaggacatcctgagagacgtgagcgacctgaaggccctggccaacatgcacgagagcctggagtggctggccagcagaaccaagagcgccttcagcaacctgagcaccagccagatgctgagccccgcccaggacagccacaccaacaccgacctgccccccgtgagcgagcagatcatgcagaccctgagcgagctggccaagagcttccaggacatggccgacagatgcctgctggtgctgcacctggaggtgagagtgcactgcttccactacctgatccccctggccaaggagggcaactacgccatcgtggccaacgtggagagcatggactacgaccccctggtggtgaagctgaacaaggacatcagcgccatcgaggaggccatgagcgccagcctgcagcagcacaagttccagtacatcttcgagggcctgggccacctgatcagctgcatcctgatcaacggcgcccagtacttcagaagaatcagcgagagcggcatcaagaagatgtgcagaaacatcttcgtgctgcagcagaacctgaccaacatcaccatgagcagagaggccgacctggacttcgccagacagtactacgagatgctgtacaacaccgccgacgagctgctgaacctggtggtggaccagggcgtgaagtacaccgagctggagtacatccacgccctgaccctgctgcacagaagccagaccggcgtgggcgagctgaccacccagaacaccagactgcagagactgaaggagatcatctgcgagcaggccgccatcaagcaggccaccaaggacaagaagatcaccaccgtgtag

SEQ ID NO: 209688 - DNA, 1782 bp, Artificial Sequence
  derived and/or modified sequence
atggccgacgtgtgggtgaagatccaggacgtgctgcagatgctgctgaccgagtacctggacatgaagaacaccagaaccgccagcgagcccagcgcccagctgagctacgccagcaccggcagagagttcgccgccttcttcgccaagaagaagccccagagacccaagaacagcctgttcaagttcgagagcagcagccacgccatcagcatgagcgcctacctgagagagcagagaagagagctgtacagcagaagcggcgagctgcagggcggccccgacgacaacctgatcgagggcggcggcaccaagttcgtgtgcaagcccggcgccagaaacatcaccgtgatcttccaccccctgctgagattcatccaggagatcgagcacgccctgggcctgggccccgccaagcagtgccccctgagagagttcctgaccgtgtacatcaagaacatcttcctgaaccaggtgctggccgagatcaacaaggagatcgagggcgtgaccaagaccagcgaccccctgaagatcctggccaacgccgacaccatgaaggtgctgggcgtgcagagacccctgctgcagagcaccatcatcgtggagaagaccgtgcaggacctgctgaacctgatgcacgacctgagcgcctacagcgaccagttcctgaacatggtgtgcgtgaagctgcaggagtacaaggacacctgcaccgccgcctacagaggcatcgtgcagagcgaggagaagctggtgatcagcgccagctgggccaaggacgacgacatcagcagactgctgaagagcctgcccaactggatgaacatggcccagcccaagcagctgagacccaagagagaggaggaggaggacttcatcagagccgccttcggcaaggagagcgaggtgctgatcggcaacctgggcgacaagctgatccccccccaggacatcctgagagacgtgagcgacctgaaggccctggccaacatgcacgagagcctggagtggctggccagcagaaccaagagcgccttcagcaacctgagcaccagccagatgctgagccccgcccaggacagccacaccaacaccgacctgccccccgtgagcgagcagatcatgcagaccctgagcgagctggccaagagcttccaggacatggccgacagatgcctgctggtgctgcacctggaggtgagagtgcactgcttccactacctgatccccctggccaaggagggcaactacgccatcgtggccaacgtggagagcatggactacgaccccctggtggtgaagctgaacaaggacatcagcgccatcgaggaggccatgagcgccagcctgcagcagcacaagttccagtacatcttcgagggcctgggccacctgatcagctgcatcctgatcaacggcgcccagtacttcagaagaatcagcgagagcggcatcaagaagatgtgcagaaacatcttcgtgctgcagcagaacctgaccaacatcaccatgagcagagaggccgacctggacttcgccagacagtactacgagatgctgtacaacaccgccgacgagctgctgaacctggtggtggaccagggcgtgaagtacaccgagctggagtacatccacgccctgaccctgctgcacagaagccagaccggcgtgggcgagctgaccacccagaacaccagactgcagagactgaaggagatcatctgcgagcaggccgccatcaagcaggccaccaaggacaagaagatcaccaccgtgtag

SEQ ID NO: 209689 - DNA, 714 bp, Artificial Sequence
  derived and/or modified sequence
atggaggtgctgccctgcagcagagtggcccacatcgagagaaccagaaagccctacaacaacgacatcgactactacgccaagagaaacgccctgagagccgccgaggtgtggatggacgacttcaagagccacgtgtacatggcctggaacatccccatgagcaaccccggcgtggacttcggcgacgtgagcgagagactggccctgagacagagactgaagtgcagaagcttcaagtggtacctggagaacgtgtaccccgagatgagagtgtacaacaacaccctgacctacggcgaggtgagaaacagcaaggccagcgcctactgcctggaccagggcgccgaggacggcgacagagccatcctgtacccctgccacggcatgagcagccagctggtgagatacagcgccgacggcctgctgcagctgggccccctgggcagcaccgccttcctgcccgacagcaagtgcctggtggacgacggcaccggcagaatgcccaccctgaagaagtgcgaggacgtggccagacccacccagagactgtgggacttcacccagagcggccccatcgtgagcagagccaccggcagatgcctggaggtggagatgagcaaggacgccaacttcggcctgagactggtggtgcagagatgcagcggccagaagtggatgatcagaaactggatcaagcacgccagacactag

SEQ ID NO: 209690 - DNA, 294 bp, Artificial Sequence
  derived and/or modified sequence
atggaggtgctgccctgcagcagagtggcccacatcgagagaaccagaaagccctacaacaacgacatcgactactacgccaagagaaacgccctgagagccgccgaggtgtggatggacgacttcaagagccacgtgtacatggcctggaacatccccatgagcaaccccggcgtggacttcggcgacgtgagcgagagactggccctgagacagagactgaagtgcagaagcttcaagtggtacctggagaacgtgtaccccgagatgagagtgtacaacaacaccctgtag

SEQ ID NO: 209691 - DNA, 165 bp, Artificial Sequence
  derived and/or modified sequence
atggaggtgctgccctgcagcagagtggcccacatcgagagaaccagaaagccctacaacaacgacatcgactactacgccaagagaaacgccctgagagccgccgaggtgtggatggacgacttcaagagccacgtgtacatggcctggaacatccccatgtag

SEQ ID NO: 209692 - DNA, 714 bp, Artificial Sequence
  derived and/or modified sequence
atggaggtgttgccttgttcaagagtcgcccacatcgagcgtacaaggaaaccgtataataacgacatagattattacgctaaaaggaacgccttgcgcgcagccgaggtctggatggacgatttcaaaagccatgtttacatggcctggaatatcccaatgtccaatcctggcgtggattttggtgacgtgtcagaacgtcttgccctgagacaaagactcaaatgccgatcttttaaatggtatctcgaaaacgtgtatccagaaatgagggtctataataacaccctcacttatggggaagtgagaaactcgaaagctagcgcgtactgcttggaccagggtgccgaggatggtgatcgggccattttatacccatgtcacggcatgagttcccagctggtgcggtacagtgcagatgggttgctccagctgggcccactcggctccaccgctttcctccccgactcgaagtgtcttgtggatgacggcactgggcgaatgcctaccttaaaaaagtgtgaagacgtagctcgcccaacgcaacggctttgggacttcacgcagtctggtccaattgtcagtcgggccactggaaggtgtctggaagttgagatgagcaaggacgcgaacttcggactgcggctcgtcgtgcaacgatgttcaggccaaaagtggatgatacgaaactggataaagcacgctcgacattag

SEQ ID NO: 209693 - DNA, 294 bp, Artificial Sequence
  derived and/or modified sequence
atggaggttctcccctgtagccgtgtcgcccacattgagaggacaagaaaaccctacaataacgacatcgactactatgcaaagcgtaatgccctgcgggctgccgaagtctggatggatgatttcaaaagtcacgtatacatggcctggaacatcccaatgtccaatcccggcgtggatttcggagacgtgagtgagagattggcactgcgccagcgcttgaaatgccggtcctttaaatggtacttagagaatgtttacccagagatgcgcgtgtacaacaacaccctgtag

SEQ ID NO: 209694 - DNA, 714 bp, Artificial Sequence
  derived and/or modified sequence
atggaagttctgccatgttctcgggtcgcgcatatagaacgaaccagaaagccctataataacgacatcgactattacgctaaacggaatgccctcagagctgctgaggtttggatggacgactttaaatcgcatgtttacatggcatggaatataccgatgagcaatccaggtgtggactttggggacgtttccgagcggctggcactgcgacaaagactgaaatgtcggtcattcaagtggtatttggagaatgtatacccagagatgcgggtttacaacaatactctgacttatggggaggttagaaattccaaggcatctgcatattgcttagaccagggggccgaggatggtgatagagcaattctgtacccctgccatggtatgagcagccagttggtgagatattcagccgacggactgttgcagcttgggcccctgggttctactgcttttcttcctgattctaaatgtctggttgacgacggcaccggcaggatgcccaccctgaaaaagtgtgaggacgtcgctaggcccactcagaggctctgggactttactcagagcggacccatcgtgtctcgtgcaactggccggtgcctggaggtcgaaatgagcaaggatgccaattttgggttgcggcttgtggtgcagcgctgctcgggacagaaatggatgattagaaattggatcaagcacgcccggcattag

SEQ ID NO: 209695 - DNA, 165 bp, Artificial Sequence
  derived and/or modified sequence
atggaggtattgccatgttccagggtggctcatattgaaagaactaggaaaccttacaataatgacattgactactatgccaaaaggaacgcgctgagagcggccgaggtgtggatggatgacttcaaatcccacgtttacatggcgtggaatatacctatgtag

SEQ ID NO: 209696 - DNA, 714 bp, Artificial Sequence
  derived and/or modified sequence
atggaggtcttaccctgtagccgagtggcgcatatcgaacggacgagaaaaccctacaataatgacatcgactactatgcaaagaggaacgccctccgggccgctgaagtctggatggatgacttcaagtcccacgtgtacatggcatggaacataccaatgagcaacccgggcgtggattttggagatgtgagcgaacggctggccttacgccagagactgaaatgccggagttttaaatggtatctggagaacgtttaccccgaaatgcgcgtttataacaacactttgacatacggcgaggtgagaaattctaaggcatctgcgtattgtctcgatcagggtgccgaggacggggaccgagccattttgtacccttgccatgggatgtcatctcagttagtccggtatagtgctgacgggcttctccagctgggccctttgggcagcacggcctttctgccagattcaaagtgcttggtggacgatggaactggacgcatgcctacacttaagaagtgtgaagacgtggcccgacccacacagcgcttgtgggatttcacccagagtgggcccatagtctctcgagccactgggaggtgtttggaggtagagatgtctaaggacgccaactttggactccggctggtcgtacaacgttgcagcggacagaagtggatgattcgaaactggattaagcatgcaagacactag

SEQ ID NO: 209697 - DNA, 714 bp, Artificial Sequence
  derived and/or modified sequence
atggaggtgctgccctgcagccgggtggcccacatcgagaggaccaggaagccctacaacaatgacatcgactactatgccaagagaaatgccctgcgggctgctgaggtgtggatggatgacttcaagagccacgtgtacatggcctggaacatccccatgagcaaccctggggtggactttggagatgtgtctgagcggctggccctgcggcagaggctgaagtgccgctccttcaagtggtacctggagaatgtgtacccagagatgagggtgtacaacaacaccctgacctatggagaggtgaggaacagcaaggccagcgcctactgcctggaccagggcgcagaagatggagaccgggccatcctgtacccctgccacggcatgagcagccagctggtgcgctacagcgcagatggcctgctgcagctgggccccctgggcagcacagccttcctgcctgacagcaagtgcctggtggatgatggcactggaaggatgcccaccctgaagaagtgtgaagatgtggcccggcccacccagaggctgtgggacttcacccagagcggccccatcgtgtcccgggccaccggccgctgcctggaggtggagatgagcaaggatgccaactttggcctgcggctggtggtgcagcgctgcagcggccagaagtggatgatccggaactggatcaagcacgcccggcactag

SEQ ID NO: 209698 - DNA, 294 bp, Artificial Sequence
  derived and/or modified sequence
atggaggtgctgccctgcagccgggtggcccacatcgagaggaccaggaagccctacaacaatgacatcgactactatgccaagagaaatgccctgcgggctgctgaggtgtggatggatgacttcaagagccacgtgtacatggcctggaacatccccatgagcaaccctggggtggactttggagatgtgtctgagcggctggccctgcggcagaggctgaagtgccgctccttcaagtggtacctggagaatgtgtacccagagatgagggtgtacaacaacaccctgtag

SEQ ID NO: 209699 - DNA, 165 bp, Artificial Sequence
  derived and/or modified sequence
atggaggtgctgccctgcagccgggtggcccacatcgagaggaccaggaagccctacaacaatgacatcgactactatgccaagagaaatgccctgcgggctgctgaggtgtggatggatgacttcaagagccacgtgtacatggcctggaacatccccatgtag

SEQ ID NO: 209700 - DNA, 714 bp, Artificial Sequence
  derived and/or modified sequence
atggaggtgctgccctgcagccgggtggcccacatcgagcggacccgcaagccctataacaatgacattgattactacgctaaaaggaatgccctcagagcagccgaggtttggatggacgactttaaatcccacgtatacatggcctggaacatcccaatgagcaatcctggagtcgactttggagatgtgtcggaaagactggccctgcgccagagactcaagtgcagatcctttaaatggtacctggagaacgtttaccctgaaatgagagtgtacaataacactctcacatacggagaggttagaaattcgaaggcttccgcgtactgcctcgatcaaggcgccgaggacggggacagggcaattctttatccatgccatggcatgtccagccaactggtgagatactctgccgacgggctgttgcagctgggccctcttggaagcacagctttcctccctgatagcaaatgcttagtggatgatggaaccgggagaatgcctacactaaagaagtgcgaggacgtcgcccggccaacccagcgactgtgggacttcactcaatccggaccgattgtgagtagggccactggccgttgcctggaggtcgaaatgtccaaggacgctaacttcggacttcggcttgtggttcaacgctgctccggccagaaatggatgataaggaactggattaagcacgcaagacattag

SEQ ID NO: 209701 - DNA, 294 bp, Artificial Sequence
  derived and/or modified sequence
atggaggtgctgccctgcagccgggtggcccacatcgagcggaccaggaagccatataacaacgacattgattattatgcaaaacgcaatgcacttcgcgccgctgaggtctggatggatgacttcaagtcccatgtttacatggcctggaatattccaatgagcaaccctggggtcgactttggcgacgtgtctgagcgccttgctttacgccagagattgaaatgccggagtttcaagtggtacctggagaacgtttatccagagatgagggtctataacaacactctgtag

SEQ ID NO: 209702 - DNA, 714 bp, Artificial Sequence
  derived and/or modified sequence
atggaggtgctgccctgcagccgggtggcccacatcgagcggaccagaaaaccgtataacaacgacattgattattatgcaaaacggaacgctcttagggccgcagaagtgtggatggacgacttcaagtcccacgtctatatggcctggaacatcccaatgagcaatccgggggtggacttcggggacgtcagcgagcgtctggctctgaggcagcggctgaaatgtagatcctttaagtggtacttagagaatgtgtaccccgagatgcgcgtttataataacacccttacctatggggaagttaggaattcaaaggccagtgcatattgcctcgatcagggcgctgaggatggggatagagccatcctttacccttgtcacggcatgtctagccagctggtacggtattccgccgatggcctgttgcagctaggccccctcggctctacggcattcttgcctgactctaaatgtctggtagatgacggaaccgggaggatgccgacacttaagaagtgtgaagatgtggcccgacctactcagcgactttgggacttcacacagagtgggccaatcgtatcaagggctacagggaggtgcctggaagtggaaatgtccaaagacgccaactttggcttgaggcttgtggtccagcgttgctcagggcagaagtggatgatcagaaactggattaaacacgctcgacattag

SEQ ID NO: 209703 - DNA, 165 bp, Artificial Sequence
  derived and/or modified sequence
atggaggtgctgccctgcagccgggtggcccacatcgagcggacccggaagccttataacaatgatattgattactacgcaaagcgcaatgcgctgcgggccgctgaggtctggatggacgatttcaaatctcacgtgtatatggcatggaatatcccaatgtag

SEQ ID NO: 209704 - DNA, 714 bp, Artificial Sequence
  derived and/or modified sequence
atggaggtgctgccctgcagccgggtggcccacatcgagcggacccggaagccctacaataacgacatcgattattacgctaagcgcaatgccctccgcgctgcggaagtgtggatggatgactttaaatctcatgtctatatggcatggaacatcccaatgtctaatcctggagtagacttcggagatgtctctgaacgactcgccctcaggcagagactcaaatgtcgctcttttaaatggtatcttgaaaacgtgtacccagaaatgcgggtttataacaatactttgacttatggagaagtaaggaacagcaaggcaagcgcatactgtctggatcaaggcgcggaagatggggacagggccattttgtatccctgccatggcatgtcatcccagctggtgagatattccgccgacggcctcctccaactggggccactgggctctacagcctttctgcctgattccaagtgtctagtggatgacggcaccggtcgtatgcctacccttaagaaatgcgaggacgtggctcggccaactcagaggctttgggactttacccagtcaggccccatagtgtccagggccacggggcgctgccttgaagtagaaatgtccaaagacgcgaacttcggcctgagattggtggtgcaaagatgttcaggacagaagtggatgatccgcaattggattaagcatgcccggcattag

SEQ ID NO: 209705 - DNA, 714 bp, Artificial Sequence
  derived and/or modified sequence
atggaggtcctaccatgcagccgagtggctcatattgaaaggactaggaagccctacaacaatgatatcgattattatgctaagcgcaatgctctccgggctgcagaggtctggatggatgatttcaaatctcacgtgtatatggcctggaacatccctatgtccaacccgggagtggacttcggggacgtgagcgagaggcttgccctgcgccagagattaaaatgtaggtctttcaaatggtatctggagaacgtgtacccagaaatgagagtttataacaataccctgacatacggagaagtacggaattcgaaggcatccgcgtactgcctcgaccagggcgctgaagacggcgaccgggctatcttatacccgtgccacggaatgtccagtcaactggttaggtattctgcggatgggctgttgcagctaggtcctttgggatctactgcattcctgcccgattctaaatgccttgtcgacgacggcacagggaggatgcctaccctaaaaaagtgcgaggatgttgccagacctacccagcggctgtgggatttcacacaatccgggcctatcgtttcaagagcaaccggaaggtgtctggaggtggagatgagcaaggatgctaacttcggcctcaggctggtggtgcaaaggtgcagcggtcagaagtggatgattaggaattggatcaaacatgctcgacactag

SEQ ID NO: 209706 - DNA, 294 bp, Artificial Sequence
  derived and/or modified sequence
atggaggttctaccgtgtagtagagtcgcgcatatagaacgcacccggaaaccctataacaatgatatagactactacgctaagcgaaacgccctaagggctgccgaagtgtggatggacgatttcaaatcccacgtttacatggcttggaatatccccatgtcgaatcccggagtagatttcggcgatgtgtctgagagacttgccctgagacaacgccttaagtgccggagcttcaaatggtacctagagaacgtgtatcccgaaatgcgcgtatataacaatacattgtag

SEQ ID NO: 209707 - DNA, 714 bp, Artificial Sequence
  derived and/or modified sequence
atggaggttctaccttgttctcgggtggcgcatattgagagaactcggaagccctacaataatgacatcgattactatgccaagcggaatgcattgcgcgctgcagaagtttggatggatgatttcaaaagccacgtctacatggcctggaatatccccatgtccaaccccggagtggattttggagacgtgtcagagagactcgcactgcgacaacggctgaagtgtcgaagcttcaagtggtacctggagaacgtgtatccggagatgagagtttataacaacaccctaacctatggggaagtccgaaactccaaggcttcagcatactgcctggatcagggcgctgaagacggtgaccgggctattctgtatccatgccacggcatgtccagccagttagtgcgatactccgcagacggacttttacaactcgggcctcttggcagcacggcgtttcttcctgactctaagtgtttggttgatgatggcacagggcgaatgcctacactgaagaaatgcgaagacgtcgccagaccaacgcaaaggctgtgggactttactcagagcggtcctatagtctcccgggcaaccggtcggtgtctggaggtggaaatgtccaaagacgctaactttggcctgagactcgtggtgcagcgctgcagcgggcagaaatggatgatcaggaactggattaaacacgcaagacattag

SEQ ID NO: 209708 - DNA, 165 bp, Artificial Sequence
  derived and/or modified sequence
atggaagtcctgccttgctcaagggtggcacatatagaacgcaccagaaaaccctataacaatgacatagactattatgcgaagaggaacgccctgcgggcagcggaggtctggatggatgattttaagagtcacgtctatatggcctggaatattccaatgtag

SEQ ID NO: 209709 - DNA, 714 bp, Artificial Sequence
  derived and/or modified sequence
atggaagtgctgccttgcagtagagtcgcccatatagagcgaaccagaaaaccatacaataatgacatcgattactacgccaagcgcaatgccctgagggccgctgaagtgtggatggatgacttcaagtctcacgtgtacatggcctggaacattccgatgtctaaccctggtgtggactttggagatgtgtccgaaaggcttgccttgcgccaaaggctcaagtgcaggagtttcaagtggtacctggaaaatgtttatccggagatgcgggtttataacaatacgctgacgtacggcgaagtgagaaatagtaaggctagcgcttactgtttagatcagggcgcagaagacggagatagagccatcctctacccatgtcacggtatgtcttctcagttggttcggtacagcgccgatggtctgttacagcttggcccactgggttccactgcctttctccccgactctaaatgtctggtggacgatggaactggcagaatgcccacattgaaaaaatgtgaagacgtcgctcgtcctacccagagattgtgggactttactcagtcaggacctattgtctccagggctacaggaaggtgcctggaggtcgagatgtctaaggacgccaatttcgggcttaggctcgtagtgcagaggtgtagcgggcagaagtggatgattcggaattggataaagcacgctagacattag

SEQ ID NO: 209710 - protein, 165 aa, Artificial Sequence
  derived and/or modified sequence
MKPLIWTWSDVEGQRPALLICTAAAGPTQGVKDLEEVPPSAASQSAQARCALGSWGYGKPFEPRSVKNIHSTPAYPDATMHRQLLAPVEGRMAETLNQKLHVANVLEDDPGYLPHVYSEEGECGGAPSLSSLASLEQELQPDLLDSLGSKATPFEEIYSESGVPS

SEQ ID NO: 209711 - DNA, 498 bp, Artificial Sequence
  derived and/or modified sequence
atgaagcccctgatctggacctggagcgacgtggagggccagagacccgccctgctgatctgcaccgccgccgccggccccacccagggcgtgaaggacctggaggaggtgccccccagcgccgccagccagagcgcccaggccagatgcgccctgggcagctggggctacggcaagcccttcgagcccagaagcgtgaagaacatccacagcacccccgcctaccccgacgccaccatgcacagacagctgctggcccccgtggagggcagaatggccgagaccctgaaccagaagctgcacgtggccaacgtgctggaggacgaccccggctacctgccccacgtgtacagcgaggagggcgagtgcggcggcgcccccagcctgagcagcctggccagcctggagcaggagctgcagcccgacctgctggacagcctgggcagcaaggccacccccttcgaggagatctacagcgagagcggcgtgcccagctag

SEQ ID NO: 209712 - DNA, 498 bp, Artificial Sequence
  derived and/or modified sequence
atgaaacctttgatctggacttggagcgacgtcgagggacaacgaccagcattgcttatttgtaccgccgctgccggtccaacccaaggcgtaaaggatttggaagaggtgccaccctccgccgcctcacagtctgcccaggcgaggtgcgcacttgggagttggggatatggtaaaccattcgagcctcgaagcgtgaagaatatccacagcacacctgcgtacccggacgctactatgcaccggcagctgctggcccccgtcgagggcagaatggccgagacattgaaccagaagctccatgttgctaatgtgttggaagatgaccccggctatctgccccacgtatactctgaggagggtgagtgcggtggcgccccttcgctgtcctcgctcgcttctttggaacaggaacttcagccagatttactagatagccttggcagcaaggccacacccttcgaagagatttactcagagagcggtgtccccagttag

SEQ ID NO: 209713 - DNA, 498 bp, Artificial Sequence
  derived and/or modified sequence
atgaagcccctcatctggacctggagcgatgtggagggccagaggcctgccctgctgatctgcacagctgctgctggccccacccagggcgtgaaggacctggaggaggtgccccccagcgctgccagccagagcgcccaggcccgctgtgccctgggctcctggggctacggcaagccctttgagcccaggtctgtgaagaacatccacagcaccccagcctacccagatgccaccatgcaccggcagctgctggcccctgtggagggccgcatggccgagaccctgaaccagaagctgcacgtggccaacgtgctggaggatgaccccggctacctgccccacgtgtacagcgaggagggggagtgtggcggggcccccagcctgagcagcctggccagcctggagcaggagctgcagcctgacctgctggacagcctgggcagcaaggccaccccatttgaggagatctacagcgagagcggcgtgcccagctag

SEQ ID NO: 209714 - DNA, 498 bp, Artificial Sequence
  derived and/or modified sequence
atgaagcccctgatctggacctggagcgacgtggagggccagcggccggccctgctgatttgcacagccgctgccggtcccacgcagggggtgaaggatttagaggaggtacccccatcagccgcctcccagagcgcccaggctcggtgcgcactgggtagctggggttatggaaagcccttcgaaccaagaagcgtgaaaaatatacattcaactcctgcttaccctgacgccaccatgcataggcagttgttggctccagtagaaggcagaatggccgaaaccctgaaccagaagctgcacgttgccaacgtgttggaggacgaccccggttacctcccccatgtgtatagcgaagaaggagaatgcggcggcgctcccagcctgtccagccttgcctccttggagcaggaactacagccagatcttctggactcactgggatctaaggccaccccatttgaggagatctatagcgaaagtggcgtcccgtcttag

SEQ ID NO: 209715 - DNA, 498 bp, Artificial Sequence
  derived and/or modified sequence
atgaaaccactcatttggacctggtccgatgtggagggtcaaagaccagcgctcctgatctgcacagccgctgccggacccacacagggtgtaaaggatttagaggaggttcccccaagtgccgcttctcagagcgctcaggcgagatgcgcgctgggaagttgggggtacgggaaaccctttgaacctagatctgtgaaaaatattcattccacccccgcttatcccgacgccacgatgcatcgacagctactggccccagtggaaggaaggatggccgagacgctcaaccaaaaacttcatgtcgccaatgtgttggaagacgatcctgggtatttacctcatgtgtacagcgaagaaggcgaatgcgggggtgcaccatccttgtcctctctggctagcctcgaacaagagcttcagcctgacctgcttgattcactggggagcaaggctactccgttcgaagaaatatattcagagtcaggtgtccccagctag

SEQ ID NO: 209716 - DNA, 2494 bp, Artificial Sequence
  derived and/or modified sequence
aataagaaagcagcttttccaagaaacaatacaatattactggccagatagtattattgattaattcaacaaacagttatgtagcatctactggtaccctggaactgtgctgaactttatagctacacagatgactaagacgcaatttggccttgccagttcatgactgagttatacatgaacagaacaagatcctcatgaaacctctgatatggacatggtcagatgttgaaggccagaggccggctctgctcatctgcacagctgcagcaggacccacgcagggagttaaggatctcgaggaagtgcctccatctgcagcgagtcagtcagcccaagcacgctgtgctctggggagctggggttatggcaagccctttgagccaagaagtgtgaaaaacatacactctactcctgcttacccagatgccacaatgcacagacaactcctggctccggtggaaggaaggatggcagagacattgaatcagaaactccatgttgccaatgtgctggaagatgaccccggctacctacctcacgtctacagcgaggaaggggagtgtggaggggccccatccctcagctctctggccagcttggaacaggagttgcaacctgatttgctggactctttgggttcaaaagcgactccgtttgaggaaatatattcagagtcaggtgttccttcctaaaaaaaaaagtctattttggagaattgaaataattcatggaagggaatcactattcagggatttttcccctttgctcttcttttccctccttaaaagaaaaattaccttctagtcctaggatgaggacacactattagtttgaattaaatgctttgatattctcagatcagccatcttgaaccaaagcaaaaccacaagttacactttcttaaaatttgatttgtcatattttctagagaaacttgaatttaattgtgttattcttagcttccactggcagcctagctttgagggtaaatgaaaatataacccatagattacccagccacttgggaacagcaggtaatactgaagaaaaataaaaatagattttgaaaacgttacttacatttctatgattatgattctgcttccatttaagggaaaacttaggtaaatagagaaattttttctataacatttgtagtcagtatttgaagtgattttttaaaaaataagtattggtccctgttcactttttgattagataaatagataaaatatgttatcttgagaaaaatgattatgctgaaagctttataaacagtatactctttaaaaaatgaagagctgacataatttaacttgtatgtattatgtaagtaaaagagttaggagcctttgaatgagtaagttctgattagattttatctttaaacaaaaccacaaaatttaattggtttttacttgtccacttactgctagtgtcagtttcaggggaagaaatggtttcttttaaaaatcttaataggggacatatgccctaaaaatagtcagttttctagtctgagtaatagataagagactgactaagcaaagtttaaaatgctatttggacactttaatgcacatattggatatctaaaagtctacagccatataaaaattttatataattaatgagcaaatgccgtctctcatgccctaaaataaatcagtagaaacatgtttgctggtgaatcagtgaagcattatgttaaacagtgagttacagctcagagttaaaactttctccttctttttgaagaagctgtgcaaatacttctttttaaggagatctggccttttcctacctggttacctcagtcttcctctgctttgggaagctgaaaaagaagaaaaatcacatttaaagcactggaatgtctgaatgggacgcttgaatgtgtagaacagctgtactgatcctagcatgactcagaggacagtctagggcattttctgggtaattcaggataaaagtatttttttttttaagaaaaatacatgtttttggacaacaaaacaaagtaaacattagtttattcgattgcctccttatacttgcctctttcattctgtcccctgtagatttttaaaaaattatctcattttaaaactttattatttcattttaaataattgacatataataattgtacatatttagggggtacatagtcatgtttcaatacatttacagtgatcagatcagggtggttaacgtaatcattggctcaaacatttttcatttctttgtattggtacggagcattcaatatccatcccccttctagctatctaaaactatgtattattgttaactataggcaacatataatggtatagagtgctagaacgtattcctcctaggaataatttgctgtaattttgtatcctttaataaatctctccctatccctctttccccccacccttcccagctgctgtgtcctctgttctaccttctacttccgagataaacttggttttagcttcca

SEQ ID NO: 209717 - DNA, 165 bp, Artificial Sequence
  derived and/or modified sequence
atgtgtagagagacagcaggatatggctggttgctggcgagcacagagttactctccttgctagaacccctgagcccccagctgctcaaagaacacatctcctgtacgtcacaagtcgccgcaggggcaaaagtgacaccggattccgccgtttgggcgccttag

SEQ ID NO: 209718 - protein, 383 aa, Artificial Sequence
  derived and/or modified sequence
MLSRKKTKNEVSKPAEVQGKYVKKETSPLLRNLMPSFIRHGPTIPRRTDICLPDSSPNAFSTSGDVVSRNQSFLRTPIQRTPHEIMRRESNRLSAPSYLARSLADVPREYGSSQSFVTEVSFAVENGDSGSRYYYSDNFFDGQRKRPLGDRAHEDYRYYEYNHDLFQRMPQNQGRHASGIGRVAATSLGNLTNHGSEDLPLPPGWSVDWTMRGRKYYIDHNTNTTHWSHPLEREGLPPGWERVESSEFGTYYVDHTNKKAQYRHPCAPSVPRYDQPPPVTYQPQQTERNQSLLVPANPYHTAEIPDWLQVYARAPVKYDHILKWELFQLADLDTYQGMLKLLFMKELEQIVKMYEAYRQALLTELENRKQRQQWYAQQHGKNF

SEQ ID NO: 209719 - protein, 350 aa, Artificial Sequence
  derived and/or modified sequence
MPSFIRHGPTIPRRTDICLPDSSPNAFSTSGDVVSRNQSFLRTPIQRTPHEIMRRESNRLSAPSYLARSLADVPREYGSSQSFVTEVSFAVENGDSGSRYYYSDNFFDGQRKRPLGDRAHEDYRYYEYNHDLFQRMPQNQGRHASGIGRVAATSLGNLTNHGSEDLPLPPGWSVDWTMRGRKYYIDHNTNTTHWSHPLEREGLPPGWERVESSEFGTYYVDHTNKKAQYRHPCAPSVPRYDQPPPVTYQPQQTERNQSLLVPANPYHTAEIPDWLQVYARAPVKYDHILKWELFQLADLDTYQGMLKLLFMKELEQIVKMYEAYRQALLTELENRKQRQQWYAQQHGKNF

SEQ ID NO: 209720 - DNA, 93 bp, Artificial Sequence
  derived and/or modified sequence
catcgaatggactcgaatggaataatcattgaacggaatcgaagggaatcatcatcggatggaaacgaatggaatcatcatcgaatggaaatg

SEQ ID NO: 209721 - DNA, 89 bp, Artificial Sequence
  derived and/or modified sequence
atcgaatggaatcattgaatggaaaggaatggaatcatcatggaatggaaacgaatggaatcactgaatggactcgaatgggatcatca

SEQ ID NO: 209722 - DNA, 1152 bp, Artificial Sequence
  derived and/or modified sequence
atgctgtcccgaaaaaagacaaaaaatgaggtctccaagccggctgaggttcagggcaaatacgtgaagaaggagacttccccattgctgaggaaccttatgccttctttcatccgtcacggacctaccattcctagacggactgacatatgcctgccagacagcagcccgaacgccttctccacttccggggatgtcgtgtctcgaaatcagagctttctgcgcacccccatccagaggaccccccacgagattatgcgtcgcgaatcgaaccgattatctgcacctagctaccttgccaggtcgctcgcggatgtgccgagagagtacgggagcagccaaagcttcgtcaccgaggtatcctttgcggtcgaaaatggcgactcaggctctaggtattactattctgataacttcttcgatggtcaacgcaagcggcccctgggagacagagcccacgaggattatagatattatgagtacaatcacgacctctttcagagaatgccacagaaccaaggcaggcacgcttctggcattggccgcgttgcagccaccagcctcggcaatctgaccaatcatggctccgaggacttgccattaccacccggttggagcgtggattggacgatgcggggtcgcaaatactacattgaccataacacaaataccacgcattggagtcaccccttagagcgggagggtctgcctcctggatgggagcgggttgaatcatccgaattcgggacatattacgtggaccatactaataaaaaggctcagtaccggcatccatgcgccccctctgtgccacgttatgaccaacctcctcccgtcacatatcagccacagcagacggaaagaaaccaaagcttgttggtgccagcgaacccttaccacacagcagaaattccagactggctgcaggtctacgcaagagctccggtcaaatacgaccacatcttaaagtgggagctgtttcaactggcagacctcgacacttatcaggggatgctgaagttgctatttatgaaagaactggagcagatagtgaagatgtatgaagcttataggcaagctttgctcacagagttggagaaccgcaaacagagacaacagtggtacgcccagcagcatggaaaaaatttctag

SEQ ID NO: 209723 - DNA, 1152 bp, Artificial Sequence
  derived and/or modified sequence
atgctgagcaggaagaagaccaagaatgaggtgtccaagccagctgaggtgcagggcaagtatgtgaagaaggagaccagccccctgctgaggaacctgatgcccagcttcatccgccacggccccaccatccccaggagaacagacatctgcctgcctgacagcagccccaatgccttcagcaccagcggagatgtggtgtccaggaaccagagcttcctgcggacccccatccagaggacccctcatgagatcatgagaagagagagcaaccggctgagcgcccccagctacctggcccggagcctggctgatgtgccccgggagtatggcagcagccagagctttgtgacagaggtgtcctttgctgtggagaatggagacagcggcagccgctactactacagcgacaacttctttgatggccagaggaagaggcccctgggggaccgggcccacgaggactaccgctactatgagtacaaccacgacctcttccagaggatgccccagaaccagggcagacatgccagcggcatcggccgggtggccgccaccagcctgggcaacctgaccaaccacggcagcgaggacctgcccctgcccccaggctggagcgtggactggaccatgaggggcaggaagtactacatcgaccacaacaccaacaccacccactggagccaccccctggagcgggagggcctgcccccaggctgggagcgggtggagagcagcgagtttggcacctactacgtggaccacaccaacaagaaggcccagtaccgccacccctgtgcccccagcgtgcccaggtatgaccagcccccacctgtgacctaccagccccagcagacagagaggaaccagagcctgctggtgcctgccaacccctaccacacagctgagatcccagactggctgcaggtgtatgcccgggcccctgtgaagtatgaccacatcctgaagtgggagctgttccagctggccgacctggacacctaccagggcatgctgaagctgctcttcatgaaggagctggagcagatcgtgaagatgtatgaggcctaccggcaggccctgctgacagagctggagaacaggaagcagaggcagcagtggtacgcccagcagcacggcaagaacttctag

SEQ ID NO: 209724 - DNA, 1152 bp, Artificial Sequence
  derived and/or modified sequence
atgctgagccggaagaagaccaagaacgaggtgagcaagcccgccgaggttcagggcaagtacgtcaagaaggagacgtccccactgctccgcaatctgatgccatcatttatacgccacggtccaacgattcctagacggaccgacatttgcttgcctgactctagcccaaacgccttctccacttccggagatgtggtgtccaggaaccaaagctttttaaggacccctatccaacgtactcctcatgagataatgaggagagagagcaacagactgtccgcacccagctatctggcccgttccctagccgacgtcccccgagagtacggatccagccagtccttcgttacagaggttagcttcgcagtcgagaacggtgattccgggtcccgctattactactcagataatttcttcgatgggcaaagaaaacggccgcttggggaccgagctcatgaggactacagatattacgaatacaatcatgatctgttccagagaatgccccaaaaccagggccgtcacgcgagcgggatcgggagagtggccgcaacaagtctcggtaatctgacaaaccacggctctgaggatctgcctttgccacctggttggtctgtcgactggacgatgagaggccgcaagtattacatcgatcacaacactaacacgacgcactggtcacatcccctagagcgcgagggcttgccgccagggtgggaaagggtggagagctccgaattcggcacttattacgtagaccacacaaataagaaggctcaatacaggcacccatgcgcaccgtcggttcccaggtatgaccaaccaccaccagttacttatcagccgcaacagacagagcggaaccaatcacttctcgtgcctgccaacccataccacaccgctgagattcccgattggttgcaggtttacgcccgagcgcccgttaaatacgaccacatccttaagtgggaactgttccaattggcagaccttgacacatatcagggaatgctgaaactcttgttcatgaaggagttggagcagattgtgaaaatgtatgaggcataccggcaagctctcctcaccgaactggagaaccgaaaacagcgacagcagtggtacgctcaacagcacgggaagaacttctag

SEQ ID NO: 209725 - DNA, 1152 bp, Artificial Sequence
  derived and/or modified sequence
atgctgtctaggaaaaagacgaagaatgaggtttcaaagcccgctgaggtccagggcaagtatgtcaagaaggagacctccccactactcagaaatctgatgccttctttcatacgccacggtcccaccatcccacggcgaactgatatctgtttgcccgacagctcccccaacgcattctctactagtggcgatgtggtgagccgtaatcagtcctttctcaggacaccaatccagcgcaccccacacgaaataatgaggagggaatctaaccgcctttctgcccctagctatctcgcacgctccctcgcagacgtccctcgagaatatggttcttctcagtcctttgtgacagaagttagcttcgcagtcgaaaacggcgactcaggatctcggtattactatagcgataactttttcgacggccagcggaaacggcctcttggtgaccgggctcacgaggactatcgttattacgaatataaccatgatctctttcagagaatgccacaaaaccaggggaggcatgcctcggggatagggagggtggccgctaccagcctaggcaacctgactaatcatggttctgaggatctgccgttgccccctggatggtctgtcgactggaccatgagggggagaaaatattacattgaccacaacacaaatacgactcactggtcgcacccactggagcgggaaggcctccctccaggttgggagagggtcgagagctccgaattcggaacttattatgtcgaccacaccaacaaaaaggcccagtaccgtcatccatgtgccccttccgtcccaaggtacgaccaaccaccgccagttacatatcagccccaacagactgagcgaaaccagtccctcctggtgcccgcaaatccctatcacactgctgaaataccggattggttacaggtatatgcccgtgcccctgtgaaatatgaccacatcctcaaatgggagcttttccagttggcagacctcgacacttaccagggcatgctgaaattgctgttcatgaaagagctggagcagatcgtgaaaatgtatgaggcgtaccgtcaggcactgctgacagaactggaaaaccgtaagcagcggcagcaatggtacgcacagcagcacggaaaaaacttctag

SEQ ID NO: 209726 - DNA, 2059 bp, Artificial Sequence
  derived and/or modified sequence
aaagtttacgggatgtaggcggcggcggcggtagtggtagcggttattcggcggcccgcggcggaccatggccctggccctggcccggcgtcgctgggctttcctcacggcgtccccgagcagcgtcgcagagcgggccgacttccgggaaggaactgaccagcgactgagcggcggccggcgcgcttagcgccctgaacatgcggcagtccctgcgggcgaccccgggctccggacaggcggcggcggaggcggcggctcgggagggaaggaggcggcggcgccggcggaggtggcggcggaggtgcaggggaagtacgtgaagaaggagacgtcgcctctgcttcggaatcttatgccttcattcatccggcatggtccaacaattccaagacgaactgatatctgtcttccagattcaagccctaatgccttttcaacttctggagatgtagtttcaagaaaccagagtttccttagaactccaattcaaagaacacctcatgaaataatgagaagagaaagcaacagattatctgcaccttcttatcttgccagaagtctagcagatgtccctagagagtatggttcttctcagtcatttgtaacggaagttagttttgctgttgaaaatggagactctggttcccgatattattattcagacaatttttttgatggtcagagaaagcggccacttggagatcgtgcacatgaagactacagatattatgaatacaaccatgatctcttccaaagaatgccacagaatcaggggaggcatgcttcaggtattgggagagttgctgctacatctttaggaaatttgactaaccatggttctgaagatttaccccttcctcctggctggtctgtggactggacaatgagagggagaaaatattatatagatcataacacaaatacaactcactggagccatcctcttgagcgagaaggacttcctcctggatgggaacgagttgagtcatccgaatttggaacctattatgtagatcacacaaataagaaggcccaatacaggcatccctgtgctcctagtgtacctcggtatgatcaaccacctcctgtcacataccagccacagcaaactgaaagaaatcagtcccttctggtacctgcaaatccatatcatactgcagaaattcctgactggcttcaggtttacgcacgagcccctgtgaaatatgaccacattctgaagtgggaactcttccagctggctgacctggatacataccagggaatgctaaagttgctcttcatgaaagaattggagcagattgttaaaatgtatgaagcatacagacaagcccttcttacagagttggaaaaccgaaagcagagacagcagtggtatgcccaacaacatggaaaaaatttttgagctgattttttaaaaatttaagttttgtaagagctttaaaatattttcacagataaaaaattgcaaacaagtactctggttaataaatgctgcttcctttgtggaaattataaaattctaactttacatgtattttgttattagaaattttcttttattgaatgagaaaaattagtctatcattttaagagccaatatggcaaacactttcaaatactgtatattaggaaactgttttggtattcttgatggaaaaaaacgcagcggaaatgtcattatgaacagatgttaaataggaaattattacttgttaacttcttacagcagtagtaccttctttaaaaaaaaaaaagaatctgcggtatttttttaaaaaaaaagtttaccgctgtagtgtgaaatattgtctggaaagggatggtttaaatattaccatgatgtagttgaaatataaaataggatttggaaccttattgtgataaatatttatatatgatgtatgtttgtctcccctctccaaagtaaggaacccagctgggcgtggtggctcactcctgtaatcccagcattttgggaggccgaggtgggtggaccgcttgagtccacgagtttaagaccagcctgggcaacatggtgaagccccatctctac

SEQ ID NO: 209727 - DNA, 3063 bp, Artificial Sequence
  derived and/or modified sequence
acgggatgtaggcggcggcggcggtagtggtagcggttattcggcggcccgcggcggaccatggccctggccctggcccggcgtcgctgggctttcctcacggcgtccccgagcagcgtcgcagagcgggccgacttccgggaaggaactgaccagcgactgagcggcggccggcgcgcttagcgccctgaacatgcggcagtccctgcgggcgaccccgggctccggacaggcggcggcggaggcggcggctcgggagggaaggaggcggcggcgccggcggaggtggcggcggagacggccggcgcccggcgcggagccctagggaggcagttcagcgcggcctcgggcctcgtcgagaaggatgctgtcccgaaagaaaaccaaaaacgaagtgtccaagccggccgaggtgcaggggaagtacgtgaagaaggagacgtcgcctctgcttcggaatcttatgccttcattcatccggcatggtccaacaattccaagacgaactgatatctgtcttccagattcaagccctaatgccttttcaacttctggagatgtagtttcaagaaaccagagtttccttagaactccaattcaaagaacacctcatgaaataatgagaagagaaagcaacagattatctgcaccttcttatcttgccagaagtctagcagatgtccctagagagtatggttcttctcagtcatttgtaacggaagttagttttgctgttgaaaatggagactctggttcccgatattattattcagacaatttttttgatggtcagagaaagcggccacttggagatcgtgcacatgaagactacagatattatgaatacaaccatgatctcttccaaagaatgccacagaatcaggggaggcatgcttcaggtattgggagagttgctgctacatctttaggaaatttgactaaccatggttctgaagatttaccccttcctcctggctggtctgtggactggacaatgagagggagaaaatattatatagatcataacacaaatacaactcactggagccatcctcttgagcgagaaggacttcctcctggatgggaacgagttgagtcatccgaatttggaacctattatgtagatcacacaaataagaaggcccaatacaggcatccctgtgctcctagtgtacctcggtatgatcaaccacctcctgtcacataccagccacagcaaactgaaagaaatcagtcccttctggtacctgcaaatccatatcatactgcagaaattcctgactggcttcaggtttacgcacgagcccctgtgaaatatgaccacattctgaagtgggaactcttccagctggctgacctggatacataccagggaatgctaaagttgctcttcatgaaagaattggagcagattgttaaaatgtatgaagcatacagacaagcccttcttacagagttggaaaaccgaaagcagagacagcagtggtatgcccaacaacatggaaaaaatttttgagctgattttttaaaaatttaagttttgtaagagctttaaaatattttcacagataaaaaattgcaaacaagtactctggttaataaatgctgcttcctttgtggaaattataaaattctaactttacatgtattttgttattagaaattttcttttattgaatgagaaaaattagtctatcattttaagagccaatatggcaaacactttcaaatactgtatattaggaaactgttttggtattcttgatggaaaaaaacgcagcggaaatgtcattatgaacagatgttaaataggaaattattacttgttaacttcttacagcagtagtaccttctttaaaaaaaaaaaagaatctgcggtatttttttaaaaaaaaagtttaccgctgtagtgtgaaatattgtctggaaagggatggtttaaatattaccatgatgtagttgaaatataaaataggatttggaaccttattgtgataaatatttatatatgatgtatgtttgtctcccctctccaaagtaaggaacccagctgggcgtggtggctcactcctgtaatcccagcattttgggaggccgaggtgggtggaccgcttgagtccacgagtttaagaccagcctgggcaacatggtgaagccccatctctacaaaaaatacaaaaaaattagccgggtatgatggtgtgtgcctctagtcccagctacttgggaggctgaggtcagaggatggcttgagcccaagaggcagaggttgcagggtcaagatcgcaccacttgcactgcagcctgagagagagagagccagaccttgtctcaaaaaataaaaaataaaaaaataaaaacaaaataaggaatccttttaaagcatgttgagaaagtattttttggtatgaatgggtgacgggccttttaatctttcaggaatacatataagcaggaatacttagcctgtattgggaaggtgcgtgaaactcaaagttgctaacatcatcttccttattttcagccagtgctgttactgcatttagcatggctctgacgaggcagtggagagttcctgacagcatagcatactgccttctgacagactgggttaagctaccaaaaatgacaaccagggattcaaaaaaaatttttggtcattaaatcgaatgtatattattactttttaattttctaagtatttatcacaggactttaacaccatatatttccctcccagtttttctccccttttggtttaatagttaaaacatttttcataattagtgctgtacatttgattgcaaacaaattggtgatacttctaaactataactataaatctctagaattctgtgaatttcaacattatttgaagtagttcttcagttatatttacatgtgttgtaaatatgtaaatatacttttagcttaggaagtcttccagaatacaaactactcccagttagatatcagtgagtttgaataactgaagaaatgttgacaatgttaagtgtttgattttatataacaagcttattaaatatatttttgtggaaacta

SEQ ID NO: 209728 - DNA, 1152 bp, Artificial Sequence
  derived and/or modified sequence
atgctgagcagaaagaagaccaagaacgaggtgagcaagcccgccgaggtgcagggcaagtacgtgaagaaggagaccagccccctgctgagaaacctgatgcccagcttcatcagacacggccccaccatccccagaagaaccgacatctgcctgcccgacagcagccccaacgccttcagcaccagcggcgacgtggtgagcagaaaccagagcttcctgagaacccccatccagagaaccccccacgagatcatgagaagagagagcaacagactgagcgcccccagctacctggccagaagcctggccgacgtgcccagagagtacggcagcagccagagcttcgtgaccgaggtgagcttcgccgtggagaacggcgacagcggcagcagatactactacagcgacaacttcttcgacggccagagaaagagacccctgggcgacagagcccacgaggactacagatactacgagtacaaccacgacctgttccagagaatgccccagaaccagggcagacacgccagcggcatcggcagagtggccgccaccagcctgggcaacctgaccaaccacggcagcgaggacctgcccctgccccccggctggagcgtggactggaccatgagaggcagaaagtactacatcgaccacaacaccaacaccacccactggagccaccccctggagagagagggcctgccccccggctgggagagagtggagagcagcgagttcggcacctactacgtggaccacaccaacaagaaggcccagtacagacacccctgcgcccccagcgtgcccagatacgaccagcccccccccgtgacctaccagccccagcagaccgagagaaaccagagcctgctggtgcccgccaacccctaccacaccgccgagatccccgactggctgcaggtgtacgccagagcccccgtgaagtacgaccacatcctgaagtgggagctgttccagctggccgacctggacacctaccagggcatgctgaagctgctgttcatgaaggagctggagcagatcgtgaagatgtacgaggcctacagacaggccctgctgaccgagctggagaacagaaagcagagacagcagtggtacgcccagcagcacggcaagaacttctag

SEQ ID NO: 209729 - protein, 526 aa, Artificial Sequence
  derived and/or modified sequence
MPAVSGPGPLFCLLLLLLDPHSPETGCPPLRRFEYKLSFKGPRLALPGAGIPFWSHHGDAILGLEEVRLTPSMRNRSGAVWSRASVPFSAWEVEVQMRVTGLGRRGAQGMAVWYTRGRGHVGSVLGGLASWDGIGIFFDSPAEDTQDSPAIRVLASDGHIPSEQPGDGASQGLGSCHWDFRNRPHPFRARITYWGQRLRMSLNSGLTPSDPGEFCVDVGPLLLVPGGFFGVSAATGTLADDHDVLSFLTFSLSEPSPEVPPQPFLEMQQLRLARQLEGLWARLGLGTREDVTPKSDSEAQGEGERLFDLEETLGRHRRILQALRGLSKQLAQAERQWKKQLGPPGQARPDGGWALDASCQIPSTPGRGGHLSMSLNKDSAKVGALLHGQWTLLQALQEMRDAAVRMAAEAQVSYLPVGIEHHFLELDHILGLLQEELRGPAKAAAKAPRPPGQPPRASSCLQPGIFLFYLLIQTVGFFGYVHFRQELNKSLQECLSTGSLPLGPAPHTPRALGILRRQPLPASMPA

SEQ ID NO: 209730 - protein, 514 aa, Artificial Sequence
  derived and/or modified sequence
MPAVSGPGPLFCLLLLLLDPHSPETGCPPLRRFEYKLSFKGPRLALPGAGIPFWSHHGDAILGLEEVRLTPSMRNRSGAVWSRASVPFSAWEVEVQMRVTGLGRRGAQGMAVWYTRGRGHVGSVLGGLASWDGIGIFFDSPAEDTQDSPAIRVLASDGHIPSEQPGDGASQGLGSCHWDFRNRPHPFRARITYWGQRLRMSLNSGLTPSDPGEFCVDVGPLLLVPGGFFGVSAATGTLAGEDPTGQVPPQPFLEMQQLRLARQLEGLWARLGLGTREDVTPKSDSEAQGEGERLFDLEETLGRHRRILQALRGLSKQLAQAERQWKKQLGPPGQARPDGGWALDASCQIPSTPGRGGHLSMSLNKDSAKVGALLHGQWTLLQALQEMRDAAVRMAAEAQVSYLPVGIEHHFLELDHILGLLQEELRGPAKAAAKAPRPPGQPPRASSCLQPGIFLFYLLIQTVGFFGYVHFRQELNKSLQECLSTGSLPLGPAPHTPRALGILRRQPLPASMPA

SEQ ID NO: 209731 - protein, 144 aa, Artificial Sequence
  derived and/or modified sequence
MRNRSGAVWSRASVPFSAWEVEVQMRVTGLGRRGAQGMDSPAIRVLASDGHIPSEQPGDGASQGLGSCHWDFRNRPHPFRARITYWGQRLRMSLNSGLTPSDPGEFCVDVGPLLLVPGGFFGVSAATGTLAGEDPTGQVRAEGQ

SEQ ID NO: 209732 - DNA, 1581 bp, Artificial Sequence
  derived and/or modified sequence
atgcccgccgtgagcggccccggccccctgttctgcctgctgctgctgctgctggacccccacagccccgagaccggctgcccccccctgagaagattcgagtacaagctgagcttcaagggccccagactggccctgcccggcgccggcatccccttctggagccaccacggcgacgccatcctgggcctggaggaggtgagactgacccccagcatgagaaacagaagcggcgccgtgtggagcagagccagcgtgcccttcagcgcctgggaggtggaggtgcagatgagagtgaccggcctgggcagaagaggcgcccagggcatggccgtgtggtacaccagaggcagaggccacgtgggcagcgtgctgggcggcctggccagctgggacggcatcggcatcttcttcgacagccccgccgaggacacccaggacagccccgccatcagagtgctggccagcgacggccacatccccagcgagcagcccggcgacggcgccagccagggcctgggcagctgccactgggacttcagaaacagaccccaccccttcagagccagaatcacctactggggccagagactgagaatgagcctgaacagcggcctgacccccagcgaccccggcgagttctgcgtggacgtgggccccctgctgctggtgcccggcggcttcttcggcgtgagcgccgccaccggcaccctggccgacgaccacgacgtgctgagcttcctgaccttcagcctgagcgagcccagccccgaggtgcccccccagcccttcctggagatgcagcagctgagactggccagacagctggagggcctgtgggccagactgggcctgggcaccagagaggacgtgacccccaagagcgacagcgaggcccagggcgagggcgagagactgttcgacctggaggagaccctgggcagacacagaagaatcctgcaggccctgagaggcctgagcaagcagctggcccaggccgagagacagtggaagaagcagctgggcccccccggccaggccagacccgacggcggctgggccctggacgccagctgccagatccccagcacccccggcagaggcggccacctgagcatgagcctgaacaaggacagcgccaaggtgggcgccctgctgcacggccagtggaccctgctgcaggccctgcaggagatgagagacgccgccgtgagaatggccgccgaggcccaggtgagctacctgcccgtgggcatcgagcaccacttcctggagctggaccacatcctgggcctgctgcaggaggagctgagaggccccgccaaggccgccgccaaggcccccagaccccccggccagccccccagagccagcagctgcctgcagcccggcatcttcctgttctacctgctgatccagaccgtgggcttcttcggctacgtgcacttcagacaggagctgaacaagagcctgcaggagtgcctgagcaccggcagcctgcccctgggccccgccccccacacccccagagccctgggcatcctgagaagacagcccctgcccgccagcatgcccgcctag

SEQ ID NO: 209733 - DNA, 1545 bp, Artificial Sequence
  derived and/or modified sequence
atgcccgccgtgagcggccccggccccctgttctgcctgctgctgctgctgctggacccccacagccccgagaccggctgcccccccctgagaagattcgagtacaagctgagcttcaagggccccagactggccctgcccggcgccggcatccccttctggagccaccacggcgacgccatcctgggcctggaggaggtgagactgacccccagcatgagaaacagaagcggcgccgtgtggagcagagccagcgtgcccttcagcgcctgggaggtggaggtgcagatgagagtgaccggcctgggcagaagaggcgcccagggcatggccgtgtggtacaccagaggcagaggccacgtgggcagcgtgctgggcggcctggccagctgggacggcatcggcatcttcttcgacagccccgccgaggacacccaggacagccccgccatcagagtgctggccagcgacggccacatccccagcgagcagcccggcgacggcgccagccagggcctgggcagctgccactgggacttcagaaacagaccccaccccttcagagccagaatcacctactggggccagagactgagaatgagcctgaacagcggcctgacccccagcgaccccggcgagttctgcgtggacgtgggccccctgctgctggtgcccggcggcttcttcggcgtgagcgccgccaccggcaccctggccggcgaggaccccaccggccaggtgcccccccagcccttcctggagatgcagcagctgagactggccagacagctggagggcctgtgggccagactgggcctgggcaccagagaggacgtgacccccaagagcgacagcgaggcccagggcgagggcgagagactgttcgacctggaggagaccctgggcagacacagaagaatcctgcaggccctgagaggcctgagcaagcagctggcccaggccgagagacagtggaagaagcagctgggcccccccggccaggccagacccgacggcggctgggccctggacgccagctgccagatccccagcacccccggcagaggcggccacctgagcatgagcctgaacaaggacagcgccaaggtgggcgccctgctgcacggccagtggaccctgctgcaggccctgcaggagatgagagacgccgccgtgagaatggccgccgaggcccaggtgagctacctgcccgtgggcatcgagcaccacttcctggagctggaccacatcctgggcctgctgcaggaggagctgagaggccccgccaaggccgccgccaaggcccccagaccccccggccagccccccagagccagcagctgcctgcagcccggcatcttcctgttctacctgctgatccagaccgtgggcttcttcggctacgtgcacttcagacaggagctgaacaagagcctgcaggagtgcctgagcaccggcagcctgcccctgggccccgccccccacacccccagagccctgggcatcctgagaagacagcccctgcccgccagcatgcccgcctag

SEQ ID NO: 209734 - DNA, 435 bp, Artificial Sequence
  derived and/or modified sequence
atgagaaacagaagcggcgccgtgtggagcagagccagcgtgcccttcagcgcctgggaggtggaggtgcagatgagagtgaccggcctgggcagaagaggcgcccagggcatggacagccccgccatcagagtgctggccagcgacggccacatccccagcgagcagcccggcgacggcgccagccagggcctgggcagctgccactgggacttcagaaacagaccccaccccttcagagccagaatcacctactggggccagagactgagaatgagcctgaacagcggcctgacccccagcgaccccggcgagttctgcgtggacgtgggccccctgctgctggtgcccggcggcttcttcggcgtgagcgccgccaccggcaccctggccggcgaggaccccaccggccaggtgagagccgagggccagtag

SEQ ID NO: 209735 - DNA, 1581 bp, Artificial Sequence
  derived and/or modified sequence
atgcccgcggtgtccggacctggtccactgttctgtctcctgttgctcttgctggatccgcactctcccgaaacagggtgccctcctctgaggcgatttgagtataaactttcgttcaaaggaccaagattggcccttcccggcgcaggcatcccattttggagtcatcatggagatgctatactgggactggaggaggtgaggctcaccccgagtatgcgtaacaggtccggggcagtgtggtcaagggcttccgttcccttcagcgcttgggaggttgaggttcagatgcgggtaacgggacttgggcggcggggggcgcaaggcatggccgtctggtatactaggggcaggggccatgtgggttcagtgctcgggggtttggcctcgtgggatggaattggtatcttctttgatagcccagccgaggacacccaggactctccagccatccgcgttcttgcttcagacggtcacatcccttctgagcagccaggggacggtgcttcccaaggactcggttcttgccactgggatttccgtaacaggccacacccttttcgggcccgcattacctattgggggcagagactgcgaatgagtctgaattcagggttaactccctcagaccccggagagttttgcgtcgatgtcggccccctactgctggtgccggggggcttttttggggtgtccgctgcaacaggtacgctggctgacgatcacgacgttttgtccttcctgaccttctctcttagtgaaccttcacctgaagtgccccctcagcctttcctggagatgcagcagttgcggctggctcgccagctggaggggctttgggctcgcctgggcctcggcactcgggaagacgtcactccgaagtctgattcagaggctcagggtgagggggagaggcttttcgatctggaggagacccttggtcggcatcggcgtatcctgcaggctctgaggggcctgtcgaaacaactggcacaggccgagaggcaatggaaaaagcagctgggtccacctggacaggctaggcctgatggcggctgggcactggacgcaagctgccaaataccgagcacccccggccggggcggccatctgtccatgagtctaaacaaggacagtgcaaaggtgggtgcactgttacatgggcagtggaccctgctgcaggccttgcaagagatgcgcgacgccgccgttagaatggcagctgaagcccaggtgtcctatttaccggtcggcattgaacatcacttcctggaattggatcatatattaggtctgctgcaggaggaactccggggacccgcaaaggcagcagcaaaggcgccaagaccccccggtcagcccccccgggcatcaagctgccttcagcctggaatcttcctgttttatctcttaatccagacagtgggcttcttcgggtatgtccactttcgacaggaacttaacaagtcattacaggaatgtctgagcaccggatcacttcccctgggccccgcgccacacactcctcgggccctggggatccttaggcgccagcctttacctgcctccatgcccgcctag

SEQ ID NO: 209736 - DNA, 1545 bp, Artificial Sequence
  derived and/or modified sequence
atgcccgcagtctcaggcccgggacccctgttttgcctcctgctgttactgcttgatcctcatagccctgagacaggatgcccccctctccgcaggtttgagtacaaactgtctttcaagggcccacggcttgctttgcctggagccgggattccattttggtcccatcatggcgatgccatccttgggctggaggaggtaagattgaccccgtcgatgcggaaccgatcgggtgccgtgtggagccgtgcttccgtcccattctcagcgtgggaagtcgaggtgcaaatgagagtgaccggccttggaagacgcggggcccagggaatggccgtttggtatacacgaggtcgtggacacgtgggctccgttttagggggcctcgcctcctgggacgggatcggaattttttttgacagcccggcagaggatactcaggattcaccagctataagggtgttggcctctgatggacacatcccaagcgaacagccgggagacggcgcttcccaaggcctcggatcatgccactgggactttagaaaccggccccaccccttccgggccaggataacatactggggccagcgactccgaatgtcattgaatagcgggctgaccccatctgatcccggtgagttttgtgttgatgttgggccactgctcctggttcccggagggttcttcggggtgtcagctgctacaggtaccctggccggagaagatcccacaggacaggttcccccccagccattcttagagatgcaacagctcagactcgctaggcaactggaaggactttgggcccgtcttggtcttgggacccgagaggatgtgaccccaaagtccgatagcgaggcacagggggaaggtgagcggctgtttgatctggaagaaacactgggtcggcataggcgcattctccaggcactccgggggttaagcaagcagttggctcaggcagaacggcagtggaagaagcagctggggccgcctgggcaagcacggcccgatggagggtgggctctcgacgcatcatgccagatcccctcaactcccgggagaggcggccacttgtctatgagtctgaacaaggattcggctaaggtaggagccctgctgcatggtcagtggacattgctgcaggcactccaggaaatgcgcgatgccgccgtgagaatggctgctgaggctcaggtgtcctacctgccggttgggatcgaacaccacttcttggagcttgatcatattttgggcctcctacaggaggagctccgcggcccagcaaaggcggcagcaaaggccccaagacccccagggcagccaccccgcgcttcctcttgtctacaacctggcattttcctcttttacctactgatccaaacagtgggcttttttggctacgtgcacttccggcaggagctgaataagagtctccaagagtgtctctctacagggtcccttcccctaggccccgctccgcacacgccccgggctttaggcattttgcgaagacagcccctgccagccagcatgcctgcctag

SEQ ID NO: 209737 - DNA, 435 bp, Artificial Sequence
  derived and/or modified sequence
atgcgcaaccgttctggtgcagtttggtcaagagccagcgtgccattttcggcttgggaggttgaggtgcaaatgagggttacagggttgggaagaaggggagcccagggtatggacagtccggcaataagggtgctggctagcgacggtcacattcccagcgaacagcccggggatggggcctcacaggggctcggcagttgccactgggatttccggaacaggcctcatccattccgcgcccgcatcacctactggggtcaacggttacggatgagcctgaactccggtctgactcctagcgatcccggtgaattctgcgttgacgtgggcccccttctcttagtacccggaggctttttcggtgtctcagccgcaactggcaccttggcaggcgaagaccccacaggccaggtccgggcggaaggacagtag

SEQ ID NO: 209738 - DNA, 1873 bp, Artificial Sequence
  derived and/or modified sequence
agatagagggagaggacagtgccaaaacccagctcctggccagtccccagctcctccctgcctggccctatcccaggatcccctccccggcctcccagctatgatctaccccggggcccagacttcaggcgccttcacgatgccggcggtcagtggtccaggtcccttattctgccttctcctcctgctcctggacccccacagccctgagacggggtgtcctcctctacgcaggtttgagtacaagctcagcttcaaaggcccaaggctggcattgcctggggctggaatacccttctggagccatcatggagacgccatcctgggcctggaggaagtgcggctgacgccatccatgaggaaccggagtggcgccgtgtggagcagggcctctgtccccttctctgcctgggaagtagaggtgcagatgagggtgacgggactggggcgccggggagcccagggcatggccgtgtggtacacccggggcaggggccatgtaggctctgtccttggggggctggcttcgtgggacggcatcgggatcttctttgactctccggcagaggatactcaggacagtcctgccatccgtgtgctggccagcgacgggcacatcccctctgagcagcctggggatggagctagccaagggctgggctcctgtcattgggacttccggaaccggccacaccccttcagagcacggatcacctactgggggcagaggctgcgcatgtccttgaacagtggcctcactcccagtgatccaggtgagttctgtgtggatgtggggcccctgcttttggtccctggaggtttctttggggtctcagcagccaccggcaccctggcagatgatcatgatgtcctgtccttcctgaccttcagcctgagtgagcccagcccagaggttccccctcagcccttcctggagatgcagcagctccgcctggcgaggcagctggaagggctgtgggcaaggctgggcttgggcaccagggaggatgtaactccaaaatcagactctgaagctcaaggagaaggggaaaggctctttgacctggaggagacgctgggcagacaccgccggatcctgcaggctctgcggggtctctccaagcagctggcccaggctgagagacaatggaagaagcagctggggcccccaggccaagccaggcctgacggaggctgggccctggatgcttcctgccagattccatccaccccagggaggggtggccacctctccatgtcactcaataaggactctgccaaggtcggtgccctgctccatggacagtggactctgctccaggccctgcaagagatgagggatgcagctgtccgcatggctgcagaagcccaggtctcctacctgcctgtgggcattgagcatcatttcttagagctggaccacatcctgggcctcctgcaggaggagcttcggggcccggcgaaggcagcagccaaggccccccgcccacctggccagcccccaagggcctcctcgtgcctgcagcctggcatcttcctgttctacctcctcattcagactgtaggcttcttcggctacgtgcacttcaggcaggagctgaacaagagccttcaggagtgtctgtccacaggcagccttcctctgggtcctgcaccacacacccccagggccctggggattctgaggaggcagcctctccctgccagcatgcctgcctgacccacctcagagcctgctttgcatcactgggaagcaggcagtgtcttgggtgggggcttggtcagtatcctctccgtctgggtgcccagctcccacgcacacctgagctttcggcatgctcccacctcgttaaaggtgatttccctctcccca

SEQ ID NO: 209739 - DNA, 1706 bp, Artificial Sequence
  derived and/or modified sequence
ggcgccttcacgatgccggcggtcagtggtccaggtcccttattctgccttctcctcctgctcctggacccccacagccctgagacggggtgtcctcctctacgcaggtttgagtacaagctcagcttcaaaggcccaaggctggcattgcctggggctggaatacccttctggagccatcatggagacgccatcctgggcctggaggaagtgcggctgacgccatccatgaggaaccggagtggcgccgtgtggagcagggcctctgtccccttctctgcctgggaagtagaggtgcagatgagggtgacgggactggggcgccggggagcccagggcatggccgtgtggtacacccggggcaggggccatgtaggctctgtccttggggggctggcttcgtgggacggcatcgggatcttctttgactctccggcagaggatactcaggacagtcctgccatccgtgtgctggccagcgacgggcacatcccctctgagcagcctggggatggagctagccaagggctgggctcctgtcattgggacttccggaaccggccacaccccttcagagcacggatcacctactgggggcagaggctgcgcatgtccttgaacagtggcctcactcccagtgatccaggtgagttctgtgtggatgtggggcccctgcttttggtccctggaggtttctttggggtctcagcagccaccggcaccctggcaggtgaggatcccactggacaggttccccctcagcccttcctggagatgcagcagctccgcctggcgaggcagctggaagggctgtgggcaaggctgggcttgggcaccagggaggatgtaactccaaaatcagactctgaagctcaaggagaaggggaaaggctctttgacctggaggagacgctgggcagacaccgccggatcctgcaggctctgcggggtctctccaagcagctggcccaggctgagagacaatggaagaagcagctggggcccccaggccaagccaggcctgacggaggctgggccctggatgcttcctgccagattccatccaccccagggaggggtggccacctctccatgtcactcaataaggactctgccaaggtcggtgccctgctccatggacagtggactctgctccaggccctgcaagagatgagggatgcagctgtccgcatggctgcagaagcccaggtctcctacctgcctgtgggcattgagcatcatttcttagagctggaccacatcctgggcctcctgcaggaggagcttcggggcccggcgaaggcagcagccaaggccccccgcccacctggccagcccccaagggcctcctcgtgcctgcagcctggcatcttcctgttctacctcctcattcagactgtaggcttcttcggctacgtgcacttcaggcaggagctgaacaagagccttcaggagtgtctgtccacaggcagccttcctctgggtcctgcaccacacacccccagggccctggggattctgaggaggcagcctctccctgccagcatgcctgcctgacccacctcagagcctgctttgcatcactgggaagcaggcagtgtcttgggtgggggcttggtcagtatcctctccgtctgggtgcccagctcccacgcacacctgagctttcggcatgctcccacctcgttaaaggtgatttccctctc

SEQ ID NO: 209740 - DNA, 1263 bp, Artificial Sequence
  derived and/or modified sequence
gatctaccccggggcccagacttcaggcgccttcacgatgccggcggtttgagtacaagctcagcttcaaaggcccaaggctggcattgcctggggctggaatacccttctggagccatcatggagacgccatcctgggcctggaggaagtgcggctgacgccatccatgaggaaccggagtggcgccgtgtggagcagggcctctgtccccttctctgcctgggaagtagaggtgcagatgagggtgacgggactggggcgccggggagcccagggcatggacagtcctgccatccgtgtgctggccagcgacgggcacatcccctctgagcagcctggggatggagctagccaagggctgggctcctgtcattgggacttccggaaccggccacaccccttcagagcacggatcacctactgggggcagaggctgcgcatgtccttgaacagtggcctcactcccagtgatccaggtgagttctgtgtggatgtggggcccctgcttttggtccctggaggtttctttggggtctcagcagccaccggcaccctggcaggtgaggatcccactggacaggtaagagcagaagggcagtgatgaataaatcaccctcagcacaccttctaaagagcactggggtggcgtcagccacttcaccacatgacctgggcttctgtgacccttgggagaagtcatgtctgccttgagacttgcaagtctcaaatgggataaaacaagagaagctttgatttcagtgctggccacataagtgcccctagctgtgagttgcgggacaagtggaagacagacagcaaagaggggcatttaggaaaatggagcaaagaaatgtgacaccatggagagtccacggagggtcccacagcgggaaagctgagggcaaccagagcgtgggagtccttgaatgccaggaccttggtctggtttctgaggaggagagtgacatggtcagagctatgctggaaaggtggccactgtgcagttgctactaccagtagcagctgtgctctgggggcctaagagtgtcagatggtctgctgccatggctctagcccaggatgttttgggatcgtccagttctgccacaggggcctgcctctgactgagtgtgaggttcaaccctcaccacccacccgtctacctgtcaaccctcacacctttcctaggaagtaagcaagacaagcatcagacggtggcccaaagtcacccctcttgcctcggtgggatatcatggcggtta

SEQ ID NO: 209741 - DNA, 1581 bp, Artificial Sequence
  derived and/or modified sequence
atgcctgctgtgtctggccctggccccctcttctgcctgctgctgctgctgctggacccccacagccctgagaccggctgcccccccctgcggagatttgagtacaagctgtccttcaagggcccccggctggccctgcctggagctggcatccccttctggagccaccacggagatgccatcctgggcctggaggaggtgcggctgacccccagcatgaggaacagaagtggagctgtgtggagccgggcctctgtgcccttcagcgcctgggaggtggaggtgcagatgagggtgacaggcctgggccggcggggggcccagggcatggctgtgtggtacacccggggccggggccacgtgggctctgtgctgggcggcctggcctcctgggatggcatcggcatcttctttgacagccctgctgaggacacccaggacagccctgccatccgggtgctggccagtgatggccacatccccagcgagcagcctggagatggagccagccagggcctgggcagctgccactgggacttcaggaaccggccccaccccttccgggcccgcatcacctactggggccagaggctgaggatgagcctgaacagcggcctgacccccagcgaccctggagagttctgtgtggatgtgggccccctgctgctggtgcctgggggcttctttggagtgtctgctgccaccggcaccctggctgatgaccatgatgtgctgtccttcctgaccttcagcctgtctgagcccagccctgaggtgcccccccagcccttcctggagatgcagcagctgcggctggcccggcagctggagggcctgtgggcccggctgggcctgggcaccagagaagatgtgacccccaagagtgacagcgaggcccagggcgagggggagcggctgtttgacctggaggagaccctgggccgccaccggcgcatcctgcaggccctgcggggcctgagcaagcagctggcccaggccgagcggcagtggaagaagcagctgggccccccaggccaggcccggccagatggcggctgggccctggatgccagctgccagatccccagcaccccaggccggggcggccacctgtccatgagcctgaacaaggacagcgccaaggtgggcgccctgctgcacggccagtggaccctgctgcaggccctgcaggagatgagagatgctgctgtgaggatggctgctgaggcccaggtgtcctacctgcctgtgggcatcgagcaccacttcctggagctggaccacatcctgggcctgctgcaggaggagctgcggggccctgccaaggccgccgccaaggccccccggcccccaggccagcccccccgggccagcagctgcctgcagcccggcatcttcctgttctacctgctgatccagacagtgggcttcttcggctacgtgcacttccggcaggagctgaacaagagcctgcaggagtgcctgagcacaggcagcctgcccctgggccctgccccccacaccccccgggccctgggcatcctgcggcggcagcccctgcctgcctccatgcctgcctag

SEQ ID NO: 209742 - DNA, 1545 bp, Artificial Sequence
  derived and/or modified sequence
atgcctgctgtgtctggccctggccccctcttctgcctgctgctgctgctgctggacccccacagccctgagaccggctgcccccccctgcggagatttgagtacaagctgtccttcaagggcccccggctggccctgcctggagctggcatccccttctggagccaccacggagatgccatcctgggcctggaggaggtgcggctgacccccagcatgaggaacagaagtggagctgtgtggagccgggcctctgtgcccttcagcgcctgggaggtggaggtgcagatgagggtgacaggcctgggccggcggggggcccagggcatggctgtgtggtacacccggggccggggccacgtgggctctgtgctgggcggcctggcctcctgggatggcatcggcatcttctttgacagccctgctgaggacacccaggacagccctgccatccgggtgctggccagtgatggccacatccccagcgagcagcctggagatggagccagccagggcctgggcagctgccactgggacttcaggaaccggccccaccccttccgggcccgcatcacctactggggccagaggctgaggatgagcctgaacagcggcctgacccccagcgaccctggagagttctgtgtggatgtgggccccctgctgctggtgcctgggggcttctttggagtgtctgctgccaccggcaccctggccggggaggaccccaccggccaggtgcccccccagcccttcctggagatgcagcagctgcggctggcccggcagctggagggcctgtgggcccggctgggcctgggcaccagagaagatgtgacccccaagagtgacagcgaggcccagggcgagggggagcggctgtttgacctggaggagaccctgggccgccaccggcgcatcctgcaggccctgcggggcctgagcaagcagctggcccaggccgagcggcagtggaagaagcagctgggccccccaggccaggcccggccagatggcggctgggccctggatgccagctgccagatccccagcaccccaggccggggcggccacctgtccatgagcctgaacaaggacagcgccaaggtgggcgccctgctgcacggccagtggaccctgctgcaggccctgcaggagatgagagatgctgctgtgaggatggctgctgaggcccaggtgtcctacctgcctgtgggcatcgagcaccacttcctggagctggaccacatcctgggcctgctgcaggaggagctgcggggccctgccaaggccgccgccaaggccccccggcccccaggccagcccccccgggccagcagctgcctgcagcccggcatcttcctgttctacctgctgatccagacagtgggcttcttcggctacgtgcacttccggcaggagctgaacaagagcctgcaggagtgcctgagcacaggcagcctgcccctgggccctgccccccacaccccccgggccctgggcatcctgcggcggcagcccctgcctgcctccatgcctgcctag

SEQ ID NO: 209743 - DNA, 435 bp, Artificial Sequence
  derived and/or modified sequence
atgaggaacagaagtggagctgtgtggagccgggcctctgtgcccttcagcgcctgggaggtggaggtgcagatgagggtgacaggcctgggccggcggggggcccagggcatggacagccctgccatccgggtgctggccagtgatggccacatccccagcgagcagcctggagatggagccagccagggcctgggcagctgccactgggacttcaggaaccggccccaccccttccgggcccgcatcacctactggggccagaggctgaggatgagcctgaacagcggcctgacccccagcgaccctggagagttctgtgtggatgtgggccccctgctgctggtgcctgggggcttctttggagtgtctgctgccaccggcaccctggccggggaggaccccaccggccaggtgcgggcagagggccagtag

SEQ ID NO: 209744 - DNA, 1581 bp, Artificial Sequence
  derived and/or modified sequence
atgcccgccgtgagcggccccggccccctgttctgcctgctgctgctgttactcgaccctcattctcctgagaccggctgcccccctctgcggaggttcgagtacaagctatctttcaaggggccaaggctggcgctgcccggcgccggcatcccgttctggagtcaccacggagatgcaatacttggcttagaggaggtgcgcctgaccccatccatgaggaatcggagcggcgctgtgtggagccgcgcatctgtccccttcagcgcgtgggaggtcgaggtgcagatgcgcgtgactgggttgggccgaagaggggcccaggggatggcagtctggtacacacggggcaggggccacgtggggagcgtgctggggggtttggcgtcatgggatggcatcggcatcttcttcgattcccctgcggaagacacacaggattcacccgctatcagggttctggcgagcgatggccacatccctagcgaacagccgggggatggggcgagccaagggctcggaagctgccattgggacttcaggaatagaccccatccctttagagccagaatcacctattggggccaaaggttaaggatgagtctgaattccggactcactcctagcgaccctggcgaattctgtgttgatgtggggcctctgttgctagtgcccgggggctttttcggtgtgtcagccgctactggcacccttgcggacgatcatgacgtcttaagttttttaacattctctctatccgaaccctctccagaagttcccccacagccgttcctagagatgcaacagcttaggctggcaagacagctggaggggttgtgggcccgcctggggttgggtacccgcgaggacgttactccgaaatccgactccgaggcgcagggtgagggagaaagattgttcgacctagaggaaaccctgggtcgccatcggcgtatcttgcaggcattgcgtggcctgtccaaacagcttgcccaggcagagcgacagtggaagaagcaacttgggcctcctggacaagccaggccagacggaggatgggccttagacgcgtcatgccagattccgagcacaccaggaaggggggggcatctgtccatgtctctgaacaaggacagtgccaaggtcggggcgttgttacacggacagtggacgcttctacaagcgctgcaggagatgagagacgcagctgtgcgcatggcagccgaggctcaagtctcctatctgcctgtcgggatagagcatcactttctcgagctagatcacatactcggtcttctgcaggaagagttgagaggccccgctaaggctgccgcaaaggctcccagacctcccggccagcctcctcgcgcgagctcatgtctgcaacctggcatctttttgttttacctgcttattcagacggttggcttctttggctatgttcacttccggcaggagctaaataaaagtctccaagaatgtctaagcaccgggagtctgccattaggcccggccccccatacaccgcgagctctgggaattctccgacgccagcctctgccagcatcaatgcccgcctag

SEQ ID NO: 209745 - DNA, 1545 bp, Artificial Sequence
  derived and/or modified sequence
atgcccgccgtgagcggccccggccccctgttctgcctgctgctgctcctcttagatccccacagtcctgagactgggtgccccccgctcaggagattcgagtacaagctgagcttcaaggggccacggctcgccctacccggggcaggcatacccttctggagtcaccatggagacgctatcctgggacttgaagaagtgcgtctaactccttctatgagaaaccgttcgggagccgtatggagtagggcctctgttccattttctgcttgggaagtggaggtgcaaatgcgagtcactggtctgggacggcgaggtgcacaagggatggccgtgtggtatacgcggggacgcggccatgtggggtccgtgctcggaggattagcttcatgggacgggattggtatcttctttgacagtcctgctgaagacacccaagactcacctgctatcagggtgctcgcctcagacggacacattccttcagagcagccaggtgacggggcctctcagggacttgggtcatgtcattgggacttcagaaaccgccctcacccctttcgagccaggatcacctattggggccaaagactgaggatgagtctcaatagcggcctcacgccatccgatcccggcgagttctgtgtggatgtgggaccactgttgctggtgccaggcgggttcttcggggtaagtgcggccaccggcactcttgccggcgaagaccccacgggccaggttcccccccagcctttcctcgaaatgcagcagttacggctcgcaagacagctggaggggctatgggctcggctgggattgggtaccagggaagatgtgactccaaagtcagacagtgaggcgcaaggagagggtgaacgcctcttcgatcttgaagaaaccctcggaaggcatcggaggattctccaggccctgagaggactgtccaagcaattagcacaggcggaaagacagtggaagaagcagctcggacccccgggacaggcaagacccgacgggggttgggcactagacgcttcttgccagatcccctctaccccgggaagaggcggccacctttctatgtccctgaataaagactcagcgaaggtgggcgcccttttgcacggccagtggacactgctgcaagcactgcaggagatgcgcgatgccgccgtgagaatggcagccgaggcgcaggtctcatacctgcctgtaggcattgagcaccactttcttgagttggatcacatcctaggtcttctacaggaggagcttcgggggcctgcgaaggcagccgccaaggccccccggcctccaggtcagccaccccgcgcatcctcatgcctacagcccggaatcttcttgttctacctgctcatccagacagttggctttttcggctacgtgcactttaggcaggagctcaataaatccctgcaggaatgcctgagcaccggtagcctgcctttgggacccgctccccacacaccccgcgccctggggatcttacggagacagcctctgcccgcatcgatgccagcttag

SEQ ID NO: 209746 - DNA, 435 bp, Artificial Sequence
  derived and/or modified sequence
atgcggaaccggagcggcgccgtgtggagccgggccagcgtgcccttctccgcatgggaagtagaggtccagatgcgagtcaccgggcttggtcgaagaggcgcacaaggcatggactccccggccatccgcgttcttgcatcggatggccacattccatctgaacagccaggcgatggagctagtcagggactgggcagctgtcactgggacttcagaaacaggccacacccatttagagcccgcatcacctattgggggcagcgactgagaatgagtctcaactccggactaacaccttccgacccgggagagttttgtgtggatgttggtcccctgctgctggtgcctggtggcttcttcggtgtgtcggcagcaactggaaccctcgctggtgaagatccaacaggacaggtaagggccgagggccagtag

SEQ ID NO: 209747 - DNA, 1581 bp, Artificial Sequence
  derived and/or modified sequence
atgcctgccgtgtccgggccaggtccattattttgccttctgctcctgctgctggacccacatagcccagagaccggttgcccacctctgagacgatttgagtataagctgagctttaaggggccacgcctggccttgcccggagctggaatcccgttctggagccatcacggcgatgcaatcctcggcctggaggaagttcggctcactcctagcatgcgcaatcgcagcggcgcagtgtggtcacgggcaagcgtaccgttttctgcctgggaggtggaagtccaaatgcgggttacgggactaggccgtcggggtgctcaaggcatggctgtatggtacacccgaggcagaggtcatgtaggttccgtcctcgggggattagctagttgggatggcattggaattttttttgactcaccagctgaagacacccaggattctcccgcaatccgcgtcctggcctcagatggtcacatccctagtgaacagccaggcgacggggcaagccagggcctgggatcttgccactgggattttcgcaaccgccctcacccttttcgcgcaagaatcacatactggggccaacggctgcgcatgtcgctgaatagtgggttaacaccctcggatccaggcgagttttgtgtggatgttggtccactcctgcttgtccctggagggttcttcggtgttagtgctgctacagggacccttgctgatgatcacgacgtcctgtcattcttaacattctctctgtctgagccttctcccgaagtccctcctcaaccatttttagagatgcagcagctgaggcttgcacgccagctcgaggggctgtgggctaggctggggctgggcacccgggaggacgtcaccccaaagagcgatagcgaggctcagggggaaggggaacggctgtttgatctggaggagacccttggcaggcaccggagaattctgcaggcactccgcggactgtctaaacaactggcccaagcagaacggcaatggaagaaacagctggggcctcccggacaggcaaggccggacggcggatgggcccttgacgccagctgtcagattccctcaacaccagggaggggaggccacttatccatgagtctcaataaagactcagccaaagtgggcgctctcttacatggacaatggacactgctgcaagcacttcaggagatgcgggatgcggctgttcggatggccgcagaggcacaggtgtcttaccttcccgtggggatcgagcatcacttcttagaattggatcacattctagggcttctccaagaagagctgagaggaccagctaaagcagccgctaaggcaccccgaccacctggacagcctccacgagcctcttcttgtctacagcctggcatttttctcttttatcttctgatccaaaccgtagggttttttggatatgtccactttcgacaggaattaaacaagagcctgcaggagtgcctttcgaccggttctcttcccctgggaccagccccacacaccccgcgtgctctcggaattcttcgtcgccaaccactgcccgcaagtatgcccgcttag

SEQ ID NO: 209748 - DNA, 1545 bp, Artificial Sequence
  derived and/or modified sequence
atgcccgctgtgagcgggccaggcccactgttttgtttattactgctattgctggatcctcatagccccgaaaccggctgcccaccactgaggaggttcgagtacaagctgagcttcaaggggcctcggctggccttaccaggcgctggaatcccattttggagccatcacggggatgcaatactcggtctggaagaggtgagactgacaccctcaatgcgaaaccgatccggggcagtgtggagccgggcatctgtgcccttcagcgcttgggaggtggaggtgcagatgcgcgtaacaggtctggggaggcgaggggctcaaggtatggcagtgtggtacacccggggtcggggacacgtgggttccgtccttggcggtctggcttcatgggacggcattggaatcttttttgattccccagcggaggacactcaggattcccccgctattcgggttctcgcttccgatggccatatccccagcgagcagcccggtgacggggctagtcaggggctgggctcgtgccattgggattttagaaaccgtccacatccatttagagctagaatcacatattggggtcagagacttagaatgtctcttaactctgggctgacaccgagtgatcccggagagttctgcgtagatgtggggcctctcttgttggtgccaggcggttttttcggtgtatctgccgctaccggcactctggcaggagaagacccaaccgggcaagtccccccacagccctttctggaaatgcaacagctgcggctcgccaggcaactggaagggttatgggctcgtttgggactcggcacccgcgaggatgtgactcctaagtctgactcagaggctcagggcgaaggggaaaggctgttcgatctcgaagagaccctcggcagacatcggaggatcctccaagcacttaggggcctttccaaacagctcgcccaagccgaaagacaatggaagaaacaactgggccctcctggccaggccagaccagacgggggatgggccctggatgcgtcttgccagatccccagcacgccaggccgaggcggacacctgtcgatgagcttaaacaaagacagcgctaaggtgggtgcgctgctgcatggtcagtggacgcttctgcaagcattgcaggaaatgcgggacgctgccgtcagaatggccgcagaggcccaagtgagctacttacccgtgggcatcgagcatcacttcctggagctcgaccatattcttggtctgcttcaggaggaactgaggggcccagctaaagccgcagcgaaggcccctcgccctccaggacagcctccaagagccagctcttgcctgcagcccggtatcttcctattctatctgttaatccaaaccgttggttttttcgggtacgtgcatttccgacaagaactgaacaagagtctgcaggaatgcttaagcactggcagtttgcccttagggccagccccacacaccccacgcgcattgggcatcttgcgacggcagccattacctgcgagtatgcctgcctag

SEQ ID NO: 209749 - DNA, 435 bp, Artificial Sequence
  derived and/or modified sequence
atgcgtaaccggagtggcgcagtgtggtccagagccagcgtgcccttttcagcctgggaggtggaggttcagatgagggtcactggactgggaaggagaggtgcccaggggatggactctcccgctatcagagttcttgcctctgacggccacataccgagtgaacagcccggagacggagcaagtcagggccttggctcatgtcactgggacttccgcaacaggccgcaccccttcagagctagaatcacctactgggggcagaggctgcgcatgagcctcaacagcgggctaaccccttctgacccgggagagttctgtgtggacgttggaccactgttactcgtgccaggcggattttttggcgtcagcgccgctactggaactttggctggggaagaccccacaggccaagttcgggcagagggccagtag

SEQ ID NO: 209750 - protein, 384 aa, Artificial Sequence
  derived and/or modified sequence
MKPHFRNTVERMYRDTFSYNFYNRPILSRRNTVWLCYEVKTKGPSRPPLDAKIFRGQVYSELKYHPEMRFFHWFSKWRKLHRDQEYEVTWYISWSPCTKCTRDMATFLAEDPKVTLTIFVARLYYFWDPDYQEALRSLCQKRDGPRATMKIMNYDEFQHCWSKFVYSQRELFEPWNNLPKYYILLHIMLGEILRHSMDPPTFTFNFNNEPWVRGRHETYLCYEVERMHNDTWVLLNQRRGFLCNQAPHKHGFLEGRHAELCFLDVIPFWKLDLDQDYRVTCFTSWSPCFSCAQEMAKFISKNKHVSLCIFTARIYDDQGRCQEGLRTLAEAGAKISIMTYSEFKHCWDTFVDHQGCPFQPWDGLDEHSQDLSGRLRAILQNQEN

SEQ ID NO: 209751 - DNA, 1155 bp, Artificial Sequence
  derived and/or modified sequence
atgaaaccgcatttccgaaatacggtagagcgaatgtaccgggacacgttttcttacaacttttacaatcgccccatcctttccagacgtaacaccgtgtggctgtgttatgaggtcaaaactaagggcccatctagaccgccgcttgacgcaaaaatatttcgggggcaggtgtacagtgagctgaagtaccaccccgaaatgcgattttttcactggttcagcaaatggcgcaagcttcatagagaccaagagtacgaagtcacctggtatattagttggtccccttgtactaagtgcacgcgtgatatggctacttttttggctgaggatccgaaagtcactctcaccatatttgtagcgagactgtactatttctgggatccggattatcaagaagctttacgttctctttgtcaaaagcgcgacggtcctagagccaccatgaaaatcatgaattacgacgaattccaacattgttggagcaaatttgtctactcccagagagagttattcgaaccttggaataacctcccgaaatattacatcttgcttcatattatgctgggggagatcttgagacactccatggacccaccaacatttaccttcaatttcaacaatgagccctgggtccgcggaaggcacgagacctacctatgctatgaggtggagagaatgcacaacgacacttgggttcttctgaaccagcgaaggggcttcttatgtaatcaagcccctcataaacatggctttctggaaggacggcacgctgagctctgctttttggacgtgatcccattctggaagttggatcttgatcaggattaccgggtgacctgttttacatcttggagtccttgcttcagctgtgcgcaagaaatggccaaatttattagtaagaacaagcatgtgagtctgtgtatctttacagcccgcatctatgatgaccagggtcgttgccaggaggggctgcggactctggccgaggctggcgccaagatcagcatcatgacatatagtgagttcaaacactgctgggacacattcgtggatcatcagggatgcccttttcagccgtgggatggcctagacgagcatagccaagacctctctggtaggttgcgtgcaatcctgcagaatcaagagaattag

SEQ ID NO: 209752 - DNA, 1155 bp, Artificial Sequence
  derived and/or modified sequence
atgaagcctcattttcgcaataccgtagagcggatgtatagagacacatttagttataatttctacaatagaccaattctgagtaggaggaacactgtgtggctgtgttatgaggttaaaacgaaggggccgagccgccctcccctagatgccaaaatttttagggggcaagtgtactcagaactcaagtaccaccccgagatgcgattcttccactggttctcaaagtggaggaagctacatcgagaccaagagtacgaggtcacgtggtacatttcctggtccccctgtactaagtgtaccagggacatggccacattcctcgctgaggacccaaaggtaacactaaccatctttgtggctcgcttgtactacttctgggaccctgactaccaagaagccctccgctctctgtgccagaaaagggacggaccaagggcaacgatgaagataatgaactacgatgaatttcaacactgttggagtaaatttgtctacagtcagcgggaacttttcgaaccatggaataatttacccaagtattacatccttctccatataatgctcggagagatcctcagacactccatggatccacccacctttaccttcaactttaacaacgagccttgggtccgaggtcgtcacgaaacatacttgtgttacgaagtcgagcgaatgcataacgatacatgggtactgctgaaccagcgacggggtttcctctgcaaccaggcgcctcataaacacggattcctggaagggcgccatgcggagttgtgtttcctggatgtcatccccttctggaagctggacttggaccaggactatagagtcacttgttttacgagctggagcccatgtttctcttgcgcccaggagatggccaaatttataagcaagaacaaacatgtctcactctgtatcttcacagctaggatctacgatgaccagggaagatgtcaggaggggcttcgcaccttagccgaagccggtgccaagatcagcatcatgacttatagtgagtttaaacattgttgggacacctttgtcgatcatcagggctgccccttccaaccttgggatggccttgacgagcactcacaggacctaagtggcaggctaagagctatactgcaaaatcaagagaactag

SEQ ID NO: 209753 - DNA, 1155 bp, Artificial Sequence
  derived and/or modified sequence
atgaagccccacttcaggaacacagtggagaggatgtacagagacaccttctcctacaacttctacaaccggcccatcctgagcagaagaaacacagtgtggctgtgctatgaggtgaagaccaagggccccagcaggcctcccctggatgccaagatcttccggggccaggtgtacagcgagctgaagtaccaccctgagatgaggttcttccactggttcagcaagtggaggaagctgcaccgggaccaggagtatgaggtgacctggtacatctcctggagcccctgcaccaagtgcacccgggacatggccaccttcctggccgaggaccccaaggtgaccctgaccatctttgtggcccggctgtactacttctgggaccctgactaccaggaggccctgcggagcctgtgccagaagagagatggcccccgggccaccatgaagatcatgaactatgatgagttccagcactgctggagcaagtttgtgtacagccagcgggagctgtttgagccctggaacaacctgcccaagtactacatcctgctgcacatcatgctgggggagatcctgcggcacagcatggacccccccaccttcaccttcaacttcaacaatgagccctgggtgcggggcagacatgagacctacctgtgctatgaggtggagaggatgcacaatgacacctgggtgctgctgaaccagaggcggggcttcctgtgcaaccaggccccccacaagcacggcttcctggagggcagacatgctgagctgtgcttcctggatgtgatccccttctggaagctggacctggaccaggactacagagtgacctgcttcacctcctggagcccctgcttcagctgtgcccaggagatggccaagttcatcagcaagaacaagcacgtgtccctgtgcatcttcaccgcccgcatctatgatgaccagggccgctgccaggagggcctgcggaccctggccgaggccggggccaagatcagcatcatgacctacagcgagttcaagcactgctgggacacctttgtggaccaccagggctgccccttccagccctgggatggcctggatgagcacagccaggacctgagcggccgcctgcgggccatcctgcagaaccaggagaactag

SEQ ID NO: 209754 - DNA, 1155 bp, Artificial Sequence
  derived and/or modified sequence
atgaagccccacttccggaacaccgtggagcggatgtaccgggacaccttttcatataacttctacaatcgcccaattttgagccgacgcaatacagtgtggctgtgctatgaagtcaagaccaagggtccctcccgtcccccactcgacgctaagatctttcgaggccaggtttattccgagctcaagtaccaccccgagatgcgattctttcactggttttccaaatggagaaagctgcatcgcgaccaagaatatgaggtgacatggtacatttcctggtccccatgcacgaagtgcaccagagacatggctacatttctggccgaggatcctaaagtgactctgaccatatttgtcgctagactttactacttttgggatcccgattaccaggaggccttacggtccctgtgtcagaaaagggacggccctagagccaccatgaaaatcatgaactatgacgagttccagcactgctggtccaagtttgtttattcacaacgggagctcttcgagccctggaataatctgcccaagtattacatcctgttgcatatcatgttgggggagattttgcgccattcgatggacccaccgaccttcaccttcaactttaacaacgagccttgggttagggggcggcatgagacatatctttgctacgaggtagaacgaatgcataatgatacttgggttctcctaaatcaacggcgagggtttttatgtaaccaggccccccataaacatggtttcctggaaggacgacatgccgaactgtgttttctcgatgtcattcccttctggaagcttgatttggaccaggattatcgcgtgacgtgctttacatcctggtccccatgtttctcttgcgcgcaagagatggctaaatttataagcaagaataagcacgtatcactctgtattttcacagccagaatctacgacgatcaaggacggtgccaggagggcctccgtactcttgccgaagctggagcaaagatctctatcatgacctactccgaattcaagcactgttgggacactttcgtagaccaccagggttgtcctttccaaccctgggacggtctggatgagcattcacaggatctatcaggacgcctacgagcaattttacaaaaccaggagaattag

SEQ ID NO: 209755 - DNA, 1155 bp, Artificial Sequence
  derived and/or modified sequence
atgaagccccacttccggaacaccgtggagcggatgtaccgggacaccttctcatacaatttctacaaccgtccaatcctctctaggaggaataccgtctggctctgctatgaggtcaagacgaaaggcccaagcaggccgcctctcgatgccaaaatttttcggggacaggtgtacagcgaactcaagtaccaccccgagatgaggttttttcattggttttccaagtggagaaaactccaccgtgaccaggaatacgaagtaacttggtatatttcctggtccccctgcactaagtgtacccgggatatggcgactttcctggccgaagaccccaaagtcaccctcaccatattcgtcgcaaggctgtattacttctgggatccagattaccaggaggccctccggagcctgtgtcagaagcgcgacggaccccgcgctaccatgaagattatgaattacgacgagtttcaacactgttggtctaaatttgtgtactcacagagagagctttttgagccctggaacaatctgcccaagtactacattctcctgcatattatgttgggtgagatcctacggcactctatggaccccccgacatttactttcaacttcaacaacgagccctgggtacgcggacgccatgagacctatttatgttatgaggttgagcgcatgcacaatgatacatgggttctgctcaaccagcgcagaggtttcctctgcaaccaggccccacacaagcacggctttctggagggccgccatgcagaactctgtttcctcgatgtgattcctttttggaagctggacctagaccaagattaccgcgtgacctgctttacatcttggtcgccttgtttctcctgcgcacaagaaatggctaagttcatatccaagaataagcatgtgagtctctgcatttttacggcaagaatctatgacgaccagggcagatgccaggaaggactgcgaaccttggccgaggcgggtgccaagattagcattatgacgtattctgagttcaaacattgctgggacacttttgtggaccaccagggttgtcccttccaaccctgggacgggctggacgagcacagccaggacctcagcggtagacttcgcgctatactccaaaaccaagagaactag

SEQ ID NO: 209756 - DNA, 1155 bp, Artificial Sequence
  derived and/or modified sequence
atgaagccccactttcgtaacaccgtggaacgtatgtaccgcgacacctttagctataatttctacaatcgtccaattttgagccgacggaatacagtgtggctctgctatgaggtaaagacaaagggaccttcccgacctccgttggacgccaaaatatttcggggacaggtgtattccgaactgaaatatcaccccgagatgcgtttctttcactggttctcaaaatggcggaagctgcatcgcgaccaagagtatgaagttacatggtacatctcttggtccccatgtaccaaatgtacccgagatatggcaacgtttctggcggaggatccaaaggtgacactgaccatcttcgtggcccgtttgtattatttctgggacccagactaccaagaggcattgcgcagcctgtgtcaaaagagggacggaccaagagccaccatgaagatcatgaactatgacgaattccagcactgctggtctaagtttgtgtattcccagcgcgagctgttcgaaccttggaacaacctgccaaaatattatattttgctccacatcatgttaggcgaaatcctgcgccattcaatggaccccccaacctttacttttaactttaataatgagccgtgggtccggggaagacacgagacgtatctgtgctatgaagtcgaaagaatgcacaatgacacttgggtcctgttaaatcagagacgaggcttcttgtgcaatcaggccccacataagcatggctttctagaagggagacacgcagaactgtgctttctggacgtgattccattctggaaactcgatttggaccaagattatagggtgacctgttttacctcctggtctccgtgtttcagttgtgcacaagagatggcgaagtttatctccaagaataaacacgtgagtctctgtatttttaccgcacgtatctatgacgatcaggggaggtgccaagaaggcctgagaaccctcgccgaggcaggcgcaaagatttctatcatgacgtactccgagttcaaacactgctgggatactttcgtggatcatcagggatgcccgtttcagccatgggacggattggatgaacattctcaggacctcagcggcagactgagagctatcctgcagaaccaggagaattag

SEQ ID NO: 209757 - DNA, 1155 bp, Artificial Sequence
  derived and/or modified sequence
atgaaaccacatttccgcaatacggtggagcgaatgtacagggacacattcagctacaacttttacaataggccaatcctgtctcgcaggaacactgtgtggctctgctatgaggtaaaaacaaagggaccctctcggccaccactggacgcaaagatattccggggtcaggtctactccgaattaaaatatcacccagagatgaggttttttcattggttctccaaatggagaaaattacaccgcgatcaagagtatgaggtgacctggtacatatcatggtccccctgcacaaagtgtactagagacatggctacctttctagctgaggaccctaaagtaactctgacaattttcgttgctcggctctactatttctgggacccagactatcaggaagctctgcggtccctgtgccagaaacgcgacggccctagggctactatgaaaattatgaactacgacgagttccagcattgctggagtaaattcgtgtatagtcagagggagttgttcgaaccatggaataacttgcctaaatactacattttactccacatcatgctgggagaaatcctgaggcattcaatggatccccctacttttacattcaacttcaataatgaaccttgggtgcgcggaagacacgagacctatctatgttacgaggtggagcggatgcataacgatacttgggtgttactgaaccaaaggcgtgggttcctctgcaatcaggcgcctcataaacatggatttttggaagggcgacacgcagaactctgttttctcgatgtcattcccttctggaaacttgatttggatcaggactacagagttacatgttttaccagttggagcccatgcttttcatgtgcccaggaaatggccaagttcatctccaagaacaaacacgtgtctctctgtatcttcacggcgagaatttacgacgaccagggacgctgccaggaaggcttacggactctcgcagaggccggagccaagatctcaataatgacatactcagaattcaaacactgctgggacaccttcgtggaccaccagggatgtccctttcagccatgggatggattagacgaacacagccaggatttgtcgggcaggcttcgggcaattctacagaaccaggaaaactag

SEQ ID NO: 209758 - DNA, 1834 bp, Artificial Sequence
  derived and/or modified sequence
gtgctctgctggctcagcctggtgtggacccacctcccgggcgctggctgcaatgactttctctttccctttgcaattgccttgggtcctgccgcacagagcggcctgtctttatcagaggtccctctgccagggggagggccccagagaaaaccagaaagagggtgagagactgaggaagataaagcgtcccagggcctcctacaccagcgcctgagcaggaagcgggaggggccatgactacgaggccctgggaggtcactttagggagggctgtcctaaaaccagaagcttggagcagaaagtgaaaccctggtgctccagacaaagatcttagtcgggactagccggccaaggatgaagcctcacttcagaaacacagtggagcgaatgtatcgagacacattctcctacaacttttataatagacccatcctttctcgtcggaataccgtctggctgtgctacgaagtgaaaacaaagggtccctcaaggccccctttggacgcaaagatctttcgaggccaggtgtattccgaacttaagtaccacccagagatgagattcttccactggttcagcaagtggaggaagctgcatcgtgaccaggagtatgaggtcacctggtacatatcctggagcccctgcacaaagtgtacaagggatatggccacgttcctggccgaggacccgaaggttaccctgaccatctttgttgcccgcctctactacttctgggacccagattaccaggaggcgcttcgcagcctgtgtcagaaaagagacggtccgcgtgccaccatgaagatcatgaattatgacgaatttcagcactgttggagcaagttcgtgtacagccaaagagagctatttgagccttggaataatctgcctaaatattatatattactgcacatcatgctgggggagattctcagacactcgatggatccacccacattcactttcaactttaacaatgaaccttgggtcagaggacggcatgagacttacctgtgttatgaggtggagcgcatgcacaatgacacctgggtcctgctgaaccagcgcaggggctttctatgcaaccaggctccacataaacacggtttccttgaaggccgccatgcagagctgtgcttcctggacgtgattcccttttggaagctggacctggaccaggactacagggttacctgcttcacctcctggagcccctgcttcagctgtgcccaggaaatggctaaattcatttcaaaaaacaaacacgtgagcctgtgcatcttcactgcccgcatctatgatgatcaaggaagatgtcaggaggggctgcgcaccctggccgaggctggggccaaaatttcaataatgacatacagtgaatttaagcactgctgggacacctttgtggaccaccagggatgtcccttccagccctgggatggactagatgagcacagccaagacctgagtgggaggctgcgggccattctccagaatcaggaaaactgaaggatgggcctcagtctctaaggaaggcagagacctgggttgagcctcagaataaaagatcttcttccaagaaatgcaaacaggctgttcaccaccatctccagctgatcacagacaccagcaaagcaatgcactcctgaccaagtagattcttttaaaaattagagtgcattactttgaatcaaaaatttatttatatttcaagaataaagtactaagattgtgctcaatacacagaaaagtttcaaacctactaatccagcgacaatttgaatcggttttgtaggtagaggaataaaatgaaatactaaatctttctgta

SEQ ID NO: 209759 - DNA, 1506 bp, Artificial Sequence
  derived and/or modified sequence
gtgctccagacaaagatcttagtcgggactagccggccaaggatgaagcctcacttcagaaacacagtggagcgaatgtatcgagacacattctcctacaacttttataatagacccatcctttctcgtcggaataccgtctggctgtgctacgaagtgaaaacaaagggtccctcaaggccccctttggacgcaaagatctttcgaggccaggtgtattccgaacttaagtaccacccagagatgagattcttccactggttcagcaagtggaggaagctgcatcgtgaccaggagtatgaggtcacctggtacatatcctggagcccctgcacaaagtgtacaagggatatggccacgttcctggccgaggacccgaaggttaccctgaccatctttgttgcccgcctctactacttctgggacccagattaccaggaggcgcttcgcagcctgtgtcagaaaagagacggtccgcgtgccaccatgaagatcatgaattatgacgaatttcagcactgttggagcaagttcgtgtacagccaaagagagctatttgagccttggaataatctgcctaaatattatatattactgcacatcatgctgggggagattctcagacactcgatggatccacccacattcactttcaactttaacaatgaaccttgggtcagaggacggcatgagacttacctgtgttatgaggtggagcgcatgcacaatgacacctgggtcctgctgaaccagcgcaggggctttctatgcaaccaggctccacataaacacggtttccttgaaggccgccatgcagagctgtgcttcctggacgtgattcccttttggaagctggacctggaccaggactacagggttacctgcttcacctcctggagcccctgcttcagctgtgcccaggaaatggctaaattcatttcaaaaaacaaacacgtgagcctgtgcatcttcactgcccgcatctatgatgatcaaggaagatgtcaggaggggctgcgcaccctggccgaggctggggccaaaatttcaataatgacatacagtgaatttaagcactgctgggacacctttgtggaccaccagggatgtcccttccagccctgggatggactagatgagcacagccaagacctgagtgggaggctgcgggccattctccagaatcaggaaaactgaaggatgggcctcagtctctaaggaaggcagagacctgggttgagcctcagaataaaagatcttcttccaagaaatgcaaacaggctgttcaccaccatctccagctgatcacagacaccagcaaagcaatgcactcctgaccaagtagattcttttaaaaattagagtgcattactttgaatcaaaaatttatttatatttcaagaataaagtactaagattgtgctcaatacacagaaaagtttcaaacctactaatccagcgacaatttgaatcggttttgtaggtagaggaataaaatgaaatact

SEQ ID NO: 209760 - DNA, 1155 bp, Artificial Sequence
  derived and/or modified sequence
atgaagccccacttcagaaacaccgtggagagaatgtacagagacaccttcagctacaacttctacaacagacccatcctgagcagaagaaacaccgtgtggctgtgctacgaggtgaagaccaagggccccagcagaccccccctggacgccaagatcttcagaggccaggtgtacagcgagctgaagtaccaccccgagatgagattcttccactggttcagcaagtggagaaagctgcacagagaccaggagtacgaggtgacctggtacatcagctggagcccctgcaccaagtgcaccagagacatggccaccttcctggccgaggaccccaaggtgaccctgaccatcttcgtggccagactgtactacttctgggaccccgactaccaggaggccctgagaagcctgtgccagaagagagacggccccagagccaccatgaagatcatgaactacgacgagttccagcactgctggagcaagttcgtgtacagccagagagagctgttcgagccctggaacaacctgcccaagtactacatcctgctgcacatcatgctgggcgagatcctgagacacagcatggacccccccaccttcaccttcaacttcaacaacgagccctgggtgagaggcagacacgagacctacctgtgctacgaggtggagagaatgcacaacgacacctgggtgctgctgaaccagagaagaggcttcctgtgcaaccaggccccccacaagcacggcttcctggagggcagacacgccgagctgtgcttcctggacgtgatccccttctggaagctggacctggaccaggactacagagtgacctgcttcaccagctggagcccctgcttcagctgcgcccaggagatggccaagttcatcagcaagaacaagcacgtgagcctgtgcatcttcaccgccagaatctacgacgaccagggcagatgccaggagggcctgagaaccctggccgaggccggcgccaagatcagcatcatgacctacagcgagttcaagcactgctgggacaccttcgtggaccaccagggctgccccttccagccctgggacggcctggacgagcacagccaggacctgagcggcagactgagagccatcctgcagaaccaggagaactag

SEQ ID NO: 209761 - protein, 204 aa, Artificial Sequence
  derived and/or modified sequence
MEPKASCPAAAPLMERKFHVLVGVTGSVAALKLPLLVSKLLDIPGLEVAVVTTERAKHFYSPQDIPVTLYSDADEWEIWKSRSDPVLHIDLRRWADLLLVAPLDANTLGKVASGICDNLLTCVMRAWDRSKPLLFCPAMNTAMWEHPITAQQVDQLKAFGYVEIPCVAKKLVCGDEGLGAMAEVGTIVDKVKEVLFQHSGFQQS

SEQ ID NO: 209762 - DNA, 615 bp, Artificial Sequence
  derived and/or modified sequence
atggaacccaaagcctcctgcccagcggccgcccctttgatggaaagaaagtttcacgttttggtcggcgtcacaggatctgtggcagctctaaaactgcctttactcgtctcaaaactgcttgacatccctggtctcgaagtagccgtcgttacaaccgaacgagccaaacacttctactcaccccaggacatcccagtcacgttgtattctgatgcagatgaatgggagatctggaagagtcggagcgaccccgttttacacattgatcttagacggtgggctgatctcttgctggtggcccctttagacgctaacacgcttgggaaagtcgccagcggcatctgcgataacctactcacctgcgttatgcgcgcctgggacagatctaagccgcttctcttctgccccgccatgaacacagcaatgtgggaacatccaatcaccgctcaacaggtggaccagctgaaagcctttggatacgtggagatcccctgcgtggctaagaagctggtttgtggagacgaagggttaggtgcaatggccgaagtgggtaccatcgtggataaggtaaaagaggtcctgtttcagcattctggtttccaacagtcctag

SEQ ID NO: 209763 - DNA, 615 bp, Artificial Sequence
  derived and/or modified sequence
atggagcccaaggccagctgcccagctgctgcccccctgatggagaggaagttccacgtgctggtgggcgtgactggatctgtggccgccctgaagctgcccctgctggtgtccaagctgctggacatccctggcctggaggtggccgtggtgaccacagagcgggccaagcacttctacagcccccaggacatccctgtgaccctgtacagtgatgctgatgagtgggagatctggaagagcagaagtgaccctgtgctgcacatcgacctgcggcgctgggccgacctgctgctggtggcccccctggatgccaacaccctgggcaaggtggccagcggcatctgtgacaacctgctgacctgtgtgatgagggcctgggacaggagcaagcccctgctcttctgcccagccatgaacacagccatgtgggagcaccccatcacagcccagcaggtggaccagctgaaggccttcggctacgtggagatcccctgtgtggccaagaagctggtgtgtggagatgagggcctgggcgccatggccgaggtgggcaccatcgtggacaaggtgaaggaggtgctcttccagcacagcggcttccagcagagctag

SEQ ID NO: 209764 - DNA, 615 bp, Artificial Sequence
  derived and/or modified sequence
atggagcccaaggccagctgccccgccgccgcccccctgatggagcgtaaatttcatgtacttgttggcgtcactggatccgtggccgcgctgaagctgccattgttggtgtccaagctgctggatatccccggcctggaggtggcagtggttacgactgagcgggcgaagcacttttattcaccacaagacatccctgttaccttgtactcagacgccgacgaatgggagatttggaagtcgcgtagtgatcccgttctgcatatcgacctccggcggtgggcagatcttcttctcgtggcaccccttgacgccaacacccttggtaaagtcgcttcgggaatttgcgacaaccttctgacatgcgtaatgagagcatgggaccgttccaaaccgcttctgttttgccctgcaatgaatacagccatgtgggagcacccaattacagcgcagcaggtcgatcagctgaaggcattcggctatgtagagattccatgtgtagccaagaaacttgtctgtggtgacgaaggactaggcgcgatggcagaagtgggcacgatagtggacaaggtgaaggaggttctgttccagcactctggtttccaacagagctag

SEQ ID NO: 209765 - DNA, 2250 bp, Artificial Sequence
  derived and/or modified sequence
agtcagattccgcgggagagcggcagagataccgcgatatttgggagcggccccgagacgcgcctggcgcggatcctaaatcccgacagctttatagagcccaggcctggcaggctcccagaacttgaagccaccagaccccacatggaaccaaaggcctcctgtccagctgctgcacccttgatggagagaaaattccatgttcttgtgggtgtcacggggagtgtcgcagccctgaagttgcctcttctggtgtcaaagcttttggacattcctgggctggaagtagcagtggtcacaactgagagagccaaacatttctacagcccccaggacattcctgtcaccctctacagcgacgctgatgaatgggagatatggaagagccgctctgacccagttctgcacattgacctgcggaggtgggcagacctcctgctggtggctcctcttgatgccaacactctggggaaggtggccagtggcatctgtgacaacttgcttacctgcgtcatgcgggcctgggaccgcagcaagcccctgctcttctgcccggccatgaacaccgccatgtgggagcacccgatcacagcgcagcaggtagaccagctcaaggcctttggctatgtcgagatcccctgtgtggccaagaagctggtgtgcggagatgaaggtctcggggccatggctgaagtggggaccatcgtggacaaagtgaaagaagtcctcttccagcacagtggcttccagcagagttgacctgggatttctgtcatgggtgtccctctgtactcagaatgggttcaggccaagtcggtgaagatggatgttggcaaaataggaggataccctcatttgctgaatgggggacctgctctgagcctgcccaggggccaggcctgctccaggttaaactggacggaaggcccaggtctcagtttctttcaaccaggagaggccgctgcctagagcccctccccaccttttcctggatgggtgaggcaagccaggagagcaagcagtgttgtcctcacgggaggaggactgagcgactgggaaaactcggctctacatctcacccagaacggcttttagaaacaccacagctggagagtcctggctgagccttgggagtttcagctctttggcggggtgcccaggtgccatgcgatcagcgaagcctgcgagttggcaggactctgaggtttcctgcagaccatgccatgagattgaaggtgcggggaaataaagaaaaatcaccatttaggagactccattctttccctacaacccagctgtggtcccagagatcagggggtgttgccaggtgtggctggggaagggtctgggttcacaactcaccggcactctttagtccccgtataacatggtggttaaggataaagatctgaagccagacagcccctagttccaatcccagctctgccgcttactagcagtggcagtttggttcaggacttagccttcctgaccttcacttacctcagctatcttgttatcctaccctcagggagttgttgagaggattcagtgaaattttgtgtgcagaatacccatgccactgagtgcctggaacgtagtaaatgtcaaatcaatggaagttaaaactaggcatgcatatatgccagagagctttcctagcatttactgcaatgccctgtctcattttgggaaaaaggaaatcctggatgctaagttgacacatccctttatgcaagtgacaggtaagcagccaggagggttgaccctgccctgggtcccaggcctcttgcctgcttcttggtttcctctgttctcatcctttcagctttgctggacctgaggcaggggcctgggtgtctgtgcctccctaccccccagtacacatgaccaagggaagtagatccagagacaccatgcactctggcccagaaaccctctgctacccagcttttgacttaattgccatttggtgtggctgcagcggggagggcttgtctgcgtatttggagctgaggctgaggctggcttcctgccctctggcttccaggccaggtgtgagggacatcccatgtgggctctgagagcactgagagtagaggtgccttgaggggaccaggaagcctactggctggaatcagtgctccagcagcctccacagcctttatctcaacagcacttgacttcaccaggtgaccctttgggataaaattgccttagggtatgaaataaactataactaaaatggta

SEQ ID NO: 209766 - DNA, 615 bp, Artificial Sequence
  derived and/or modified sequence
atggagccaaaggcctcatgccccgctgccgctcccctcatggagagaaaattccatgtcctcgtcggcgtgacagggagtgtagcagctctcaaactgcctctcctggtaagcaagctcctggatataccaggattagaagtcgccgtcgtgacaaccgagcgggctaagcatttctactctcctcaggatattcctgtaaccctctacagcgacgccgacgaatgggaaatctggaaaagtagatccgacccagtccttcacatagacctacgcaggtgggccgacctgttactggtagctcccttggacgcgaacacattaggaaaggttgcatctggtatttgtgataatttactaacttgcgtcatgagagcctgggaccggtcaaagccattgctcttctgtcctgccatgaacacagccatgtgggagcatccaatcaccgcccagcaggtggaccagctcaaggcgttcggatacgtcgaaatcccttgcgtggcaaagaaattagtttgtggcgacgaaggtctaggcgctatggcagaagtcggaaccatcgtcgacaaagtcaaggaagtgctctttcaacattccggatttcaacaatcatag

SEQ ID NO: 209767 - DNA, 615 bp, Artificial Sequence
  derived and/or modified sequence
atggagcccaaggccagctgccccgccgccgcccccctgatggagagaaagttccacgtgctggtgggcgtgaccggcagcgtggccgccctgaagctgcccctgctggtgagcaagctgctggacatccccggcctggaggtggccgtggtgaccaccgagagagccaagcacttctacagcccccaggacatccccgtgaccctgtacagcgacgccgacgagtgggagatctggaagagcagaagcgaccccgtgctgcacatcgacctgagaagatgggccgacctgctgctggtggcccccctggacgccaacaccctgggcaaggtggccagcggcatctgcgacaacctgctgacctgcgtgatgagagcctgggacagaagcaagcccctgctgttctgccccgccatgaacaccgccatgtgggagcaccccatcaccgcccagcaggtggaccagctgaaggccttcggctacgtggagatcccctgcgtggccaagaagctggtgtgcggcgacgagggcctgggcgccatggccgaggtgggcaccatcgtggacaaggtgaaggaggtgctgttccagcacagcggcttccagcagagctag

SEQ ID NO: 209768 - protein, 592 aa, Artificial Sequence
  derived and/or modified sequence
MRVLCAFPEAMPSSNSRPPACLAPGALYLALLLHLSLSSQAGDRRPLPVDRAAGLKEKTLILLDVSTKNPVRTVNENFLSLQLDPSIIHDGWLDFLSSKRLVTLARGLSPAFLRFGGKRTDFLQFQNLRNPAKSRGGPGPDYYLKNYEDDIVRSDVALDKQKGCKIAQHPDVMLELQREKAAQMHLVLLKEQFSNTYSNLILTARSLDKLYNFADCSGLHLIFALNALRRNPNNSWNSSSALSLLKYSASKKYNISWELGNEPNNYRTMHGRAVNGSQLGKDYIQLKSLLQPIRIYSRASLYGPNIGRPRKNVIALLDGFMKVAGSTVDAVTWQHCYIDGRVVKVMDFLKTRLLDTLSDQIRKIQKVVNTYTPGKKIWLEGVVTTSAGGTNNLSDSYAAGFLWLNTLGMLANQGIDVVIRHSFFDHGYNHLVDQNFNPLPDYWLSLLYKRLIGPKVLAVHVAGLQRKPRPGRVIRDKLRIYAHCTNHHNHNYVRGSITLFIINLHRSRKKIKLAGTLRDKLVHQYLLQPYGQEGLKSKSVQLNGQPLVMVDDGTLPELKPRPLRAGRTLVIPPVTMGFYVVKNVNALACRYR

SEQ ID NO: 209769 - DNA, 1779 bp, Artificial Sequence
  derived and/or modified sequence
atgcgggtgctgtgtgcgtttcctgaggcaatgcccagttccaacagccgacccccagcctgcctagcacctggtgccctgtacctggccctgctgctgcacttgtcccttagcagtcaagcgggcgatcgtcgacccttgcccgtggatcgcgccgctggacttaaagagaagactctaatcctgttggacgtatctaccaaaaaccccgttcgcaccgtgaatgaaaactttctctcgttacaactcgaccccagtattatacacgacggatggctagatttcttgagctcaaagcgtctggtaaccctggcccgcggcctgagccccgcctttcttcgcttcggggggaaacgaacggactttcttcaattccagaacctgcgaaaccctgcgaaatctcgagggggccccggtcctgattactacctgaagaactatgaggacgacatcgtgaggtctgacgtggccctcgacaaacagaagggatgtaaaatagcccaacaccccgatgtgatgctggaactgcagcgcgagaaggccgctcagatgcacctcgtgttacttaaagaacagttttcaaatacttacagcaatctgattttgacagctaggtctctagacaagctgtacaatttcgcggactgctccggattacacctgatatttgccctgaatgcactgcgacggaatccaaacaacagctggaacagttcgagcgccttatctctgctcaagtattctgcctctaaaaagtataatattagctgggagctgggtaatgaacctaacaattacaggaccatgcatggccgggcagtgaacgggtcccagttaggcaaagactacatccagcttaagtccctgctgcagcccattagaatatatagcagggcgagcctgtacggacctaacattggcagaccaaggaaaaacgtgatcgctctgcttgacggttttatgaaagtggctgggtccacagttgacgcagtgacgtggcaacattgctacatcgacgggcgggttgttaaggtcatggacttcctcaagacccgactccttgatacactgagcgatcagattagaaagattcaaaaggtggtgaacacctacactcccggaaaaaaaatctggctcgagggcgtggtgacaacatccgccggcgggacaaacaacttgtccgactcttatgcagctggatttctctggcttaacacgttaggcatgctggcaaatcaaggaatagatgtggtgatcagacactctttctttgatcacgggtataaccacctggtagatcagaatttcaatccgctgcccgactattggctgtcactgctgtataaacggctgattggtcctaaggtactggcagtccacgttgcaggattgcagcgaaagccccggcccggccgcgttatcagagacaaactgcgtatttatgcccattgcaccaaccatcataatcacaactacgttcgtgggtcaatcacattgtttattattaacctgcaccgcagtagaaaaaagatcaaactggctggcaccttgagggacaaacttgtgcaccagtatctgctgcaaccatacggccaggagggactcaagtctaagagcgtgcagctgaatggacagcccctggtaatggtcgatgacggcacccttccagagctgaaacctcgccccctccgggcaggacggacgctggtgatccctccagttaccatgggattctatgtggtaaaaaatgtgaacgctctggcatgtaggtaccggtag

SEQ ID NO: 209770 - DNA, 2295 bp, Artificial Sequence
  derived and/or modified sequence
aaggacaattagtcactagcgagacccagtaggaagagaggtttaaatcagagggattgaatgagggtgctttgtgccttccctgaagccatgccctccagcaactcccgcccccccgcgtgcctagccccgggggctctctacttggctctgttgctccatctctccctttcctcccaggctggagacaggagacccttgcctgtagacagagctgcaggtttgaaggaaaagaccctgattctacttgatgtgagcaccaagaacccagtcaggacagtcaatgagaacttcctctctctgcagctggatccgtccatcattcatgatggctggctcgatttcctaagctccaagcgcttggtgaccctggcccggggactttcgcccgcctttctgcgcttcgggggcaaaaggaccgacttcctgcagttccagaacctgaggaacccggcgaaaagccgcgggggcccgggcccggattactatctcaaaaactatgaggatgacattgttcgaagtgatgttgccttagataaacagaaaggctgcaagattgcccagcaccctgatgttatgctggagctccaaagggagaaggcagctcagatgcatctggttcttctaaaggagcaattctccaatacttacagtaatctcatattaacagccaggtctctagacaaactttataactttgctgattgctctggactccacctgatatttgctctaaatgcactgcgtcgtaatcccaataactcctggaacagttctagtgccctgagtctgttgaagtacagcgccagcaaaaagtacaacatttcttgggaactgggtaatgagccaaataactatcggaccatgcatggccgggcagtaaatggcagccagttgggaaaggattacatccagctgaagagcctgttgcagcccatccggatttattccagagccagcttatatggccctaatattgggcggccgaggaagaatgtcatcgccctcctagatggattcatgaaggtggcaggaagtacagtagatgcagttacctggcaacattgctacattgatggccgggtggtcaaggtgatggacttcctgaaaactcgcctgttagacacactctctgaccagattaggaaaattcagaaagtggttaatacatacactccaggaaagaagatttggcttgaaggtgtggtgaccacctcagctggaggcacaaacaatctatccgattcctatgctgcaggattcttatggttgaacactttaggaatgctggccaatcagggcattgatgtcgtgatacggcactcattttttgaccatggatacaatcacctcgtggaccagaattttaacccattaccagactactggctctctctcctctacaagcgcctgatcggccccaaagtcttggctgtgcatgtggctgggctccagcggaagccacggcctggccgagtgatccgggacaaactaaggatttatgctcactgcacaaaccaccacaaccacaactacgttcgtgggtccattacactttttatcatcaacttgcatcgatcaagaaagaaaatcaagctggctgggactctcagagacaagctggttcaccagtacctgctgcagccctatgggcaggagggcctaaagtccaagtcagtgcaactgaatggccagcccttagtgatggtggacgacgggaccctcccagaattgaagccccgcccccttcgggccggccggacattggtcatccctccagtcaccatgggcttttatgtggtcaagaatgtcaatgctttggcctgccgctaccgataagctatcctcacactcacggctaccagtgggcctgctgggctgcttccactcctccactccagtagtatcctctgttttcagacatcctagcaaccagcccctgctgccccatcctgctggaatcaacacagacttgctctccaaagagactaaatgtcatagcgtgatcttagcctaggtaggccacatccatcccaaaggaaaatgtagacatcacctgtacctatataaggataaaggcatgtgtatagagcagaatgtttcccttcatgtgcactatgaaaacgagctgacagcacactcccaggagaaatgtttccagacaactccccatgatcctgtcacacagcattataaccacaaatccaaaccttagcctgctgctgctgctgccctcagaggaagatgaggaaggaaaaaaactgggtggacctacaaaaacccatcctctcccaa

SEQ ID NO: 209771 - DNA, 1779 bp, Artificial Sequence
  derived and/or modified sequence
atgagggtgctgtgtgccttccctgaggccatgcccagcagcaacagccggcccccagcctgcctggcccctggggccctgtacctggccctgctgctgcacctgagcctgagcagccaggccggggaccggcggcccctgcctgtggacagagctgctggcctgaaggagaagaccctcatcctgctggatgtgtccaccaagaaccctgtgaggacagtgaatgaaaacttcctgagcctgcagctggaccccagcatcatccatgatggctggctggacttcctgagcagcaagaggctggtgaccctggcccggggcctgagccctgccttcctgcgctttggaggcaagaggacagacttcctgcagttccagaacctgagaaatcctgccaagagccggggcggccctggccctgactactacctgaagaactatgaagatgacatcgtgcggagtgatgtggccctggacaagcagaagggctgcaagatcgcccagcacccagatgtgatgctggagctgcagcgggagaaggccgcccagatgcacctggtgctgctgaaggagcagttcagcaacacctacagcaacctgatcctgacagcccggagcctggacaagctgtacaactttgctgactgcagcggcctgcacctgatctttgccctgaatgccctgcggaggaaccccaacaacagctggaacagcagcagcgccctgagcctgctgaagtacagcgccagcaagaagtacaacatctcctgggagctgggcaatgagcccaacaactaccgcaccatgcacggccgggctgtgaatggcagccagctgggcaaggactacatccagctgaagagcctgctgcagcccatccgcatctacagccgggccagcctgtatggccccaacatcggccggcccaggaagaatgtcatcgccctgctggatggcttcatgaaggtggccggcagcacagtggatgctgtgacctggcagcactgctacattgatggccgggtggtgaaggtgatggacttcctgaagacccggctgctggacaccctgagtgaccagatcaggaagatccagaaggtggtgaacacctacaccccaggcaagaagatctggctggagggcgtggtgaccaccagcgctgggggcaccaacaacctgagtgacagctatgctgctggcttcctgtggctgaacaccctgggcatgctggccaaccagggcattgatgtggtgatccgccacagcttctttgaccacggctacaaccacctggtggaccagaacttcaaccccctgcctgactactggctgagcctgctgtacaagaggctcatcggccccaaggtgctggccgtgcacgtggccggcctgcagaggaagccccggcccggccgggtcatccgggacaagctgcgcatctatgcccactgcaccaaccaccacaaccacaactacgtgcggggcagcatcaccctcttcatcatcaacctgcacaggagcaggaagaagatcaagctggccggcaccctgcgggacaagctggtgcaccagtacctgctgcagccctacggccaggagggcctgaagagcaagtctgtgcagctgaatggccagcccctggtgatggtggatgatggcaccctgcctgagctgaagccccggcccctgcgggccggccgcaccctggtgatcccccctgtgaccatgggcttctacgtggtgaagaatgtgaatgccctggcctgccgctacagatag

SEQ ID NO: 209772 - DNA, 1779 bp, Artificial Sequence
  derived and/or modified sequence
atgcgggtgctgtgcgccttccccgaggccatgcccagcagcaactcccgtccgcccgcctgcctggcccccggcgccctttatctggccctcttactgcatctgagcctgagctcccaagccggcgaccgcaggcctctccctgtcgacagagccgccggactcaaggagaaaacgctgattctgctggacgtgtccacaaagaacccagttaggactgtgaatgaaaatttcttgagccttcagctggatccaagcatcatccacgacggttggttggatttcttatcgagtaagcgcctagtgaccctcgccagaggactaagcccggcatttcttagatttggcgggaaaaggactgacttcctgcagttccagaatcttaggaaccccgccaagtcccggggaggccctggccccgactactatttgaagaattatgaggatgacatcgtgaggtctgatgttgcgctggataagcagaaggggtgcaaaatcgcccagcaccctgacgttatgctggagctgcaaagggagaaagccgcccagatgcacctggtcctcctcaaagagcagttttcaaacacatactccaacctcattttgaccgctcgcagcctcgacaagctatataatttcgcagactgttccggactacacctgatattcgccctgaacgcgcttcggagaaacccaaacaactcttggaacagcagtagtgccctgtccctgcttaaatactcagctagtaagaagtataatattagttgggaattgggcaacgaacccaacaattatcggactatgcatgggagagccgttaatggtagccaactgggaaaagattacatacagctgaaatctctgctgcagcctatccgcatttactcccgcgcctctctatacggccccaatataggacgcccccggaaaaacgtgattgcattactcgacgggtttatgaaggtagccggatctaccgttgacgcagtgacatggcagcactgttacatagacggaagagtggtgaaggtcatggattttctaaagaccaggctgttggatacgctctccgatcaaattaggaaaatccagaaagtcgtcaatacctacacccctgggaaaaaaatctggctggagggggtcgtgactacaagtgctggtggaaccaataatctgtctgacagttatgctgcgggattcctgtggctgaacactctaggaatgctggccaatcagggtatagacgtggtgattcgccattccttctttgatcatggatataaccacttagtggaccagaactttaatcctctccctgattattggctctctcttctatacaagcggctgattgggcccaaagtgctggcggtacacgttgcgggcctccagcggaagcctcggcctggccgtgtgatccgggacaagctgcgcatatacgcacactgtacaaatcatcataaccataactacgttcgcggtagcatcaccttgttcattataaatctacatcggagtagaaagaaaattaaacttgccggcactctgcgcgataagctggtgcatcagtaccttctgcagccatacggacaggagggactgaagtcaaagtcagttcagcttaacggtcagccacttgtcatggtggatgatgggactctccctgaactgaagcctaggcctttgagagctggacgaacactcgttattcccccagtcaccatgggcttctacgtggtgaagaacgtcaatgcactggcttgtcgctaccgctag

SEQ ID NO: 209773 - DNA, 1779 bp, Artificial Sequence
  derived and/or modified sequence
atgagggtgttgtgcgcttttcccgaagctatgccctcctcaaactccagaccacctgcctgtctcgcaccgggagcactttatttggcacttctcctgcacttgagtttgtcatcccaagcaggtgacaggcggccactgccagttgatcgagcggctggtctcaaggagaaaactcttattctgctggacgtctcaactaaaaaccccgtgcgcacggtcaacgaaaacttcctctcactgcaactagatccttctatcattcacgatgggtggttggacttcctctcaagcaagcggctcgtaaccctcgcccgtggattgagcccagctttcctgagatttggcggaaaaaggaccgattttctgcagttccagaatttgaggaaccccgcaaagtcaagggggggtcccggacctgactattacttgaaaaattacgaggatgatatcgtacgaagtgatgtggccttggacaagcaaaaaggatgcaagatcgcccagcatcccgacgtgatgctcgagctgcagcgcgaaaaagccgcacaaatgcacttggttcttctgaaagagcagttcagcaatacctactcaaaccttattctgaccgcacggtctctggataaactgtacaatttcgcagactgcagtggcttacatcttatctttgcccttaatgcacttcggagaaatccaaataacagctggaactcctcctctgcactatcattgctgaaatactctgcctcaaaaaagtacaacatttcctgggagctcggcaatgagccaaataactataggacaatgcacggcagggcagtaaatggctcacagctgggcaaggactacattcagctgaagtcattgctgcagcccatcagaatatactcgagagcttctctctatggcccaaacatcggaagaccacggaaaaatgtgattgccctgctggacggcttcatgaaagtggccggttctacagtcgacgcggtcacctggcaacattgttatatagacggtcgcgttgtgaaggtgatggatttcttgaaaaccagactgctggacacactctcagaccagatccggaagattcagaaagttgtgaatacttatacaccgggaaaaaaaatttggttggagggggttgtgaccaccagcgccggaggaacgaataacctgtcggactcttacgccgctgggttcttgtggctcaacacattgggtatgttggcaaaccagggaatcgacgttgtcatccggcactccttctttgatcatgggtacaatcacttggttgatcagaattttaacccattgccggactattggctttcactcctgtacaaaaggcttatcgggccaaaggttctggccgtgcacgtcgctgggttgcagaggaaaccacgacctggtagggttatacgagacaagctgagaatttacgcgcactgtacgaaccatcataatcataattacgtgcggggatctatcacactcttcattatcaaccttcacaggagtcgcaagaaaatcaaactcgcaggaactctgcgcgacaaactggtgcaccaatacctcctacagccctatggccaggagggcctgaagtcaaaaagtgtgcagctcaacgggcaaccattggtcatggtagacgacgggaccctgcctgaactaaagccccgtcccctgagagcagggagaaccttggtgattcccccagtgactatgggcttttacgtggttaagaatgtgaacgcactcgcctgtaggtatcgatag

SEQ ID NO: 209774 - DNA, 1779 bp, Artificial Sequence
  derived and/or modified sequence
atgagagtgctgtgcgccttccccgaggccatgcccagcagcaacagcagaccccccgcctgcctggcccccggcgccctgtacctggccctgctgctgcacctgagcctgagcagccaggccggcgacagaagacccctgcccgtggacagagccgccggcctgaaggagaagaccctgatcctgctggacgtgagcaccaagaaccccgtgagaaccgtgaacgagaacttcctgagcctgcagctggaccccagcatcatccacgacggctggctggacttcctgagcagcaagagactggtgaccctggccagaggcctgagccccgccttcctgagattcggcggcaagagaaccgacttcctgcagttccagaacctgagaaaccccgccaagagcagaggcggccccggccccgactactacctgaagaactacgaggacgacatcgtgagaagcgacgtggccctggacaagcagaagggctgcaagatcgcccagcaccccgacgtgatgctggagctgcagagagagaaggccgcccagatgcacctggtgctgctgaaggagcagttcagcaacacctacagcaacctgatcctgaccgccagaagcctggacaagctgtacaacttcgccgactgcagcggcctgcacctgatcttcgccctgaacgccctgagaagaaaccccaacaacagctggaacagcagcagcgccctgagcctgctgaagtacagcgccagcaagaagtacaacatcagctgggagctgggcaacgagcccaacaactacagaaccatgcacggcagagccgtgaacggcagccagctgggcaaggactacatccagctgaagagcctgctgcagcccatcagaatctacagcagagccagcctgtacggccccaacatcggcagacccagaaagaacgtgatcgccctgctggacggcttcatgaaggtggccggcagcaccgtggacgccgtgacctggcagcactgctacatcgacggcagagtggtgaaggtgatggacttcctgaagaccagactgctggacaccctgagcgaccagatcagaaagatccagaaggtggtgaacacctacacccccggcaagaagatctggctggagggcgtggtgaccaccagcgccggcggcaccaacaacctgagcgacagctacgccgccggcttcctgtggctgaacaccctgggcatgctggccaaccagggcatcgacgtggtgatcagacacagcttcttcgaccacggctacaaccacctggtggaccagaacttcaaccccctgcccgactactggctgagcctgctgtacaagagactgatcggccccaaggtgctggccgtgcacgtggccggcctgcagagaaagcccagacccggcagagtgatcagagacaagctgagaatctacgcccactgcaccaaccaccacaaccacaactacgtgagaggcagcatcaccctgttcatcatcaacctgcacagaagcagaaagaagatcaagctggccggcaccctgagagacaagctggtgcaccagtacctgctgcagccctacggccaggagggcctgaagagcaagagcgtgcagctgaacggccagcccctggtgatggtggacgacggcaccctgcccgagctgaagcccagacccctgagagccggcagaaccctggtgatcccccccgtgaccatgggcttctacgtggtgaagaacgtgaacgccctggcctgcagatacagatag

SEQ ID NO: 209775 - protein, 684 aa, Artificial Sequence
  derived and/or modified sequence
MWVLLRSGYPLRILLPLRGEWMGRRGLPRNLAPGPPRRRYRKETLQALDMPVLPVTATEIRQYLRGHGIPFQDGHSCLRALSPFAESSQLKGQTGVTTSFSLFIDKTTGHFLCMTSLAEGSWEDFQASVEGRGDGAREGFLLSKAPEFEDSEEVRRIWNRAIPLWELPDQEEVQLADTMFGLTKVTDDTLKRFSVRYLRPARSLVFPWFSPGGSGLRGLKLLEAKCQGDGVSYEETTIPRPSAYHNLFGLPLISRRDAEVVLTSRELDSLALNQSTGLPTLTLPRGTTCLPPALLPYLEQFRRIVFWLGDDLRSWEAAKLFARKLNPKRCFLVRPGDQQPRPLEALNGGFNLSRILRTALPAWHKSIVSFRQLREEVLGELSNVEQAAGLRWSRFPDLNRILKGHRKGELTVFTGPTGSGKTTFISEYALDLCSQGVNTLWGSFEISNVRLARVMLTQFAEGRLEDQLDKYDHWADRFEDLPLYFMTFHGQQSIRTVIDTMQHAVYVYDICHVIIDNLQFMMGHEQLSTDRIAAQDYIIGVFRKFATDNNCHVTLVIHPRKEDDDKELQTASIFGSAKASQEADNVLILQDRKLVTGPGKRYLQVSKNRFDGDVGVFPLEFNKNSLTFSIPPKNKARLKKIKDDTGPVAKKPSSGKKGATTQNSEICSGQAPTPDQPDTSKRSK

SEQ ID NO: 209776 - DNA, 2055 bp, Artificial Sequence
  derived and/or modified sequence
atgtgggtcctactccgatctggctatcctctgagaattctgctgcctctacgcggtgaatggatgggcagacgcggattgcccagaaatctcgcccctggcccacccaggaggagatacagaaaagagaccctccaggcccttgacatgccagtgttacccgtgacagcaacagagataagacagtatctacgcgggcacggaatcccatttcaggatggacatagttgcttacgggccctgtcccctttcgcggagtcgtcccagctgaaaggacagaccggtgtgaccaccagcttctcactgttcatcgacaaaactactgggcatttcctgtgtatgacatccctagctgagggatcatgggaggacttccaggcttctgtggaaggtcgcggcgatggagcgcgtgagggattccttctgagcaaagccccagaatttgaagacagcgaggaggtcaggcggatatggaatcgagccatcccattatgggaactccctgatcaggaggaggtgcagttagcagacactatgtttggactcacaaaagtcactgacgatactctaaaaaggttttccgtgagatatctcagacctgctcggagtctggtgttcccctggttttcaccggggggcagcgggctccgtggcctgaagctgctggaggccaagtgtcaaggcgacggagtttcgtatgaggaaaccacaatcccgcgtcctagcgcctatcacaatctgtttggcttgccgttgatatcacgccgagatgccgaagttgtgcttacttcccgggagcttgactctctagccctaaaccagagcactggactgcctaccctcacattaccccgcggcacaacatgcctgccacccgctctcctgccctacctggagcaatttagaaggatcgtgttttggctgggagacgacttacgctcctgggaggcggctaagttgttcgccagaaaactgaatccaaagagatgctttttggttaggccaggcgaccagcagcccaggccattggaggcacttaatggcgggtttaacctcagtcgaatcctgcggacagccctccccgcctggcacaagagcattgtcagcttccgacaactgagggaggaagtacttggggagctctcaaatgtcgaacaggccgcaggactccggtggtctagattccccgacctaaaccgtatcttaaaggggcacaggaagggtgaactcacagtgttcaccggccctaccgggagcggaaaaactaccttcatttctgaatatgccttggacttgtgcagccagggggtcaacacgttgtggggctcctttgagataagcaacgtgagattggccagggtgatgcttactcagttcgccgaaggcaggcttgaggatcaactggacaaatatgaccattgggccgatcgctttgaagacctcccgctctattttatgacctttcacggccagcagagtatccggaccgtgatagacaccatgcagcacgccgtatatgtgtatgatatttgtcacgtaattatcgataacctacaatttatgatgggccacgaacaactgtcaacagacaggattgccgcccaggattacatcatcggagtgttccggaagtttgctacagataacaactgccacgtcaccctggttatacatccgcgcaaagaagacgatgataaagagctccagactgccagcatttttggatctgcaaaagcgtcacaggaggccgacaatgttctgatcctccaggatcggaagctcgttactgggcccggcaagcgttatctgcaggttagcaagaatcgatttgacggagatgtgggtgtcttcccactggaatttaacaaaaattctttgaccttttcaatccccccaaaaaacaaagcccggctgaagaaaatcaaagatgacactgggcccgtggccaaaaaaccctcatctggcaagaaaggagctacgacacagaattccgaaatttgcagcggtcaagctccaacaccagaccaacctgacacctctaagcgtagtaaatag

SEQ ID NO: 209777 - DNA, 2055 bp, Artificial Sequence
  derived and/or modified sequence
atgtgggtgctgctgcggagcggctaccccctgcgcatcctgctgcccctgcggggggagtggatgggccggcggggcctgcccaggaacctggcccctggccccccaagaagacgctacaggaaggagaccctgcaggccctggacatgcctgtgctgcctgtgacagccacagagatccggcagtacctgcggggccacggcatccccttccaggacggccacagctgcctgcgggccctgagcccctttgctgagagcagccagctgaagggccagacaggagtgaccaccagcttcagcctcttcatcgacaagaccaccggccacttcctgtgcatgaccagcctggccgagggctcctgggaggacttccaggcctctgtggagggcagaggagatggagcccgggagggcttcctgctgagcaaggcccctgagtttgaagattctgaggaggtgcggcgcatctggaacagagccatccccctgtgggagctgcctgaccaggaggaggtgcagctggccgacaccatgtttggcctgaccaaggtgacagatgacaccctgaagcgcttctctgtgcgctacctgcggcctgcccggagcctggtgttcccctggttcagccctgggggcagcggcctgcggggcctgaagctgctggaggccaagtgccagggagatggagtgtcctatgaggagaccaccatcccccggcccagcgcctaccacaacctgtttggcctgcccctcatcagcagaagagatgctgaggtggtgctgaccagccgggagctggacagcctggccctgaaccagagcacaggcctgcccaccctgaccctgccccggggcaccacctgcctgcccccagccctgctgccctacctggagcagttccgccgcatcgtgttctggctgggagatgacctgcgctcctgggaggccgccaagctgtttgccaggaagctgaaccccaagcgctgcttcctggtgcggcctggggaccagcagccccggcccctggaggccctgaatggaggcttcaacctgagccgcatcctgaggacagccctgcctgcctggcacaagagcatcgtgtccttccggcagctgcgggaggaggtgctgggggagctgagcaatgtggagcaggccgccggcctgcgctggagccgcttcccagacctgaaccgcatcctgaagggccacaggaaaggagagctgactgtgttcaccggccccactggaagtggcaagaccaccttcatcagtgaatatgccctggacctgtgcagccagggcgtgaacaccctgtggggcagctttgagatcagcaatgtgcggctggcccgggtgatgctgacccagtttgctgagggccgcctggaggaccagctggacaagtatgaccactgggccgacagatttgaggacctgcccctgtacttcatgaccttccacggccagcagagcatccgcaccgtcatcgacaccatgcagcacgctgtgtatgtgtatgacatctgccacgtgatcatcgacaacctgcagttcatgatgggccacgagcagctgagcacagacagaattgctgcccaggactacatcattggagtcttcaggaagtttgccacagacaacaactgccacgtgaccctggtgatccaccccaggaaggaggatgatgacaaggagctgcagacagccagcatcttcggcagcgccaaggccagccaggaggccgacaacgtgctgatcctgcaggacaggaagctggtgacaggccctgggaagcgctacctgcaggtgtccaagaacagatttgatggagatgtgggcgtcttccccctggagttcaacaagaacagcctgaccttcagcatcccccccaagaacaaggcccggctgaagaagatcaaggatgacaccggccctgtggccaagaagcccagcagcggcaagaagggggccaccacccagaacagcgagatctgcagcggccaggcccccaccccagaccagcctgacaccagcaagaggagcaagtag

SEQ ID NO: 209778 - DNA, 2055 bp, Artificial Sequence
  derived and/or modified sequence
atgtgggtgctgctgcggagcggctaccccctgcggatcctgctgcccctgcgcggggagtggatgggccggaggggcctgccgagaaacttggccccagggcctccccgaagaaggtatcggaaggagaccctacaggctctagacatgcctgtccttccagtgacagccaccgagatccgtcagtatttacgtggacatggaatccccttccaagacggccattcatgcctcagggcactgtcacccttcgccgagagctcccagttgaaaggccaaaccggcgtgaccacctccttttctttgttcattgataagactaccggtcatttcctttgtatgaccagtctcgctgagggatcctgggaggacttccaagccagtgtggaaggcagaggggacggtgctagggaaggtttcctgctgtctaaggctcccgagtttgaagattcagaagaggtccgaagaatttggaatcgggctattcctctctgggagttacctgaccaggaggaagttcagctcgccgacactatgttcggactaaccaaagttaccgatgacaccctcaaacgctttagcgttcggtacttacggcctgcccgatccctagtctttccatggtttagcccgggaggctctggactgcgcggtctgaaactgcttgaggctaaatgtcaaggggatggcgtgtcttatgaggagaccacaatcccaaggcctagtgcataccacaaccttttcggcctgccccttatatcccgccgagacgccgaagttgtgctcacatcccgcgagctggactctctggctctgaaccagagcacagggcttccgaccctcacactgccccgcgggacaacgtgcctgccgccggccctgctcccatacctcgagcagtttcgccggatcgtgttttggctcggcgatgaccttcgcagttgggaagccgcgaagctatttgcccgaaaactaaatccaaaacgatgcttcctagtcagacccggggaccaacagcccagacctttggaggctctcaatgggggtttcaacctctcccggatcctgcgcacagcacttccggcctggcataaaagtatcgtatcttttaggcagctaagagaggaagtgctcggggagctatctaatgtggaacaggctgctgggctccggtggagcagattccctgacctgaataggattctaaagggccatcggaagggtgagctaacagtattcacagggccaactgggtctggcaaaacaacatttatttcggagtatgccctggacctctgttctcagggtgtaaataccttgtggggctcctttgagatttcaaacgtgaggttagctagagtcatgctcacccagtttgccgagggacggctcgaggatcagttagataaatatgaccattgggctgaccggttcgaggatcttccactctactttatgactttccacggccagcagagtatccgaactgtgatcgacacgatgcagcacgcagtctacgtctacgacatctgccacgtgattattgataacctacaattcatgatggggcacgagcagctatccacagaccggattgctgctcaagattacattattggagtcttcaggaaattcgctacagacaacaactgtcacgtgaccctggtaattcaccctaggaaagaggatgacgacaaagagttacagacggcaagcatctttgggtcagccaaggcaagtcaggaagccgacaacgtgctgattctccaggaccgaaagctggtaaccggtcccggcaagaggtatctacaagtgagcaagaaccgctttgacggcgacgtgggggtgtttcccctcgaattcaataagaacagtttgacgttttccatcccacctaagaacaaggcacggctgaagaaaataaaagacgacactggcccagtcgcaaaaaaaccttcaagcggaaaaaaaggcgctacgacccaaaatagtgaaatttgctccgggcaggcacctacccccgaccaacccgatacctctaagagaagtaaatag

SEQ ID NO: 209779 - DNA, 2055 bp, Artificial Sequence
  derived and/or modified sequence
atgtgggtgcttctgcgctccggttatcccctcagaatattgctccccttgcgaggtgaatggatgggaagaaggggactcccacggaatctcgccccagggcctccaagaaggaggtaccgtaaagaaaccctacaggccttagacatgccagtgctgcccgtgacggccactgagatccggcagtacttgcgcggacacggcattcccttccaggacgggcactcatgcctgagagcacttagcccattcgcagaaagctctcagctgaagggacagaccggcgtgacaacgtctttttcgctctttattgacaagaccaccggccacttcttatgcatgactagcttggcggaaggaagctgggaagatttccaggcgagcgtagagggaagaggcgacggtgccagggaggggtttctcctgtccaaagctccagagtttgaggattctgaagaagtcaggcggatatggaaccgcgctattcctctgtgggaactgccagaccaggaggaagtacaattagccgacacaatgttcggactcacaaaagtaacagatgatacactgaagcggttcagcgtaagatacttgcggcctgctcggtctctagtttttccatggttttcccctggaggcagcggactgcgcggtctcaagcttctcgaggcaaagtgccagggcgacggagtgtcctacgaagaaacgaccattcctcgaccctcggcttatcacaacctgttcgggctcccactgattagccgtagagacgcagaggtcgttctgacgagtagggagctggactccctggccctgaatcagagtacagggctgcctactctgacactgccacggggtacaacctgcctaccccctgccctgttaccctatctggaacagtttcggagaatcgtgttttggcttggagacgacctgcggtcctgggaggcagctaaactcttcgcccgtaaacttaatcctaaaagatgcttcctcgtgcgtcctggcgaccaacagccacgacccttggaagctcttaacggtggttttaacttatctcggatccttagaacagctctgcctgcatggcacaagtccatcgtctcattccggcagctgcgtgaagaggttcttggtgaattatcaaacgttgagcaggccgcaggcctgcgatggtctaggttccctgacttaaacaggatactcaagggacacagaaagggggaactgaccgtgttcacaggacccaccggtagtgggaagactaccttcatcagcgaatatgctctggatctgtgtagccagggggttaacacactgtggggctccttcgaaatatcgaatgtgagactcgcgagggtgatgcttactcagtttgctgaggggagactggaagatcagctagacaaatacgaccattgggctgacaggttcgaagatctacccctgtactttatgacgtttcacggccagcagtccattcgaacggtaatcgacacgatgcagcacgccgtgtacgtttacgatatttgccacgtaattatcgacaatctccaattcatgatgggccacgagcagctcagcaccgatcgcattgcggcacaagactatattattggggtgttccgaaagttcgcaacagacaacaattgtcacgtaaccctagtgattcatcctagaaaagaggatgatgataaagagttacagactgcgtctattttcggaagcgccaaagcctcccaggaagccgacaacgtcctgatcctccaggaccgaaaattagttactggacccggaaaacgctacctacaggtcagcaaaaaccgctttgatggagatgttggggtgttcccccttgagtttaataaaaattcactcactttctctattcctcctaagaacaaggctcggctgaagaaaattaaagacgatacagggcctgtggctaaaaaaccgtcttctggcaagaagggggctactacacagaatagcgagatctgtagcggacaggccccaacaccagaccagcccgacacaagcaagcgtagcaaatag

SEQ ID NO: 209780 - DNA, 3131 bp, Artificial Sequence
  derived and/or modified sequence
tgggcatatgtgtgaagcagcaacgtagaggggctgaagaggagaaattcatggagagaaagaatgcacctagagtgagctctgcagagtgctgcgtgggatatccctagagtttggtctagtgaaggcacgctaaccaggcacctaaggcatttcaagtagtgacttcccacatttggctaggaatgtgggtcctcctccgaagtgggtaccccctccgtatcttgttacccctgcgtggggagtggatgggtcggaggggcctgccccgaaacttggccccaggccctcctcgcagacgttacaggaaggagactctccaagccttggatatgccagtgttgcctgtaactgcaactgaaatccgccagtatttgcgggggcatgggatccccttccaggatggtcacagttgcctgcgggcactgagcccctttgcagagtcttcacagctcaaaggccagactggtgttaccacttccttcagcctcttcattgacaagaccacaggccactttctctgcatgaccagcctagcagaagggagctgggaagacttccaggccagcgtggaggggcgaggggatggggccagggaggggtttctgcttagcaaggcaccagaatttgaggacagcgaggaggtccggaggatctggaaccgagcaatacctctctgggagctgcctgatcaggaggaggttcagctggctgatacaatgtttggccttaccaaggttacagatgacacactcaagcgtttcagtgtgcgatatctgcgacctgctcgcagtcttgtcttcccttggttctcccctgggggctcaggattacgaggcctgaagctcctagaggctaaatgccagggggatggagtgagctacgaggaaaccactattccccgacccagcgcctaccacaatctgtttggattaccactgattagtcgtcgagatgctgaggtggtactgacgagtcgtgagcttgacagcctggccttgaaccagtccacggggctgcctacccttactctaccccgaggaacgacctgcttaccccctgccttactcccttacctggaacagttccggcggattgtattctggttgggggatgaccttcggtcctgggaagccgccaagttgtttgcacgaaaactgaaccccaaacgatgcttcttggtgcgaccaggagaccagcaaccccgtcccctggaggccctgaacggaggcttcaatctttctcgtattcttcgtaccgccctgcctgcctggcacaagtccatcgtatctttccggcagcttcgggaggaggtgctaggagaactgtcaaatgtggagcaagcagctggcctccgctggagccgctttccagacctcaatcgtatcttgaagggacatcgaaagggcgagctgacggtcttcacagggccaacaggcagtggaaagacgacattcatcagtgagtatgccctggatttgtgttcccagggggtgaacacactgtggggtagcttcgagatcagcaatgtgagactagcccgggtcatgctgacacagtttgccgaggggcggctggaagatcaactggacaaatatgatcactgggctgaccgctttgaggacctgcccctctatttcatgactttccatggacagcaaagcatcaggactgtaatagatacaatgcaacatgcagtctacgtctatgacatttgtcatgtgatcatcgacaacctgcagttcatgatgggtcacgagcagctgtccacagacaggatcgcagctcaagactacatcatcggggtctttcggaagtttgcaacagacaataactgccatgtgacactggtcattcacccccggaaagaggatgatgacaaggaactgcagacagcgtccatttttggctcagccaaagcaagccaggaagcagacaatgttctgatcctgcaggacaggaagctggtaaccgggccagggaaacggtatctgcaggtgtccaagaaccgctttgatggagatgtaggtgtcttcccgcttgagttcaacaagaactccctcaccttctccattccaccaaagaacaaggcccggctcaagaagatcaaggatgacactggaccagtggccaaaaagccctcttctggcaaaaagggggctacgacacagaactctgagatttgctcaggccaggcccccactcccgaccagccagacacctccaagcgttcaaagtgaaggccgtgcagagctggtcactgaaatgagcctgataggataggctggagcataaaactctgcaagggctcctctatcctgtggtcctgagctgtgtgcccttctcagtctgaggggcctaacctagagcaggtttccatagtgagaaaattcaatgtagcagactactgagaaactactgtgttgctcaggctttgtttgaggtcctgtatatacagcactgaaaagagagataaagtccctgcctgcatgcattctggcggaagagacaagcaagcaatgaacaaattagcagaaaacctagttttagtgaaaaatgctgtaaagaaaatagaaatgcgatagagtgctggcaggctagtgtagataagtggtctgaaaaggtgtctctgagccgagggcatgtgagctggggcctaaacaactagaaggagagagccacgtgaacatccggcgaaggggacccaggcagagagaaaaggaaatccaagccctgaggtaggaatgagcaggtcagattcaaggcagtgaggtcaggccgcatgaacctggaggggaatcggggacttcatgcgaaactccagcctaggctttcaaagtcaaagggtgatacagtgggtaccaagctcctctgctccccactttgtagagcctagcatgaggtggcatgtactagaattggatcctaggtgcttagccctgcaatatcagggcctcactggtgggagctgcctcgggctgggttgcttggtcatagagccatagaaggaagctgtcagcccggagtgcctgccacctagacactgatgccattgtgtgctgcctcaagactgctggagtcaggacattttatagagccttttccagttttactaaaaaatttttccattg

SEQ ID NO: 209781 - DNA, 2055 bp, Artificial Sequence
  derived and/or modified sequence
atgtgggtgctgctgagaagcggctaccccctgagaatcctgctgcccctgagaggcgagtggatgggcagaagaggcctgcccagaaacctggcccccggcccccccagaagaagatacagaaaggagaccctgcaggccctggacatgcccgtgctgcccgtgaccgccaccgagatcagacagtacctgagaggccacggcatccccttccaggacggccacagctgcctgagagccctgagccccttcgccgagagcagccagctgaagggccagaccggcgtgaccaccagcttcagcctgttcatcgacaagaccaccggccacttcctgtgcatgaccagcctggccgagggcagctgggaggacttccaggccagcgtggagggcagaggcgacggcgccagagagggcttcctgctgagcaaggcccccgagttcgaggacagcgaggaggtgagaagaatctggaacagagccatccccctgtgggagctgcccgaccaggaggaggtgcagctggccgacaccatgttcggcctgaccaaggtgaccgacgacaccctgaagagattcagcgtgagatacctgagacccgccagaagcctggtgttcccctggttcagccccggcggcagcggcctgagaggcctgaagctgctggaggccaagtgccagggcgacggcgtgagctacgaggagaccaccatccccagacccagcgcctaccacaacctgttcggcctgcccctgatcagcagaagagacgccgaggtggtgctgaccagcagagagctggacagcctggccctgaaccagagcaccggcctgcccaccctgaccctgcccagaggcaccacctgcctgccccccgccctgctgccctacctggagcagttcagaagaatcgtgttctggctgggcgacgacctgagaagctgggaggccgccaagctgttcgccagaaagctgaaccccaagagatgcttcctggtgagacccggcgaccagcagcccagacccctggaggccctgaacggcggcttcaacctgagcagaatcctgagaaccgccctgcccgcctggcacaagagcatcgtgagcttcagacagctgagagaggaggtgctgggcgagctgagcaacgtggagcaggccgccggcctgagatggagcagattccccgacctgaacagaatcctgaagggccacagaaagggcgagctgaccgtgttcaccggccccaccggcagcggcaagaccaccttcatcagcgagtacgccctggacctgtgcagccagggcgtgaacaccctgtggggcagcttcgagatcagcaacgtgagactggccagagtgatgctgacccagttcgccgagggcagactggaggaccagctggacaagtacgaccactgggccgacagattcgaggacctgcccctgtacttcatgaccttccacggccagcagagcatcagaaccgtgatcgacaccatgcagcacgccgtgtacgtgtacgacatctgccacgtgatcatcgacaacctgcagttcatgatgggccacgagcagctgagcaccgacagaatcgccgcccaggactacatcatcggcgtgttcagaaagttcgccaccgacaacaactgccacgtgaccctggtgatccaccccagaaaggaggacgacgacaaggagctgcagaccgccagcatcttcggcagcgccaaggccagccaggaggccgacaacgtgctgatcctgcaggacagaaagctggtgaccggccccggcaagagatacctgcaggtgagcaagaacagattcgacggcgacgtgggcgtgttccccctggagttcaacaagaacagcctgaccttcagcatcccccccaagaacaaggccagactgaagaagatcaaggacgacaccggccccgtggccaagaagcccagcagcggcaagaagggcgccaccacccagaacagcgagatctgcagcggccaggcccccacccccgaccagcccgacaccagcaagagaagcaagtag

SEQ ID NO: 209782 - protein, 307 aa, Artificial Sequence
  derived and/or modified sequence
MGGLTASDVHPTLGVQLFSAGIAACLADVITFPLDTAKVRLQVQGECPTSSVIRYKGVLGTITAVVKTEGRMKLYSGLPAGLQRQISSASLRIGLYDTVQEFLTAGKETAPSLGSKILAGLTTGGVAVFIGQPTEVVKVRLQAQSHLHGIKPRYTGTYNAYRIIATTEGLTGLWKGTTPNLMRSVIINCTELVTYDLMKEAFVKNNILADDVPCHLVSALIAGFCATAMSSPVDVVKTRFINSPPGQYKSVPNCAMKVFTNEGPTAFFKGLVPSFLRLGSWNVIMFVCFEQLKRELSKSRQTMDCAT

SEQ ID NO: 209783 - DNA, 924 bp, Artificial Sequence
  derived and/or modified sequence
atgggcggcctgaccgccagcgacgtgcaccccaccctgggcgtgcagctgttcagcgccggcatcgccgcctgcctggccgacgtgatcaccttccccctggacaccgccaaggtgagactgcaggtgcagggcgagtgccccaccagcagcgtgatcagatacaagggcgtgctgggcaccatcaccgccgtggtgaagaccgagggcagaatgaagctgtacagcggcctgcccgccggcctgcagagacagatcagcagcgccagcctgagaatcggcctgtacgacaccgtgcaggagttcctgaccgccggcaaggagaccgcccccagcctgggcagcaagatcctggccggcctgaccaccggcggcgtggccgtgttcatcggccagcccaccgaggtggtgaaggtgagactgcaggcccagagccacctgcacggcatcaagcccagatacaccggcacctacaacgcctacagaatcatcgccaccaccgagggcctgaccggcctgtggaagggcaccacccccaacctgatgagaagcgtgatcatcaactgcaccgagctggtgacctacgacctgatgaaggaggccttcgtgaagaacaacatcctggccgacgacgtgccctgccacctggtgagcgccctgatcgccggcttctgcgccaccgccatgagcagccccgtggacgtggtgaagaccagattcatcaacagcccccccggccagtacaagagcgtgcccaactgcgccatgaaggtgttcaccaacgagggccccaccgccttcttcaagggcctggtgcccagcttcctgagactgggcagctggaacgtgatcatgttcgtgtgcttcgagcagctgaagagagagctgagcaagagcagacagaccatggactgcgccacctag

SEQ ID NO: 209784 - DNA, 924 bp, Artificial Sequence
  derived and/or modified sequence
atgggcggtctgacagcctctgacgtccacccaacattgggagtgcaactgtttagcgcgggcatagctgcgtgcttggctgatgtgattacatttccactcgacacagccaaggtgcgcctccaggttcaaggggagtgcccgacttctagcgttattcgctacaagggggtcttaggcacaatcactgccgtggtgaagacagaaggacgcatgaaactgtattctgggctcccagccggactccagcgccagatttcttccgccagtctcagaatcggcctctacgatacggtacaagagttcctgaccgctggcaaggagactgcccctagtctcgggagcaagattttagctggtttgacaaccggtggcgttgcagtgttcatcggacagcccactgaagttgttaaggtgaggctgcaggcccagagtcacctccacggcatcaagccacgctatactggcacttacaacgcatacaggatcatagcaaccacagagggcctaacaggtctttggaaaggtacgacccccaatctcatgcggagcgttatcattaattgtacagaattggtgacatatgatctgatgaaggaggcctttgtcaaaaacaatattctggcggacgatgtgccttgtcacctggttagtgctctcattgccggcttctgtgcgacagcaatgagttccccagtagacgtggtgaagactcgctttatcaacagccctccgggacagtacaagtctgtgccgaactgcgcaatgaaggtttttacaaatgagggtccgactgccttttttaagggattggtaccatccttcctaagactgggctcatggaatgtgatcatgttcgtatgctttgagcagctgaagagggagctctctaaatcccgccagacgatggactgcgccacttag

SEQ ID NO: 209785 - DNA, 924 bp, Artificial Sequence
  derived and/or modified sequence
atgggcggcctgacagccagtgatgtgcaccccaccctgggcgtgcagctgttctctgctggcattgctgcctgcctggctgatgtgatcaccttccccctggacacagccaaggtgcggctgcaggtgcagggcgagtgccccaccagcagcgtcatccgctacaagggcgtgctgggcaccatcacagctgtggtgaagacagagggccgcatgaagctgtacagcggcctgcctgctggcctgcagaggcagatcagcagcgccagcctgagaattggcctgtatgacacagtgcaggagttcctgacagctgggaaggagacagcccccagcctgggcagcaagatcctggccggcctgaccactggaggagtggccgtgttcatcggccagcccacagaggtggtgaaggtgcggctgcaggcccagagccacctgcacggcatcaagccccgctacacaggcacctacaatgcctaccgcatcatcgccaccacagagggcctgaccggcctgtggaagggcaccacccccaacctgatgaggagcgtcatcatcaactgcacagagctggtgacctatgacctgatgaaggaggcctttgtgaagaacaacatcctggctgatgatgtgccctgccacctggtgtctgccctgattgctggcttctgtgccacagccatgagcagccctgtggatgtggtgaagacccgcttcatcaacagccccccaggccagtacaagtctgtgcccaactgtgccatgaaggtgttcaccaatgaaggccccacagccttcttcaagggcctggtgcccagcttcctgcggctgggctcctggaatgtcatcatgtttgtgtgctttgagcagctgaagcgggagctgagcaagagccggcagaccatggactgtgccacctag

SEQ ID NO: 209786 - DNA, 924 bp, Artificial Sequence
  derived and/or modified sequence
atgggcggcctgaccgccagcgacgtgcaccccaccctgggcgtgcagctgtttagcgccggaatcgcagcgtgcctggccgacgtcatcacttttccactggacaccgctaaagttcggctacaagttcagggcgagtgtcctaccagctcagtgatacggtataaaggggtgctgggaaccatcaccgcggttgttaaaacagaaggcaggatgaagctttattccgggctgcccgcagggcttcagcgtcagatctctagtgcgagtctgcggatcgggctctacgacactgtccaggagtttttgacagccggaaaggagaccgccccttcacttggatctaaaatcctcgcaggactgaccacaggtggggtcgcggtgtttattgggcaaccaaccgaggtcgtaaaagttcgccttcaggctcagagccaccttcatggtattaaacctaggtatacagggacatacaacgcatataggatcattgcaaccactgaaggtctgactggtttatggaagggtacaacgcccaacctgatgcgaagcgtcattatcaactgtactgagctcgtgacttacgacctaatgaaggaagccttcgtgaagaacaatatcctggccgacgacgttccctgccatctcgtgagcgctctgatcgcaggcttttgcgcaacagccatgagctcacccgtggatgttgtaaaaacacggtttataaatagtcctccaggccagtacaaaagtgtgcccaactgtgctatgaaagtctttaccaacgagggtcccaccgctttttttaagggccttgttccctctttcctgaggcttggtagctggaacgttatcatgttcgtgtgctttgagcagttaaaaagagaactgagcaagtcacgccagacaatggattgtgccacctag

SEQ ID NO: 209787 - DNA, 924 bp, Artificial Sequence
  derived and/or modified sequence
atgggcggtctgacagcaagtgacgtccatcccactctcggcgttcagctgttctcagctggtattgctgcctgcttggccgacgtaatcacctttccactcgataccgccaaggtccgcctccaagtccagggggagtgccctacttctagcgtgatcaggtacaaaggcgttttgggtactattaccgcagtggttaaaacagagggtcgaatgaagctctattctgggcttccggctggcctccagagacagatttccagtgcatcgttacgtatcgggttatacgataccgtgcaggaatttctgaccgccggaaaagagacagcccctagtctggggagcaagatcttagcaggcctaactaccggtggcgtggcggttttcatcggacagcccaccgaggtggtgaaggtaaggctccaggcccagagccacttacatggcatcaaacctcgttacacgggtacctataacgcatatcgaatcattgcaacaactgagggactcactgggctgtggaaaggcaccaccccgaatctgatgagaagcgtgattatcaactgcaccgagttggtcacatatgacctgatgaaggaggccttcgtgaaaaacaacatcctagcagacgacgttccatgtcacttggtgagcgccctgatagccggattctgtgccactgcaatgagttcccctgtggacgtggtcaaaacacgatttatcaattctcctccaggccagtacaagtccgttccgaactgcgcaatgaaagtttttaccaacgaaggtcccacagccttcttcaaaggattagtgcctagttttttacgactcgggagctggaacgtgatcatgtttgtatgtttcgagcagcttaagcgggagcttagtaaaagccgacaaactatggactgcgcaacctag

SEQ ID NO: 209788 - DNA, 1462 bp, Artificial Sequence
  derived and/or modified sequence
agagcaagggaaaggaacttcctccaccttcggggctggagcccttttcctctgcatctccagtctctgagtgaagatggggggcctgacagcctcggacgtacacccgaccctgggggtccagctcttctcagctggaatagcggcgtgcttggcggacgtgatcaccttcccgctggacacggccaaagtccggctccaggtccaaggtgaatgcccgacgtccagtgttattaggtataaaggtgtcctgggaacaatcaccgctgtggtaaaaacagaagggcggatgaaactctacagcgggctgcctgcggggcttcagcggcaaatcagctccgcctctctcaggatcggcctctacgacacggtccaggagttcctcaccgcagggaaagaaacagcacctagtttaggaagcaagattttagctggtctaacgactggaggagtggcagtattcattgggcaacccacagaggtcgtgaaagtcagacttcaagcacagagccatctccacggaatcaaacctcgctacacggggacttataatgcgtacagaataatagcaacaaccgaaggcttgacgggtctttggaaagggactactcccaatctgatgagaagtgtcatcatcaattgtacagagctagtaacatatgatctaatgaaggaggcctttgtgaaaaacaacatattagcagatgacgtcccctgccacttggtgtcggctcttatcgctggattttgcgcaacagctatgtcctccccggtggatgtagtaaaaaccagatttattaattctccaccaggacagtacaaaagtgtgcccaactgtgcaatgaaagtgttcactaacgaaggaccaacggctttcttcaaggggttggtaccttccttcttgcgacttggatcctggaacgtcattatgtttgtgtgctttgaacaactgaaacgagaactgtcaaagtcaaggcagactatggactgtgccacataatcagcttcaagaaaatgatgtaacataccagtgggaatcttgctgactggatcataaaaacaaacaaaacttattcacttattttaacctaaaaagataaaggaattttggcagagaattttggacttttttatataaaaaagaggaaaattaatgcctatttcatataactttttttttttctcagtgtcttaagaaggggaaagcaaaacattcagcatataccctggcaaatgtaatgcagataagctactgcatttgaccatttctggagtgcaattgtgtgaatgaatgtgaagaactttaacatgttttaattacaattccaactggtggaaaagaaactgagtgaaatgcagtttatatttataaatacttaaaaatgaagttattaaaaatattagtttttattaaccacagttgtcagttaatatattcaataaagtattgctaatacctttt

SEQ ID NO: 209789 - protein, 453 aa, Artificial Sequence
  derived and/or modified sequence
MSWSLHPRNLILYFYALLFLSSTCVAYVATRDNCCILDERFGSYCPTTCGIADFLSTYQTKVDKDLQSLEDILHQVENKTSEVKQLIKAIQLTYNPDESSKPNMIDAATLKSRKMLEEIMKYEASILTHDSSIRYLQEIYNSNNQKIVNLKEKVAQLEAQCQEPCKDTVQIHDITGKDCQDIANKGAKQSGLYFIKPLKANQQFLVYCEIDGSGNGWTVFQKRLDGSVDFKKNWIQYKEGFGHLSPTGTTEFWLGNEKIHLISTQSAIPYALRVELEDWNGRTSTADYAMFKVGPEADKYRLTYAYFAGGDAGDAFDGFDFGDDPSDKFFTSHNGMQFSTWDNDNDKFEGNCAEQDGSGWWMNKCHAGHLNGVYYQGGTYSKASTPNGYDNGIIWATWKTRWYSMKKTTMKIIPFNRLTIGEGQQHHLGGAKQVRPEHPAETEYDSLYPEDDL

SEQ ID NO: 209790 - DNA, 1359 bp, Artificial Sequence
  derived and/or modified sequence
atgagctggtccctgcacccaagaaatctcattctgtacttttacgcacttctcttcctgagcagcacctgcgtcgcatatgtggcaaccagagataactgttgtatcctggacgaaaggttcgggtcgtactgtcctactacctgcggcattgcagattttctttcaacttaccaaactaaggtggataaggaccttcagtccctcgaggacatacttcatcaagtcgaaaacaagacgtccgaagtgaaacaactgattaaggcaattcaactgacttacaatcctgatgaatcctcaaaaccaaacatgattgatgccgctacccttaagtctcgtaaaatgctggaggagattatgaaatacgaagcctcaattcttacccatgattcgtcaatccgctacctgcaagaaatctacaactccaataaccaaaagatcgtgaatctgaaagagaaggtcgctcagctcgaggcgcagtgtcaggaaccttgtaaagataccgtccaaatccatgatataactggcaaggattgccaagacattgccaacaagggggcaaagcagagcggcctgtactttatcaagcctcttaaggcgaaccaacaatttcttgtgtactgcgagattgacggatcgggcaacggatggacggtgtttcagaagcggctggatggatcggttgactttaagaagaattggattcaatacaaagagggtttcggtcacctgagccccaccggaaccaccgaattttggctcggcaacgaaaagatccatctcatttccactcagtccgcaatcccttacgcacttagagttgagcttgaggactggaatgggcggactagcaccgcagattacgcaatgtttaaggtgggccctgaagcggacaaataccgactgacttacgcgtactttgcgggtggagatgcaggtgacgcattcgatggttttgattttggcgacgacccctcagataagtttttcacttcgcataacggaatgcaattctcgacttgggacaatgataacgataagttcgagggtaattgtgccgaacaagatggatcaggatggtggatgaacaagtgccatgcaggtcatctgaacggagtctattaccaaggcggcacgtactcgaaggcgtcaactccgaacggctatgataacggaattatctgggcaacctggaaaactcgctggtacagcatgaaaaagaccactatgaaaatcatcccttttaaccggttgactatcggcgagggtcagcaacatcacctcggaggtgcgaaacaagtgcgtccggagcatcccgcagaaaccgaatacgattcactctacccggaggatgatctt

SEQ ID NO: 209791 - DNA, 1359 bp, Artificial Sequence
  derived and/or modified sequence
atgagctggtccttgcatcctaggaatctgatcctgtatttctacgcactcctgtttctttcgtccacttgcgtggcctatgtcgcaactcgtgataattgttgtatccttgatgagagatttggctcgtattgtccaaccacctgcggaatcgcagattttctgtcgacgtaccagaccaaggtcgacaaagatcttcaatcacttgaggacattctgcaccaagtggagaacaagacctctgaagtcaagcaacttatcaaggccattcaacttacttacaatccagacgaatctagcaagcccaacatgattgatgcagcaactcttaagtcgcgcaaaatgctggaagagattatgaagtacgaggcatcgattcttacccatgattctagtattcggtacctccaagagatttacaattcaaacaatcagaagatcgtgaatctgaaggaaaaagttgctcagctggaggcccaatgtcaagagccttgtaaggataccgtccagattcatgacataactggaaaggactgtcaggacattgcaaacaagggagcgaaacagtccggcctgtactttatcaaacctcttaaagcaaaccagcaatttcttgtgtactgtgaaattgatggctccggaaatggatggaccgtgtttcaaaaaagattggatgggtcagtggacttcaaaaagaactggattcaatacaaggaggggtttggtcacctgtccccgaccggaacgactgaattttggcttggaaacgaaaagatacacctgatttcgactcagtctgccatcccatacgcgctccgcgtagagttggaagattggaacggtagaacctctaccgcggactacgcaatgtttaaggtgggaccggaagcagataagtaccgtctcacttacgcatacttcgcaggcggtgatgccggagacgcattcgatggcttcgactttggggatgatccatcggataagttctttacctcacacaacggaatgcaattttccacctgggataacgataatgacaagtttgaaggtaactgcgcagaacaagatggatccggctggtggatgaacaaatgccacgctgggcatcttaacggggtgtactaccagggagggacctactcaaaggcaagcactcccaatggttacgataacgggataatctgggcaacgtggaaaactcgatggtacagcatgaaaaagaccaccatgaagataatccctttcaaccgccttactatcggggaaggacagcagcatcatttgggtggagcgaagcaggtgcggcctgaacatcctgccgaaacggagtacgattcactgtatccagaggacgacctc

SEQ ID NO: 209792 - DNA, 1359 bp, Artificial Sequence
  derived and/or modified sequence
atgtcttggtctctgcatcctcggaacctaattttgtacttctatgcactgctgtttctctctagcacttgtgtggcttacgtggcaacacgcgataactgctgcattctggacgagcgctttggaagctattgtcctaccacttgcggtatcgctgactttctgtccacataccagaccaaagtggataaagatttacagagtctagaagacatcctgcaccaggtggaaaacaagacttctgaagtgaagcagttgatcaaagccatccagctgacatacaacccagatgagtcctcaaaacctaacatgattgacgctgccaccctcaaaagtagaaaaatgctagaggaaattatgaagtacgaagccagtattctgacccacgactcttcaatacgctatctacaagagatctacaattctaataatcagaagatagtgaatcttaaagagaaagtggcacagttggaggctcagtgccaggaaccatgtaaggataccgtgcagattcacgacattaccggcaaggactgccaggatatagctaataaaggcgctaagcagtctggcctgtatttcataaaacctctgaaagcaaatcagcagttcctagtatattgtgagatcgatggtagcggaaatggctggacagttttccagaaaaggctggacgggtccgtggattttaagaagaactggattcaatacaaggagggcttcgggcacctgagccctacaggcactaccgagttttggctgggcaatgagaaaatacacctgattagtactcaatcagccattccatacgccctgagggtggagcttgaagattggaacggccggacttctactgctgactatgcaatgtttaaagtaggccctgaagcagataaatacagattaacatacgcctacttcgctggaggagatgctggcgacgcttttgatggcttcgactttggcgatgacccaagcgataagttctttaccagccacaatggaatgcagttttctacctgggataacgacaacgacaaattcgagggaaattgtgccgagcaagacggcagcgggtggtggatgaataagtgccacgccgggcacctcaatggtgtgtattaccaaggaggaacatatagcaaggcttccacacccaacggctacgataatggcatcatatgggccacctggaagacacgttggtactccatgaagaaaactactatgaaaataatacctttcaatcgcttaactattggtgagggtcagcaacaccacttaggcggcgccaagcaggttagaccagagcacccagccgaaaccgaatatgacagcctgtaccctgaagacgatttg

SEQ ID NO: 209793 - DNA, 1359 bp, Artificial Sequence
  derived and/or modified sequence
atgtcctggtcacttcatccacgtaatctcatcctttacttttacgccctgttgtttctcagctctacttgcgttgcatacgttgcaactcgcgacaattgctgtattctggacgagcggttcgggagctactgtccaactacatgtgggatcgcagactttttaagcacatatcagactaaggtcgataaagatctacagtcgctggaagacattctgcaccaagtggagaataagacttctgaagtaaagcagctgatcaaagctatccagttgacatacaaccccgatgaatccagcaaacctaatatgatcgacgcagcaaccctgaaaagtcggaaaatgcttgaggagatcatgaagtatgaggcctcaatcctaactcacgactcctctatacggtacctacaggagatctacaattcaaataaccagaaaatcgtcaatctaaaagaaaaggtcgctcagttggaagcacagtgccaggaaccctgtaaagacaccgtacagatccacgatattaccggcaaggactgccaagacatcgctaacaaaggcgctaagcagtcgggcctttatttcattaaacccctgaaggccaatcagcagttccttgtgtattgcgagatcgacggctccggaaacggatggacagttttccagaaacggcttgatggctctgtcgacttcaagaagaactggatccagtataaagagggcttcggacacctcagccctacggggacaactgagttctggctgggcaatgaaaagattcacctgatttccactcaatctgctatcccctacgccctacgggtagagcttgaggactggaacggcagaacgtctacagcagactacgcaatgttcaaggtggggccagaggccgacaagtaccgactgacgtacgcttatttcgcaggcggcgatgctggtgatgccttcgatgggttcgatttcggtgacgacccatctgataagtttttcacctctcataacgggatgcagttctctacctgggacaatgacaacgataaattcgagggcaactgcgcggaacaggatggcagcgggtggtggatgaacaaatgccatgcaggtcacctgaatggcgtctactaccaaggaggaacatatagtaaggcttccacccctaatggctacgataatggtatcatctgggcaacctggaaaacacgatggtacagcatgaagaagaccaccatgaagattattccatttaaccgactgaccataggggagggacagcaacatcatcttggcggcgccaaacaggttcggcctgaacatccagctgaaactgagtatgactcactatatccagaagatgacctt

SEQ ID NO: 209794 - DNA, 1359 bp, Artificial Sequence
  derived and/or modified sequence
atgagttggagccttcatccacgaaatctgattttatatttctatgccctgctgtttctgtcaagcacatgcgtcgcctacgtggcaaccagggataactgttgcattttggatgaacggtttgggtcatattgcccaaccacatgcggcatagcggactttttgagcacctaccagacgaaagtggacaaagatctgcagtcgttggaagacattttacaccaggttgagaataagacaagcgaggtgaagcagctgatcaaagccattcaattgacttacaaccctgacgagagcagtaagcctaacatgattgatgcggctactctgaaaagtcggaaaatgctggaggagataatgaaatatgaggcctctatcctgactcacgacagctcaattaggtacttgcaggagatctacaacagcaataatcagaaaatcgtgaatttaaaggagaaagttgcccagttagaggcacagtgccaagaaccctgcaaagatacagtacagatccatgacattacaggcaaagattgtcaggatatcgccaacaagggtgccaagcagagtggcctatatttcatcaagccactgaaagctaatcagcagttcctggtctactgcgagatcgatgggtcaggaaacggatggacagtgtttcaaaaacggctggatggtagtgtcgacttcaagaaaaattggatccagtataaggagggcttcggacatttgagccccactggaacaaccgagttttggctcggaaacgagaaaatacacttgatctcgacccagtcagctattccctacgctctcagggtcgaactggaagattggaatggacgaactagcacagctgattacgccatgtttaaagttggtccggaggctgacaagtaccggctaacatacgcttatttcgcagggggagacgccggcgacgcctttgacgggtttgactttggggacgaccccagcgataagttttttacatcacacaacggaatgcagttctccacatgggacaatgacaacgataagtttgaaggaaattgtgccgagcaggatgggtcgggctggtggatgaacaagtgccacgccggccacctcaacggagtgtactaccaaggaggcacttactcgaaggcttccacacccaacggctacgacaacgggatcatttgggccacatggaagaccaggtggtacagcatgaagaaaactaccatgaagatcataccattcaaccgtctcacaatcggcgaaggccaacagcaccatctggggggagcgaagcaggttagacccgaacatcctgctgaaacggaatatgactccctgtatccagaggatgatctt

SEQ ID NO: 209795 - DNA, 1359 bp, Artificial Sequence
  derived and/or modified sequence
atgagctggtccctgcatccaagaaatttgatcttgtatttctacgccctcctgtttctctcaagcacttgtgtcgcgtacgtggcgacgcgcgacaactgctgcattcttgatgagcggttcggatcgtactgtccaaccacctgtggtatcgcggactttttgtcgacctaccagactaaagtggataaggacctgcaatccctcgaggatatcttgcaccaagtcgaaaataagacttctgaagtcaagcagttgatcaaggccatccagttgacttacaacccggatgaatcgagcaagccaaacatgatcgatgccgccaccctgaagtcgagaaagatgctggaagaaatcatgaaatacgaagcatccattctgacccacgacagctcaatcagatacctgcaggaaatctacaactcgaacaatcagaagatcgtgaatctgaaggagaaggtggcacaactggaagcccagtgtcaggaaccgtgcaaagacactgtgcagatccatgatattactggaaaggattgccaggacatcgcaaataaaggcgccaagcaatcgggcctgtacttcatcaagccgctgaaggccaatcagcaattcctggtgtactgcgaaatcgatggatcggggaatgggtggaccgtgttccaaaaacgcctggatgggagcgtcgactttaagaagaactggatccaatacaaggaaggttttggacacctgtcacctactggcaccaccgagttctggttgggcaacgaaaagatccacctcatcagcactcagtcagctatcccatacgcccttcgggtggaattggaggactggaacggtcgcacttccactgctgattacgctatgttcaaagtgggcccggaagcagacaagtaccgcctcacctacgcctacttcgcaggcggcgatgcaggagacgccttcgacggcttcgacttcggagatgacccgagcgacaaattctttacctcccataatggcatgcaattctcaacctgggataatgacaatgacaagtttgagggcaactgcgccgaacaagatggttcgggatggtggatgaataagtgccatgccgggcacctcaatggtgtgtactaccagggcggaacttacagcaaggcttcgaccccaaacggttacgacaatggcatcatctgggctacttggaagacgcggtggtactccatgaagaaaaccactatgaagatcattccgttcaacagactgaccatcggcgaaggacagcagcaccacctggggggagccaaacaagtgcggccagagcatcctgcagagacggaatacgattccctctacccagaggatgacctt

SEQ ID NO: 209796 - DNA, 1359 bp, Artificial Sequence
  derived and/or modified sequence
atgtcctggagcctccatcccagaaatctgatcctgtatttctatgcattgttgttcctgtctagtacctgtgtggcgtacgtggccacgcgggataattgctgcatactcgacgagcgttttggaagctattgccccacgacttgcggaatagcagactttctgtccacctaccagacaaaggtggataaggaccttcaatccctggaagacattttgcatcaagtcgagaataagacgagcgaagtgaaacagcttatcaaggcgatccagcttacctacaaccctgatgaaagctccaagcccaatatgatcgatgcggcaacccttaaatcgaggaaaatgcttgaagagattatgaaatacgaggcaagcatactgactcacgattcctccattagatacctccaggaaatttataatagcaataaccagaaaatagtaaacctgaaagaaaaggtcgcccagctagaagcccagtgccaggagccctgcaaagataccgtacagattcacgatatcaccggcaaggattgccaggatatagctaacaagggcgctaaacagtcaggactgtacttcatcaagccattgaaggcgaatcagcaattcctggtttactgcgaaattgatgggtcgggcaatggctggaccgtcttccaaaaaaggttggatgggtccgtggatttcaagaaaaactggattcaatacaaagaagggttcgggcatttgagccctacaggaacaactgaattttggctgggaaacgaaaagatccacctcataagcacccagagcgctatcccttatgctttgagggtggaactagaagattggaacgggcggacttcaacggccgactacgctatgttcaaggtcggcccagaagccgacaagtataggctcacgtatgcttatttcgcgggcggagatgcaggtgatgcgttcgacgggttcgattttggggacgatccaagcgataagttttttaccagccataacgggatgcagtttagcacatgggacaacgacaacgataagttcgagggtaactgtgcagagcaggacgggagtggctggtggatgaataagtgtcatgcaggccatcttaacggagtatactatcagggaggaacatattccaaggccagcacccccaatggatacgacaatgggatcatttgggccacctggaaaacaaggtggtactccatgaagaagactacaatgaaaattatcccgtttaaccgccttactatcggtgagggacagcagcaccatctaggtggcgcaaaacaggtcagacccgagcaccccgctgaaaccgagtacgactctctttatcctgaagatgacctg

SEQ ID NO: 209797 - DNA, 1359 bp, Artificial Sequence
  derived and/or modified sequence
atgtcctggtccctacacccaaggaacctcatcctgtacttctacgccctactgtttcttagcagtacttgtgtagcgtatgtcgctaccagggacaattgctgcatcctggacgagcggttcggcagctactgccccaccacctgcggtatagctgatttcctctccacctaccagacaaaggtcgacaaagatctacagtcactggaggatatcttacatcaggttgaaaataagacctcagaggtgaaacagttgattaaggcaatccagttaacctataaccctgacgagtccagtaagccaaatatgattgacgccgccaccctcaagagcagaaaaatgctcgaggagattatgaaatatgaggcctcaatcctgacccacgactctagtatccgctacctgcaggagatttataactccaataatcaaaagatcgtcaaccttaaggaaaaagtcgctcagttggaggcacagtgccaggaaccatgcaaggacactgtccagattcatgacattactggtaaggactgccaggacattgccaacaagggcgccaaacaatccgggctttacttcattaagccactgaaggcaaatcagcagttccttgtctactgcgagatcgacggttctggtaacggctggaccgtgttccaaaaaaggcttgatgggagtgtcgattttaagaagaactggatccagtacaaggagggcttcggacatctgtctccaactggtacaacggaattttggctgggaaatgagaagatccatctcatctcgactcagagtgcgatcccatatgctctgcgggtggagttagaagattggaacggcagaacaagcacagctgactacgcgatgttcaaggttggtcctgaggctgacaaataccgactcacttacgcctactttgctggcggggatgcaggcgatgccttcgacggcttcgacttcggtgacgatcctagcgataaattctttacgtcccataacgggatgcaattttccacgtgggacaacgataatgacaagttcgaggggaattgcgcagaacaggatggttcgggttggtggatgaataagtgtcacgccggacatttgaatggggtgtactatcagggcgggacatactccaaggcctctaccccaaatgggtacgataacggcattatatgggcaacatggaaaacccggtggtactccatgaaaaagaccacgatgaaaatcatccccttcaaccggttgacaatcggcgagggacagcagcaccacctgggcggagccaagcaggtcaggcccgaacaccccgccgagaccgagtatgattctctttatcctgaggacgacctg

SEQ ID NO: 209798 - DNA, 1359 bp, Artificial Sequence
  derived and/or modified sequence
atgagctggtcgctgcacccacggaaccttatcctctacttctacgccctcttgttcctctcatcgacttgcgttgcatacgtcgccactagggataactgctgtattttggacgaacgcttcggaagttactgcccaacgacctgtggcatcgcggatttcctctcgacctaccagaccaaggtggacaaggacctccagtcgcttgaggatatcctgcaccaggtcgaaaacaagacgtccgaggtcaaacaattgatcaaagcaatccagctgacgtacaacccagatgagtctagcaaacctaatatgattgacgcggcgacgctgaagagcagaaaaatgcttgaagagataatgaagtacgaggccagcattctcactcatgattcctcgattagataccttcaagaaatctacaattcgaacaaccaaaagatcgtcaacctgaaggaaaaggtggctcaactggaggcccaatgtcaggaaccctgcaaagataccgttcagatccacgacatcactgggaaggactgccaggatatcgctaacaagggtgccaagcagtcaggactctactttatcaagcctctgaaggctaaccagcaattcctggtgtattgcgagatcgacggatcaggaaacgggtggactgtgttccagaagcgcctggacggatcagtggatttcaaaaagaattggattcagtacaaggaaggattcgggcacttgtccccaactggcactactgaattctggctgggaaacgagaagatccacctgatctccactcagtcggcgataccgtacgcactccgagtcgaactggaagattggaatggccggacctctactgcagactatgccatgttcaaggtcggccctgaagccgacaaatacaggctcacctacgcgtacttcgctggtggggacgccggcgacgcctttgacggattcgatttcggcgacgacccaagcgacaagttcttcaccagccataacggaatgcagttctcaacctgggacaacgacaacgacaaattcgaggggaattgcgcggaacaagacggatcgggatggtggatgaataagtgccacgctggccacctgaacggtgtatactaccagggcggaacttacagcaaggcaagcactccgaatgggtatgacaacggaatcatctgggccacctggaaaactagatggtactcgatgaaaaagactactatgaaaatcatcccattcaaccggctgaccatcggggagggccagcagcatcatctcggaggtgccaagcaagtgcgccctgaacatccagccgagacggaatatgacagcctgtacccagaagatgatctt

SEQ ID NO: 209799 - DNA, 1359 bp, Artificial Sequence
  derived and/or modified sequence
atgtcatggtcacttcatccaagaaaccttattctttacttttacgcgcttctgttcctctcgtccacttgcgtggcgtacgtcgcaacccgggacaactgctgtatactcgacgaaaggttcggatcgtactgcccaacgacgtgcggaattgctgactttctgtcgacctaccagactaaggtggataaggatcttcagtctcttgaagatattctgcatcaagtggaaaacaagacttctgaagtgaagcagctgattaaggcaattcaactcacttacaaccccgatgaaagttcaaaaccgaatatgattgatgcagccaccctgaagagcagaaagatgctggaggagataatgaaatatgaagcctcgatccttacccatgattcctcgatcaggtacctccaggagatctacaactcgaataatcagaaaattgtgaatcttaaagaaaaggtcgcacagctggaggcgcaatgtcaggagccgtgtaaagatacggtgcaaatccacgatatcaccggtaaggattgtcaagatattgccaacaagggagcaaagcagtccggcctctactttatcaaacctctgaaggctaatcagcaatttctcgtctactgtgaaatagacgggagcggtaacggatggaccgtctttcaaaaacggttggacggtagcgtcgactttaagaagaactggattcagtacaaagaaggctttggtcatttgtcgcctactgggactacggaattttggctggggaatgagaagattcatctcatctccactcaatcagccattccctacgctctgcgcgtggaacttgaggattggaacgggagaacttcgaccgcagattatgcgatgtttaaagtaggacctgaagcagacaagtaccggttgacctatgcgtacttcgcaggcggtgatgcgggtgatgcttttgatggattcgattttggtgatgacccatcagataagttcttcacctcccacaacggtatgcaattcagtacctgggataacgataatgataagttcgaaggtaattgtgcagaacaagacggctccgggtggtggatgaacaaatgtcacgcagggcatctgaatggtgtgtactaccagggaggaacttacagcaaggcatctaccccaaacggatacgacaacggaatcatttgggcaacttggaaaactaggtggtactccatgaagaaaaccactatgaagataattccttttaaccgcctcactatcggcgagggccagcaacaccatcttggcggagcgaagcaagttagacccgaacaccctgcagaaactgagtacgattcactctaccctgaggacgatttg

SEQ ID NO: 209800 - DNA, 1359 bp, Artificial Sequence
  derived and/or modified sequence
atgtcatggtccctccatccgagaaatcttatcctatatttctatgcgctgctgtttctgtcaagcacctgcgtagcctacgttgctacaagggataattgctgtatcctcgacgaacggtttggctcttattgtcctactacctgtggaattgccgacttcttatcgacatatcaaactaaggtagataaggacctgcagtcgctcgaggatattctacaccaggtggagaataaaaccagcgaagtgaagcagttgatcaaggccatccagcttacctacaatccggatgaaagctccaaaccaaacatgatcgatgccgccaccttgaagagcaggaaaatgttagaggaaataatgaaatatgaagccagtatcctgactcatgactccagtatccggtatctgcaggaaatctataattccaacaatcagaagattgtcaacctcaaagagaaggtggctcaactggaggctcaatgtcaggagccatgcaaagacacagttcaaatacacgacattaccgggaaggactgccaggatatcgccaacaagggggcaaaacaaagcggtctttacttcataaaacctctgaaagccaaccagcagtttttggtgtactgcgaaatagacggatcggggaatgggtggactgtgttccagaagcgtttagatggctctgtcgatttcaagaaaaactggatccagtacaaagaagggtttggtcacctcagccccacaggtacaaccgagttttggctggggaatgagaaaattcaccttatctccacacaatccgcgatcccatacgccttgcgcgtggagctggaggattggaatgggcggacctcgacagctgactacgccatgtttaaggtgggacctgaggcggataagtacagactgacctacgcttactttgccgggggggacgcgggggacgcatttgacggcttcgacttcggtgacgatccctctgataagttttttacctcccacaatggcatgcagttttcaacgtgggacaatgacaacgataagttcgagggcaactgcgcagagcaggacgggtcagggtggtggatgaataagtgccacgcaggtcaccttaatggagtatattaccagggcggtacatattcaaaagccagcactcccaacggctacgacaacggtattatttgggccacctggaaaacccgctggtacagcatgaagaagactactatgaagatcatcccgtttaacaggctgactatcggggagggccagcaacaccacctgggcggcgcaaaacaagtgcgtcctgaacaccccgcggaaacggagtacgattccctttatcccgaggatgatctt

SEQ ID NO: 209801 - DNA, 1359 bp, Artificial Sequence
  derived and/or modified sequence
atgtcttggagtctgcatccaaggaatttaattttgtacttctatgccctccttttcttgtcatctacctgtgtggcctatgtggcgaccagggacaattgctgcatcctggacgaacgcttcggctcctactgccccaccacctgcgggatcgcagatttcttgtcaacataccagacaaaagtcgacaaggatctgcagagcctggaagacattctgcaccaggttgaaaataagaccagcgaggtgaagcaactcattaaagccatacagctaacctataatcccgacgagtcctcgaagcccaacatgattgacgccgcaacactgaaaagcaggaaaatgcttgaagaaattatgaagtatgaagcatcaattttaactcacgatagctccatccggtatttgcaggaaatctacaattctaataatcaaaaaatcgtgaacctcaaagagaaggttgctcaattagaggctcagtgccaggaaccttgcaaggataccgtgcaaatccatgatatcactggcaaagattgtcaagacattgcaaataagggtgcaaagcagagtggcttatactttataaagccactaaaggctaatcagcagtttctggtgtactgtgagatcgatggcagtggcaatggatggacagtctttcagaagaggcttgatggctctgtggattttaagaaaaattggatccaatacaaggaagggtttggccatctctctcccacgggcaccaccgagttttggctgggaaacgagaagatacacctcatcagcacacagagcgcaattccctatgctctgcgggtggagttggaagattggaacggacgtaccagcacagcggactatgcaatgttcaaggtgggcccggaggcggataagtacaggctaacatatgcttatttcgctggaggcgatgccggcgatgcgttcgacggattcgactttggtgatgacccaagcgacaagttctttacatcccataatgggatgcagttttccacgtgggataatgacaacgacaagttcgagggaaactgtgcagagcaggacggctcgggctggtggatgaacaaatgtcacgctggtcaccttaacggcgtctactatcagggtggcacctattctaaagcgtcgaccccaaatggatacgataacgggatcatatgggctacctggaagactcggtggtattccatgaaaaagaccaccatgaagatcattccatttaatcgcctgacaataggggagggacaacaacaccatttgggcggagcaaagcaagtgcgccctgaacaccccgcagaaactgaatacgactcgctgtacccagaggatgatctg

SEQ ID NO: 209802 - DNA, 1359 bp, Artificial Sequence
  derived and/or modified sequence
atgtcttggtctctacacccaaggaatctgatcctgtatttctacgcactgctgttcttgagttctacctgtgttgcttacgtcgccacccgtgataactgttgcattctagatgaaaggttcgggagctactgcccgaccacttgtggcattgctgatttcctctcaacataccagacaaaagtcgacaaggatctgcaatccctagaagatatcctccaccaagtcgagaataaaacatcagaggttaagcaactgattaaagcgattcagttaacttataaccctgatgagtcttccaagcctaacatgattgatgccgccaccctaaaatcacgcaagatgttggaggaaattatgaagtatgaagcgtctattttaactcatgactccagcattcgctatctacaggagatttataatagtaacaatcagaaaatagttaatctaaaagagaaagtcgcccaattggaagcgcaatgccaggaaccatgtaaggataccgtccaaattcacgacatcactgggaaagactgccaagatatcgctaacaagggggctaagcagtctggtctgtacttcatcaagcctctaaaggcaaaccaacagttcttggtttactgtgaaatcgatggttctggcaacggatggacagtgttccaaaaacgcctggatggctccgtagattttaagaaaaactggatccagtataaggaaggcttcggccatctgtcgcctaccgggacgactgagttttggctaggcaatgagaagatccacttaatcagcacgcaatccgctattccgtacgccctcagagtggaacttgaggattggaacggccgtacatcaaccgcagactacgcgatgttcaaagttggacctgaagccgataaataccggttaacgtatgcttacttcgccggaggcgatgcaggagacgcctttgatggattcgacttcggcgatgatccttcggataaatttttcactagtcacaatggaatgcagttcagtacatgggacaatgataatgataaattcgagggcaattgcgcggagcaggatggcagcggatggtggatgaataaatgccacgcaggtcatttgaacggtgtgtactaccagggcggcacctactccaaggcatcaactcccaatgggtacgataatgggataatctgggcaacatggaaaactcgttggtactcgatgaagaagactaccatgaagattattccgtttaatcgcctaacgatcggagaaggacaacaacaccatttaggtggagccaagcaagttcgcccggaacatccagctgagaccgagtatgactccctttatccggaggatgatctt

SEQ ID NO: 209803 - DNA, 1359 bp, Artificial Sequence
  derived and/or modified sequence
atgtcatggtcccttcatccaagaaatctgattctttatttttacgcacttttgtttcttagctctacgtgtgtggcatatgttgctacgcgcgacaactgttgcatactggatgaaagattcgggtcatattgcccgacaacgtgcggaattgctgactttctttcaacttatcaaactaaggtcgataaagatttacagagcttagaagatatcttacatcaagtggagaacaaaacatcagaagttaaacagttaattaaagcgattcagctgacttacaacccagatgaatcatctaaaccgaacatgattgatgccgcaacccttaaaagtcgcaaaatgcttgaagaaataatgaagtacgaggcctccattcttacacatgattcatcaatccgttatttacaggaaatttataactcaaacaaccagaaaattgtaaacttaaaggaaaaagtcgcacagctggaagcacaatgccaagaaccctgtaaagatactgtccaaattcatgatatcacgggcaaagattgtcaagatattgcaaacaaaggagctaaacagtcgggcctttactttattaagccattaaaggcaaaccagcagtttctggtctactgcgagatagatggaagcggaaatggctggaccgtgtttcagaaacgtctcgatggcagcgttgactttaaaaagaactggattcagtataaagaaggctttgggcatttgagcccaaccggcaccacagagttctggctgggaaacgaaaaaattcatcttatctcaacacagtcggctatcccttacgcgctgcgggtagaattggaggattggaatggcagaacatcaacggccgattatgcaatgtttaaagtcggacctgaggcggataagtacagattaacatatgcatatttcgccggaggcgatgctggcgatgcttttgatggttttgatttcggagacgatccgtcagataaattttttacatctcataacggtatgcagttttcaacgtgggataacgacaacgataaattcgaaggcaactgcgctgaacaggatggttctggatggtggatgaacaaatgccatgcggggcatctgaatggcgtctactaccaaggtgggacatattcgaaagcgtcaacgccaaatgggtatgacaatggcataatatgggccacttggaaaacccgctggtattctatgaaaaaaaccacaatgaaaattattccatttaatagattgaccattggagaaggccaacaacatcatctcggcggagctaaacaagtgcgccctgaacatcctgcggagacagaatatgattcactgtatccagaagatgatctc

SEQ ID NO: 209804 - DNA, 1359 bp, Artificial Sequence
  derived and/or modified sequence
atgtcctggtcgctgcatccgcggaacctgatcctctacttttacgcgctgctcttcctttcgtcgacctgcgtcgcgtacgtcgccacccgcgacaactgttgcatccttgatgagcggttcggatcctactgcccgaccacttgtggtatcgccgatttcctgtcgacgtaccagaccaaggtggataaggacctgcagtcactggaagatattctgcaccaggtggaaaacaagacctcagaagtaaagcaacttatcaaagccatccagctgacctacaacccagacgagtcatccaagcctaacatgatcgatgcagctactctcaagtcacgtaaaatgcttgaggagatcatgaaatacgaggcttcaatcctgactcatgattccagcatccgctacctccaagagatatacaactcgaacaatcagaaaatcgtgaatctgaaggaaaaagttgcccaattggaagcacaatgccaagagccgtgcaaggacaccgtgcagattcacgacatcactggaaaagactgccaggatatcgcaaacaagggagccaaacagtcgggactgtacttcatcaagcccctgaaggccaatcaacaattcctggtgtattgcgaaattgacggatcgggaaatgggtggactgtctttcagaagcggctggatggatcagtggacttcaaaaagaactggattcagtacaaggagggttttgggcacttgtctccaacgggaaccacggaattttggctcggaaacgagaaaattcacctcatctcaactcagtcggccatcccatacgccctgcgggtcgaactcgaggattggaacggacgaaccagcaccgccgactacgccatgttcaaggtcggacccgaagccgacaagtaccgcctcacttacgcgtactttgctggtggagacgctggagatgcgttcgacggattcgatttcggagacgatccgtccgacaaattcttcaccagccataacgggatgcagtttagcacttgggacaatgacaatgacaagttcgaagggaattgcgccgaacaggacggctctggatggtggatgaacaagtgccatgcgggacacctcaatggggtgtactatcagggagggacctactccaaggccagcactccaaacggttacgataacgggatcatttgggccacttggaaaacccggtggtactcaatgaagaaaaccaccatgaagatcatcccctttaatcggctgaccatcggagagggacagcagcatcacctgggaggagcgaagcaggtgcgccctgaacacccggcggagacggaatacgactctctgtacccagaagatgacctg

SEQ ID NO: 209805 - DNA, 1359 bp, Artificial Sequence
  derived and/or modified sequence
atgagctggagcctgcatccaagaaacctgattctttacttctacgcactcctattcctctcatcaacttgcgtggcttacgtcgccacccgagacaactgttgtattttagacgagcgctttggaagttattgtccaactacctgtggaatagctgatttcctatcgacatatcagacgaaagtcgataaagatctgcagagtctcgaagacatattgcaccaggtggaaaataagacgtcagaagttaagcagttaatcaaagccatacagcttacatacaacccagacgaaagttctaaaccaaacatgattgatgcggcaactcttaagtcccgtaagatgctcgaggaaatcatgaagtatgaggccagcattctgacgcatgattctagcatccgctatctacaagaaatatacaactccaataaccagaagatcgtcaatctcaaggagaaggtcgctcagctggaagcccaatgccaggaaccgtgtaaggataccgtgcagatccatgacatcacaggaaaggattgtcaagacatcgccaacaagggcgccaagcaatcaggactgtacttcattaagcccctgaaggccaaccagcagtttctggtttattgtgagatcgatggctctggtaatggatggaccgtgttccagaaaaggctggatgggagcgtggatttcaagaaaaactggatacaatacaaagaaggctttggccacctgagtcctactgggaccaccgaattttggctcggaaatgagaaaatacatctcataagcacccagagcgccatcccctatgctttgcgggtggagctggaagactggaacggccgaacgagtacagccgattacgctatgtttaaggtgggcccagaagcagacaaatacaggttaacttacgcatacttcgccggcggcgatgcaggagacgcctttgacggttttgattttggagatgatccttccgacaagttcttcaccagccataacggcatgcagttcagtacatgggataacgacaacgacaaattcgagggtaattgcgcagagcaggacgggtccggatggtggatgaataaatgccacgctggccacctgaacggagtttactaccagggcggcacatacagtaaggcatctacaccaaatggatatgataatgggatcatctgggcaacatggaagacccgctggtattctatgaaaaagacaaccatgaagatcatcccatttaaccggctgaccataggtgaaggccaacaacatcatctgggcggggccaagcaggtgcggccagagcaccctgctgagacagaatacgactcactttatcccgaagatgatcta

SEQ ID NO: 209806 - DNA, 1359 bp, Artificial Sequence
  derived and/or modified sequence
atgagttggagcttacacccacgcaatcttatcctctacttctatgccctgctattcctttccagcacatgcgtggcttacgtggctactcgggataattgctgcatactggatgaacggtttggcagctattgccccactacatgtgggattgctgatttcttgagtacataccaaacgaaagtggataaagatctccagagcttggaggacatactacatcaggttgagaataaaacatccgaagtgaaacagcttatcaaagcaatccagctcacgtacaaccctgacgagtcttcaaagccaaatatgattgacgcagcgacactcaagagccgcaagatgctcgaggaaatcatgaagtatgaggcaagcatcctgacacacgacagcagcattagatatcttcaggagatatacaacagtaacaatcaaaagattgtgaatcttaaggagaaagtggcacagctggaggcacagtgccaggaaccgtgtaaagacaccgtccagattcacgacattaccggcaaggattgccaggacattgcaaataaaggggccaagcagtctggcctgtacttcatcaaacccctcaaggccaaccagcagttccttgtgtactgtgagatagatgggtccggcaacgggtggacggtattccagaagagattggacggcagtgtggactttaagaaaaactggatacagtataaggaaggattcggtcacctgagccctaccgggacgactgagttctggctcgggaacgagaagatccacctgatctctactcaaagcgctattccatacgccctgagagtggagctcgaggactggaatgggcgtacaagcaccgctgattacgctatgtttaaggtgggtcctgaggctgacaagtaccgtctgacttatgcatacttcgcaggaggagacgcaggggatgcttttgacggatttgatttcggcgatgatccctctgataaattttttacttcacacaacggaatgcagttttcgacgtgggataacgacaatgacaaatttgagggtaactgcgccgagcaagatggaagcggctggtggatgaataagtgccacgctggccatttgaacggagtttattatcaggggggcacttatagcaaagcgtctacccccaacggatatgacaacggcattatttgggccacatggaagacacgatggtactctatgaagaaaacgaccatgaagatcattccattcaatcgcctcaccatcggcgagggacagcagcatcatttggggggggctaaacaggtccgcccagagcacccagcggaaacagagtacgattccctgtaccccgaagatgatcta

SEQ ID NO: 209807 - DNA, 1359 bp, Artificial Sequence
  derived and/or modified sequence
atgtcatggtcgcttcacccccgaaacttgattttgtacttttatgctcttcttttcttgtcatctacgtgcgttgcctacgtcgctacccgagataattgctgtatccttgacgaaagattcggttcttattgtcccacgacatgtggaattgcggacttcctttccacatatcagaccaaagtcgataaagatcttcagtcgctggaagacatccttcaccaagtggaaaataagaccagtgaagttaagcagctgatcaaggccatacaacttacctacaatccagatgaaagcagtaaacctaatatgatcgatgcagcaacattaaaatcgagaaaaatgcttgaagaaatcatgaaatatgaagcaagtattcttacccacgactcatcaattagatatcttcaggaaatatacaattccaataaccaaaaaatcgtgaatcttaaggaaaaagtcgcccagcttgaagctcaatgtcaagaaccgtgcaaggacacagttcaaatacatgacattaccggaaaagactgccaggacattgcaaataaaggagcaaagcagagcgggctttattttattaaacccctgaaggcaaatcagcaattccttgtatattgtgagatagacggatctggcaatggatggactgttttccagaagcgactggatggaagtgtggacttcaaaaaaaattggattcagtataaggaaggatttggtcacctgtcaccgacaggaacaactgaattttggttgggaaatgaaaagatccacctgattagtactcaaagtgccattccttacgccctacgagttgaattggaggactggaatggacgaacatcaaccgctgattatgctatgtttaaggtcggaccagaagcagataaataccgtttaacctacgcctactttgctggtggtgatgctggagacgcatttgatggtttcgacttcggtgatgatccatcagacaaatttttcacatcccataatggaatgcaatttagcacatgggacaacgataatgataagtttgagggaaactgtgcagaacaggacggatcgggctggtggatgaataagtgccatgcaggacaccttaatggagtctactatcagggaggaacttacagtaaggcatctacgccaaacggatatgacaatggaattatttgggccacatggaagacaagatggtatagcatgaaaaaaacgactatgaagattatcccatttaaccgattgacgatcggagagggacaacaacatcatctgggaggtgctaaacaggttaggccagagcacccagcagaaactgaatatgatagtttgtacccagaggatgacctc

SEQ ID NO: 209808 - DNA, 1359 bp, Artificial Sequence
  derived and/or modified sequence
atgtcttggtccttacatccaagaaaccttatcttgtatttctatgccctcctgttcctctcaagtacctgtgtggcgtacgtggcaacccgggacaattgttgtatcttggatgagcgttttggctcctattgtcccaccacatgcggaatcgcagatttcctctccacttatcagactaaggttgataaagacctgcaaagcctggaggacatcctccaccaagtggagaataagactagcgaagtgaaacagctgatcaaagccatccagctgacttataatcctgatgaaagctctaaacccaacatgatcgacgccgctactctgaaatcaagaaaaatgctggaagaaatcatgaagtatgaagcctcaattctgacccatgattcctctatccggtatctgcaggagatttataactcaaacaaccagaagatcgtcaacctcaaagagaaagttgcccagttggaggcccagtgtcaggagccctgtaaggacaccgtgcagatccacgatatcacaggtaaggattgtcaggacattgctaacaagggtgctaagcagagcgggttatatttcataaagccattgaaagctaaccaacagttcctggtgtattgcgagatcgatggcagcggcaatggttggacggtgttccagaaacgcctggacggctcggttgactttaaaaagaactggatccagtacaaagaaggatttgggcacctgtccccaacaggtacaacagagttttggctggggaacgagaaaattcacctcatctccacccagagcgccattccgtacgcgctccgagtggagctggaagattggaatgggagaacttctaccgcagactatgccatgtttaaggtggggccggaagccgacaagtaccgcctcacatatgcatattttgcaggaggcgatgccggcgacgcattcgacgggtttgactttggggacgatccatcagacaagtttttcacaagccacaatggaatgcagttttcaacgtgggacaacgacaacgacaaatttgagggaaactgcgctgagcaggatggaagcggctggtggatgaataaatgccatgcaggccatctgaacggggtttactaccaggggggaacttatagtaaggcttccacaccaaatgggtatgacaacggcatcatttgggctacctggaagaccagatggtatagtatgaaaaaaacgacaatgaagattatccctttcaatcgcttaaccattggcgaggggcagcaacatcatctcggtggagccaaacaggtgaggcctgaacatccggcggagacagaatatgactccctgtacccggaggatgacctg

SEQ ID NO: 209809 - DNA, 1359 bp, Artificial Sequence
  derived and/or modified sequence
atgtcgtggtcgctgcacccccgtaacctgatcctctacttctatgccctcctgtttctgagcagtacctgcgtcgcctacgtcgctacgcgcgacaattgttgtatcctcgatgaacgattcggttcctactgccccaccacatgcgggatcgctgatttcttgagcacctaccagaccaaggtggacaaggatctccaatccctggaggacatcctccaccaggtcgagaacaagaccagtgaggtcaagcagcttatcaaggccatccagcttacgtataacccggatgagtcttcgaaacccaacatgatcgacgccgctacgctcaagtcccgtaaaatgctcgaggagattatgaagtacgaagcatctatactgacgcacgattcctccatccgttacctccaggagatttataactctaacaaccagaagatcgtgaacttgaaggagaaggtcgcccagcttgaggcccaatgccaggaaccctgcaaagatactgtccagattcacgatatcaccggcaaggactgccaggacatcgctaacaagggtgctaagcagtccggcctgtactttatcaaacctctcaaggccaaccagcagttcctggtatactgcgagatcgatggttcaggcaacggttggactgtgttccaaaagcgcctggatgggtctgttgatttcaagaaaaactggattcagtacaaggagggcttcggccacctgtcccccaccggcaccactgagttctggctcggaaacgagaagatccacttgatctccacgcaatccgccatcccctacgctctccgcgtcgaactggaagattggaacggtcgaacatctactgcggactacgcgatgttcaaagtgggccctgaagccgataagtaccgtttgacttatgcctatttcgctgggggtgacgccggtgatgccttcgacggattcgatttcggagatgacccgtcagataagttcttcacctctcacaatggcatgcagtttagcacctgggacaacgacaatgacaagttcgagggcaattgcgccgagcaggacggcagcggttggtggatgaataagtgtcacgctggccacttgaatggcgtgtactaccagggcggcacctacagcaaagcgagcacgcctaacggctacgacaacggaattatttgggctacctggaaaacccgctggtattccatgaagaagaccacgatgaagatcatccctttcaaccgcctgaccattggagagggacagcagcatcacctcggcggagccaagcaagtgcgtcccgagcaccctgcagagaccgagtacgactccctttacccagaagacgacttg

SEQ ID NO: 209810 - DNA, 1359 bp, Artificial Sequence
  derived and/or modified sequence
atgtcatggagcttacaccctaggaatctcatcctgtacttttacgccctcctgtttctgtcatccacatgcgtcgcttacgtggcaactcgggataactgctgcattctcgatgaaagatttgggtcatactgccctacaacttgcggtattgccgatttcctgtcgacataccagaccaaggttgacaaggacctgcagagcctagaggacatcctgcaccaggtggaaaataaaactagcgaggtaaaacagctgataaaggccatacagcttacttacaacccggatgagtcgagcaagccaaacatgattgacgccgctacacttaaaagcagaaagatgctcgaggagattatgaagtatgaggcctcgattctgactcacgattcatcgatcagatacctgcaagagatttataatagtaataaccaaaaaatcgtgaacctaaaagagaaggttgctcagcttgaagcgcagtgtcaagagccatgtaaggacacggtgcaaattcacgatattacgggcaaggactgtcaggatatcgcaaacaagggcgccaaacagagcggcctgtactttatcaaaccactgaaagctaaccagcaatttctggtctattgcgaaatcgacggatccggtaatggttggacagtgttccagaagcggctcgatgggtcggttgacttcaaaaagaattggattcagtacaaagaaggattcggccatctgtctcccacaggaacaacggaattctggttaggaaatgagaagattcacctcatctccacacagtcagccattccttatgcactcagagtggaactggaggactggaacgggcgtacttccacggcggactatgccatgtttaaagttggacctgaggcagataaataccgcctgacctacgcctatttcgcaggcggcgatgcaggtgacgcattcgatggctttgattttggtgacgacccatccgacaagttctttacctcccacaacggaatgcagttttctacatgggacaatgacaatgataagttcgaagggaattgcgctgaacaggatggatcaggctggtggatgaataagtgtcacgccggccatctcaatggagtgtattatcaggggggtacttactcaaaggcatcaactcccaacgggtatgacaacgggattatctgggcgacctggaaaacccgctggtactctatgaaaaagaccacaatgaagataattcccttcaacagattaaccatcggagagggtcagcagcatcatctggggggagccaaacaagtgcgaccagagcatccagccgagactgagtatgattccttatatccggaagacgatctc

SEQ ID NO: 209811 - DNA, 1359 bp, Artificial Sequence
  derived and/or modified sequence
atgtcttggtcactccacccgcgaaatcttatcctttacttctacgcccttctgttcctgtccagtacatgtgtggcgtacgtggcaacccgcgataattgctgtatcttagacgagcgcttcggatcatattgcccaacgacttgcggcatcgccgacttcttgtcaacgtatcagaccaaggttgacaaagatctccaatcgctcgaggacatcctccaccaggtcgagaataaaacatcggaggtgaagcaactcatcaaagccatacagctgacttacaatccagatgagagttccaaacctaatatgattgatgcggccactctcaagtctcgaaagatgctagaggaaatcatgaagtacgaggccagcatacttacgcatgactcgtccatccgttacttgcaggagatctacaacagtaacaaccaaaagattgtgaatctgaaggagaaggtggcgcagctggaggcacaatgccaggagccctgcaaggatacagtgcagatacatgacatcacaggcaaagattgccaagacatcgccaacaagggcgcaaagcagtcgggcctgtacttcatcaaaccactaaaagccaaccaacagttcctggtgtactgcgagatcgacggttcgggaaatgggtggaccgtgttccagaaacgcctagatggttcggtagactttaagaagaattggatccagtacaaggagggtttcggtcacttgagccccacagggactaccgaattctggctgggtaacgagaagatccacttaatttctactcaatcggccatcccctacgcgctgagggtggagctagaggactggaatgggcgcaccagcacagccgattacgcgatgttcaaggtgggccccgaggctgataagtaccggctcacatacgcctacttcgcaggcggcgatgccggcgatgctttcgatggcttcgacttcggcgacgatccctccgataaattttttacgtcccataatggtatgcagttcagtacgtgggataatgacaacgacaagtttgaaggcaattgcgccgagcaggatggttccggctggtggatgaataagtgccacgccggccacctgaacggagtgtactaccagggtggcacatactctaaggcctcgactccgaacggttatgacaatggcattatttgggctacgtggaagaccaggtggtactccatgaagaagaccacgatgaagattataccctttaaccgtttgacgatcggcgagggccaacaacaccacttgggcggcgctaagcaagtgagaccggaacacccagcagaaactgagtatgatagtttgtaccctgaggatgatctc

SEQ ID NO: 209812 - DNA, 1359 bp, Artificial Sequence
  derived and/or modified sequence
atgtcctggtccctgcatcctcgtaacctcattttgtatttttacgcgctactctttctctcaagcacctgcgttgcgtacgtcgccacacgcgataattgttgcatactggatgagcgcttcggtagctattgtccgacgacctgcggcattgctgattttctgtccacgtatcagaccaaggtagacaaagacctccagtccctcgaagacatcttgcaccaagtggagaacaaaacctctgaggttaagcagctgattaaggcaatccagctcacgtacaacccagatgagtctagcaagcctaacatgatcgatgcagctaccctgaagagccgcaaaatgctggaagagattatgaaatatgaggcgtctattctgacccatgactccagcatccgctacctgcaggaaatctataactcgaataatcaaaagatcgtgaacctgaaggagaaagtggctcagctggaggcacaatgccaggagccgtgtaaggatacggtgcagatccacgacataaccgggaaggactgccaagatatcgctaataagggcgccaagcagagtggcctgtactttattaagcctctgaaagcgaatcaacagttcctggtttattgtgagattgacggttctggcaatggatggaccgtttttcaaaaacgtcttgacggcagcgtcgactttaagaaaaactggattcagtacaaagagggtttcggtcacctgagccctaccggcacgactgaattttggctgggaaatgagaaaatccacttgatcagcactcaaagcgctatcccctatgccttacgcgtggagctggaggactggaacggtagaacctctactgctgattatgctatgtttaaggtgggtcctgaagcggataaatatagactgacctacgcctactttgcaggtggcgacgcgggtgatgcatttgatggtttcgacttcggcgacgacccgagcgataagttcttcactagccataatggtatgcagttcagtacgtgggataacgacaacgacaagtttgaaggtaactgcgctgagcaggacggttcaggttggtggatgaacaaatgtcacgctggtcacctgaacggtgtttattaccagggcggcacgtacagtaaagcaagcactcctaatggctacgataacggaataatctgggccacttggaagacgcgttggtatagcatgaagaagaccaccatgaaaatcattccatttaatcgtctgaccattggtgagggccagcaacaccacctgggtggagcaaaacaggtgcgaccggaacaccctgctgaaactgaatatgactccctgtatccagaggatgacttg

SEQ ID NO: 209813 - DNA, 1359 bp, Artificial Sequence
  derived and/or modified sequence
atgtcctggtctctgcaccctcggaacctcatcctgtatttttacgcccttctatttttatcaagtacctgcgtggcctacgttgccacacgggataattgttgcatcttggatgagcggttcggatcttactgtccaactacctgtgggattgcagacttcctgtctacctatcagacaaaggtggataaggacctccagtcactggaggatatcctgcaccaggttgaaaacaagacgtcagaggtgaagcaattaattaaggcaattcagctgacctataaccctgacgaaagttccaagccaaacatgattgacgcagcgaccctgaaatccaggaagatgcttgaagagattatgaagtacgaggcctctatcttgacccacgacagttctatccggtatctgcaggaaatttacaattctaataaccagaaaatagttaacctaaaagagaaagtggcacagctggaagcccagtgccaagaaccatgcaaggatacagtccaaattcacgacattactgggaaggattgccaagatattgccaataagggcgccaagcagtctggactgtattttattaagccactgaaagcgaaccagcaattccttgtgtactgtgagatcgacggcagcggaaacggctggacggttttccagaagcgtctcgatggctcggtagatttcaagaagaattggatccagtacaaagagggattcgggcacctgtcacccacaggaacaaccgagttctggttgggaaacgagaagatccacctcatctccacacagtccgccataccttatgcgctgcgcgtcgagctcgaggattggaacggtaggacctccactgccgattatgccatgtttaaggtgggacccgaggccgacaagtatcgcttaacctacgcatattttgctggcggagatgctggcgacgcctttgatggctttgacttcggagacgatcctagtgataagttcttcacaagccataacggtatgcagttctcgacctgggacaacgataatgacaagttcgaaggaaattgtgccgagcaggacggcagcggatggtggatgaacaagtgccacgctggccatctaaacggcgtgtattatcaaggcggcacctacagcaaagcgtccacacctaatggttatgacaatggtatcatctgggcaacctggaaaactcggtggtattccatgaaaaaaaccacaatgaagatcatccctttcaacagactcactatcggcgagggtcagcagcatcacttaggaggcgccaagcaggtgcggccagagcatccagcagagacggagtatgatagtctctaccctgaagacgacctc

SEQ ID NO: 209814 - DNA, 1359 bp, Artificial Sequence
  derived and/or modified sequence
atgtcctggtccctccacccccgcaacctgattctgtacttttatgcgctcctgtttctatcctccacttgtgtggcgtacgttgctactcgggataactgttgcattctggacgaaaggtttggcagctactgtccaacaacgtgcgggatcgcagacttcctgtcaacttatcagaccaaggtcgacaaggatttacaatcgctggaagacatcttgcaccaggtagaaaacaaaacctctgaagtgaaacagttgatcaaggcaatccagttgacatataacccggacgagtccagtaagcccaacatgatagatgcagccactctgaagagccgcaagatgcttgaagaaataatgaagtacgaggcttcaatccttactcatgatagcagcattcgctacctgcaagaaatctacaactccaacaaccaaaagatcgtgaacctgaaggagaaggtggcccagctggaggcacagtgccaagagccttgcaaggacaccgtgcagatacatgatataaccggtaaggactgtcaggacatcgcaaataaaggcgccaaacagagtggcctgtatttcatcaagcccctgaaggcaaatcagcagtttctggtgtactgcgaaattgacggaagtggcaatggctggactgtgtttcagaagcggcttgatgggtctgtggattttaaaaaaaactggatccaatacaaggagggttttgggcacctttcgccaaccggtaccactgagttctggttaggcaacgaaaagatccacttaatcagtacccagagcgcgataccctacgcactgcgagtggaactcgaggattggaatggccggacatccacggctgactatgcaatgttcaaggttggacctgaggccgataagtatcggctcacctatgcctactttgccggaggcgatgccggcgacgcatttgatggcttcgacttcggcgatgacccatcagacaagttcttcactagtcataatggcatgcaattctctacttgggacaacgataacgataagtttgaaggcaattgcgcagaacaggatggttcaggctggtggatgaataagtgtcacgccggccacctgaatggggtgtattatcaaggcggcacttacagcaaggcttccacaccgaacgggtacgataatggaattatatgggcaacttggaagacgagatggtattccatgaagaagactacgatgaaaataatcccttttaatcgtctaacaatcggggagggacaacaacaccacctcggcggagccaagcaggtgcgacctgagcatcctgccgaaactgagtacgatagcctgtatcccgaggatgatctg

SEQ ID NO: 209815 - DNA, 1359 bp, Artificial Sequence
  derived and/or modified sequence
atgtcttggagcttgcacccccgcaacctcatcctgtatttctacgccttgctcttcctctcgtccacctgcgtagcctacgtggccaccagagacaattgctgtatcctggatgagagatttgggtcatattgtccgaccacttgcggcatcgctgatttccttagcacctatcagaccaaagtggataaggacctgcagtcgctggaagatattctgcatcaagtggaaaacaagacctccgaagtgaaacagttaattaaggcaatccagctgacgtataacccagatgaaagctccaaacccaatatgattgacgcagcaaccttaaagtcacgtaaaatgcttgaggaaatcatgaagtacgaggcttccatactgactcatgattccagcatccggtaccttcaggaaatctataatagcaacaatcagaagatcgttaaccttaaagaaaaggtagcccagctagaagctcagtgccaggaaccatgtaaggatacagtgcagatccatgatattactgggaaggactgccaggacatagctaacaaaggtgcaaagcagtccgggctgtatttcattaaacccttgaaggcaaaccagcagttcctcgtgtactgcgagatagacgggagtggaaatggctggacagttttccaaaagcgccttgacggtagcgtggatttcaagaaaaactggatacaatataaggaaggctttgggcacctctctccaactggcactactgagttctggctggggaacgaaaaaatccatctgatttccacccaaagcgccatcccctacgcattacgcgtggagctggaggactggaacggaagaaccagtactgcagactacgcaatgttcaaggtcggacccgaagccgacaagtaccgtctgacgtacgcctatttcgccgggggggatgccggcgatgcgtttgatgggtttgactttggagacgacccatccgacaaattctttaccagccacaatgggatgcagtttagcacgtgggacaatgacaatgataagtttgagggcaattgcgcagagcaggacggttcaggctggtggatgaacaaatgtcacgcagggcatctcaatggggtttattatcagggcggaacttactccaaggcaagcaccccaaacgggtatgataacgggattatttgggctacctggaaaacacgatggtatagcatgaaaaagacgaccatgaagataattcccttcaaccgtctaaccatcggtgaaggacagcagcatcacctggggggtgcaaagcaggtgagaccagagcacccagctgaaaccgagtatgatagcctttacccagaggatgatctc

SEQ ID NO: 209816 - DNA, 1359 bp, Artificial Sequence
  derived and/or modified sequence
atgtcctggagtctgcaccccagaaatctcatactctatttttacgccctgcttttcctgtcctccacctgtgtcgcttacgttgctacaagggacaattgctgcatcttggatgagaggtttggtagctactgccctaccacctgcggaatcgccgattttctgagcacgtatcagaccaaagttgacaaggacctccagagcctcgaggatatcctccaccaggtggagaataagacctccgaggtcaagcagctgatcaaggctatccaacttacttacaatccggatgaatcctccaaacctaacatgatcgacgctgccacactgaaaagcaggaagatgctggaagaaatcatgaagtatgaagcctcaattctgacacacgactcatccatcaggtaccttcaggagatttataatagcaataaccaaaagattgtgaatctcaaagagaaggtggctcaactcgaggcccagtgtcaggagccctgcaaggacactgtgcaaatccacgatatcacaggtaaagattgtcaggacatcgctaataagggcgcaaagcagagcggactttacttcatcaagcctctgaaagctaaccagcagttccttgtgtactgtgaaatcgacggttcaggcaacggttggaccgtgtttcagaaaaggctcgatggttctgtcgattttaaaaaaaactggatccagtataaggagggtttcggtcacttgtctccaactggaaccaccgagttttggctgggcaatgagaagattcacctcatctccacccagtctgccatcccctatgctctgagagtcgagttggaggattggaacggtagaacgagtacagctgattacgcaatgtttaaagttggaccggaggccgacaaatatagattgacgtacgcctacttcgcaggaggtgacgctggcgacgcctttgacggctttgatttcggagacgaccccagtgataaatttttcacctctcacaatggaatgcagtttagtacatgggataacgataatgacaaattcgagggaaactgtgcagaacaggacggttctggctggtggatgaacaagtgtcacgcgggtcacctgaatggagtctactaccaaggcggaacctatagtaaagccagcacacctaatggctacgacaacggcattatatgggccacttggaagacacgctggtacagtatgaaaaagactaccatgaagataatcccctttaatcgcctgacaatcggcgagggacagcagcatcaccttggaggagctaagcaagttcgcccagagcatcccgccgagactgagtatgattcactgtacccagaggacgatctc

SEQ ID NO: 209817 - DNA, 1359 bp, Artificial Sequence
  derived and/or modified sequence
atgagttggtcactgcatccgcgcaatctgatactttatttctatgctctcctgtttctgagctcgacctgtgtggcgtacgtcgccacgcgggataactgttgcattttggacgagcgtttcggaagctactgccctactacttgtggaatcgcggatttcttgtccacctatcagactaaggtagacaaggatctacagtcgctggaagacattctgcaccaggttgagaataaaacttccgaggtgaagcaacttatcaaagcaatacagctcacatacaaccctgacgagtctagcaaaccaaacatgatcgacgccgctacactcaaatctcgaaagatgctggaggagatcatgaaatacgaagcatccatactcacgcacgactcttcaattagatacctgcaggagatctataatagcaacaatcagaagatcgtaaacctcaaggaaaaagtggcgcagctggaggcgcagtgccaggagccttgtaaagatacggtgcaaatccacgatattacagggaaggactgccaggatatcgcgaacaagggcgccaaacaaagcggattgtacttcataaagcccctgaaggccaaccagcagttccttgtttattgtgaaatcgacggctccggcaatgggtggacagtctttcagaagcggctggacggctctgtggacttcaagaagaattggattcagtacaaggagggatttggtcacctgtctccgacaggcacaacagagttctggctaggcaacgagaaaatccatctgatttctacccagagtgctattccctatgctctccgggtagaattagaggactggaacgggcgcacctccaccgccgattacgccatgtttaaagtaggtccggaagccgataagtaccgcctgacctacgcctactttgccggaggtgacgctggtgatgccttcgatggatttgatttcggtgatgacccgagtgacaagtttttcacgtcccataatggaatgcagttctccacctgggacaatgacaacgataaattcgagggcaactgtgcggaacaagacggctctggatggtggatgaacaagtgccacgctggccatctgaacggggtttactaccagggaggaacttactcaaaggcatccactcctaacgggtacgataatggaataatttgggccacatggaagaccagatggtactccatgaaaaaaacaaccatgaaaatcatcccctttaataggctaacaatcggggaaggacagcaacaccatctgggaggcgcgaagcaggttcggcctgagcacccggctgagaccgagtatgatagcttataccccgaggatgatctg

SEQ ID NO: 209818 - DNA, 1359 bp, Artificial Sequence
  derived and/or modified sequence
atgtcctggtccctgcaccctcgtaacctgattctgtacttctacgccctgctcttcctttcgtccacttgtgtggcgtacgtggcaaccagagataactgttgtattctggatgagcggtttggttcctattgtcccactacctgtggaatagccgatttcctctccacttaccagactaaagtggacaaagaccttcaatcgctcgaggatattcttcatcaagtggagaataagacctccgaagtgaagcagctcataaaagcaattcaattgacgtacaacccggatgaatcctcgaaaccaaatatgattgacgcagcaactctgaagtcacgcaagatgctggaagagattatgaagtatgaagctagcatcttgactcacgactcgtccattagatacctccaagagatttacaactcgaataaccaaaagattgtgaatctgaaggaaaaagtggcacagctcgaagcacagtgtcaagagccgtgtaaggatactgtccaaatacatgatataaccggtaaggactgccaggatattgcgaataaaggggctaagcagtcgggtctgtactttatcaagccactgaaggcgaatcaacaattcctggtgtactgtgagatcgacggtagcgggaacggatggactgtgtttcagaagagactcgatggatccgtggatttcaagaaaaactggattcaatacaaggagggttttggtcaccttagcccaactggaactaccgaattttggcttggaaacgaaaagatccacctgattagcactcaatcggccatcccatacgcgctgagagtcgaactggaagattggaacggccgaaccagcaccgctgattacgctatgtttaaagtgggtccggaggcagataagtaccgtcttacttacgcgtactttgcgggaggcgatgctggtgatgcattcgacgggtttgattttggcgatgatccgtcggacaagtttttcacttcgcataacggaatgcaatttagcacctgggataatgataacgacaagtttgaaggaaactgcgcagagcaggatggatcggggtggtggatgaacaagtgtcatgcagggcatcttaacggcgtgtactaccagggcggaacctactcaaaggcctcgacgccaaatggatacgataatggaattatctgggcaacctggaaaactcgctggtattcgatgaaaaagaccaccatgaagattattccttttaacagacttaccattggagaaggccaacagcatcatctggggggagcaaaacaagtgcgcccggagcatccagccgaaactgagtacgactccctgtaccctgaagatgatttg

SEQ ID NO: 209819 - DNA, 1359 bp, Artificial Sequence
  derived and/or modified sequence
atgtcttggtcacttcaccccagaaacctaatcctatatttctacgccctgctgttcctgtcttctacatgcgttgcctatgtggcaacccgcgataattgctgtatcctggatgagcgcttcggttcgtactgccctactacctgcgggatagctgattttctatccacctaccagacgaaagtagataaggacctacagtcactagaagacattttacatcaggtagagaataaaacttcagaagtgaaacagttgatcaaagccatccagctgacttataatcctgacgaatctagcaagcccaatatgatcgacgcagccacattaaaaagtcggaagatgctggaggaaatcatgaagtatgaggcatccattctcactcatgactcatcaattcgctacctgcaggagatctataactcgaataatcagaagatagtaaatctcaaagagaaagtggcccagctggaagcccagtgtcaggaaccttgcaaagacacagttcaaattcacgacatcacaggaaaggattgtcaagatatcgcaaacaagggcgcaaagcagtcaggtctgtactttattaaaccccttaaggcaaaccagcagttcttggtatactgtgaaattgatgggagtggtaatggttggacagttttccagaaacgccttgacggtagtgtcgatttcaaaaagaactggatccagtataaagaggggttcggtcacctgagtccaacagggaccacagagttctggctgggcaatgaaaagattcatctgatcagcacgcaaagcgccattccttacgccctgagagtcgaacttgaggactggaacggaagaacatcgaccgcagactacgccatgttcaaggtcggtcccgaggccgataaataccggctgacctatgcttatttcgcaggaggtgacgccggagacgcattcgatgggttcgatttcggcgacgacccctcagataagttttttactagccacaacggcatgcagttcagcacttgggataatgacaacgacaaatttgagggtaactgcgctgaacaggacggtagtgggtggtggatgaataagtgtcatgcgggtcatctcaatggggtctactatcaaggcggaacgtattctaaggctagcacacctaacggctacgataacggaattatctgggccacatggaaaaccaggtggtattcgatgaaaaagacaaccatgaaaatcattccattcaaccgtcttaccatcggcgaaggccagcagcaccacctcggaggggccaaacaggtgaggccagaacacccagcagaaacggagtacgattccctgtaccctgaagacgatctc

SEQ ID NO: 209820 - DNA, 1359 bp, Artificial Sequence
  derived and/or modified sequence
atgtcctggtcattgcaccctcgaaatcttatactttacttttacgcacttctgttcctttcctccacctgtgtcgcctacgtggccactcgggataattgttgtatcctggacgaaagatttggatcttactgtcctactacctgtgggatagcagatttccttagcacttaccaaacgaaagtcgacaaggatcttcagagcctggaggacattcttcatcaagtcgaaaacaaaacctcggaagtcaagcagctgatcaaagccattcaattgacgtacaaccctgacgaatcatccaagccaaacatgattgatgcggcaacccttaagtcgagaaagatgctggaggagattatgaagtacgaagcatccatactcactcatgattcgtccattagatacctgcaggagatttacaactccaacaatcaaaagatagtgaaccttaaggagaaggttgcacaactcgaggcccagtgtcaagaaccttgtaaagacactgttcaaatccatgatattaccggaaaggattgccaagatattgcaaataagggtgcaaagcagtcgggactttacttcattaagcctctgaaggccaaccaacaatttctggtttactgtgaaattgacggatcgggtaacggttggaccgtgtttcaaaaacgtctggacgggtcagtggactttaagaagaactggatacagtacaaagaaggctttggacacctgtcccctaccggtacgactgaattttggcttggcaacgaaaagatccaccttatatcaacccaatctgcaatcccatacgcactcagagtggaactggaagattggaatggtcggacctcaactgcggactatgccatgttcaaggtcggccctgaagcggacaagtaccgactgacctacgcatactttgccggcggtgatgccggagatgcattcgatggctttgatttcggcgatgacccatcagataagttctttacctctcacaatggcatgcaatttagcacctgggacaacgataacgacaagtttgaaggtaactgtgcagagcaagatggttcaggttggtggatgaacaagtgtcatgccggacatctgaacggggtgtactatcaaggtggtacttacagcaaagcgagcaccccaaacggatacgataacgggattatctgggcaacctggaaaacccggtggtactcgatgaagaaaactactatgaagattattcccttcaataggcttactatcggagaaggtcagcagcaccatctgggtggagccaagcaagtgcgcccggagcatccagctgagactgaatacgatagcctgtatcctgaagatgatctt

SEQ ID NO: 209821 - DNA, 1359 bp, Artificial Sequence
  derived and/or modified sequence
atgagttggagtttacatccacgtaatttaattttatatttttatgcacttttatttctttcatctacttgtgttgcttatgttgctactagagataattgttgtattcttgacgaaagattcggaagctattgtcctactacatgcgggattgctgattttctatctacatatcaaacaaaagttgataaagatttacaatcattagaggatattttgcatcaagtagaaaataagacatcagaagttaaacaattaattaaagctattcaattaacttataatcctgatgaaagtagtaagccaaatatgatcgatgcagcaactttaaaatcacgtaagatgttagaagaaattatgaaatatgaagcatcaattcttactcatgatagtagtattagatatttacaagagatttataattcaaataatcaaaaaattgtgaatcttaaggaaaaggttgcacaattagaagcacaatgtcaagaaccatgtaaagatacagttcaaatccatgatataactggtaaagattgtcaagatattgctaataaaggggcaaaacaaagtggattatattttattaaaccattaaaggctaatcaacaatttcttgtttattgtgaaattgatggatcaggaaatggttggactgtttttcaaaaaagacttgacggatctgtagatttcaaaaaaaattggattcaatataaggaaggatttggacatttatcacctactggtactactgaattttggttagggaacgaaaaaattcatcttattagtacacaaagtgcaattccttacgcacttagagtcgaattagaagactggaatggaagaacttcaactgcagattacgccatgtttaaagttggaccagaagctgataaatatcgtcttacctatgcttattttgcagggggagatgctggagatgctttcgacggattcgactttggagacgatccatctgataaatttttcacatctcataatggaatgcaatttagtacatgggataatgacaatgacaagtttgagggtaattgtgctgaacaagatggatcaggttggtggatgaataaatgtcatgcaggacatttgaatggtgtttattatcaaggtggaacttattctaaagcctcaactccaaatggatatgataatggaattatatgggctacatggaaaactagatggtattctatgaaaaaaacaactatgaagattataccttttaacagattaacaatcggagaaggacaacaacatcaccttggtggagctaaacaagttaggcctgaacatcctgctgaaactgagtacgattcattatatcctgaagatgattta

SEQ ID NO: 209822 - DNA, 1359 bp, Artificial Sequence
  derived and/or modified sequence
atgagttggtcactgcaccccaggaatttaatactgtatttttacgccctgctgtttctgtcttccacatgcgtcgcatacgtggccactagggacaattgctgcatactggacgagcggtttggcagctactgtcccaccacatgtggcattgcagacttcttgtctacttaccaaactaaagtcgataaggatctacagagcctggaagacatccttcaccaggtggaaaataaaacatccgaggtcaaacagctgatcaaagcaatacaactcacctacaaccctgacgaaagcagtaaaccaaacatgatagatgctgccacacttaagagcaggaaaatgcttgaggagatcatgaaatacgaggccagcatcttgacccacgactccagcatccggtacctgcaggagatatataactcaaataaccagaagatcgtaaacctgaaggaaaaggtcgctcagctagaggcgcagtgtcaggaaccttgcaaggacaccgttcagattcatgatattacaggcaaggactgtcaggatatagctaacaaaggtgctaaacagagtggattgtactttatcaagcccttgaaggctaaccagcagtttttggtctactgtgaaatcgacgggagcgggaatggctggaccgtgttccagaagcggctcgacggttctgtcgattttaaaaaaaactggatacagtacaaggagggcttcggacatctaagtcccaccgggaccaccgaattttggctcggtaatgaaaagatccaccttatcagtactcagtcagcaataccctatgcgctgcgggtggagctcgaggactggaatggcagaactagtacagccgactatgccatgtttaaggtgggcccggaggccgacaagtacagattgacctatgcatatttcgcgggaggcgatgctggcgacgcttttgatggattcgattttggggatgatccttcagacaagttcttcacctctcataacgggatgcaatttagtacatgggacaacgacaatgacaaatttgagggaaattgcgccgaacaagacgggagtgggtggtggatgaataagtgccacgctggacatcttaacggcgtgtactaccagggaggcacgtacagcaaggcctcaacacccaacggctacgacaacggcattatctgggccacttggaaaacgcgctggtattcaatgaagaagaccacaatgaagattattccatttaataggctaacaatcggagagggacagcagcatcacctgggaggagcaaagcaggttagaccagaacatccagccgaaaccgagtatgactcactgtaccctgaggacgatttg

SEQ ID NO: 209823 - DNA, 1359 bp, Artificial Sequence
  derived and/or modified sequence
atgagttggtctttacatcctagaaacctgatcctgtacttttatgcccttctcttcctctcttcaacatgcgtagcctatgtcgctactcgagataattgctgtattttagatgagcggttcggcagctactgccccacaacatgtggaatagcggatttcctgtcaacttatcagactaaggtggacaaggaccttcaaagcctggaggatatcctccaccaggtcgagaacaagacatccgaggtgaagcagttgataaaggcaatacagctgacatacaacccggacgagtcctcgaagcctaacatgatcgatgccgccacgctgaagtctaggaaaatgctggaggagatcatgaagtatgaagccagcatcctgacacacgacagtagcatcaggtatctgcaggaaatttataattctaacaaccagaaaattgttaatttgaaagaaaaagtcgctcagctggaggcccagtgtcaagaaccttgcaaagatacagttcaaatacacgacatcacaggtaaggattgccaggatatagccaataaaggcgccaagcagagtggtctgtatttcattaaacctctaaaagccaatcagcagttcctggtttattgtgagattgatgggtcgggcaacggctggaccgtgttccagaaacggctggatgggagcgtagatttcaaaaagaactggattcaatacaaggaaggcttcgggcacctgtcgcccaccgggactactgaattctggctgggcaatgaaaagatccaccttattagtacgcaaagcgccattccgtacgccttgagagtggaactggaggactggaacggtcgcacatctactgccgattatgcaatgttcaaggtgggacccgaagccgacaaataccgcctgacctatgcctatttcgccggaggcgatgcaggggatgcctttgatggtttcgatttcggagatgatccaagtgacaaatttttcacttcacataatggtatgcagttttccacctgggacaacgacaacgataagtttgaaggtaactgtgcagagcaagacgggtctggatggtggatgaacaaatgtcacgccggccatctgaacggcgtttactaccaaggagggacgtactccaaggccagtacaccaaatggatatgacaacggcatcatttgggcaacctggaaaacccggtggtattctatgaagaagaccactatgaaaatcatcccatttaatagactcactatcggagaaggacaacaacatcacctggggggagctaaacaggtacgccccgagcacccagcagagactgagtatgactccttatatcccgaggacgatctc

SEQ ID NO: 209824 - DNA, 1359 bp, Artificial Sequence
  derived and/or modified sequence
atgagctggtcgctgcatccccgcaacctcatcctttacttctacgcgctgcttttcctcagctctacttgtgtcgcatacgtggctaccagagataattgttgtatccttgatgaaagattcggatcctactgccctactacctgtggaatagccgatttcctgagcacttaccaaactaaggtggacaaggatctgcagtccctggaggacattctgcatcaggtggaaaacaaaacttcggaagtcaagcaattgattaaggccattcagctgacttacaaccctgacgaaagctccaagccgaacatgatagacgcggcaaccctcaagagccggaagatgcttgaggaaatcatgaagtacgaagcctcgattctcacgcatgattcgtctattagatacttgcaagagatttacaattcaaacaatcagaaaatagtgaaccttaaggaaaaggtggcgcagctggaggcccagtgtcaggaaccatgtaaggacacggtccagattcatgatataactggcaaggactgtcaggacattgcgaataagggggcaaagcaatctggtctttacttcataaaacctctcaaagcgaatcaacagttccttgtgtactgcgaaatagacgggtccggcaatggctggaccgtttttcaaaagcgacttgatgggtccgtggatttcaagaagaactggattcagtacaaggaaggattcggtcatctgtcgccaaccgggaccaccgagttttggcttggtaatgagaagatacatcttatcagcactcaaagcgcaataccttacgcactgcgagtggagttggaagattggaacggaagaacctccactgcagactacgccatgtttaaagtcggacctgaagcagataagtatcgtctgacctacgcatactttgcaggaggtgatgccggagatgcatttgatggatttgattttggtgatgaccccagcgataagtttttcacttcgcataacggaatgcagttttcaacttgggataacgacaatgacaagtttgaaggaaactgcgctgagcaggatggatccggatggtggatgaataagtgtcatgcaggccatttgaatggtgtttactaccagggtggaacctactccaaggcgtccaccccgaatggatatgataacggaatcatttgggcaacctggaaaacccggtggtactccatgaaaaagactaccatgaagatcatcccatttaaccggctgaccattggggagggacaacagcaccatctggggggagcaaagcaagtgcgcccagaacaccctgcagaaaccgagtacgactccctctaccctgaagatgatctg

SEQ ID NO: 209825 - DNA, 1359 bp, Artificial Sequence
  derived and/or modified sequence
atgtcttggtcactgcatccacgtaatctaatactgtatttttacgcactcctgtttttgagttccacgtgtgtggcatatgtggcaacccgcgacaactgttgtattcttgatgagcgtttcgggagttactgtccgaccacttgtggtattgccgactttctgtccacctatcagaccaaggtggacaaagatttgcaatccctggaagacatccttcaccaagtcgaaaacaaaacttctgaggttaaacagttgattaaagccattcaactcacgtataatccagacgagagttccaagcccaacatgatagatgccgccacattaaaaagtcgaaaaatgctcgaagaaattatgaagtacgaagcctcaatcttaacccacgattcctcaatacggtatctgcaagagatctataattccaacaatcagaaaattgttaatctgaaagagaaggtggcccaattggaagcgcagtgtcaggagccgtgtaaggatactgtccagatccatgacataaccggcaaggattgccaggacattgccaataagggggcaaaacagtctggattgtactttataaagcccctgaaggccaatcagcagtttctcgtttattgcgagatcgacggctcagggaatgggtggactgtcttccagaaacggctcgatgggagtgtggactttaaaaaaaattggatacagtataaggaggggtttgggcacctgtcacctactggtacaacagagttctggttggggaacgaaaaaattcatctaatctctactcagtctgctatcccttatgccctgcgtgtggaactagaagactggaacggtcgtacctctactgcagactacgccatgtttaaggtgggcccagaagctgacaagtatcgactgacctatgcttatttcgccgggggtgacgctggagacgctttcgacggtttcgatttcggcgacgacccatccgacaaatttttcacgagccacaatggcatgcagttcagtacctgggataatgacaatgataagtttgagggcaactgtgcagaacaggatgggtccgggtggtggatgaacaaatgccacgccggccatttgaatggagtgtattatcagggaggaacctactccaaagcctccactcccaacgggtacgacaatggaattatatgggccacatggaaaacgcgatggtacagtatgaagaaaactactatgaaaataatcccgtttaacagactaaccataggagaaggccagcaacaccacctgggcggggccaagcaggtgcggccagaacacccagctgaaacagaatatgatagtctgtatcccgaggatgatcta

SEQ ID NO: 209826 - DNA, 1359 bp, Artificial Sequence
  derived and/or modified sequence
atgtcctggtcgctgcatccccggaacttgattctctatttttatgcgctgttgtttctgagtagcacctgtgtagcgtacgtcgccaccagggataactgctgcattttagacgaacgcttcgggagctactgccccacgacctgcgggatcgcagactttttaagcacttatcagactaaggtagataaagatctccaatcgctggaagacatccttcatcaggtggaaaacaaaacaagtgaagtcaagcaactcattaaagctatacagctgacatataacccggacgaatcctcgaagcccaatatgatcgacgctgccaccctgaaatcacgcaagatgctcgaagaaattatgaagtatgaggccagtatactcacacacgatagcagcatccgatatttgcaagaaatttataattccaacaatcaaaaaattgttaacctgaaagagaaagtcgcgcagctggaagcgcagtgtcaggaaccttgtaaggacaccgtccagattcacgatatcactggcaaggactgccaggacatagccaataagggggccaagcagtctggattgtacttcataaagcctctcaaggcaaaccagcaatttctggtgtactgtgaaattgatggctccggaaatggctggactgtctttcagaagcgattggatgggtctgtggactttaagaaaaattggatacaatataaggagggcttcggacacttatccccaacaggcaccacagagttttggctggggaatgagaagattcatctgatatcaacccagtctgcaattccctatgccctcagagtcgagctggaggattggaatgggcgcacatctacagccgattatgcaatgttcaaggttgggcctgaagcagataagtacaggctcacgtatgcatacttcgccgggggggatgccggcgatgcctttgacggattcgactttggggacgatccttctgataagttctttaccagtcacaacggtatgcagtttagcacctgggataacgacaacgataagttcgagggcaactgcgctgagcaagacggctcagggtggtggatgaataaatgccatgctggccatttgaatggggtatactaccagggggggacctactcaaaggccagcacccctaacgggtacgacaacggtattatttgggcaacttggaagacccggtggtattccatgaaaaaaacgaccatgaaaatcatccccttcaaccggctcaccattggggaagggcagcaacatcacctcgggggggctaagcaggtgcggcctgagcaccctgccgagacagaatatgactccctctatcctgaggacgatctc

SEQ ID NO: 209827 - DNA, 1359 bp, Artificial Sequence
  derived and/or modified sequence
atgtcctggtctctgcatcccagaaatctcatactctatttctatgctcttctcttcctttcttcaacctgcgttgcctacgtcgccacacgtgataattgttgtatccttgacgaacgtttcggtagctactgcccaacaacttgcggtatcgctgactttctgagcacttaccagacaaaggtcgataaggacctccagtctctggaagatattctgcatcaggtagaaaataagaccagtgaggtcaaacagctgattaaagctattcagcttacctacaatcctgatgagagttccaagcccaatatgatcgacgcagctacactgaagtctcgcaagatgctcgaggagatcatgaagtatgaggcctctattctgacacacgattcctctatccgctatcttcaggaaatctacaactctaacaatcagaagatcgtcaacttgaaagagaaggtggctcagctggaagcccagtgtcaagaaccttgtaaagatacagtgcagatacatgacatcaccggtaaggactgtcaagacatcgccaacaagggcgccaagcagtcaggactttacttcatcaagcctctcaaagctaaccaacagttcctggtttactgcgaaattgacggttccggaaatggctggactgtatttcagaagagacttgacggatctgtggactttaagaagaactggatccaatacaaagaaggctttggtcacctctctcctaccggaaccacagagttttggctcggaaatgagaagatccacctcatctccacccagtccgccattccctacgctttgagagttgagttggaagactggaatggccgtacatctacagcagactatgccatgtttaaagtcggacctgaggcagacaagtacaggttgacatacgcttatttcgctggaggcgacgccggagacgctttcgatggctttgacttcggtgacgacccctcagacaagttctttacatcacataacggcatgcagtttagcacatgggacaacgacaacgataaattcgaaggaaactgcgctgagcaagacggcagcggctggtggatgaacaaatgtcatgcaggacatcttaacggtgtctactaccagggcggcacatactctaaagcttcaactcccaacggctatgacaacggtataatctgggcaacatggaagaccagatggtactctatgaagaagactaccatgaaaatcattcctttcaatcgccttacaattggtgagggacagcaacaccatttgggtggcgctaagcaggtgaggcctgagcatcccgccgaaactgaatatgacagtttgtatcccgaggacgacctc

SEQ ID NO: 209828 - DNA, 1359 bp, Artificial Sequence
  derived and/or modified sequence
atgagttggtccctgcacccaaggaacctcattctgtacttctacgcactgctcttcctttccagcacctgcgtggcgtacgtggcgacccgagacaactgctgcatcttggacgaacgcttcggatcctattgcccgacgacctgcggtatcgctgatttccttagcacctaccagacgaaggtggataaggatctgcagtcgctggaagatatcctgcaccaggtggagaataagaccagcgaagtgaagcaattgatcaaagccattcagcttacttacaaccccgatgaatcctcaaagcctaacatgatcgatgccgccactctcaagtctcgtaagatgctggaggagatcatgaaatacgaagcctccatcctcacccatgactcgagcatccggtacctgcaggagatctacaactctaataaccaaaagatcgtcaacctcaaggaaaaagtggcgcagctggaagcacagtgtcaggaaccatgcaaggacacggtccagatccacgatatcaccggaaaagattgtcaggacatcgccaataagggggccaagcagtcggggctttactttatcaagccgctgaaggccaatcagcagttcctggtttactgcgaaatcgacggtagcggcaatggatggaccgtctttcagaaaagattggacggatctgtggacttcaagaaaaactggatacagtataaagaaggttttggtcatctgtcacctactggcactaccgagttctggctgggaaacgagaagatccacctgatttccacccaatcggcaattccgtacgcgcttcgcgtcgagctggaggactggaacggtcgcaccagcaccgcggattatgcgatgttcaaggtgggcccggaagcagacaaataccggctcacctacgcctacttcgcaggaggggatgctggagacgcattcgacggctttgacttcggagacgacccctccgataagttcttcacctcccataacggaatgcagttttcaacttgggacaacgacaatgacaaatttgagggcaactgtgctgagcaagacggatcaggatggtggatgaacaaatgccacgcggggcacctgaacggagtgtactaccaaggcggaacgtactcgaaggcgagcactcctaacggatatgataatgggatcatctgggctacttggaaaactagatggtactccatgaagaaaaccactatgaaaatcatccctttcaatcgtttgactataggagaaggacaacaacatcacctgggaggcgccaagcaagttcgaccggaacatccagccgaaacggaatacgactctttgtaccccgaggacgacctc

SEQ ID NO: 209829 - DNA, 1359 bp, Artificial Sequence
  derived and/or modified sequence
atgagctggagtttgcacccccgtaaccttatcctgtacttttatgcccttctttttctgagctccacctgtgtggcatatgtggctacaagggacaattgctgcatccttgacgaacgctttggctcttattgtcccaccacctgtggtattgctgactttctcagcacttaccagactaaggtggacaaggacctgcagtcactggaggacatcctacatcaggtggaaaacaagacttcagaggtgaagcagctcatcaaagccatccagctgacctataatcctgatgagagctccaaacccaacatgatcgatgccgccactcttaagagccgaaagatgcttgaggagatcatgaaatacgaggcatcaattttgacacacgattctagcatccgttatctgcaggaaatatataactccaataaccagaagatcgtgaatctgaaagaaaaagtggcacaactggaagcccagtgtcaggaaccttgtaaagacaccgtgcagatacatgacatcactgggaaggattgccaggacatcgcaaacaaaggggcaaagcagagcggcctctatttcatcaagcctttgaaggccaaccagcaatttcttgtctactgcgaaatcgatggaagcgggaatggatggaccgtattccagaaaaggctcgatgggagtgtcgacttcaagaagaactggatccagtacaaagaaggatttggacacctgagccctactggcaccactgagttctggcttggaaacgaaaaaatccacctgatttccacacagtctgccatcccatacgccctgagagtggaacttgaggattggaacggacggactagcacggccgattacgctatgtttaaagtggggcctgaggctgacaaatatcggttgacctacgcttatttcgcgggaggcgatgcaggtgatgcctttgatggctttgactttggcgacgaccccagcgacaagttttttacctcgcataacgggatgcaattcagcacctgggacaacgacaacgataaatttgagggcaattgcgctgaacaagacgggagtgggtggtggatgaacaagtgtcacgcgggacacttaaatggagtttattaccaggggggtacatacagcaaggcaagtacacccaacggatacgataacggaatcatttgggcaacttggaaaacccgatggtactccatgaagaaaacaaccatgaagatcatcccatttaaccggctgaccatcggcgagggccaacagcaccatctcggcggggctaagcaagttagacccgagcatcccgccgaaaccgaatacgattctctgtaccctgaggatgacctt

SEQ ID NO: 209830 - DNA, 1359 bp, Artificial Sequence
  derived and/or modified sequence
atgtcgtggtcgctacatccgcgtaatttaatactatatttttatgcgttactatttttatcgtcgacgtgtgttgcgtatgttgcgacgcgagataattgttgtatattagatgaacgatttggttcgtattgtccgacgacgtgtggtatagcggattttctatcgacgtatcaaacgaaagtagataaagatttacaatcgctagaagatatactacatcaagtagaaaataaaacgtcggaagtaaaacaactaataaaagcgatacaattaacgtataatccggatgaatcgtcgaaaccgaatatgatagatgcggcgacgctaaaatcgcgtaaaatgttagaagaaataatgaaatatgaagcgtcgatactaacgcatgattcgtcgatacgttatctacaagaaatatataattcgaataatcaaaaaatagttaatttaaaagaaaaagttgcgcaactagaagcgcaatgtcaagaaccgtgtaaagatacggtacaaatacatgatataacgggtaaagattgtcaagatatagcgaataaaggtgcgaaacaatcgggtctatattttataaaaccgttaaaagcgaatcaacaatttctagtttattgtgaaatagatggttcgggtaatggttggacggtttttcaaaaacgactagatggttcggtagattttaaaaaaaattggatacaatataaagaaggttttggtcatttatcgccgacgggtacgacggaattttggctaggtaatgaaaaaatacatctaatatcgacgcaatcggcgataccgtatgcgttacgtgtagaattagaagattggaatggtcgtacgtcgacggcggattatgcgatgtttaaagttggtccggaagcggataaatatcgtttaacgtatgcgtattttgcgggtggtgatgcgggtgatgcgtttgatggttttgattttggtgatgatccgtcggataaattttttacgtcgcataatggtatgcaattttcgacgtgggataatgataatgataaatttgaaggtaattgtgcggaacaagatggttcgggttggtggatgaataaatgtcatgcgggtcatctaaatggtgtttattatcaaggtggtacgtattcgaaagcgtcgacgccgaatggttatgataatggtataatatgggcgacgtggaaaacgcgttggtattcgatgaaaaaaacgacgatgaaaataataccgtttaatcgtctaacgataggtgaaggtcaacaacatcatttaggtggtgcgaaacaagtacgtccggaacatccggcggaaacggaatatgattcgttatatccggaagatgatcta

SEQ ID NO: 209831 - DNA, 1359 bp, Artificial Sequence
  derived and/or modified sequence
atgtcatggtcgctgcatccccggaatctgatcctgtacttttacgccctgctcttcctgtcctctacttgcgtggcatacgtggccactcgagacaactgctgcatcctggacgagagatttggatcctactgcccgaccacgtgtggcatcgccgatttcttgagtacctaccagactaaggtcgacaaggaccttcagtcgctcgaagatattctgcaccaagtggagaacaagacctccgaggtgaagcagctgattaaggctatccagctgacttacaatccggacgagtcgtcgaagccaaacatgattgatgcggccaccctgaagagcagaaagatgctcgaagaaatcatgaagtacgaggcttccatcctcactcatgactcctccattcggtacctgcaggaaatctataactctaacaaccagaaaatcgtgaacctgaaggagaaagtggctcagctggaagcacagtgccaggagccgtgcaaggacactgtgcagatccacgatatcaccgggaaagattgccaggatatcgctaataagggagcgaaacagagcgggttgtacttcatcaagccgctcaaggccaaccagcagtttctggtgtactgcgagatcgacgggagcggaaatgggtggaccgtgtttcagaagcgcctcgatgggtccgtcgacttcaagaagaactggatccaatacaaggaaggatttggacacctgtccccgaccggaaccactgaattctggctgggcaatgaaaagatccacctcatctcgacgcaaagcgcgattccttacgcgctgagagtggagctcgaggactggaacggacgcacctcgaccgcagattacgccatgtttaaggtgggacctgaagccgacaagtaccggctgacctatgcctacttcgctggcggagacgcaggcgacgcttttgatggatttgacttcggagacgacccgtctgacaagttctttacttcacacaacggaatgcagttctcgacgtgggacaatgataatgataagttcgagggaaattgcgcagaacaggatggctcaggctggtggatgaacaaatgccacgctggccatcttaacggagtgtactaccaaggagggacttactcgaaggcgtcgacccctaatggctacgataatggcatcatctgggccacctggaaaactcgctggtactcgatgaagaaaactactatgaagattatccctttcaatcgccttaccatcggcgagggccaacaacaccaccttggaggagccaaacaggtgcggcccgaacatccagctgaaactgagtacgactccctctaccctgaagatgacctg

SEQ ID NO: 209832 - DNA, 1359 bp, Artificial Sequence
  derived and/or modified sequence
atgagttggagtctacacccccggaatctaatcctttatttttacgcgctgctatttttgagttccacctgtgtcgcctatgtcgctacacgcgataactgttgcattttggatgaacggttcgggtcgtattgcccaactacttgtggaatagcagatttcctgtctacataccagaccaaggtggacaaagatttgcagtccttggaggacatactccatcaggtggagaacaaaaccagtgaggtgaaacagttgatcaaagcgattcagctgacatataatccagacgaaagctcgaagcctaatatgattgacgctgcgactctgaagtcccggaagatgctggaggaaataatgaagtatgaggcttccatcctgacccatgactctagtataaggtatttacaggaaatttataactccaacaatcagaagattgtcaatttaaaagagaaggtggctcagttggaggcacagtgccaggaaccctgtaaagacaccgtccagattcacgacataactggtaaggactgtcaagacattgccaataaaggagccaaacaatccggtttatacttcataaaacctctgaaggcaaatcagcaattcctcgtgtactgcgagatcgacggttcgggcaatggctggacagtgttccaaaaaagactggacgggtccgtcgacttcaagaaaaactggattcagtacaaggaaggctttggacacctgagtccaacaggcacaacagagttttggctggggaacgaaaagattcatcttatttccacacaaagtgctatcccttacgccctcagagtggaactggaagattggaatggtcggactagtactgccgactacgccatgttcaaggtaggtccagaagctgacaagtatcggctgacatacgcatatttcgccggaggcgatgcaggagatgctttcgacgggtttgactttggcgatgacccctccgacaagttcttcacatctcacaatggtatgcaatttagtacctgggacaatgacaacgataagtttgaaggcaactgtgctgaacaagatggctcaggatggtggatgaacaaatgccacgcaggtcacctaaacggcgtgtattaccagggtggtacctactctaaggcatcaaccccgaatggctacgataacgggatcatctgggctacatggaaaacccggtggtacagtatgaaaaaaactactatgaaaatcattcctttcaatcgcctgacaatcggcgaaggccaacagcaccacctgggcggagcgaaacaggtgcggcctgagcatcccgctgaaacagagtacgacagcctttatcccgaagatgatctc

SEQ ID NO: 209833 - DNA, 1359 bp, Artificial Sequence
  derived and/or modified sequence
atgagctggtctcttcatccacgtaatctgattctctatttctatgccttgctcttcctaagctccacatgtgtggcctacgtggccaccagggacaattgctgcatcctcgacgaacgctttggatcttattgccctactacatgtggcattgccgatttcctgagcacataccagacaaaggtggacaaagatctccagtctctcgaggacattttacatcaagtcgaaaacaaaacctctgaggtaaagcagctcataaaagcaatccagctgacctataacccagatgaatcttccaagccgaatatgatcgatgctgccaccctgaagtcgcgaaaaatgctcgaggaaataatgaaatacgaggcctccatcctgacccacgactcttccattcgataccttcaagaaatctacaattccaacaatcagaagatagttaaccttaaggagaaggttgcccagcttgaagcacagtgtcaagagccatgtaaagataccgtgcagatccatgacattactgggaaggattgtcaagacattgccaataaaggtgcaaaacagagtggactgtacttcatcaagcccctgaaagcaaatcagcaattcttggtgtactgcgagatagatggcagcggcaacggttggactgtgtttcagaagagactggatggaagcgtcgacttcaagaagaattggatccagtacaaggaagggttcggacatttaagccctacaggaacaaccgagttttggctgggaaatgaaaagattcacctgatctccacgcagtccgcgattccttacgcacttagggtggaacttgaagactggaatgggagaaccagcaccgccgattacgccatgttcaaggttggtccagaagccgataaatatagactcacttatgcctactttgccgggggcgacgctggtgacgcattcgatggattcgactttggggatgatccaagcgataaattttttacatcacataacgggatgcaattcagcacctgggacaatgataacgataaattcgagggcaattgtgcagaacaagacggcagcggctggtggatgaataaatgccacgccgggcacctgaatggcgtgtactaccaaggcggaacctacagcaaggcatcaacgcccaatgggtatgataatggcataatctgggctacttggaaaaccagatggtattctatgaaaaagaccaccatgaagatcattcctttcaaccgcctcacaatcggagaggggcagcagcatcaccttgggggcgcgaagcaggtgcgtccagagcatcccgccgaaacggagtacgacagtttgtaccctgaggatgatctg

SEQ ID NO: 209834 - DNA, 1359 bp, Artificial Sequence
  derived and/or modified sequence
atgagctggtccctgcatcctcgcaaccttatcctgtatttctacgcgttgttgttcttgtctagcacgtgcgtggcctacgtggccactcgcgataattgctgcattctggatgaacggttcggatcgtactgcccgactacttgcggaattgcggatttcctttcgacctaccagaccaaagtggacaaagatctccaatcgctcgaagatatcctgcaccaagtggaaaacaaaaccagcgaggtcaaacagcttatcaaagccatccagctcacctacaatccggacgaatcgtccaagccaaatatgattgacgcagccaccctcaagagtagaaagatgctggaggagatcatgaagtacgaagcctcgatcctgactcacgactcaagcatccgctacctgcaggagatttacaactccaacaaccagaagatagtgaatctgaaggaaaaagtggcccaattggaagcacaatgtcaagaaccatgcaaggacaccgtccaaatccatgacatcaccggcaaggattgccaagacatcgctaataagggggccaagcagtccggtctgtactttatcaagccgctgaaggctaaccagcagtttctggtctactgtgagatcgatgggtccggaaacggttggactgtttttcagaagaggctcgatggtagcgttgacttcaaaaagaattggattcagtacaaagaaggcttcggccacctctcccccaccggaactactgaattctggcttggtaatgagaaaatccacctgatctcgacccaatccgcgatcccatacgccctccgggtggagttggaggactggaatggacgcacctccaccgcagattacgctatgtttaaggtgggacctgaagctgataagtatagactcacgtatgcctacttcgccggcggagacgccggggatgccttcgacggattcgattttggagacgacccttcagacaagttcttcacttcccacaatggaatgcaattctcgacttgggataacgataacgataagttcgagggaaactgtgctgaacaagacggatcaggatggtggatgaataagtgccatgccggacacttgaacggggtctactaccaaggaggaacttactccaaagcatcgacccccaacggatacgataacgggatcatctgggccacctggaaaactaggtggtacagcatgaaaaagaccacgatgaagatcattcctttcaatcggcttactatcggagaaggtcaacaacatcacctcggaggtgccaagcaagtccgcccagaacaccctgccgaaaccgagtacgactcgctgtaccctgaggacgatctg

SEQ ID NO: 209835 - DNA, 1359 bp, Artificial Sequence
  derived and/or modified sequence
atgagctggtcactccaccctcggaacctcatcctgtacttctatgcactgctgtttctctcttctacttgcgtcgcctacgtggctacccgagacaactgttgcatcctggatgaaaggtttggcagctattgtccaacgacctgcggaattgcagatttcctgtccacctatcagacaaaagtggacaaggacttgcaaagccttgaggacattctccatcaggttgagaataagacttctgaagtcaagcaacttattaaagcgatccagttgacatataatccagatgaatcttccaagccaaatatgatagacgccgccacgcttaagagcaggaagatgctggaggagatcatgaaatatgaggctagtatactgacgcatgactcatccatcagatacttgcaggaaatctataatagcaataatcagaagattgtgaatctcaaagagaaagtggctcagctggaagcccagtgtcaggagccctgcaaggacaccgtgcagattcacgacatcaccggcaaggactgccaagatatcgccaataagggggccaaacaatctggcctgtacttcatcaagccactgaaagcgaaccaacagtttctggtctattgcgaaatagacgggtccggaaatggatggacagtgttccagaagagacttgacgggtccgtagactttaagaaaaactggattcagtataaggaaggatttggtcacctctcacctaccggaaccaccgagttctggctcgggaatgaaaagattcacctgatctcaacgcagtcagctatcccttacgcccttcgagtcgagctggaagattggaatggcagaacaagcactgccgactacgccatgttcaaagtcggcccagaggcagacaagtatcgactgacttacgcatacttcgcaggcggtgatgctggcgatgcattcgatggcttcgacttcggggacgatccaagtgataagttcttcacatcccataacgggatgcaatttagtacttgggacaatgacaacgataagttcgagggcaattgcgcagaacaggatggctccggctggtggatgaacaaatgccacgctggccatctgaatggcgtgtattaccagggcggaacttatagtaaggcttccacgcctaacggttatgacaacggtataatctgggctacatggaaaacgcggtggtattccatgaaaaagacaaccatgaagataatcccctttaatcggcttaccatcggggaagggcagcagcaccatctcgggggcgctaaacaagttcggcccgagcaccccgctgagaccgaatatgatagcctgtatccggaagacgacctt

SEQ ID NO: 209836 - DNA, 1359 bp, Artificial Sequence
  derived and/or modified sequence
atgagctggagcctccatccaagaaacctgatcctgtacttctacgctctgctttttctgtcctctacatgcgtcgcttacgtagctaccagggataactgttgcatactggatgaaagatttggaagctactgtcccacaacctgcggtattgctgattttctgagcacctaccagactaaggtggataaagatttgcagtccctcgaagacatactccaccaggttgagaataaaacaagcgaggtgaagcaactgatcaaagccatacagctcacctataaccccgacgagagcagcaagcccaacatgattgacgctgctaccctcaagtcacgcaaaatgctggaggagatcatgaaatacgaagcgagtattctgactcatgactcatcaatcaggtatctgcaggaaatctacaactccaacaaccagaaaatagtgaacctgaaggaaaaggtggcccaactcgaggcacagtgccaggagccttgcaaggataccgtgcagatacacgatatcaccggaaaagactgccaggacatcgctaataaaggggctaagcagtccgggctttacttcatcaagccactcaaagcaaaccagcagttcctggtttactgtgaaatagacggttccggaaacgggtggacagtgttccagaagaggctggatggttctgtggacttcaaaaaaaactggattcagtacaaagagggatttggccatttgagcccaaccggcacaaccgagttttggctcggcaacgagaaaatccacctcatcagcacacaatctgctattccctatgccctcagagttgaactagaagattggaacgggcgcacatctaccgccgattatgcgatgtttaaggtggggcctgaagcagataaatataggcttacatacgcatacttcgcaggaggcgatgccggggatgctttcgatggctttgactttggagacgacccttcggacaaattcttcacttcacacaacggtatgcagttttccacttgggacaatgacaacgataaattcgagggcaactgcgcagaacaggatggatctggatggtggatgaataaatgtcatgcaggacatttgaacggagtgtactatcaaggcggaacctacagcaaggctagcactccaaatgggtatgacaatggaatcatctgggctacatggaaaacgcggtggtacagtatgaagaagactactatgaagatcatcccttttaatcgactgacaatcggtgagggccagcagcaccatttagggggcgccaagcaggttaggcctgagcatccggcagagaccgagtacgatagcctgtatccagaggatgacttg

SEQ ID NO: 209837 - DNA, 1359 bp, Artificial Sequence
  derived and/or modified sequence
atgtcctggtccctccatccgcggaatctcatcctttacttctatgcattgctgttcctttcctccacctgtgtggcgtatgtggccacccgggacaattgctgcatcctggacgagcggtttggttcttactgtccaacaacctgcggaatcgcagactttttgagcacctaccagactaaggtggacaaggatctgcagtccctggaggatatcctgcaccaggtcgaaaacaaaacatccgaagtaaaacagttaatcaaggctattcagctcacctacaatcccgacgaatcatctaaacccaatatgatcgacgctgctaccctgaagtccaggaagatgctagaagaaatcatgaagtacgaagcttcaatactaacccacgattcatcgattcgctatttgcaggaaatctataacagcaataatcaaaaaatagtgaatctgaaggaaaaagtcgcccagctagaggcccagtgccaggagccatgcaaggatactgtgcagattcacgacatcacagggaaggattgtcaagacatcgcgaataaaggagcgaaacagtcaggtctctacttcattaagcccttgaaggcgaatcagcagtttctcgtgtactgtgagatagatggttctggaaacggctggacggtcttccagaagagactggatggttccgttgacttcaagaagaattggatacagtataaagaagggtttggtcatttgtcccccacagggaccaccgaattctggctgggtaacgaaaagatacatctcatttcaactcaaagcgcaattccctatgccttgcgggtggagctggaggactggaacggaagaacttccactgccgactacgctatgttcaaggttgggcctgaagcagacaaataccggcttacatacgcctactttgccggtggggacgccggagacgcattcgatgggtttgactttggcgacgatccttccgataaattctttacgtcccacaatggtatgcagttttccacttgggacaacgacaatgataagtttgaaggaaattgtgccgaacaagacgggtccggctggtggatgaacaagtgccacgctggccatctgaatggagtatattaccagggcggcacatactctaaagcatccactcccaatggatacgacaatggcatcatctgggctacgtggaagacccgatggtactccatgaaaaagaccactatgaaaataatcccatttaacaggctcactatcggcgaaggccagcagcaccacttaggcggcgccaaacaagttaggccggaacacccggcggagaccgaatacgacagcctgtatcccgaggacgacctg

SEQ ID NO: 209838 - DNA, 1359 bp, Artificial Sequence
  derived and/or modified sequence
atgtcctggtctctgcaccctcgaaatctcattctgtacttttatgcgctgctgttcttatcttctacttgcgtggcctatgttgcaaccagggataactgttgcatattggatgagagatttgggtcctactgtccaactacatgtgggatagccgattttttgagcacttatcaaactaaagtcgataaagatctccagagccttgaggacattctccatcaagtggagaacaagacatcagaagtgaagcagctcatcaaggctattcagttgacttacaaccccgacgaatcctcaaagcctaatatgattgatgctgccaccctgaaaagccgaaaaatgctggaagagatcatgaagtatgaggcaagtatccttactcatgatagttcaattcgatacttacaggagatctataatagcaataaccagaaaatcgtgaacttgaaggaaaaggtcgcccagctggaggcgcagtgtcaggaaccctgcaaggataccgtgcagattcatgacattaccggaaaggactgtcaggacatcgccaacaagggggccaaacagtccggactttattttattaagccgctgaaggctaatcaacagtttctggtgtattgtgaaatcgatgggagtgggaatggctggactgtgttccagaaacgactggatggaagcgtggactttaaaaagaactggattcagtataaagagggcttcggccatctgagccccaccggcaccactgagttctggttaggtaatgaaaagatccatttgatctccacgcagagtgccatcccttacgccctgcgcgtggaacttgaagactggaacggacgcacgtcgacagcggattacgccatgttcaaggttggacctgaggcggataagtaccgactcacctatgcttatttcgccgggggcgacgccggtgacgccttcgacgggtttgactttggagatgatcccagcgataaattctttaccagccataacggaatgcagttttcaacctgggacaatgataatgataaatttgaggggaactgtgccgaacaggatggttccggatggtggatgaataaatgccatgcaggccaccttaacggcgtctattatcagggggggacttatagcaaggcgagcacccccaatggctatgataacggcattatctgggcaacgtggaagacacggtggtattcaatgaagaagaccaccatgaaaataattccatttaatagattgactattggagaagggcagcaacaccacttgggcggcgcgaaacaggtccggccagaacatcctgccgaaaccgagtacgatagtctgtatccagaagatgacctg

SEQ ID NO: 209839 - DNA, 1359 bp, Artificial Sequence
  derived and/or modified sequence
atgtcgtggagtctccacccaagaaatttaatactttatttttacgctctcctcttcctgtcttctacttgcgtcgcttatgtagctactagggataactgttgcatattggatgaacgatttgggtcatattgcccaactacttgtggaatcgcagattttctgtctacttatcagactaaagttgataaagatctgcagtcccttgaagatatactgcaccaggtggaaaataaaacatcagaggtcaagcagctcatcaaggcaatccagctgacatataatcccgatgaatcatccaaaccaaacatgatcgatgccgcaactctgaaatcacgaaaaatgctcgaggaaatcatgaaatatgaagcctctatcctcacacacgattcctccattcgctaccttcaggaaatctacaattctaataatcagaaaatcgtgaatctcaaagaaaaggtggctcagcttgaagcacagtgtcaggaaccctgtaaagatacagtccagattcatgatatcacagggaaagactgtcaggatatcgcaaacaaaggggccaaacagtcgggactgtattttatcaaaccccttaaagccaaccagcagttcttggtttattgtgagatcgatggatcgggaaacggatggacggtgtttcagaaaaggttagatgggtccgtagattttaaaaagaattggatccagtataaagaaggattcgggcacctttctcccacaggaacaacagaattctggctcggaaacgagaaaatacatctcatctcaactcagtctgccatcccatacgcacttcgcgtggaattagaagactggaacgggcggactagtacagccgattacgccatgttcaaagtaggaccagaagccgataagtaccgactcacatatgcatattttgctggaggggatgcgggagacgctttcgatgggtttgatttcggagatgatcctagtgataaatttttcacttctcacaatgggatgcagtttagtacatgggataacgataacgataagttcgaagggaattgcgctgagcaggatggatcgggatggtggatgaacaaatgtcacgcgggacatctcaacggagtgtattatcagggggggacttattctaaagcatctacaccaaatgggtatgataacgggataatctgggccacttggaaaactagatggtattctatgaagaaaacaactatgaagatcatccccttcaatcgactgactattggagagggacagcagcaccacctgggaggagctaaacaggtgcggcctgaacatcccgccgaaactgaatatgacagtctatatcctgaggatgatctc

SEQ ID NO: 209840 - DNA, 1359 bp, Artificial Sequence
  derived and/or modified sequence
atgtcctggtcgcttcatccaagaaaccttatcttgtacttctacgcacttctttttctctcttcgacgtgtgtggcttatgtggccacccgagacaactgttgtatccttgatgaacggtttggctcgtactgtccaactacttgtgggatcgctgattttctttcgacgtatcaaacgaaagttgataaggatcttcaatcccttgaggacattttgcaccaagtggagaataagacgtcggaagtcaagcagcttatcaaggcaattcaactgacctacaacccagacgaatcatccaaacctaacatgattgatgctgcgactctgaagtcaagaaaaatgctcgaagagattatgaaatacgaggcatccatactgacccacgactcatccatcagataccttcaagaaatctacaatagcaacaaccagaagattgtgaacctcaaggagaaggtggcacaacttgaagcgcagtgtcaagagccgtgcaaagacacggtgcaaattcacgatattaccggtaaggactgtcaggatattgccaacaaaggggcaaagcagtcaggactgtacttcatcaagcctctgaaggccaatcagcagttcctggtgtattgcgaaatagacggctcaggtaatggatggaccgtctttcagaagcgactcgatggctccgtggacttcaagaaaaactggattcaatacaaggagggttttggacatctgagcccgaccggaaccactgaattttggttgggtaatgagaagatccatcttatttcaacccaatcggctatcccttacgccttgagggtcgaactggaagattggaacggtcggacttcaaccgcagattatgcaatgtttaaggtgggacctgaggcagataagtatcgtctgacctatgcctactttgcgggcggtgacgcaggagatgcgttcgatgggtttgatttcggcgatgatccctcagataagtttttcaccagccacaatgggatgcagttttccacttgggataacgataacgacaagtttgaaggtaactgcgcggaacaggatggctccggatggtggatgaacaaatgccatgccggacatttgaacggggtgtactaccaaggaggaacttactcgaaggcatccactcccaacggctacgataatgggattatctgggctacttggaaaacccgctggtactccatgaagaaaaccaccatgaagattatccctttcaatcgccttactattggtgagggtcaacaacaccatctgggaggagcaaagcaagtcagaccagaacatcctgctgaaaccgagtacgattccctctacccggaagatgatctc

SEQ ID NO: 209841 - DNA, 1359 bp, Artificial Sequence
  derived and/or modified sequence
atgtcctggtcccttcacccccgaaaccttattctttacttctacgcacttctgtttctctcgtcaacctgtgtggcctacgtcgcaacgagagacaactgttgtattctcgatgagcggtttggaagctactgcccaaccacctgcggcattgctgattttctgtcaacctaccagactaaagtggataaggatctgcagtcccttgaggatatccttcatcaagtggaaaacaagacttcggaggtcaagcagttgataaaggcaatccaactgacttacaatcccgatgagtcgtcaaaacctaacatgattgatgccgccacgctgaaatcacgtaagatgctcgaagaaatcatgaaatacgaagcatcgattcttacccatgactcctcgatccggtacctccaagagatttacaactccaataatcaaaagatcgtgaatctgaaggagaaagtggcacagctggaagcacagtgtcaagaaccttgcaaggataccgtgcagatccatgatatcactggaaaggactgccaggatatcgccaataagggtgccaaacaatccggactgtactttatcaaaccacttaaggcaaaccaacaatttctcgtgtattgcgaaattgacgggtcaggaaacggctggacggtgtttcaaaagagattggatggaagcgttgactttaagaagaactggatccaatacaaggagggttttggtcatctctccccaactggaacgaccgaattttggctgggtaacgagaaaattcatctgatttctactcagtccgcaattccttacgcccttagggtcgaacttgaagattggaatggcaggacctctaccgcagactatgccatgtttaaggtcggcccagaggcagataagtaccgactcacttatgcctacttcgctggaggcgacgctggagatgcatttgatggctttgactttggagacgatccctcggacaagtttttcacttcccataatgggatgcagttttcaacctgggataacgacaacgacaaatttgaagggaactgcgcagaacaagacggctccgggtggtggatgaataagtgtcatgcaggtcacctgaatggggtgtactaccagggtggaacctactcaaaagcatcgaccccaaacggatacgataatggaatcatttgggcgacttggaaaactcggtggtactcgatgaaaaagaccactatgaagataatcccgtttaacagacttactattggggaaggtcaacaacaccatctgggaggagcaaagcaagtgaggccagaacaccctgccgaaaccgaatatgatagcctctatccagaggacgacctg

SEQ ID NO: 209842 - DNA, 1359 bp, Artificial Sequence
  derived and/or modified sequence
atgtcctggagccttcatccacggaatctcatcctctacttctacgccctgcttttcctctcatccacttgtgtggcctacgtcgcaacccgcgataactgttgcatccttgacgagagattcgggtcgtattgccccaccacctgtggcattgccgacttcctctcgacctaccagaccaaggtggataaagatctgcagtccctggaagatatccttcaccaagtggagaacaagacttccgaggtgaagcaactgatcaaagcaatccagctgacctacaatccggacgaatcgtcgaagccaaacatgatcgacgcggctacgttgaagtcgcggaagatgcttgaagaaatcatgaagtacgaggcgtcaatactgacccatgattcctcaatccgctacctgcaagaaatctacaactcgaacaatcagaagattgtgaatctcaaggaaaaggtggcgcagctggaggcacagtgccaggagccatgcaaggacaccgtccaaatccacgacatcacgggaaaagactgccaggacatcgcgaataaaggagctaaacagtcgggcctgtacttcattaagcccctcaaagccaaccagcagttcctcgtctactgcgagatcgatggaagtggaaacggttggactgttttccaaaagcggctggatggatccgttgacttcaagaagaactggatccaatacaaagaaggatttggacacctgtcgccaaccgggactaccgagttttggctcggaaatgagaagatccatttgatttcgactcaatccgcaattccgtacgcacttagagtcgaactcgaagattggaacggtcggacctcaacggccgactacgccatgttcaaagtcggtcccgaggcggataagtaccgtctcacttacgcgtactttgcaggtggagacgccggagacgccttcgacggatttgatttcggtgatgatccatcggacaagttctttacctctcacaacggcatgcagttctccacctgggataacgacaatgacaaattcgagggaaactgcgctgaacaagatggcagcggatggtggatgaataagtgccatgcgggccacctgaacggagtgtactaccaaggaggtacctactccaaggcttccactcccaatggatacgacaatggaattatctgggcaacgtggaaaactcgctggtacagcatgaaaaagaccactatgaagattatcccttttaaccgcctgactatcggtgaaggacaacaacatcatttgggaggagccaaacaggtgcggccggaacatccagctgaaactgagtacgattccttgtatccagaagatgacctt

SEQ ID NO: 209843 - DNA, 1359 bp, Artificial Sequence
  derived and/or modified sequence
atgagctggtcattgcaccctaggaatctgattctttatttctatgccctgttgtttttgagcagtacgtgcgtggcgtatgtggccacaagagataattgttgcatcctggacgaacgcttcgggagctactgcccgactacctgtgggatcgctgatttcctctcaacttatcagaccaaggtcgacaaggatcttcagagtttggaggacattctgcatcaggtagagaacaaaacctctgaggtgaagcagcttatcaaagcaattcagcttacatacaacccagacgaatccagtaagcctaatatgattgatgctgccactctgaaatctaggaagatgctcgaagagattatgaagtacgaggcatcaatccttacccacgatagcagtatacggtacctccaagagatttacaacagcaataatcaaaaaatcgtgaatctgaaagagaaggtcgcacagctggaagcacaatgccaggagccatgtaaggataccgtacagatccatgatatcactgggaaggattgccaggatatcgcgaacaagggtgctaagcagtctggcctctatttcatcaaacctctgaaagccaatcagcagtttctcgtatactgtgaaatagacgggtctgggaatgggtggactgtgttccagaagagactggacggaagtgtcgacttcaagaagaactggattcagtacaaggagggattcggacacctgtctcccaccggaacaaccgagttctggctcggtaatgagaagatccatttgatcagtactcagagcgcaatcccctacgcgttgagggtcgaattggaggattggaatggccggacctccaccgccgactacgccatgtttaaggtggggcctgaagctgataagtatcgactgacatacgcatactttgccgggggggacgccggtgacgcttttgacggatttgacttcggcgatgacccatcagacaagttctttacttcccacaacgggatgcagtttagtacttgggataatgacaatgacaaattcgaaggaaattgtgccgagcaggatggaagtggatggtggatgaataaatgtcacgcggggcatctgaacggcgtatactaccagggaggtacatatagtaaagctagtacaccaaatggctacgataacggtatcatatgggccacatggaagactcgatggtatagcatgaagaagacaacaatgaaaatcatccccttcaatcgcctgaccatcggcgaggggcagcagcaccatcttggaggagcgaagcaggtgcgccccgagcacccagcggaaacagagtatgatagtttgtatccagaagacgatctg

SEQ ID NO: 209844 - DNA, 1359 bp, Artificial Sequence
  derived and/or modified sequence
atgtcctggtcgttgcatccccggaatctgatactgtacttttacgctctgctctttttgtcctccacttgtgtggcatacgtcgccactagagataactgctgcatactcgatgagcggttcggatcgtactgccccaccacttgcgggatcgcagattttctgtccacctaccaaaccaaggtggataaagatcttcagtccctcgaagatattcttcatcaggtggaaaacaaaacctccgaggtcaagcagctgattaaggcaatccaactgacttacaaccctgatgaatcctcaaagccaaacatgattgacgcagcaaccttgaaaagccgcaagatgctcgaagagatcatgaaatacgaagcctctatcctcacgcacgattcatccatcaggtacctgcaagagatttacaacagcaataatcagaaaatagtgaaccttaaggaaaaggtcgctcagcttgaagcccaatgtcaggagccttgtaaggataccgtgcaaattcacgatatcactggaaaggattgtcaggatattgccaacaaaggagcgaagcagtcggggctctacttcattaagcccctcaaagcgaatcaacaattcctggtctactgtgaaatagatggcagcgggaacggctggaccgtgtttcagaaaagactggatggatcggtggatttcaaaaagaactggattcagtacaaggaggggttcggtcatctgtcacccaccggtaccactgaattttggctcggtaacgagaaaatacacctgatttcgacccagagcgcaattccatacgccctcagagtcgagctggaggattggaacggcagaacttcgaccgcagactacgcgatgttcaaggtgggtcctgaagcagataagtatcgacttacttacgcctacttcgcaggcggtgacgccggagatgcatttgatggttttgattttggagacgacccaagcgacaagttctttacctcgcacaacgggatgcaatttagcacttgggataacgataatgacaagtttgaggggaattgcgcagaacaggacggttcaggatggtggatgaacaaatgtcatgcaggtcatcttaacggtgtgtactaccagggtggtacctactcaaaggcgagcacccctaatggctacgacaacggtataatctgggcaacctggaaaacccggtggtactcaatgaaaaagacgaccatgaagattattccttttaaccgcttgactatcggagaaggccagcagcaccacctcggtggggccaagcaggtgcggcccgagcatcccgccgaaactgagtacgactccctttaccccgaagatgacctg

SEQ ID NO: 209845 - DNA, 1359 bp, Artificial Sequence
  derived and/or modified sequence
atgtcgtggtcattgcaccctcgaaaccttattctgtacttctatgcacttctgttcctttcctccacctgtgtcgcatacgtggcgactcgagataactgttgtattctggacgagcggttcggctcgtactgtcctaccacctgtggaattgcagactttctctctacctaccagactaaggttgataaagatttgcagtccctggaagatattcttcatcaagtggaaaacaagacttccgaagtcaagcagctgatcaaggcaatccaattgacctacaacccagatgaatccagcaagccgaatatgatagacgccgcaaccctgaagtcccggaaaatgctggaagaaatcatgaagtacgaagcctcaattctcactcatgactcgtcaatccgctatcttcaagaaatctacaactcgaacaaccaaaagattgtgaacctgaaagaaaaggtggcccagctggaggcacaatgccaggaaccatgtaaagataccgtgcagattcatgatattactggaaaagactgccaagatatcgcaaacaagggtgcgaagcagtcaggcctgtatttcatcaagcctctcaaggccaaccaacaatttctggtctactgcgaaattgatggatcaggcaatggatggaccgtctttcaaaaaagactcgatggcagcgttgatttcaagaagaattggattcaatacaaagagggcttcggccatttgtcccctaccgggactactgaattctggctgggaaacgaaaagatacacctgatcagcactcagtcggcaattccttatgcactgcgggtggaactcgaggattggaatggacggacttcgaccgcagactacgcaatgtttaaagtgggaccagaagcagacaagtacaggcttacctatgcctactttgcaggtggtgacgcaggagatgcctttgatggctttgactttggtgatgatccaagtgacaagtttttcacttcccataatggcatgcaattctccacttgggataacgacaatgacaagtttgagggcaattgtgcggaacaggatggatcaggatggtggatgaacaagtgccacgcgggacatctgaacggggtgtactaccagggaggaacctactccaaagcctcgaccccgaatggatacgataatggaattatctgggcaacctggaaaacgagatggtactccatgaaaaagaccacgatgaagatcatcccttttaacagacttactattggggagggacaacaacatcacctgggtggggccaaacaggttcgaccagagcaccctgcagagacggaatatgattccctctaccccgaagatgatctt

SEQ ID NO: 209846 - DNA, 1359 bp, Artificial Sequence
  derived and/or modified sequence
atgtcctggagcctgcacccgcgcaacctcatcctgtacttctacgccttgttgttcctttcctcaacttgcgtggcatacgtggcaactcgcgataactgctgcatcctggacgaaaggttcggctcgtattgtccgaccacttgtggaatcgcggatttcctgtcaacctaccagaccaaggtggacaaagacctgcagtcgctggaagatatcctgcaccaagtggagaacaagaccagcgaagtcaagcagctgattaaggccatccaactgacctacaacccggacgaatcgtcgaagcccaatatgattgacgccgccaccttgaagtcccgcaagatgctggaagaaatcatgaagtatgaggcgtccatcctgactcatgactcgagcatcaggtacctgcaggaaatctacaactccaataaccaaaagattgtgaacctgaaggagaaggttgcacagcttgaagctcagtgccaggaaccatgtaaggatacggtccagatccacgacattaccggcaaagactgtcaagatatcgcaaacaagggagccaagcagtcaggcctgtatttcattaagccactcaaggcaaaccaacagttcttggtgtactgtgaaatcgatggaagcggcaacggatggacggtgttccaaaagagactcgatggcagcgtcgatttcaagaagaactggatccaatacaaggaaggtttcggacacctctcgcccactggcaccacggagttctggttgggaaacgaaaagatccacctcatctccactcaaagcgcaatcccatacgctctgcgggtggagctggaggactggaacggaagaacttcaaccgctgactacgcgatgtttaaagtcggcccggaggctgacaaatatcgtctgacctacgcgtatttcgcgggaggagatgccggcgacgctttcgacggattcgacttcggtgacgatccgagcgacaaattcttcacttcccacaatggaatgcaattttctacctgggataatgacaacgacaagttcgaagggaactgcgcagaacaggatgggtccgggtggtggatgaacaagtgtcatgcaggacatctcaacggagtgtactaccagggcgggacgtacagcaaggcgtccaccccgaatggatacgacaatggcatcatttgggcaacctggaaaacgaggtggtactcgatgaaaaagaccactatgaagattataccgttcaaccgcttgaccatcggagaaggacaacagcatcacctcggcggggctaaacaggtgcgcccagaacatcctgcagaaaccgagtacgattcgctgtaccctgaggatgacctg

SEQ ID NO: 209847 - DNA, 1359 bp, Artificial Sequence
  derived and/or modified sequence
atgtcctggtccctccatcctaggaacctcatattgtacttttatgcgctcctattcctcagttccacatgcgtagcttatgtggctacaagagataactgctgcatcttagacgagagatttggatcttattgtccaactacttgcgggattgcagacttcttatctacttatcagacaaaagtggacaaagaccttcagtcactagaagatatacttcatcaggttgaaaataaaacttccgaagttaaacagctcatcaaagccattcagttgacatataaccccgacgaatcatccaaacctaatatgatcgatgcggccactcttaaatctagaaaaatgctcgaagaaatcatgaaatacgaagcgtccatccttactcacgattcttccattaggtatctacaggaaatatacaattctaacaatcagaaaattgtgaatctcaaagaaaaagtagcgcagctggaagcccagtgccaggaaccttgcaaagatacagtgcagatacatgacataactgggaaagactgtcaggatatagctaataaaggggccaaacagtcaggactttattttattaaacctctgaaagctaaccagcagttcttagtgtactgcgaaatagatgggtctgggaacggatggacagtttttcagaaacgcctcgatggatctgtggattttaaaaaaaattggatccagtataaagaaggattcggacatctctcccctactgggacaacagaattttggcttggaaacgaaaagattcatctgatatccactcagtctgccatcccatatgcgctaagggtggagttagaagattggaacggaagaactagtacagcagattatgcaatgtttaaagtgggacccgaggccgataaatatcggcttacatacgcttatttcgccggaggggacgccggggacgcattcgatggatttgattttggggatgatccatcggataaattcttcacatctcacaacgggatgcagttttcgacatgggataacgataacgataaatttgagggaaactgtgctgaacaggatgggtcagggtggtggatgaacaagtgtcatgcaggacaccttaatggggtatattaccagggagggacgtattctaaagcgagtactccaaatggatacgataacgggatcatatgggcgacatggaaaacacgatggtactcgatgaaaaaaactacaatgaaaatcattccctttaacagactcactatcggggaaggacagcagcaccatcttggaggggccaaacaggttagacctgagcacccagctgaaactgagtacgattcactctatccagaggatgatctg

SEQ ID NO: 209848 - DNA, 1359 bp, Artificial Sequence
  derived and/or modified sequence
atgtcctggtctctgcatccccgaaatttaattctctatttctatgctttgttgttcctttcgtctacatgtgtagcgtacgtagccacccgcgataactgctgtattctggatgagcgtttcgggtcctactgtcctacaacctgcggaatcgccgatttcctgtcaacataccagactaaggtcgataaagacctgcagagcctggaggacattctgcaccaagtggaaaacaaaacttccgaggtgaaacagcttataaaggcgatccagctcacgtataatccggatgagtcatccaaaccgaacatgattgatgcagccactctgaagtcccgcaaaatgttggaagagattatgaagtacgaggcctctattttgacgcatgatagttctatcaggtatctgcaggaaatatataacagcaacaaccagaaaattgtaaatctcaaggagaaggtagcccagctagaagcacagtgtcaggagccctgtaaggatacggttcagatacacgatattacgggcaaggattgccaggatattgccaataaaggggccaagcagagcggtctttactttattaagccacttaaagcgaatcagcagttcctcgtgtactgtgagatcgatgggtcgggcaacggctggacagtcttccaaaagaggctcgatggatcagttgatttcaagaagaattggattcaatacaaggagggcttcggtcacctgagcccgacaggtaccacggagttctggctggggaatgaaaagatccacttaataagtacccaatccgctatcccgtacgccctccgtgtcgagcttgaggactggaacggacgtaccagcacggcagattacgccatgttcaaggtgggcccggaggctgataagtataggctgacgtatgcgtacttcgcagggggggacgctggcgatgcttttgatggcttcgacttcggcgacgacccaagcgataagttctttacgagtcacaatggcatgcaattttccacgtgggacaacgacaacgacaaattcgagggcaactgcgccgagcaggacggaagcggctggtggatgaacaaatgtcacgccggtcatcttaacggcgtgtactaccagggggggacctactcaaaggccagcaccccaaatggctatgataatggcatcatctgggctacatggaaaacaaggtggtactccatgaaaaagaccaccatgaaaatcatacctttcaacagattgaccatcggcgaggggcagcaacatcatttgggcggtgctaagcaggtacggcccgagcatccagcggaaaccgaatatgattcactgtaccccgaggatgatctg

SEQ ID NO: 209849 - DNA, 1359 bp, Artificial Sequence
  derived and/or modified sequence
atgagctggtccctgcacccacgcaacctgatcctgtacttctacgctctcctgttcctgagctcgacctgtgtggcatacgtggcgaccagggacaactgttgcatcctggacgaacgcttcggaagctactgtcccaccacctgcggcatcgccgatttcctgtcgacttaccaaactaaggttgataaagatctccagagcctggaggatatcctgcaccaagtggaaaacaagacttcggaggtgaagcaactgatcaaggccatccagctgacctacaatcccgatgagtcctccaagccaaacatgatcgatgcggccaccctcaagtcacggaagatgctggaagaaatcatgaaatatgaggcctcgatcctgacgcacgactcgtcaatccgctatctgcaggagatctacaactccaataaccagaagatcgtgaacctcaaggaaaaggtggcccagctcgaggcgcagtgccaggagccatgcaaggatactgtgcagatccacgatattactggcaaagattgccaggacatcgctaacaaaggcgcgaagcaatccggactctacttcatcaaaccgctgaaggcaaaccaacaatttctggtgtactgcgagatcgacgggtccgggaatggatggaccgtgttccagaagcggctcgacggatcggtggatttcaagaagaactggattcagtataaggaaggattcggccacctgtcaccgacgggcaccaccgaattctggctgggaaacgaaaagatccatctgatctccactcagtcggcgatcccgtatgctctgagagtcgagctggaagattggaacggtcggacctcaaccgcagattacgccatgttcaaagtgggacctgaagcggacaaataccggctcacctacgcctatttcgcaggaggcgatgcgggcgacgccttcgacggtttcgatttcggagatgacccatcggacaagttcttcacttcgcacaacggcatgcagttcagcacctgggacaacgataacgacaaatttgaaggcaactgtgcagaacaggatgggtccggctggtggatgaacaagtgccatgctggtcatctgaatggggtgtactaccaaggaggaacttactcgaaggccagcaccccgaatggatatgacaacggaatcatctgggctacctggaaaacccgatggtactcaatgaaaaagacgaccatgaagatcattcccttcaatagactgaccattggagaaggtcaacagcatcatcttggaggagctaagcaggtgcgcccggaacacccggcagagacggagtacgattccctgtacccggaagatgacctc

SEQ ID NO: 209850 - DNA, 1359 bp, Artificial Sequence
  derived and/or modified sequence
atgtcctggagcctccacccacgcaatctgattttgtacttctacgcactgttgttcctgtcatcgacgtgtgtggcctacgtggccactagagacaattgttgcatcctggatgagcgcttcggaagctactgccccactacgtgcggaattgccgatttcctgtccacctaccaaaccaaggtggacaaggacttgcagagccttgaagatatcctgcaccaggtggagaacaaaacttcggaggtgaagcagcttatcaaggccatccaactgacttacaacccggatgaaagctccaagccaaatatgatcgatgctgccactctcaagtcccgcaaaatgttggaagaaatcatgaaatacgaagcgtcgatcttgactcatgatagctccatccgatacttgcaagaaatctacaatagcaacaaccagaagatcgtcaatctcaaggaaaaggtcgctcagctggaagcgcagtgccaagagccttgcaaggataccgtgcagatccatgacatcactggcaaggactgccaggacatcgcaaataagggagcaaagcaatccggactctacttcatcaagccgctgaaggcgaatcagcagttcctggtgtactgtgagattgatgggtcgggaaacgggtggaccgtgttccagaaacggctggacgggtctgtggacttcaaaaagaattggatacaatacaaggagggctttgggcacctgtccccgaccggaactactgagttttggctcggtaacgagaaaatccacctcatctccacgcagtccgccatcccgtacgccttgagggtggaactcgaagattggaacggacggacttcgaccgcagactacgctatgttcaaagtcggcccggaagctgataagtatcggcttacctacgcatacttcgcgggcggtgacgccggagacgcttttgacggatttgacttcggcgatgatccgtcggacaaattcttcacgagccataatggaatgcagttcagcacttgggacaacgacaacgacaaatttgaaggtaactgcgcagagcaggacggctccggatggtggatgaacaagtgccatgccggacaccttaatggtgtgtactaccagggaggcacttactcaaaggcatcaaccccgaacggatacgacaatggaatcatctgggccacttggaaaaccagatggtacagcatgaagaaaaccaccatgaagataattccattcaacagactcactatcggagaaggacaacagcatcacctgggcggagccaagcaagtgcgccccgaacaccccgcggaaacggagtacgactcgttgtacccggaagatgacctg

SEQ ID NO: 209851 - DNA, 1359 bp, Artificial Sequence
  derived and/or modified sequence
atgtcgtggtcgctgcacccgcggaacctgatcctgtacttctacgctctgctctttctgtcatccacctgcgtcgcctacgtggcgaccagggataactgttgcatcctggacgaacgctttggatcatactgcccgaccacttgcggaattgctgacttcctgtcgacctaccagactaaagtcgataaggatctccagagccttgaagatatccttcatcaggtggagaataagacctccgaagtgaaacaactgattaaggcaatccagctgacctacaatccagacgagtcctcgaagcctaatatgatcgacgctgctaccctcaagtcccggaagatgttggaagagattatgaagtacgaagcgtccatcctcactcacgactcttcaatccggtaccttcaagaaatctacaattctaacaatcagaagatcgtcaatctgaaggagaaggtcgcccagctcgaagcacagtgccaagaaccatgtaaggacactgtgcagattcacgacatcaccggaaaggactgccaagacatcgccaataaaggtgcgaaacaatcggggctctacttcattaagccgctgaaagcgaaccaacagtttctcgtgtactgcgagatcgacggctcaggcaacggatggacggtctttcaaaagcggctcgatggcagcgtcgacttcaaaaagaactggatccaatacaaagagggatttggacatctgagccctaccggaaccaccgagttctggctgggtaacgaaaagattcacctgatcagcacccagtcagctattccgtacgccttgcgcgtggaactggaagattggaacggccgcacttcgacggcggactatgctatgttcaaggtgggtccggaagccgacaagtacagacttacttacgcctacttcgcgggaggcgatgccggcgacgccttcgacgggttcgactttggggatgacccttcagataagttcttcactagccacaacggcatgcagttttccacctgggataacgacaatgataagttcgaaggaaactgcgctgaacaggacggttcaggatggtggatgaataagtgccacgctggacatctgaacggcgtgtattatcagggcgggacttattccaaagcctcaaccccaaacggatacgataacggcatcatctgggctacctggaaaactcggtggtatagcatgaagaaaacgactatgaaaatcataccgttcaaccgcctcactatcggagagggccaacagcaccaccttgggggagcgaagcaggtgcgccctgaacatccggccgaaactgagtacgattccttgtacccggaagatgacctg

SEQ ID NO: 209852 - DNA, 1359 bp, Artificial Sequence
  derived and/or modified sequence
atgtcgtggtccctccatccaaggaatctgattctctatttctacgcactcctgtttttgtcatcgacgtgcgtggcgtacgtcgcgaccagggacaactgctgcatcttggacgagcggttcgggagctactgccctactacgtgcggcatcgcagattttctgagcacttatcagaccaaggtggacaaggatctgcaaagcctcgaagatatactgcatcaggtggagaataagacgtcggaggtgaaacagttgatcaaggcgattcagttgacttacaatcctgacgaatcgtccaagccgaacatgatcgacgccgccaccttgaagtccaggaagatgctcgaagagatcatgaagtacgaagcaagcatcctcacccacgacagctcgattcgctacctgcaagagatctacaacagtaataaccagaaaattgtcaaccttaaggaaaaggtggctcagctggaagcccaatgccaagaaccttgcaaggacacggtgcaaatccacgacattaccggaaaggattgtcaggacattgcaaacaagggggcgaagcagtcgggcctctacttcattaaacccctcaaagcgaatcagcaattcctcgtgtactgtgagatcgatggaagcggcaatggttggactgtgtttcagaagagactggacggatccgttgactttaagaaaaactggatacaatacaaggagggattcggccacctgtcacccactggaaccaccgagttctggttgggtaacgagaaaatccacctcatctcaacccagtccgcaatcccgtacgcactgcgcgtcgagctggaggattggaacgggcggacttcgaccgcagattacgcgatgttcaaagtgggaccagaggctgataagtaccggctgacctacgcctacttcgctggaggagacgcaggggatgcgttcgacgggttcgatttcggtgatgacccgtcagataagtttttcaccagccacaacggcatgcaattctccacttgggacaacgataacgataagttcgaaggtaactgcgcagagcaggacggatccggctggtggatgaacaaatgccatgctggacatctgaatggtgtgtactaccaaggtggaacgtactcaaaagcgtcgaccccgaacggatacgataacggcattatctgggccacttggaaaaccagatggtactctatgaagaaaactaccatgaagatcatcccgtttaatcgcctgactataggagagggacagcagcaccatctgggcggcgccaagcaggttagaccggaacacccggccgagactgagtatgactcactctacccagaggacgatctt

SEQ ID NO: 209853 - DNA, 1359 bp, Artificial Sequence
  derived and/or modified sequence
atgtcctggtccttgcacccgagaaaccttatcctctacttctacgccttgctttttcttagttctacctgtgtggcttacgtggccacacgggataactgttgtatcctcgacgagagatttgggtcatactgcccgactacttgcggcattgctgacttcttatccacttaccagaccaaggtggataaagatctgcagtctcttgaggatatactccaccaggtggagaacaaaacttcagaagtgaaacagctgattaaagcgatccagctgacttacaatcctgatgagtcatctaaaccgaatatgattgacgcggccactctcaaatccaggaagatgttagaagaaataatgaaatatgaggcctccatcctgacccacgacagctcaatccgctacctgcaggagatctacaacagcaacaatcaaaagatcgttaatttgaaggagaaagtagcccaattagaggcacagtgtcaggagccctgtaaagacaccgtgcagatccatgatattaccggtaaagattgccaagatattgcaaacaagggggcgaagcaatcaggcttgtattttatcaagcctctcaaggctaatcagcagttcctcgtgtactgcgaaattgatggatcgggcaatgggtggaccgtattccaaaagcgtctagacggaagcgtggactttaaaaagaattggatacagtacaaggagggattcggccatctgtctccaaccggtactactgaattttggctcggaaacgaaaaaatccatctgattagcacccaaagcgctattccatacgctcttcgagtcgagctcgaagactggaacgggagaacaagcactgccgactacgcaatgtttaaagtcggaccggaggctgataaatatcggttaacctacgcctactttgctgggggagatgccggagatgcattcgatgggtttgattttggggacgaccccagtgacaaattcttcacatcccataacggaatgcagtttagcacctgggacaacgacaacgataagtttgaaggaaattgcgctgagcaggatgggtctggctggtggatgaataagtgccatgcggggcacttgaatggggtgtactatcagggtgggacatactctaaagcctctactccgaatgggtacgataatgggatcatctgggccacatggaaaacgagatggtactctatgaagaaaacgactatgaagattataccattcaaccgcctgacaattggggagggtcagcagcatcacttaggcggagccaagcaggtcagaccagagcaccccgctgaaaccgaatacgactctctttatccagaggatgattta

SEQ ID NO: 209854 - DNA, 1359 bp, Artificial Sequence
  derived and/or modified sequence
atgagctggtctctgcaccccagaaacttgatcctctacttctacgcccttctgttccttagcagtacttgcgtggcatatgtggccactagggacaattgttgtatattggacgagcggtttgggagttactgccccacgacttgtggtattgcagactttctgagcacttatcagacgaaagtggataaggatctgcaatctctggaggacattctgcatcaggtggagaacaaaacctctgaggtgaaacagttgataaaggctattcaattgacctacaacccggatgaatcgtccaaacccaatatgatcgatgcggccaccctgaagagcaggaagatgctcgaggaaatcatgaagtacgaggcttccatcctgacgcatgattccagcattcggtatcttcaagaaatctataattcgaacaaccagaagattgttaaccttaaagaaaaggtggcacagcttgaggctcagtgtcaggagccctgcaaggacacagttcaaattcatgacattactggcaaagactgtcaagatatagccaacaagggggcgaaacaaagcggattgtatttcatcaagcccctaaaggccaaccagcagtttcttgtctattgcgagatcgacggttctggaaacgggtggaccgtgtttcagaagcgcttggacggctctgtcgacttcaagaagaactggatccaatacaaggaaggattcggacacctatcaccaaccgggacgacagaattttggctgggcaatgaaaagatacacctgatttctactcaatccgcgattccatacgcactgagagtcgaattagaggattggaacggtcgaactagtaccgccgactacgccatgtttaaggttggaccggaggcggataaatatcggctgacttacgcttactttgctgggggtgatgctggggatgcgttcgacggtttcgacttcggcgatgaccccagtgacaagttttttaccagccacaacggaatgcagttttccacttgggataatgacaacgataagtttgaggggaactgcgcggagcaggacgggagcggatggtggatgaataaatgccatgccgggcacttgaacggtgtttattaccaggggggcacctactctaaagcctcgacccccaatgggtatgataatggaatcatttgggccacatggaaaacacgctggtatagcatgaaaaaaaccaccatgaagattattcctttcaaccggctgacaatcggggagggccagcagcaccacttgggaggcgctaagcaagtgcgcccagaacaccccgccgagacagagtatgattctttgtaccctgaagatgacctc

SEQ ID NO: 209855 - DNA, 1359 bp, Artificial Sequence
  derived and/or modified sequence
atgagctggtccttgcaccccagaaacctcattctgtacttttatgccctgctattcctaagttccacctgcgtcgcttacgtagcaacacgcgataattgctgtattctggacgagcggtttgggtcctactgtccgactacctgcggtatcgctgacttccttagcacttatcagactaaagtggataaagacttacagagtctggaagacattctgcatcaggtggagaataagacctcagaggtcaaacaactcataaaggctatccagttaacatataatccagatgagagctcaaagccaaacatgatcgacgctgctaccttaaagtctcgcaagatgcttgaggagatcatgaaatacgaagcgtctatcctcacgcacgacagtagtattcggtacctacaggagatctacaacagcaacaaccagaaaatagtgaatttaaaggagaaggtcgcgcagctggaagcacagtgccaggagccttgcaaggacaccgttcaaattcacgatatcacagggaaggactgtcaggacattgcgaataaaggtgcgaagcaatcaggtctttatttcatcaagcccctcaaggccaatcagcagttcctcgtctattgtgaaatcgatggatctggcaacgggtggaccgttttccaaaagcggctggatggctctgtagatttcaagaagaattggatccagtacaaggagggcttcggacatttgagccctaccggaaccactgagttctggctgggcaacgagaagattcacctcatatctacacagagtgccataccatacgccctgcgtgttgaactggaggactggaatggccggacgagtactgcagactatgccatgtttaaagtggggcccgaagcagataaataccgcctgacatacgcttactttgcaggcggcgatgctggggatgcttttgatggcttcgactttggagatgatcccagcgataaattttttacatcccacaacggtatgcagttttccacatgggacaacgacaacgataagtttgaaggtaactgcgcagagcaagacggcagtggctggtggatgaacaagtgccacgcgggccacctgaatggggtttactaccaggggggaacttatagtaaggcatccacgcctaacggatatgataatggcatcatttgggcgacatggaagacccgatggtattcaatgaagaagacaaccatgaaaatcattcccttcaaccgactgaccataggcgaaggccagcagcatcatctgggcggcgcaaaacaagttagaccagagcatcccgccgagactgaatacgattcactgtaccctgaggacgacttg

SEQ ID NO: 209856 - DNA, 1359 bp, Artificial Sequence
  derived and/or modified sequence
atgtcctggtccctgcatccacggaatctgatcctctacttttacgcacttctgttcctgagctccacctgcgtggcgtacgtcgccaccagagataactgttgtatcctcgatgagcggtttggatcctactgcccaaccacctgtggaatcgcagatttcctctcgacttaccaaaccaaggtcgataaagacctccagtcactcgaagatattctgcatcaggtggaaaacaaaacgtcggaagtgaagcaactgattaaagccatccaactgacgtacaaccctgacgaatcttcaaaacccaatatgattgatgcagcaacccttaagagcagaaagatgctggaagagattatgaaatatgaagcgtcgattctcacccacgattcctcgattcgatacctgcaggaaatctataacagcaacaaccagaaaatcgtgaaccttaaagaaaaggtggcacagcttgaggcccaatgtcaagaaccttgcaaggatacggtgcaaattcatgatataaccggtaaagattgtcaggatattgcgaataaaggcgctaaacagagcggtctgtacttcattaaaccactgaaggccaatcaacaattccttgtgtactgcgaaatagatggatcaggaaatggatggaccgtctttcagaagcgcctggatggttcggtcgacttcaagaagaactggatacagtataaagaaggatttggacatctgtctcctactggtaccaccgaattttggctgggtaacgaaaagatccacctgatctccactcaaagcgccattccttacgcactccgcgtggaactggaagattggaacggtcggacctccactgcagattacgcaatgtttaaggtgggacccgaggcagataagtaccgactgacctacgcttactttgcaggaggagacgcaggggacgcctttgatgggtttgattttggggacgatcctagcgacaaattctttaccagccataatggtatgcagttttccacttgggacaacgataacgataagttcgagggtaactgtgcagagcaggacgggtccggctggtggatgaataagtgtcacgcgggacatctgaacggagtgtactaccagggtggcacgtactcaaaggcttcgactcctaacggatacgacaatggcattatctgggcaacctggaaaacgaggtggtattcgatgaagaaaaccactatgaaaatcataccctttaaccggctgactatcggtgagggccagcaacatcatctgggaggtgcaaagcaagtaagacccgagcatcctgcagaaaccgagtacgactcactttaccctgaggatgatctt

SEQ ID NO: 209857 - DNA, 1359 bp, Artificial Sequence
  derived and/or modified sequence
atgtcgtggagcctccacccgcgaaacctgattctgtatttctacgcgctgctgttcttgtccagcacttgcgtggcatacgtcgctacccgcgacaactgttgtatactggatgagcgattcgggtcgtactgcccgaccacgtgcgggatcgcagatttcctgtccacttatcaaactaaggtcgacaaggacctccagtcgctggaagatatcctccaccaggtggagaacaagaccagcgaagttaagcaactgattaaggcgatacagctgacgtacaaccctgacgagtcctcaaaacctaacatgatcgacgccgccactctgaaatcaagaaaaatgctcgaggagattatgaaatacgaggcatccatcctcacccatgactcatcgattaggtatctgcaagaaatctacaattcgaacaaccagaaaatcgtgaatctcaaagagaaggtggcccagctcgaggcgcagtgccaagaaccatgcaaggatactgtccagatccatgacatcaccggtaaagattgccaagatattgctaacaagggagcaaagcaatccggactgtacttcatcaagccgctgaaggcaaaccaacagttccttgtgtactgcgaaatcgacggttcaggcaatggctggaccgtgtttcagaagcgcctggatggatcggtcgactttaagaaaaactggatacagtacaaggaaggattcgggcacctctcgccaaccggcactactgaattctggttgggaaacgaaaagatccatctcatttccacccagagcgccattccgtacgcgttgagggtggaactggaagattggaatggtcgcacctcgacggccgactacgcgatgttcaaggtgggaccggaggctgacaagtacagactgacttatgcatacttcgccggcggggacgccggagacgcgtttgacggcttcgactttggagacgacccctcagacaagttctttaccagccataatggcatgcaattcagcacctgggataatgataacgacaaatttgaaggtaactgcgcagaacaggacggcagcggatggtggatgaacaaatgtcacgccgggcacctgaatggagtgtactaccagggagggacttactccaaggcttcgaccccaaatggctacgataacggaatcatctgggccacttggaaaacccggtggtactccatgaaaaagacgactatgaagatcatcccattcaatagactgaccatcggagagggtcagcagcatcacctgggcggagctaagcaggtcagacccgaacacccggctgaaactgagtatgattctctctacccggaagatgacctt

SEQ ID NO: 209858 - DNA, 1359 bp, Artificial Sequence
  derived and/or modified sequence
atgtcttggtccctccacccccgcaatctcatcctttacttctatgctctcctgttcctgtcctccacatgtgtggcctatgtggccactagagataattgttgtattctggatgagcggttcggctcctattgtccaacaacttgcggcatagcagacttcttgagtacgtatcagactaaggtcgacaaggatctgcagagccttgaggacatactccatcaggttgaaaacaagacctccgaagtgaaacagttgataaaggctatccaactgacctataatcccgatgaaagctcaaaaccaaatatgattgacgccgccaccctgaagagccggaaaatgctggaagagataatgaagtacgaagcctctatcctgacacacgattcatcaatccggtatctccaggaaatttacaatagcaacaatcaaaagattgtgaaccttaaggaaaaagttgctcaactggaagcccagtgtcaggaaccgtgcaaggacacggttcagattcatgatatcacaggaaaagattgccaagatattgcaaataagggagccaaacagtccgggctgtatttcataaaacccctgaaggctaaccagcaattcctggtgtattgcgagatcgatggatctgggaatggctggaccgtgttccagaaacgactggacggatcagtggattttaagaagaactggattcagtataaagaggggtttggacatctgagccctacaggcacaactgaattctggcttggaaacgagaagattcacctgatttccacgcaatccgcaatcccatacgccttgcgcgttgaactcgaggattggaacggccggacttcaactgcagactatgccatgtttaaagtaggtccggaggccgataagtacaggctgacctacgcttacttcgccggaggcgacgcaggcgatgcattcgacggcttcgatttcggtgatgacccaagcgataagttcttcacctcacacaacggaatgcagttctcaacctgggataacgacaacgacaaattcgaaggcaactgtgcggaacaggatggaagtgggtggtggatgaacaagtgccatgccgggcatctgaatggcgtgtactaccaaggaggaacctatagcaaggcctcaacccctaatggttacgacaatggtattatttgggccacctggaaaacacggtggtatagtatgaagaagacaacaatgaagattatccctttcaatcgcctgacgattggagaggggcagcagcatcatttgggaggagcgaaacaggtgcgcccagaacacccagccgagacagaatatgattccctctatcctgaggacgacctt

SEQ ID NO: 209859 - DNA, 1359 bp, Artificial Sequence
  derived and/or modified sequence
atgtcctggagcttgcatcctaggaatctgatcctttacttctacgctctgctgttcttatcttccacgtgcgtagcctatgtggctacccgggataattgttgtatcctagacgagaggttcggatcatattgcccaactacatgtggtatcgctgactttttatctacttaccaaactaaggttgacaaggacctgcagtccctagaagatatccttcatcaagtcgagaataagacaagtgaagtcaagcaactcataaaagcaattcaactgacttacaaccctgatgagagttccaagcctaacatgattgacgccgcgaccctgaaaagtcggaagatgctggaggagattatgaagtacgaagcctctatactcacccacgatagctccattaggtaccttcaagagatttataactccaacaaccagaagattgtaaacttgaaagagaaggtggctcagctggaggctcagtgccaggagccttgcaaagatacggtacagattcacgacataactggaaaggactgtcaggatattgccaataaaggggctaaacagagtggcctgtacttcatcaaacctctgaaggccaaccagcagttcctcgtgtactgtgagatagacggctctggcaatggttggacagtctttcaaaagagactggatggctccgtagattttaaaaaaaattggattcagtataaggaggggtttgggcacctcagccccaccggcactaccgaattctggcttggcaacgagaaaattcacttaatcagtacacagtccgccatcccttacgcccttcgggtcgaactcgaagactggaacggccgcacctctaccgccgactatgccatgtttaaagtggggcctgaagcggacaagtaccggctaacatacgcttatttcgcaggtggtgacgcaggcgacgcgttcgacgggtttgatttcggtgacgaccctagcgacaagtttttcacctcccataacgggatgcagttttcaacctgggataacgataacgataagtttgagggtaactgtgccgaacaggatggcagcggttggtggatgaataaatgtcacgccggacatctgaacggtgtgtactaccagggtggcacatactccaaggcctccactccaaacggctatgacaatggcatcatttgggctacatggaagacccggtggtactccatgaaaaagacaacaatgaaaattatcccctttaacaggctgactatcggggagggccagcagcatcacttgggaggagctaagcaggtgaggccggaacaccccgcagagacagaatacgacagcttgtaccctgaggacgacctg

SEQ ID NO: 209860 - DNA, 1359 bp, Artificial Sequence
  derived and/or modified sequence
atgtcgtggtctcttcatccccggaatctcattctttatttttacgctctcctgtttctttcctccacttgtgttgcctatgtcgccaccagagataactgctgtattcttgatgaacggtttggttcctattgccctaccacatgcggtattgctgactttctgagtacatatcagactaaggtggacaaggatttacagagcttagaagatatactccaccaagttgaaaataagacctcagaggttaagcaactgattaaggctattcaactaacctacaacccggatgagtcttccaaacctaatatgatagatgcagctactctgaaatccagaaagatgttggaggaaatcatgaagtatgaggctagcattcttacccacgattcttcgattcgctatctgcaagaaatctataacagcaacaatcagaagattgtgaacctgaaagagaaggtggctcagttagaagcacagtgccaggagccgtgtaaagatactgttcagattcacgatataacaggcaaagattgccaggatatagcaaataagggcgcaaagcaatcaggtctttacttcatcaagccactgaaagccaatcagcagttcttggtttattgtgaaattgatggctctggaaacggttggactgttttccaaaagaggcttgatggaagtgtagatttcaagaagaactggatccagtacaaggaaggatttggtcatctaagtccaactggcactacagagttttggttggggaacgaaaagatccatttgatcagtacccagagcgctataccctatgcgcttcgggtcgagttggaggattggaatggccgtacttccaccgccgattatgcaatgttcaaggtcggccctgaagccgataagtataggcttacttatgcatactttgccggtggagatgcaggagacgcttttgatggcttcgatttcggcgatgatccatccgacaaattcttcacatcccacaacggcatgcagttctccacctgggacaacgataacgataaattcgaggggaattgtgctgagcaagatggttccggctggtggatgaacaagtgtcatgctggccatctcaacggcgtttactatcaaggaggcacatatagtaaggcctccactccgaatgggtacgataatggaattatttgggcaacttggaagaccaggtggtattcaatgaaaaaaactaccatgaaaattatcccttttaataggcttactataggtgaaggtcagcagcaccacttgggaggcgcaaaacaggtacgaccagaacatcctgctgaaacagaatatgattccttatatcctgaagatgacttg

SEQ ID NO: 209861 - DNA, 1359 bp, Artificial Sequence
  derived and/or modified sequence
atgtcctggtcactgcatccaaggaacctgatcctctacttctacgccctcctcttcctgtcgtccacttgcgttgcgtacgtggcgaccagggataactgttgcatcctggacgaacgctttggatcctactgtcccaccacttgcggaatcgcggacttcctctcgacgtaccagactaaagtggataaggatctccaaagcctggaggatatactccaccaggtggagaataagacgtccgaagtgaagcaactgatcaaggccatccaattgacttacaatccagacgaaagcagcaagcctaacatgatcgacgctgcgaccttgaagtcccgcaagatgctggaagagatcatgaagtacgaagcctccatcctgacccacgactcaagcatccgctacctccaagaaatctacaactccaacaatcagaagatcgtcaacctgaaggaaaaggtcgcacaactggaagcccagtgccaggagccgtgtaaagataccgtgcaaattcacgatatcactggaaaggattgtcaggacattgcaaacaaaggagcaaagcagagcggactctacttcattaaaccattgaaagcaaaccagcagttcctggtgtactgcgaaatcgatggaagcgggaatggatggacggtgtttcagaagcggcttgatggaagcgtcgatttcaagaagaattggatccagtacaaggaaggattcggtcacctgtcgccgaccgggactaccgaattctggttgggtaacgaaaagatccacctgatttcaacccagtccgccatcccttacgcgctgagagtggagctcgaggactggaatggacggacctcaaccgcggattacgcgatgttcaaggtgggccccgaggccgataagtacaggcttacctacgcctatttcgcaggaggagacgccggagatgcattcgatggcttcgattttggcgacgatccgtcggacaaattcttcacgagccataacggcatgcagttttccacctgggacaacgataacgacaagttcgagggaaactgcgccgaacaggacggatcgggatggtggatgaataagtgtcacgccggacacctgaacggtgtttactaccaggggggtacttactctaaagcctccactccgaacggttacgacaacggcatcatatgggcgacctggaaaacccgctggtactccatgaagaaaaccactatgaagattatcccattcaaccgcctgaccatcggtgagggtcaacaacatcatctgggaggggccaagcaggtgcggcccgaacacccagcagagactgaatacgattccctgtacccggaagatgacctg

SEQ ID NO: 209862 - DNA, 1359 bp, Artificial Sequence
  derived and/or modified sequence
atgagttggagcctccacccccgtaacctgatcctttacttctacgccctgctgtttctatcatcgacatgcgtggcatatgtcgccactcgcgacaactgctgcattctcgatgaacgattcggttcttactgtcctactacgtgtggcatcgccgacttcttgtccacctaccagaccaaggtggataaggatttgcagtcactggaggatattctacatcaagtcgaaaataaaacctcagaggtgaaacagttgatcaaggccattcaattgacctataaccctgacgagtcctccaagccaaacatgatcgacgctgccaccctaaagtcaaggaaaatgcttgaagaaattatgaagtacgaagccagcattctgactcacgattctagcattcggtatcttcaagaaatttacaacagtaataaccaaaaaattgttaatctgaaagagaaggttgcacaactagaagcccagtgccaggagccatgtaaagataccgtacagatccacgatataacgggcaaagactgccaggacatagctaacaaaggggccaaacaaagtggcctgtattttatcaaaccactgaaggccaaccaacagtttctcgtatactgcgaaatcgatggctctggcaacggctggaccgttttccaaaaacgccttgatggatcggtcgatttcaagaaaaattggattcagtataaagaaggattcggccatctgagtccaaccggaacaaccgagttctggctgggaaacgaaaagattcatctgatcagtacccagtcagcgatcccatacgcacttcgcgtggagttggaggactggaatggtcgtacttctaccgccgattatgctatgttcaaggtaggtcctgaagctgataagtacaggttgacctacgcctattttgctggaggggacgccggggatgcctttgacggattcgacttcggcgatgatcccagcgataagttctttaccagccacaacggaatgcagttctctacttgggataatgataacgacaagttcgaaggaaactgtgccgagcaggatgggtctgggtggtggatgaacaaatgtcacgcaggtcatcttaatggagtgtattatcaggggggcacatactccaaggcttccaccccaaatgggtacgataacggcatcatctgggccacctggaagactcgctggtacagtatgaaaaaaaccacaatgaagataatccctttcaacagactcacaataggggaaggccagcagcatcacttaggtggtgccaagcaagtccgtccggaacacccagccgagactgagtacgattctctatacccagaagatgatctg

SEQ ID NO: 209863 - DNA, 1359 bp, Artificial Sequence
  derived and/or modified sequence
atgagctggagcctgcacccgcgaaatctgattctgtacttctacgctttgctcttcctctcctccacttgcgtggcttacgtggctaccagagacaattgctgcatcctcgatgagcggtttggatcgtactgccctacgacctgtggaatcgcggacttcctgtcgacttaccaaaccaaggtggacaaggacctccaatcattggaggatatcttgcaccaagtggaaaacaagaccagcgaagtgaagcagctgataaaagccatccagctgacctacaacccggatgaatcctcgaagccaaatatgattgatgccgctacccttaaaagcagaaaaatgctggaagagatcatgaagtacgaggcgagcatcctgacccatgacagctcaattagatatctgcaggagatctacaactcaaacaaccaaaagatcgtcaatctcaaggaaaaggtcgcccagttggaggcgcagtgtcaggagccatgtaaggatacggtccaaatacatgacattactggaaaggactgccaagacattgcaaacaaaggagcaaaacagtcgggactctatttcatcaaaccgcttaaggccaatcaacagttcctggtttactgcgagatagacggatcgggcaacggttggactgtgtttcagaagcgcctggacggatccgtggactttaagaagaactggatacagtataaggaaggcttcggacacctctcaccaaccgggactactgagttctggctgggtaacgaaaagatccacttgatctcaacccaatccgctatcccgtacgccctgcgggtcgaacttgaggactggaatggacggactagtacggcggactacgccatgtttaaggtggggccggaggcagataagtaccggctcacgtacgcatacttcgcggggggagacgccggggatgcatttgacggtttcgatttcggcgacgacccctccgacaagttcttcacctcacataatggcatgcagttctcgacctgggacaacgataacgataagttcgagggcaactgcgccgagcaggatgggtccggctggtggatgaataagtgtcacgccggacacctgaatggcgtctattaccagggaggaacctactctaaagcctccacccctaacggatacgataatggcatcatctgggctacttggaaaacccgctggtactcgatgaaaaagacgactatgaagatcattccgttcaataggctgaccatcggagagggtcaacaacatcatttgggcggcgcgaagcaggtaaggcctgagcacccggcggagactgaatacgattcgctgtaccctgaggatgacctg

SEQ ID NO: 209864 - DNA, 1359 bp, Artificial Sequence
  derived and/or modified sequence
atgtcctggtcccttcaccctaggaatcttattctgtatttttacgctttgctgttcctcagctccacatgcgttgcttacgtggcaacccgagacaactgctgtatcctcgatgagcggttcggttcgtactgccccactacatgtgggattgctgacttcctctcaacctatcaaacgaaagtcgataaggacctgcagtccttggaggacatattgcaccaggtcgagaataaaacctccgaagtcaaacagcttattaaggccatccaactgacctataacccagacgagtcttccaagccaaatatgatcgatgcggccaccctgaagtccagaaagatgctggaggaaattatgaagtatgaagcgtccattcttacccacgactctagcataaggtacctgcaggaaatctataactccaacaaccagaagattgtgaatttgaaggagaaggtggcacaattggaggctcaatgtcaggagccatgtaaggacacagtacagatccatgatatcactggcaaagattgtcaggatattgcgaataagggggcgaaacagtcaggcctatatttcattaaaccactcaaggccaaccagcaatttttggtgtactgtgaaatcgatggcagcgggaatggatggacagtctttcagaaacgtcttgacggatccgttgacttcaaaaagaactggatccagtacaaagaggggttcggacatctcagcccaactggcactactgagttttggctggggaacgagaagatccatttaataagtacccagagcgccataccgtatgctctgagagtggaactggaggattggaatgggagaaccagcacagcagactacgctatgttcaaagtcggtcccgaagccgataaataccggttgacctatgcttattttgctggcggagatgccggagacgcttttgacgggttcgacttcggggacgacccatccgacaagttcttcacctcccataacgggatgcaattctcaacctgggataatgacaatgacaaatttgaaggaaactgcgccgaacaggacgggtcaggttggtggatgaacaagtgtcatgcaggccacttaaacggagtgtattaccaaggcggaacctatagcaaggctagcaccccaaatgggtacgacaacggcataatctgggcgacctggaaaacaaggtggtattcaatgaagaaaacaaccatgaaaatcatccccttcaacaggctcactattggagaaggacagcagcatcatctcggtggagcaaagcaggtgaggcccgagcaccctgctgagacagagtacgacagtctgtatcccgaagatgatttg

SEQ ID NO: 209865 - DNA, 1359 bp, Artificial Sequence
  derived and/or modified sequence
atgtcgtggagcctgcatccgcgaaacctcattctgtacttctacgcactgctttttctctccagcacgtgcgtggcctacgtcgccacccgggacaactgctgcatcctcgatgaacgatttgggtcctattgtcctaccacttgtgggatcgcggattttctgagcacctaccagaccaaggtggataaggatcttcaatccctggaggatattctgcatcaggtcgaaaacaaaacctcggaggtgaaacaattgattaaagcaattcaactcacctataacccagatgaaagttcgaagcccaacatgatcgatgccgcaactttgaagagcaggaaaatgctggaagagattatgaagtacgaagcatccatcctcactcatgacagctccataagatacctccaagaaatctacaattcgaacaatcagaaaatcgtgaacctgaaggagaaggtcgcacagctggaagcccaatgccaggaaccatgtaaggacaccgtccagattcatgacattactggtaaggactgtcaagatattgcgaacaaaggagccaagcaatccggactgtacttcattaaaccgctgaaggctaatcaacaattccttgtctactgtgagatagatgggagcggaaatggatggactgtctttcaaaagcggcttgatggttcagtcgatttcaagaagaattggattcaatacaaggaaggatttggccatctctcgccgaccggcaccactgaattctggcttggcaacgagaaaatccatctcatatccactcaatccgcaattccttacgcactgagagtcgaactggaggattggaacggtcggactagcaccgctgactacgcgatgtttaaggtgggtcctgaagcggacaaataccgtctgacttacgcgtacttcgcaggaggtgacgcaggggatgccttcgacggctttgatttcggagatgacccatccgataagttctttacgagtcataatggaatgcaattttcgacttgggataacgacaacgataagtttgagggtaactgtgcagaacaagatgggtccggatggtggatgaacaagtgtcacgcaggacatctgaacggagtgtactaccaaggaggaacctactcaaaggcgtctacccctaatgggtatgataatggtatcatttgggcgacctggaaaactagatggtactcgatgaaaaagacgaccatgaagatcatcccctttaatcgtcttaccataggagaaggacagcagcaccacctgggcggtgcaaaacaagtcaggcccgaacatcctgcggaaactgagtacgactccctgtacccagaagatgacctt

SEQ ID NO: 209866 - DNA, 1359 bp, Artificial Sequence
  derived and/or modified sequence
atgagttggagcttgcacccaaggaatttgatcctctacttttacgcgctgttatttctgtctagtacctgtgtcgcttacgttgctacaagagacaactgctgcatcttggacgagaggtttggcagttactgtcctactacatgcggcatcgctgacttcctgtccacttaccaaaccaaggtagataaagatttgcagtcgctggaagatatccttcaccaggtggaaaacaagacctccgaagttaaacagctgatcaaggcaattcagttaacttataatcccgacgaaagcagcaaacctaacatgattgacgccgctaccctgaaaagcagaaagatgttagaagaaattatgaaatatgaggcgagcatactgacccatgactcttccatccgttacctgcaggaaatctataacagcaacaaccagaaaattgtgaatctaaaggaaaaggtggcccagctcgaagcccagtgccaggaaccctgtaaggataccgtgcagatacacgacataacagggaaggactgccaggatatcgccaataaaggcgcaaagcagtctggcctgtactttatcaagcccctgaaggccaatcagcagttccttgtgtactgcgagatagatggatcgggaaacggatggactgttttccagaagcggcttgacggcagtgttgacttcaaaaaaaactggattcagtacaaggagggcttcgggcacttaagtccaacgggaacaacggaattctggctgggcaacgaaaagatccacctcatcagcacacagtcggcgatcccatacgccttacgggttgagttagaagattggaacggccggacaagcacagccgactacgctatgttcaaggttggtccggaggctgacaagtaccgccttacctatgcctacttcgccgggggggatgcaggcgatgcctttgacgggtttgattttggcgacgaccctagcgacaagtttttcacctctcataacggcatgcagttctcaacctgggataacgataacgacaagttcgaagggaattgtgcagaacaggatggcagtggatggtggatgaacaagtgtcatgctgggcatctaaacggcgtgtactaccagggcgggacttacagcaaagcttcaacaccaaacgggtatgataatgggattatctgggcaacttggaagaccagatggtactccatgaaaaaaacgacaatgaaaatcattccatttaatcgactcacaattggcgaaggacagcagcaccatctgggaggcgctaagcaggtacgcccagagcatcccgctgaaacagaatacgactccctctatcccgaggacgatttg

SEQ ID NO: 209867 - DNA, 1359 bp, Artificial Sequence
  derived and/or modified sequence
atgagctggtccctgcatcccaggaacttgatactctacttttatgcccttctctttttgtcgtcgacctgtgtggcatacgtggcaactcgggataattgctgtattcttgacgaacgctttggttcgtactgtcctaccacctgcgggatcgcagattttctgtccacctaccaaaccaaagtcgataaggacctgcaatcactcgaggacattctgcaccaagtcgagaataagacgtccgaagtgaaacagctcataaaggcgatccagctcacctacaacccggatgagtctagtaaacctaatatgattgacgctgcaactctgaagtcaaggaaaatgctggaagaaatcatgaagtacgaagcaagcattctcacccatgattcgtcgatccggtacctgcaggagatctacaattcaaacaaccagaagatcgtcaaccttaaggagaaggttgcccagctggaagcacaatgtcaagagccatgcaaagatactgtgcaaatccatgatattactggaaaggattgtcaagatattgcaaataagggtgcaaaacaatcgggactgtactttatcaagccacttaaggcaaaccaacagttcctcgtttactgtgaaattgatggatccggcaacggatggactgtgtttcaaaagcgtctcgacggatccgtggatttcaagaaaaactggatacagtacaaagaaggatttggtcatcttagcccgaccggcactaccgagttttggctgggtaacgagaaaatccatcttatctcgacgcaatccgctatcccttacgcactccgggtcgaactcgaagattggaacggtaggacttcaaccgctgattacgcgatgtttaaggtgggacccgaagcagacaaatacaggcttacctacgcatactttgcaggtggcgatgcgggggacgcttttgatggctttgacttcggggatgatccttcggacaagtttttcacctcccataacggtatgcagttttcgacttgggataatgataacgacaaatttgaaggaaactgtgcagagcaagatggatcgggatggtggatgaataagtgccatgcaggacacctgaatggggtgtactaccaaggggggacttacagcaaagcctcaactcccaacgggtacgataatggtatcatctgggcaacgtggaaaacccggtggtacagcatgaagaaaactactatgaaaatcattccattcaaccgtttgacgattggtgagggacagcagcatcatctgggaggtgcaaagcaggtcagaccggaacaccctgcagagacggagtatgattcgctgtatcctgaagatgatctg

SEQ ID NO: 209868 - DNA, 1359 bp, Artificial Sequence
  derived and/or modified sequence
atgagctggtcgctgcatccccgcaacttgattctgtacttttacgcacttcttttcctgtcctccacctgtgtggcgtacgtggctaccagagacaattgttgtattcttgatgaacgatttgggtcctactgtccaactacttgcggaatcgctgatttcctgtctacgtatcagacgaaagtggataaggatctgcagtcactggaggacattttgcaccaagtcgaaaacaagacctcggaggtgaagcaactgattaaagccattcagctgacctacaaccctgatgagtcatcaaaaccgaacatgatagatgcagcaacgttgaagtcgaggaaaatgctggaagagattatgaagtacgaagcgagcatcttgactcacgactcgtccatcagataccttcaagaaatctacaactcgaacaatcaaaagattgtgaatcttaaggaaaaggtggcacaacttgaagcacaatgtcaggaaccatgcaaggacacggtccagatccatgacatcaccggtaaggattgccaggatattgctaacaaaggggcaaagcaaagtgggctgtacttcataaaaccattgaaggcaaaccaacagtttctggtctactgtgaaattgatggttcgggtaatgggtggaccgtgtttcaaaaaaggcttgatggcagtgtggacttcaagaagaattggattcagtacaaagaaggatttgggcacctgtcccctaccggtactaccgagttttggcttggaaacgaaaagattcatctgatctccacccagtccgctattccttacgcgcttcgggtggaacttgaagattggaacggccgcaccagcactgccgattacgctatgtttaaggtgggtccagaggctgataagtacaggctcacttacgcgtacttcgccggaggtgatgcgggtgatgcctttgatggatttgactttggggacgatccatccgacaaattcttcacttcacataacggcatgcaatttagcacttgggataacgacaatgataagtttgaaggtaactgcgccgaacaagacggatcgggttggtggatgaacaagtgtcatgcaggacatcttaacggcgtctattatcaaggtggaacctattctaaagcatccaccccaaacggctacgataatgggatcatttgggccacttggaaaacccggtggtactccatgaaaaagaccactatgaaaatcatcccttttaacagactgaccataggggaggggcagcagcatcatctcggcggagctaagcaagtcagacccgaacatccagctgagacggagtacgacagcctttacccggaggatgatctc

SEQ ID NO: 209869 - DNA, 1359 bp, Artificial Sequence
  derived and/or modified sequence
atgtcctggtcgctgcatccgcgcaacctgatcctgtacttttacgcgcttctcttcctgtcatcgacctgtgtggcatacgtggccaccagagacaattgctgcatcctcgacgaacgcttcggttcctactgcccgaccacctgcgggatcgccgattttctctcaacgtaccaaaccaaggtggacaaagatctccagtccctggaggatattctgcaccaagtagaaaacaagacttccgaggtcaagcaattgatcaaggccatccaactgacttacaatcccgatgagtcgtcgaaacctaacatgatcgacgcggcgactctgaaatcccgtaaaatgctggaggagattatgaagtacgaagcgtcgatccttactcacgactcgtccatccgatacctccaggagatatacaattctaacaaccagaaaattgtcaacctgaaagagaaagtggcccagctggaagcccaatgtcaggagccgtgcaaggatactgtgcaaatccacgacatcaccggaaaggactgccaggatatcgcaaataagggggcaaagcaaagtggcctgtatttcatcaaaccactcaaggcaaatcagcaattcttggtgtactgcgagatcgatggcagcggtaatggatggactgtgttccagaagcgcctcgatggctctgtcgacttcaagaagaactggatccaatacaaagaaggttttggacatctttcgccgactggaaccaccgagttttggttgggaaacgaaaagatccatctcatctcaacccagtcggcgatcccttacgccctgagagtcgaactggaggactggaacgggagaacctcgaccgcagactacgcaatgttcaaggtcggacccgaggctgacaagtacaggctgacttacgcctatttcgctggaggggatgcgggcgatgcctttgatggattcgacttcggtgacgatccttcagacaagttcttcacttcacataacggtatgcaatttagcacttgggacaacgacaatgacaagttcgaaggaaactgcgccgaacaagacggaagcggctggtggatgaacaagtgtcatgcgggccatctcaatggagtgtactaccagggaggtacctactccaaagcatctaccccgaacggatacgacaacggaatcatctgggcgacctggaaaacgcggtggtactccatgaaaaagactaccatgaagataatcccattcaaccggctcaccatcggtgagggtcagcagcatcatctcgggggcgctaagcaagtgcgcccggaacatccggccgaaacggagtacgactccctgtacccagaggacgatctg

SEQ ID NO: 209870 - DNA, 1359 bp, Artificial Sequence
  derived and/or modified sequence
atgtcctggtcgctgcacccaaggaacctcatcctctacttttacgccctgctcttcctgtcgtcaacctgcgtggcgtacgtcgcaactcgtgataactgctgcatcctggatgagagatttgggtcttattgtccaactacttgtggaatcgcggacttcctcagcacctaccaaaccaaggtggacaaggatctccaatcgctggaagatatcttgcatcaggtggagaataagacgtcagaggtgaagcagctcatcaaggcgatccagctgacctacaatcccgacgaatcaagcaagcccaacatgatcgatgccgctactctcaagagccgcaaaatgctcgaagagatcatgaagtacgaagcctcaattttgacccatgactcctcgattcgctacttgcaggagatctataactcaaacaatcaaaagatcgtgaacctgaaagaaaaggtcgcgcaactggaagctcaatgccaggaaccgtgcaaggacacggtccaaatccatgacatcactggaaaggactgccaggacattgcgaacaaaggcgccaaacagagcggactgtacttcatcaagccgctgaaggcaaaccaacaatttctggtgtactgtgaaattgacggatccggaaacggctggactgtgtttcaaaagaggctcgacggttccgtggacttcaagaagaattggatccagtacaaggaaggattcggacatctgagcccaacgggaaccaccgagttctggctgggaaatgaaaagatccacctcatctccacccaatcggccatcccatacgctcttcgggtggaacttgaggactggaacgggcgcactagcaccgccgactatgccatgttcaaggtggggccggaggccgacaaataccgcctgacttatgcatacttcgcaggtggagatgcaggcgatgcctttgacggctttgatttcggagatgacccatccgacaaattcttcacttcgcataatggaatgcagttctcaacttgggataacgacaatgataagtttgaaggcaactgcgcagagcaggatgggtcaggatggtggatgaacaagtgccacgcgggtcacctgaatggcgtctactaccaagggggaacttacagcaaggcctccacgccgaacggctacgataatggtatcatctgggccacttggaaaacgaggtggtactccatgaagaaaactaccatgaagattatccctttcaacagactcactattggcgaaggacagcagcaccacttgggaggagcaaaacaggtgcggccggagcatccagcggaaaccgaatacgactcgctgtaccctgaggatgatttg

SEQ ID NO: 209871 - DNA, 1359 bp, Artificial Sequence
  derived and/or modified sequence
atgtcttggtcattgcatcctcggaaccttatcttgtacttctacgcactgctctttctttcgtcaacttgtgtcgcatacgtcgcgacccgagacaactgctgcatcctggatgaacgatttggatcatattgtcccaccacctgtgggattgcagactttctctccacctaccagaccaaggtggataaagacctgcagagcctggaggacatactccatcaagtggaaaacaaaacttccgaagttaaacagctgattaaagcgatccagcttacctacaaccccgatgaatccagcaagcccaatatgattgatgccgccaccttgaaatcacgcaagatgctcgaggagatcatgaagtatgaggcctcaatccttacgcacgattcctccattagatacttgcaggagatttacaattcaaataaccagaaaattgtgaacctcaaagagaaggtggcgcaacttgaagcgcagtgtcaggaaccgtgcaaagatacggtgcaaattcatgacataacggggaaggattgtcaagatatagcgaataaaggtgcaaagcaaagtggtctttacttcattaagcccttgaaggcgaaccagcaatttcttgtgtattgtgaaattgacggatcgggtaatggatggaccgtgttccagaagagactcgacggttcggtggatttcaagaagaactggatccaatacaaggagggatttggccacctgagccctaccggcaccaccgaattctggctcggaaatgaaaagatccacctgatctcaacgcagtccgcaataccatacgccctgcgagtcgaacttgaagattggaacggtcggactagcaccgcagactacgccatgtttaaggtgggacctgaagctgacaaatacagactgacttacgcatactttgctggcggtgacgccggcgacgcattcgacggtttcgattttggagatgatcctagcgacaagttctttacctcgcataacggaatgcagttcagcacttgggataatgacaatgataagttcgagggcaattgcgcagaacaggatggatcgggttggtggatgaataagtgccatgccggacatctgaacggagtctactaccaggggggcacctactcgaaggcgagcactcctaacggatacgacaacgggatcatttgggcaacttggaaaacccggtggtacagcatgaaaaagacgactatgaagattatcccatttaacagacttaccattggagagggccagcaacatcaccttggaggtgctaagcaggtgcgtccagaacatcctgcagaaacggagtacgattcgctttacccagaggacgacttg

SEQ ID NO: 209872 - DNA, 1359 bp, Artificial Sequence
  derived and/or modified sequence
atgtcctggtcgttgcatccgagaaatctcatcctgtatttctatgccctcctcttcctgtcctcgacttgcgtggcgtacgtggcaacccgggataattgctgcatcctggacgaaaggttcggatcatactgtccaaccacctgtggtattgccgatttcctctcgacttaccagaccaaggtcgacaaggacctgcagtccctggaggacatcctccaccaggtggaaaacaagactagcgaagtgaagcaactgatcaaggcgatccagctgacttacaatccagatgaatcctcaaagccgaacatgattgatgccgccacgctgaagagccgaaagatgcttgaggaaatcatgaaatacgaagcgtcaatcctgacccatgatagctcaatcagatacctgcaggaaatctataattcgaacaaccagaagatagtcaatcttaaggaaaaagtggcacagttggaggcgcagtgtcaagaaccgtgcaaggatactgttcagattcatgacatcactggaaaggactgccaggacatcgccaataaaggcgcaaagcaatcgggattgtactttatcaaaccactcaaggcaaaccagcaatttctcgtctactgcgagatcgatggatcgggaaacggatggacggtgttccaaaagcgcctcgacggaagcgtggacttcaagaaaaattggatccagtacaaggagggattcggccacctgagccccactggaaccaccgaattctggctcgggaacgagaagatccacctgatctcaactcagtccgccatcccttacgctctgcgggtcgaactggaagattggaatggtcgcacctcgactgccgactacgcgatgtttaaggtgggcccggaggcagataagtacagactgacctacgcttactttgccggaggagatgctggcgacgcgttcgacggatttgatttcggggacgacccgtccgacaaattcttcacttcccataacgggatgcagttctcaacttgggacaacgataatgacaagttcgagggcaactgcgctgagcaagacggcagcgggtggtggatgaacaaatgccacgccggacacctgaacggagtgtactaccaaggtggcacctactcgaaggcatctacccccaacggttacgacaacggtatcatctgggccacttggaaaacccggtggtacagcatgaagaaaaccacgatgaaaatcattccttttaaccgcctgaccattggcgagggacaacaacatcacttggggggagctaaacaggtccgccctgaacacccggccgagacggaatacgactccctttacccagaggatgatctc

SEQ ID NO: 209873 - DNA, 1359 bp, Artificial Sequence
  derived and/or modified sequence
atgtcatggagccttcatcctcggaacctcatcctgtacttctacgccctcctgttcctgtcaagcacttgcgtggcttacgtggctactcgggacaactgttgcatcctggatgaaagattcggttcctactgcccaaccacctgcggcatcgcggacttcctgtctacgtaccagactaaggtcgataaggacttgcaatcgctcgaagatatccttcaccaggtcgaaaacaaaaccagcgaagtgaagcagctgataaaggccattcagctgacgtacaatccggatgaatcttcgaagccaaacatgatcgacgccgcgacgctcaaatcacggaaaatgctggaagaaatcatgaaatatgaggcttcgatcctgacgcacgactccagcatcagatacctccaagaaatctacaactccaataaccagaagatcgtgaatcttaaggagaaggtggcgcagttggaggctcaatgtcaagagccatgcaaagataccgtacaaatccacgatatcactggaaaggactgccaagatatcgcaaacaagggtgctaagcagtcgggactctacttcatcaagccgctgaaggccaaccagcagttcctcgtctactgcgaaatcgatgggagtggaaacggatggaccgtttttcagaaacgcctggatggttccgtggactttaagaaaaactggatccaatacaaggaaggtttcgggcacctttccccgactggaactacggagttctggctgggcaacgaaaagatccatctgatctcaactcagtctgccatcccttacgcgcttcgcgtggaattggaggactggaatggaaggacttccactgccgattacgctatgttcaaagttggtccggaggccgacaaatatcgcctcacttatgcatacttcgccggaggagatgccggcgatgcgtttgacggttttgacttcggagatgacccgtctgacaagttctttacgtcccataatggaatgcagttttccacctgggacaatgacaatgacaaattcgaggggaactgcgcagaacaggatggtagcggatggtggatgaataagtgtcatgcgggacacctgaacggcgtgtactaccaaggaggaacgtactcaaaggcctccaccccaaatggatacgacaatggcatcatctgggccacttggaaaacccgctggtattccatgaaaaagactaccatgaagatcatcccatttaaccggctcaccatcggagaaggccagcagcaccacctgggcggggccaagcaggtgcggcccgagcaccctgccgagactgagtacgactcgctgtaccccgaggacgatttg

SEQ ID NO: 209874 - DNA, 1359 bp, Artificial Sequence
  derived and/or modified sequence
atgtcctggtcactgcatcctaggaaccttattctttacttttacgcgctgctcttccttagctccacctgcgtggcctacgttgccactagggacaactgttgtatcctcgatgaacggttcggatcatattgtcctaccacctgcgggattgccgattttctttccacctaccagaccaaggtggacaaggatctgcaatcactcgaggacattctccatcaagtggagaacaagacttcggaagtcaaacaactgatcaaggcaatccagcttacgtacaacccagatgagagctcaaagccaaacatgattgacgctgcaactcttaagtcgcgcaagatgctggaggaaatcatgaagtacgaagcatccattctgacccatgactccagcattagatacctgcaggagatatacaactccaataatcagaaaatagtcaacctgaaagagaaggtggcgcagttggaagcgcaatgtcaggagccttgtaaggacactgtccagattcacgacattactggcaaggattgtcaagatattgctaataagggagcaaaacagtctgggctgtacttcattaaaccacttaaagcgaaccagcagttccttgtctactgcgaaatcgatggatccggcaatggctggaccgtttttcagaagaggctggatggttccgtggacttcaaaaagaattggatccagtataaggaggggttcgggcacctctcacctaccggcacgactgagttttggcttgggaatgaaaagatccacctgatctccacccaaagcgcaattccgtatgcactgagggtggaactggaagattggaacggacgcacctcaaccgctgactacgcaatgttcaaagtgggacctgaggcagacaagtacaggctgacctacgcttacttcgcaggtggcgacgcaggggatgccttcgatggatttgatttcggagacgatccctccgataagttctttacttcacataacggcatgcaattttccacctgggacaatgacaacgacaaatttgaaggaaattgtgcagagcaagatggatcaggttggtggatgaacaagtgccatgcagggcatctgaacggcgtgtactaccaaggcggtacttactcaaaggccagcacccccaatggttacgataatggaatcatttgggctacttggaaaacgcgctggtactcgatgaagaaaactaccatgaagattatacctttcaatcgtttgactattggagaaggtcaacaacaccatctgggaggggccaagcaggtcagacctgaacatcctgcggaaaccgaatacgattcgctctacccagaggacgatctg

SEQ ID NO: 209875 - DNA, 1359 bp, Artificial Sequence
  derived and/or modified sequence
atgtcctggagcctgcacccaagaaatcttatactctatttctacgcactgttgtttctttcgtccacttgtgtcgcatacgtcgccactagagataactgttgtattcttgatgaaagattcggctcgtactgcccgactacttgcggtattgctgatttccttagcacctaccaaactaaggtggacaaggatcttcagtccctggaggatattctgcaccaagtggagaacaagacctccgaggtcaagcagctgattaaggcaatccaactcacttacaaccctgatgaatcatcgaagccgaacatgattgatgcagccacgctcaagtcgagaaaaatgctcgaagagattatgaagtacgaggccagcatcctcactcatgattcctcaatccgataccttcaagaaatctataactcgaacaaccaaaagattgtcaaccttaaggagaaggtggcccagctcgaagcacaatgtcaagaaccttgtaaggataccgtgcaaattcatgatatcactggaaaggattgtcaagacatagcaaacaaaggtgcaaaacagtccggtctttactttatcaagcctcttaaggcaaaccaacaatttctggtgtactgcgaaattgacggaagcggtaacggttggactgttttccaaaaaaggctggatggttcggtggacttcaagaagaattggattcagtacaaagaggggtttggtcacctttcgccaactggaactaccgaattctggctgggaaacgagaagattcacctgattagcactcagtcagccatcccttacgctctgcgggtggagcttgaggactggaacggccgaacctcgaccgcagactacgcgatgtttaaggtgggtccagaagctgataagtacagattgacttacgcatactttgcaggcggagacgcaggcgacgcatttgacggatttgattttggagacgatccttcagacaagttctttacttcgcataatggtatgcagttttcgacctgggataatgacaacgacaaatttgaaggtaactgtgcagagcaggacggtagcggatggtggatgaacaagtgtcacgcaggacatctcaacggtgtgtactaccaaggaggaacctacagcaaagcatccacgccaaacggttacgataacgggatcatttgggcaacctggaaaacgcgctggtactcaatgaagaaaaccactatgaaaatcatcccgtttaacaggcttacgattggtgaaggacagcaacatcaccttggtggagcgaagcaggtgcgccccgaacaccctgccgaaactgaatacgattccctctaccctgaggatgatctt

SEQ ID NO: 209876 - DNA, 1359 bp, Artificial Sequence
  derived and/or modified sequence
atgtcgtggtcgctgcatccacgcaatctcatcctctatttttatgcgctgctgttcctttcctctacatgcgtggcctacgtggcaacaagggacaattgctgtatcctcgacgagcgttttggaagttattgtcctactacctgtggaattgctgatttcctgagcacctatcagaccaaagtggacaaagacttgcagtccctcgaggacatcctgcaccaagttgagaacaagacaagcgaggttaagcagcttattaaggcgattcaactcacctacaaccccgacgagtcctccaagccaaacatgatcgacgcagccaccttaaaatcccgcaagatgttagaggagattatgaaatacgaggcatcaatcctaacccacgactcttcgatcaggtacttgcaagaaatttacaattcaaataatcagaagattgtgaatctgaaagagaaggtagcccagctggaggctcaatgtcaggagccctgtaaggacactgttcagatccatgatattactggaaaggattgtcaagatatagccaacaagggggcaaaacagagtggactgtattttattaagccattgaaggcgaatcaacaatttttggtctattgcgaaattgatgggtcaggcaacggttggacggtctttcagaaacggctagacggttccgtcgactttaaaaagaactggattcagtacaaggaggggtttggccatctctcaccaacaggaacaaccgaattctggttgggcaatgagaaaatccatctgatctccacacagtccgccattccatacgccctgagagttgaactggaggactggaatggacgcacttctaccgccgattacgcaatgtttaaggtgggccctgaagctgacaaatatagactaacgtatgcctatttcgccgggggcgacgctggcgatgcctttgacggttttgatttcggcgacgacccttctgataaattttttacctctcataatggaatgcagttttcgacctgggataatgacaatgacaaatttgagggcaactgtgctgagcaggatggctcaggctggtggatgaacaagtgtcatgctgggcatctgaatggagtgtattaccagggcggaacctattccaaggcatccactcctaacgggtacgacaatggaattatatgggcaacctggaaaaccagatggtatagcatgaaaaagacgactatgaaaatcatcccttttaatcgactcacgattggagaagggcagcaacaccacttaggaggtgcgaaacaggtcagacccgagcatcctgccgagacggagtacgactccctgtatccagaagatgacctt

SEQ ID NO: 209877 - DNA, 1359 bp, Artificial Sequence
  derived and/or modified sequence
atgagttggtcgctgcatccccgcaacctgatcctgtacttctatgcgttactgtttctttccagtacttgcgtagcctatgttgccacaagagacaattgctgcatcctggatgaacggtttggcagttactgtcctaccacctgcgggattgctgatttcctgtccacttaccagactaaggtggacaaagacttacagtcactggaagatatattacaccaggtcgaaaataaaacctccgaagtaaaacagttaatcaaggcaatccagctgacatataacccagatgagtcttcaaaaccgaacatgatcgatgctgccaccctgaagtcccgtaagatgctggaggaaattatgaagtacgaggcctccatactgactcacgattcttccattagatacttgcaggagatctacaatagcaataaccaaaagattgtcaacctgaaggagaaggtggcccaactggaggcacagtgtcaagagccttgtaaagacacagtgcaaatacatgatattacagggaaggattgtcaggacattgccaataaaggcgccaagcaatctgggctctatttcatcaaaccgctgaaagccaatcagcagtttctcgtgtattgcgaaatcgacggcagcgggaatgggtggacagtgttccaaaagagactcgatggatcagtcgactttaagaagaattggatacaatataaagaggggtttggccacttatcccctacagggacaacagagttctggctggggaacgaaaaaattcacttgattagcacgcagagcgcaattccatacgcactaagggtggagttggaggactggaatggcagaacttcaaccgctgactatgctatgtttaaggtcggccctgaggcagataaatacaggcttacatatgcctactttgccgggggtgacgcgggagacgccttcgatgggttcgactttggggatgatccctctgacaaattctttacgtcacacaatggaatgcagttcagcacatgggataatgacaatgataagtttgaaggtaactgcgctgaacaggatggttcaggttggtggatgaacaagtgccacgcggggcatttgaacggtgtgtactaccaggggggaacctatagtaaggcatcaaccccaaacggctacgataacggtataatttgggcaacctggaaaactcggtggtattcaatgaaaaagacaactatgaagattatcccctttaaccgcctaacgataggcgaagggcagcaacatcatctaggcggagctaagcaggtcaggcctgagcaccccgctgaaaccgagtacgattccttgtaccctgaagacgacctt

SEQ ID NO: 209878 - DNA, 1359 bp, Artificial Sequence
  derived and/or modified sequence
atgtcctggtcgctgcatccgcgaaaccttatcctgtacttctacgcactgctgtttttgtcgtcgacttgcgtggcctacgtcgctacgcgggacaattgctgcatcctcgatgagaggtttggatcctactgccctaccacctgtggcattgcggacttcctgagcacttaccagaccaaagtggacaaggatctccagtccctcgaggacatcctccaccaagttgagaataaaacttcagaggtcaaacagttgattaaggcaatccaactgacttacaaccctgacgagtcctccaagccgaacatgattgatgccgccaccttgaagagcaggaaaatgctcgaggaaatcatgaaatacgaagcgtcgatccttactcacgattccagcatccgctatctgcaagaaatctacaactcgaacaatcagaagatcgtgaaccttaaggaaaaagtggcccagcttgaggcacagtgccaagaaccgtgcaaagatacggtgcagatccatgatatcactggaaaggactgccaggatatcgccaacaagggcgcaaagcaaagtggcctgtactttatcaagccgctgaaggccaaccagcaattcctcgtgtactgtgaaatagatggatcaggtaacggttggaccgtctttcagaagagactggatggctcggtcgacttcaaaaagaattggattcaatacaaggaaggcttcggacatctgagcccaaccggtaccactgaattctggctcggaaacgagaaaatccacctgatctcaactcagtcagccatcccctacgctctgcgcgtggaactggaagattggaacggaagaacctcaactgctgactacgccatgttcaaggtcggacccgaagcggacaagtaccgcctgacctacgcttacttcgcaggaggcgacgccggcgacgccttcgatggattcgacttcggcgacgatccttccgacaagttcttcacctctcataatggtatgcaattttcgacctgggacaatgataatgacaagtttgagggaaactgtgctgaacaggacgggagcgggtggtggatgaataagtgccacgcggggcatctgaacggagtgtattaccaaggaggcacttacagcaaggcgagcactccaaacggatacgacaatggaatcatctgggccacctggaaaacgcgctggtattccatgaaaaagaccacgatgaagatcatcccgttcaaccggctcaccattggggaagggcagcagcaccacctgggaggagcgaagcaggtgcggccggaacacccagcagagactgagtacgattcgctctacccagaggacgacttg

SEQ ID NO: 209879 - DNA, 1359 bp, Artificial Sequence
  derived and/or modified sequence
atgtcatggtcactgcacccaaggaatctcatcctgtacttctatgccttgctgttcttgagctccacctgcgttgcttacgtcgccaccagggacaactgctgtattctcgacgaacgctttggctcctactgtccaacaacttgtggtatcgctgacttccttagcacttaccagacaaaggtggataaggatctgcaaagtctggaagatatccttcaccaggtagaaaacaagacatctgaggttaaacaactcatcaaggcaatacagctgacctacaacccagacgagtcttctaagccaaacatgatcgacgcagctactctgaagtctcgcaagatgctggaggagatcatgaagtacgaggcttctattctgacccacgactcctccatacgctacctccaggaaatctataactccaacaaccagaaaattgtgaacttgaaggaaaaagtggcccagttggaagcacagtgccaagaaccttgcaaagacacagtccagatacacgatattaccggtaaggattgccaagatattgccaacaaaggcgccaagcaatccggactgtatttcatcaagcccctgaaagcaaatcaacaattcctggtgtattgcgaaatcgacggttctggtaacggctggactgtcttccaaaagcgtctggatggttcagtcgacttcaagaagaattggattcaatacaaagaaggctttggccacctgagccctaccggtaccactgagttttggttgggtaacgagaagattcacctcatttctacccaaagtgccattccttatgccctgcgtgtggagctggaggattggaacggtcgcaccagcactgctgattatgctatgttcaaggtgggaccagaggccgacaagtacagactgacttacgcttatttcgcaggtggcgacgcaggagacgcttttgacggttttgacttcggcgatgatccttcagataagtttttcacatctcacaacggcatgcagttttcaacttgggataatgataacgataagttcgagggcaattgtgccgaacaagacggttccggctggtggatgaacaaatgccacgcaggacacctgaatggagtttactaccaaggaggtacatactcaaaagcatcaacacccaatggctacgataacggtatcatttgggctacttggaaaacaagatggtattctatgaaaaaaaccactatgaagataatccccttcaacaggcttactatcggcgaaggacagcagcatcacctgggtggtgccaaacaagtaagaccagagcatcctgctgaaaccgagtacgactctttgtaccccgaggacgatctg

SEQ ID NO: 209880 - DNA, 1359 bp, Artificial Sequence
  derived and/or modified sequence
atgagctggtcattacatcctcggaatttgattttgtatttttatgcattgcttttcctgagcagcacatgtgtcgcatatgtggcgacgcgggacaactgctgcatacttgacgaaaggtttgggtcgtattgccccaccacatgtggtattgccgatttcctttccacctatcagacaaaagtcgacaaggacctgcaatctttagaagatatcctccatcaagttgagaacaagacttctgaggtcaagcagctaatcaaggctatccaactgacctacaatcccgacgagtcctcaaaacccaatatgatcgatgccgctacactgaagtcgaggaagatgctggaggaaatcatgaagtacgaggcctcaatcttaacgcatgattcttcaattcgctacctgcaagaaatttacaactcgaataatcagaagatcgtcaacctaaaagagaaagtagcccagctcgaggctcagtgccaagaaccatgtaaagatacagtccagatccacgacatcacaggtaaagattgccaggacatagccaataaaggggcaaagcagagtgggctgtattttattaagccactaaaggcaaatcagcagtttttggtatactgtgagattgacggcagcggaaacgggtggaccgtgttccagaagcgcctcgatggctcggtggatttcaaaaaaaattggatccagtataaggaaggatttggtcatcttagcccaacgggaactactgagttttggttgggaaatgagaagattcatctgatctccacacaatctgcaattccttacgcattacgtgtggagctggaagactggaacggaaggacatcaactgctgactatgccatgttcaaagtcggcccagaggcggataaataccgcttaacgtacgcctattttgctggcggtgacgctggagacgccttcgatgggttcgacttcggggatgaccctagcgacaaattctttacaagtcacaatggcatgcagttctcaacgtgggataatgacaacgataagttcgagggaaattgtgccgaacaggatggttctggctggtggatgaacaagtgccacgccggccatttgaatggcgtgtactatcagggcggcacgtacagcaaggcaagcaccccgaacgggtacgacaacgggatcatttgggctacctggaaaactaggtggtactcaatgaagaagacaacaatgaaaattatcccatttaatcgcctgacaattggagaaggtcagcagcatcacttgggcggcgcaaaacaggttcgccctgaacatccagcagagacagagtacgattccctctacccagaggatgatttg

SEQ ID NO: 209881 - DNA, 1359 bp, Artificial Sequence
  derived and/or modified sequence
atgagttggtcccttcacccccgtaaccttatcctctacttttacgccctgttatttctaagttcaacttgcgtggcatacgtggcgacgcgggacaactgttgtattctcgatgagagatttggtagttattgccccaccacatgtgggattgccgacttcctgtccacttaccaaaccaaggtcgataaggatttgcagagtctggaggacatcctccaccaagtcgagaacaaaactagcgaagtgaagcaactgattaaagctatccagctgacctacaatcctgatgaaagctccaaaccgaacatgatcgatgccgccaccctcaaaagcaggaaaatgctggaagagattatgaaatacgaggccagcatcctaacccatgactcttccataaggtatcttcaggaaatctataactcgaataatcagaagatagtgaacctcaaagagaaagtcgcccaactcgaggcacagtgtcaggagccatgtaaggacaccgtgcagatccacgacattacaggcaaggactgccaggacattgcaaacaaaggtgccaagcaaagcggtctgtacttcataaaaccactgaaggctaaccagcaatttcttgtttattgtgaaatcgacgggagcggcaatggatggaccgtcttccagaagcgtttagatggtagtgttgacttcaaaaaaaactggatacaatacaaagagggcttcggacacctgagccctactgggacaacagagttctggctgggcaacgagaaaatccacttgattagcacacagtccgctattccttatgccttgagagttgaactcgaggattggaacggccgcacgtcaacagctgactacgccatgttcaaggtaggaccagaagcagataagtataggttgacatacgcatattttgccggaggagacgcgggcgatgcgtttgacgggtttgattttggggacgatccttcagacaaatttttcacaagccacaatgggatgcagttctcaacttgggataacgataacgacaaattcgagggtaactgcgccgagcaggacggatctggctggtggatgaacaagtgtcatgctggacacctgaacggagtgtattaccagggcggaacatattcaaaggctagtacccctaacgggtacgacaatggaattatttgggccacctggaagacccgatggtatagcatgaagaaaactacaatgaagataatccctttcaacaggctcaccatcggtgaagggcagcagcaccacctggggggtgcgaaacaggttaggccggaacatccagccgagacggagtatgatagcctgtatcccgaagacgatttg

SEQ ID NO: 209882 - DNA, 1359 bp, Artificial Sequence
  derived and/or modified sequence
atgtcttggtccctccatcctcgcaatcttattctctatttttatgcacttctgttcttaagttccacatgtgtggcttacgtcgcgactcgcgacaattgctgcatcctggatgaaaggttcggcagctattgtccgacgacatgcgggattgcagacttcctttctacataccaaacaaaagtcgataaagacttgcagagtttggaagatatcttgcatcaggttgagaacaaaacatctgaagtaaaacagttaattaaagccattcaattaacgtacaatccggatgaatcgtcgaaaccgaatatgatagatgcagcaacattgaagtcaaggaaaatgttagaggaaattatgaagtacgaggcatcaattttaacgcacgatagctcgatccgttacttacaagagatttacaattctaacaatcaaaaaattgttaacctcaaagaaaaagtagcacaattggaagcgcagtgccaggaaccttgtaaagacactgtccaaatccatgacatcacaggcaaagattgtcaagatatcgcgaataagggagccaagcaaagtggtctctactttatcaaaccgcttaaagcaaatcaacagttcttggtctactgcgagattgatggttccggcaatggctggacggtctttcagaagagacttgacgggagtgtggatttcaagaaaaattggatccagtataaagaaggctttggtcatttgtcaccgacaggaaccaccgaattttggctcggcaatgaaaaaattcatttgattagcacccaatccgcaattccgtatgcgttgagagtggagttggaggactggaatggtcgaacatcaaccgcagattatgcaatgtttaaagtaggtcctgaggcagacaaatatagattaacctatgcgtatttcgcaggaggggacgcgggtgacgcattcgatggttttgattttggagatgatccatcggacaaattctttacgagccataatggcatgcaatttagcacatgggacaatgataacgacaaattcgaaggtaattgcgcagagcaggatggatctggctggtggatgaacaaatgccatgccggacacctgaacggggtctactatcaaggcggaacctatagcaaagcttctactccaaatggctatgataatgggattatttgggcaacctggaaaacacgctggtatagcatgaagaaaaccaccatgaaaattataccatttaatcgcttgacgatcggtgaaggccaacagcatcatctagggggggccaagcaggtcaggcccgagcacccagcagaaacagaatatgactccctgtatccagaggatgaccta

SEQ ID NO: 209883 - DNA, 1359 bp, Artificial Sequence
  derived and/or modified sequence
atgtcctggtccttgcaccctagaaacctgatcctttatttctatgccttactgttcctttcaagcacctgtgttgcttatgtcgcaacacgggacaactgctgtattcttgatgagcggtttggctcgtattgccctaccacgtgtggcatcgcagactttttgtctacatatcagaccaaagtggacaaggacctgcagtcacttgaggatattcttcaccaggtggagaataaaactagtgaggtgaaacagttgataaaggcaatccagctgacatacaatccggacgagagctcaaaaccaaatatgattgatgccgcgacgctgaagtcaagaaagatgttggaagagattatgaagtacgaggcctctattctgacccacgattcctcaatccggtacttacaggaaatttataacagtaacaaccagaagatcgttaatttaaaagaaaaggttgcccagttggaggcacagtgtcaggagccatgcaaagacacggtacagattcacgatatcacggggaaagactgccaggatatagccaacaagggagcgaagcagtccggattgtactttatcaaacccttaaaagccaaccagcagtttcttgtgtactgcgaaattgacggcagtggcaatggctggactgtgttccagaagaggctagacggctccgtcgatttcaagaagaactggatccagtacaaggaaggttttggacatctgtcccccacaggaacaacagagttctggcttggtaacgaaaagatccacctcataagcacacagagcgctatcccgtacgccttaagagtcgagttagaggactggaacgggagaaccagcaccgccgactatgcgatgttcaaagtgggcccggaagctgataaatataggttaacgtatgcctactttgctgggggcgacgcaggggacgcatttgatggttttgactttggggacgatccatccgacaagttcttcacatctcacaacggaatgcagttctctacttgggacaatgacaatgacaagtttgagggcaattgtgctgagcaggatggcagtggctggtggatgaataagtgccacgctggacacttgaatggggtttattaccaggggggcacatactcaaaggcgagcaccccaaatgggtatgacaatgggataatatgggccacatggaaaacccgatggtattccatgaagaaaaccaccatgaagatcattccttttaatcgactaaccattggtgagggccagcaacaccacctcggtggggcaaaacaggtgaggccagaacatcccgccgagaccgaatacgactcactgtatccagaggacgatctc

SEQ ID NO: 209884 - DNA, 1359 bp, Artificial Sequence
  derived and/or modified sequence
atgtcctggagtcttcacccgagaaatttgatcttgtacttttatgcacttttattcctgagttctacttgtgttgcctatgtggcgacccgagacaactgctgcatcctggacgagaggtttgggagctattgtcccacaacttgtggcatcgctgattttctttcgacgtatcaaacaaaggttgataaggacctccagagcctggaagacattctgcatcaagtggaaaacaagacgtcagaagttaaacagctgattaaggcaattcagctgacctataatccagatgagagctcaaagcccaacatgattgatgccgcgacccttaagtcacgtaagatgctcgaggagatcatgaaatacgaagcctccatactgacgcatgacagttcgattcggtatctgcaagagatctacaactcaaacaaccagaaaatcgtaaacctgaaagaaaaggtggctcagctcgaggcacagtgccaagagccatgcaaggacaccgtgcagatccatgacataaccgggaaggactgtcaagacatcgccaacaagggagcgaagcagtccggactctatttcatcaagcccttgaaggcaaatcagcagtttctggtttactgtgagatcgatggaagcggaaacggatggacagtgtttcagaagcggctggacgggtccgtggacttcaagaagaattggattcaatataaggaagggttcggccacctctcccccactggtaccacagaattctggcttggaaacgagaaaatacatctgatcagtactcaatccgcgatcccatatgctctacgggtggagctggaagattggaatggccgaacaagcacagcagactacgctatgttcaaggtaggcccagaggctgacaaataccgcctaacatatgcgtacttcgccggaggggatgcgggggacgccttcgacggctttgattttggcgacgaccccagtgataaattctttacctcacacaatggaatgcagttttctacatgggacaatgataatgacaagtttgaaggcaactgcgcagaacaagatgggagcgggtggtggatgaacaagtgccatgccggccatttaaatggcgtctactatcaaggcggcacatacagtaaggcaagcacccctaatggatatgacaacggcattatatgggcaacgtggaagacacggtggtattccatgaagaaaaccaccatgaaaatcatacccttcaataggctgactatcggcgaagggcagcagcaccacctcggtggcgctaagcaagtgagacccgaacaccccgcagaaacagagtacgattccctatatcccgaggatgatctc

SEQ ID NO: 209885 - DNA, 1359 bp, Artificial Sequence
  derived and/or modified sequence
atgtcctggagcctgcaccctcgcaatctcatcctttacttctacgccctcctcttcttgagtagtacctgtgtcgcctacgttgccaccagagacaactgctgtatcctcgacgagaggttcggctcctactgtccaaccacttgcgggattgcggacttcctctctacataccagactaaagtggacaaggaccttcagagcctggaagatatcctgcatcaggttgagaataagacaagcgaggtgaagcagctgataaaggctatccagctcacctacaatccagacgagtccagcaagcccaacatgatagacgccgccactctgaaaagtcgaaagatgttggaggagatcatgaagtatgaagcatcaatcctgacacacgacagctccatccgctatctgcaggaaatttacaattctaataaccagaagatcgtcaacctgaaggagaaagtagcccaactcgaggcacaatgccaggagccctgtaaggacaccgtacagattcacgatattactggtaaggattgccaagacatcgccaacaagggtgcaaaacagtccggtttgtacttcatcaagccgctgaaagccaaccaacaattcctggtttactgtgaaatcgatggctctggcaatggctggactgtcttccagaagcgactggacggaagcgtcgacttcaaaaagaattggatacagtataaggaggggtttggacatctgtccccaaccggaacgactgaattctggctgggaaacgagaagattcatctgatcagcacccagtccgcaattccctatgcactcagagtggaattggaggactggaacggccgcacatccacagctgattatgcaatgttcaaggtgggacccgaggctgataagtataggctgacttatgcctatttcgccgggggtgatgctggggacgcttttgatggattcgactttggagacgacccatctgataagtttttcacgagtcacaacgggatgcaatttagtacctgggacaacgataatgacaaattcgagggaaattgcgccgaacaggatggcagcggttggtggatgaacaaatgccatgccggccatctgaatggggtatattatcaggggggcacttattccaaggctagtactcctaatggttatgacaacggtattatctgggccacctggaagactaggtggtattctatgaagaaaactaccatgaaaatcatcccgtttaaccgactgacgatcggggagggtcagcagcatcatctcgggggggcgaaacaagtgcggcccgaacatcctgcggagactgaatacgatagcctctatccagaagacgatctg

SEQ ID NO: 209886 - DNA, 1359 bp, Artificial Sequence
  derived and/or modified sequence
atgagttggtctctgcaccctagaaatctaattttgtacttttatgccctgctttttctgtcgtctacttgcgtggcatacgtggcaactagagacaattgttgcattttggacgagcggttcggatcatattgccctaccacttgcggaatagcagactttctgtccacctatcagacaaaggttgataaggatttgcagagcctcgaggatattctccaccaggtcgagaataaaacatcagaggtcaagcagttgattaaagccatacagttgacttataaccccgatgagtccagcaagcctaatatgatcgacgccgccacactgaagtctcgcaagatgttggaagagatcatgaagtatgaagctagtattctcacccacgattcatcgatccggtacctgcaagagatatataatagtaacaaccagaaaatcgtgaatttgaaggagaaggtagcacagctagaggcccagtgtcaggagccttgtaaggatactgtacagattcacgacattacaggaaaagattgccaggacattgcgaacaaaggcgccaaacagagcggcctgtactttatcaagccgctaaaagccaaccagcagttcctcgtatactgtgagatcgacggatccgggaacggctggaccgttttccagaaacgtctcgatggctctgtagacttcaaaaagaactggatccagtataaggaagggtttgggcacctaagtcctaccgggactacggagttttggcttgggaacgagaaaatccacctcatctctacccagagtgcaattccctatgcgctgcgggtagagttagaggactggaacggtagaacctcgacagccgattacgcaatgttcaaggtgggcccggaggcggacaaatatcggctgacttatgcctactttgccggcggcgacgcaggggatgccttcgacggatttgatttcggagatgatccttccgacaagttttttacttctcacaacggcatgcagttcagtacatgggataacgacaatgacaagtttgagggtaactgtgcggagcaagacggatcaggttggtggatgaataaatgtcatgcaggccaccttaatggagtttactaccagggcggcacgtactccaaagccagtacccctaacgggtacgataatggtattatatgggctacatggaaaacaaggtggtattctatgaaaaaaaccacaatgaagataattccttttaatcggctgactattggtgaaggtcaacaacaccacttgggcggggccaagcaagttcgtccggaacaccctgctgaaactgagtatgattcattataccccgaggatgacttg

SEQ ID NO: 209887 - DNA, 1359 bp, Artificial Sequence
  derived and/or modified sequence
atgtcttggtcgctacacccccggaacctcatcctgtatttttacgctttgctgtttctatcaagcacatgcgtggcttatgtggccacacgcgacaactgctgcattctagacgaaagatttgggtcatattgccctactacctgtggcattgccgatttcctgtccacctaccagacgaaagtcgataaagacttgcagagcctggaagatatcctgcatcaggtcgagaataagacctccgaagtgaaacagcttataaaagctatccagctgacatataatcccgacgagtcctccaagccaaacatgattgacgccgctacactgaagtccaggaagatgctcgaggagattatgaagtatgaggcttctattctgacccacgattccagcatccggtacttacaggagatctataactcaaacaaccagaagattgtgaatctgaaggagaaggtggcccagcttgaagcgcagtgtcaggagccatgtaaggataccgtgcagattcacgacatcacggggaaggactgccaagatattgctaacaagggcgcaaagcagagcgggctgtactttatcaagccactcaaagccaaccaacagttcctggtgtactgtgaaattgatggatcgggcaacggttggacagtgtttcaaaagcggctagatgggagcgtggattttaagaaaaactggattcagtataaggaaggctttgggcaccttagccccaccggcactacagaattttggctcggaaacgaaaagatacatctgatcagcacgcagtccgccataccttatgccttgagggtggagttagaagactggaatggaaggacctcaaccgctgactatgcaatgttcaaagtgggacctgaggcagataagtaccgtctgacttatgcctattttgccggaggagatgccggggacgccttcgacgggtttgattttggagatgatccttcagacaagttttttacttctcacaacggcatgcagttttcaacatgggacaacgacaacgacaagttcgagggaaattgtgccgaacaggatggcagcggctggtggatgaacaaatgtcacgccggccacctgaatggagtgtactaccagggagggacatactccaaagcgtctacgcctaatggttacgacaatgggatcatctgggccacgtggaaaacaaggtggtactctatgaagaagactacaatgaaaatcatcccgttcaacagactcacgatcggcgaagggcagcagcaccacttgggtggtgctaagcaagtcaggcccgagcatcccgccgaaacggaatacgatagtttgtaccctgaggatgacttg

SEQ ID NO: 209888 - DNA, 1359 bp, Artificial Sequence
  derived and/or modified sequence
atgagttggtcattgcatcctaggaacctcatcctgtatttttacgccctcctctttttgagctcaacctgtgtagcttacgtggccacccgggacaattgttgcatcctggatgaacgcttcggctcatactgcccaaccacctgtggtatcgcagactttttgtcaacctaccagaccaaggtcgacaaggacctccaatcgctggaagacatcctacatcaagttgaaaataaaacatcagaggtgaaacagctgatcaaggctatccaattaacttacaacccagatgagagtagtaaaccaaatatgatcgacgcggcaactcttaagagccgtaagatgctggaggagatcatgaaatacgaggcttccatcctgacccacgattcaagcatcagatacctgcaggaaatctacaattccaacaaccaaaaaatagtgaaccttaaggaaaaggtggcccaactcgaggctcaatgccaggaaccatgcaaagataccgttcagatccacgacattaccggcaaagattgccaagatattgcgaataagggtgctaaacagtctggactttattttataaaaccacttaaggcaaaccagcaatttctcgtgtactgcgagatcgatggtagcgggaacggctggactgtcttccagaagcgccttgatgggtctgtcgacttcaaaaagaactggatccagtataaagaggggttcggtcacctgagcccaacgggaacaactgagttctggctcgggaacgaaaagatccatctgatcagcacccaatccgccatcccgtatgcactgcgcgttgagctggaggactggaacggaaggacatctactgccgattacgcaatgttcaaggtcggaccagaggctgataagtacagactgacttacgcttacttcgctgggggggacgctggcgatgccttcgacggattcgattttggagacgatccttccgataaattctttacatcacacaacggcatgcagttcagtacctgggataacgacaacgacaagttcgagggcaactgtgccgagcaggatggcagcggctggtggatgaacaaatgtcacgcaggccacctgaacggagtttactaccaggggggcacctacagtaaggccagcacccccaacgggtatgacaatggcatcatctgggccacttggaaaaccagatggtattccatgaagaaaactactatgaaaatcatcccctttaatcgccttacaatcggggaaggccagcagcaccacctgggaggagccaagcaggtgagaccagaacatccagccgaaacagagtatgatagcctgtaccctgaagatgatctt

SEQ ID NO: 209889 - DNA, 1359 bp, Artificial Sequence
  derived and/or modified sequence
atgagctggtccctccacccgcggaatcttattctgtacttttatgcacttctcttcctgtccagcacctgcgtggcctacgtagcaaccagagacaattgctgtatcctggatgaaaggttcggatcgtactgccccaccacctgcgggatcgctgactttcttagcacctaccagacgaaggttgataaggatctgcagagcctcgaggacatactgcaccaggttgagaataagacttccgaggtgaagcagctaattaaggcaatacaactgacctacaatccggacgagagcagtaagccaaacatgattgatgctgccacactcaaatctcggaaaatgctagaggaaataatgaaatacgaagcgagtattctgacacatgattccagcataagatacctgcaagaaatctataatagtaacaaccagaaaatcgtgaatctgaaggaaaaagtggcacagcttgaagcacagtgtcaggagccttgcaaggacactgtccagatacatgacatcactggaaaagattgccaggacatagcgaacaagggagcaaagcagagcggactctatttcataaaacccctcaaagccaatcagcagttcctcgtttattgcgagattgatggaagcggaaacggttggactgtgtttcagaagcggctcgacggctccgtagatttcaaaaaaaactggatccagtacaaggaaggttttggtcatctgtcccctactggaaccacagagttttggttgggaaacgagaagatccatcttatctccacccagagcgccattccttatgcccttagagtggagctagaagactggaatggacgcacgtcaactgcggattatgccatgttcaaagtgggccctgaagcagacaagtatcggctgacctatgcatattttgctggcggagatgctggagacgccttcgacggttttgatttcggagacgatcctagcgataagtttttcacatcacacaacgggatgcagttcagcacatgggataacgacaatgacaagtttgaggggaattgcgcggagcaggacggatcaggatggtggatgaataagtgtcacgctggtcacctgaacggcgtctattaccagggaggaacctactcaaaagcctctactcctaacggctacgataatggtatcatatgggcaacatggaaaacacgctggtactccatgaaaaaaaccacaatgaagatcatacccttcaaccgattgaccataggcgaagggcagcaacaccacttagggggggcgaagcaggttcggccagaacaccctgcggagacggagtacgatagtttgtacccagaggatgatctt

SEQ ID NO: 209890 - DNA, 1359 bp, Artificial Sequence
  derived and/or modified sequence
atgtcatggtctttgcatcccaggaatctgatcttgtacttctatgctctcctcttcctctcttcgacttgcgttgcctacgtggccacacgagacaattgttgcatcttagatgaaagattcgggtcctactgtcctaccacctgtgggattgccgatttcttatcaacataccagaccaaagttgataaggacctacagagtcttgaggacatcttgcaccaagtcgagaataagacgtcagaagtgaaacaactgattaaggctatccagctgacctataacccggatgaatcttcaaagcccaacatgatcgacgccgccacactgaagtcgcgtaagatgcttgaggaaatcatgaagtacgaggctagcatccttacccacgattcgtccatccgatacctacaggaaatctacaacagcaacaaccagaagattgtcaatctcaaagagaaagtggcacagttggaagctcagtgtcaggagccttgcaaggataccgtccaaatccacgacatcactggcaaggactgtcaagacatcgcaaacaagggcgctaagcagtccgggctctacttcattaaacccctgaaggctaaccagcagttcttagtgtattgcgaaattgatggctcaggaaatggctggactgtgtttcagaaaaggctggatggatccgtggacttcaaaaagaactggatccagtacaaagagggcttcggccatctaagtcccaccggtactacagagttctggcttggcaacgaaaaaatccacctcatctctacgcaaagcgctataccctatgctctccgggtggagctcgaagattggaatgggaggacctctacagccgattacgctatgtttaaggtgggtcctgaggccgacaagtatcggctgacctacgcttattttgcaggaggggacgccggggatgcatttgatggattcgactttggggacgacccttctgacaagttctttacaagccacaacggaatgcagttttcaacatgggataacgacaatgacaagttcgagggtaattgcgcagagcaggacggttcgggatggtggatgaataaatgtcacgctgggcatctcaacggcgtctactaccagggtggcacctactcgaaagcgtctacaccaaacggttatgataacgggataatctgggccacttggaaaactagatggtattccatgaaaaagaccaccatgaaaataatcccgtttaacaggcttactattggcgaggggcagcagcatcacctcggcggtgcaaagcaagtgagaccagaacatcccgctgaaacagagtatgactctttgtaccctgaggatgacctc

SEQ ID NO: 209891 - DNA, 1359 bp, Artificial Sequence
  derived and/or modified sequence
atgagctggagcctgcatcctcgaaacctgatcctctacttctacgccctgctgttcctgtcatccacatgtgtggcttatgtcgctacaagggacaattgttgcatcctggacgagcgctttggatcatactgccccaccacatgtgggatcgctgacttcttaagcacatatcagaccaaggtagacaaagacctacaaagtctcgaggacattctccaccaggtagagaataagactagcgaagtcaagcagttgatcaaggccatccaattgacatataatcccgatgagtcctctaagcctaacatgatcgatgccgccactttaaaatcacggaagatgcttgaggagatcatgaaatacgaagcttccatactgacacacgactccagtattcgttacttgcaggaaatctataattctaacaatcagaagatcgttaacctgaaggagaaggttgcgcagcttgaagcccagtgccaggaaccttgcaaggatacggtccagatccacgatatcactggcaaggactgccaggatattgccaataagggggcaaagcagagtgggctttacttcattaaacctctaaaagccaatcagcaattcctggtgtactgcgagatcgacggtagcggcaacgggtggaccgtcttccagaagagactcgacggatcggtcgatttcaaaaagaactggattcagtacaaagaaggatttggccatctctccccaacaggcactaccgagttttggcttggcaacgagaagatccatctgattagtacccaatcagctatcccatatgccctgcgggtggaattggaagactggaacggccgcacttccacggccgactatgccatgttcaaagtgggcccagaagctgacaagtatagactgacttatgcatacttcgctggaggcgatgctggtgatgccttcgacggctttgacttcggggatgatccgagtgacaagttcttcaccagtcataacggcatgcagttctccacttgggataatgataatgataaattcgaaggcaactgtgccgaacaggatggtagtggatggtggatgaacaagtgtcatgctggccacctgaacggcgtttattatcagggaggcacgtactcaaaggcctccactcccaatggatacgataatggaataatctgggccacatggaaaactcgctggtactctatgaagaagacaaccatgaaaattattcccttcaaccgactaacgattggggagggtcaacagcaccaccttgggggcgctaagcaggtccgtcccgagcatcctgccgagacagagtacgacagcctatatcccgaggacgatctg

SEQ ID NO: 209892 - DNA, 1359 bp, Artificial Sequence
  derived and/or modified sequence
atgagttggtcactacatccaagaaacttgattctgtacttttacgccctgttgtttctgtcctcaacctgtgtggcatacgtagccacgcgcgataactgctgcatactcgacgagcggtttggctcatactgtccaactacttgcggtattgcagattttctatcaacttaccagaccaaggtcgataaggacctccagagcctggaagacattctgcaccaggttgaaaacaaaactagcgaagtcaaacagttgatcaaggccatccagctaacatacaaccctgacgagtcttcgaagccgaatatgatcgacgctgcaaccttgaaatcacgaaagatgctcgaggaaataatgaagtatgaggcctctatactcacccacgactcttccataaggtatctccaggagatttataactctaacaaccagaaaattgttaacttgaaggagaaggtggctcaattggaggcccagtgtcaggagccatgtaaggataccgtccagattcacgatataacgggcaaggactgtcaggacattgctaacaaaggagcaaaacagtccggcctgtacttcatcaagccgctgaaggctaaccaacagttcttggtttattgtgaaatagacgggagcgggaacggttggactgtctttcagaagagacttgatggaagcgttgatttcaaaaaaaactggattcagtataaagaaggctttggccacctctccccgactgggactacagagttctggctgggaaacgaaaaaatacatttgatctccactcaaagtgctataccttacgcactgcgggtcgagctggaggactggaacgggaggacatctactgcggattacgctatgttcaaagttggcccagaggccgataagtatcgactgacctacgcctatttcgccggaggagacgccggcgatgcctttgatgggtttgattttggagatgatccctctgacaaattcttcacatcccataatggaatgcagttctctacatgggataacgacaacgacaagtttgagggtaattgcgccgagcaggacggctccggatggtggatgaataaatgtcatgctggacatcttaacggggtctactaccaaggcggcacttatagcaaagcctccacgcctaacggctacgataacggtattatttgggccacatggaagacacgatggtatagcatgaagaagaccactatgaagattattccttttaacagactgacaattggggaaggtcagcagcaccatctgggcggcgccaagcaagtgaggccagaacatcccgcagagactgaatatgattccctatatcctgaggacgaccta

SEQ ID NO: 209893 - DNA, 1359 bp, Artificial Sequence
  derived and/or modified sequence
atgagctggtccctgcacccgaggaatctgatcctctacttttacgcattactttttctttcgagtacctgtgtggcttatgtcgctactcgtgataactgttgcatccttgatgagaggttcgggtcctactgccctaccacatgcggaattgccgatttcctgtccacttatcagactaaagtggacaaagatctccagagcctggaagacatcttgcatcaagtggaaaacaagacgtccgaggttaagcagctgatcaaggcaatccagttgacttacaatcccgatgagagtagtaaaccgaacatgattgatgccgctacactcaaatccaggaagatgttggaagaaatcatgaagtacgaagcttctatcctgactcacgacagttccattagatatctccaagagatctacaactctaataatcagaaaattgtcaatctgaaggaaaaggtggcccagttggaggcacaatgtcaggaaccgtgtaaggacactgtgcagattcatgatatcaccggaaaagattgccaggatattgccaacaagggagcgaaacaatccgggttgtactttatcaagcccttgaaagcgaatcagcagtttctggtgtactgcgaaatcgacgggtcaggcaatggctggaccgtatttcagaaacggttagatgggtcagttgatttcaagaagaactggatccaatacaaagagggattcggccacctttcgcccaccggaacaacagagttctggctgggaaacgaaaagatccacctcatcagtacacagagcgctatcccctacgctttgagagtggaactggaggactggaatggcaggacgtctacagccgactatgccatgtttaaagttgggcccgaggccgataagtataggctgacgtacgcatatttcgcgggcggcgatgccggtgacgcctttgacggcttcgatttcggagacgatccctccgacaaattcttcactagtcacaacggcatgcagttctccacatgggataatgataatgacaaattcgagggcaattgtgccgaacaggatgggagcggctggtggatgaacaagtgtcatgctggccacctgaatggtgtgtattatcaagggggtacgtactctaaggcgagcacccctaacggctatgacaatgggattatatgggcaacgtggaagaccaggtggtattccatgaagaaaacaaccatgaaaattatcccgttcaaccgacttaccataggggaagggcaacaacaccacctaggcggggctaaacaagtcagaccagagcatccagccgagaccgaatacgattccctgtatccggaagatgatctc

SEQ ID NO: 209894 - DNA, 1359 bp, Artificial Sequence
  derived and/or modified sequence
atgagctggagtctgcacccacgaaacctgattttgtatttttacgctctgctctttctcagctctacatgcgtggcatatgtcgccactcgagacaattgttgcattcttgatgagaggtttggcagttattgcccaacgacatgtggcatcgcggactttctctcaacctaccaaaccaaggttgataaggacctgcagtctctggaggatatccttcaccaagtagaaaacaaaacttccgaagtgaaacagctgattaaagctatccagttgacctataatcctgacgaaagctcaaagccaaacatgattgacgccgcaactttaaaaagtcgaaagatgctagaagagatcatgaagtatgaagcaagcatcctgacccacgattcatcaattcgttatctccaggagatttataattcaaataatcaaaaaatagtgaacttgaaagagaaggtggctcaattggaggcacagtgtcaggaaccctgtaaagatacggtccagatccacgatataactgggaaggactgccaggatattgccaacaagggcgctaagcagagtggtctgtattttattaagccgctgaaggcaaaccagcagtttcttgtgtactgtgagatcgacgggtccggcaatgggtggacggtgttccagaagcgtcttgatggctcagtggattttaagaaaaattggattcagtacaaagagggatttggacacctgagtccaacagggactaccgaattctggctcggtaacgaaaaaatacacctgattagtacccaatctgctatcccttatgctctacgcgttgagctggaagattggaacggccgcaccagtaccgcggattacgctatgttcaaggtgggcccagaggctgacaagtacaggctgacctacgcttattttgcaggtggcgatgcgggcgacgcgtttgacggttttgatttcggggatgatccctctgataaattttttacctcccataatggaatgcagttttctacatgggataatgataacgacaaattcgagggcaactgcgcagaacaggacggcagcgggtggtggatgaacaagtgccacgctggacatctgaacggcgtgtactaccagggcggtacctattcaaaagcctcaactcccaacgggtacgataacgggatcatctgggctacatggaagactagatggtatagcatgaagaagacaaccatgaagatcatacccttcaaccgtctgaccatcggggagggtcagcagcatcaccttggtggagctaagcaagttcgtcccgagcaccccgctgagaccgaatatgatagtctttaccctgaggacgacctg

SEQ ID NO: 209895 - DNA, 1359 bp, Artificial Sequence
  derived and/or modified sequence
atgtcttggagcctgcacccgcgaaacctcattctgtatttctatgcactgttgttcttgtctagcacttgcgtggcgtatgtggctaccagggacaactgctgtattttggacgagcggttcggcagctactgtccaaccacatgtggtattgccgattttctgagcacctatcaaactaaagtggataaagatctccagtctctggaggacatactccatcaagtggaaaacaaaacctcagaagttaagcaactcattaaagctattcagctcacttacaatcctgatgaatcttccaagcccaatatgatcgatgctgcaacactcaagagtagaaagatgctggaagaaatcatgaaatacgaggccagcattcttactcacgactcaagtatcagatacctgcaagaaatctacaattccaataatcaaaagatcgtaaacctgaaggagaaagtcgcacagctggaagctcagtgtcaggagccctgcaaagataccgtccagattcacgacatcactggaaaggattgccaagacattgcaaacaagggcgccaagcagtctggcctgtacttcatcaagcctctcaaagcaaatcagcagtttctggtctactgtgagatcgacggctctggcaatgggtggactgtgttccagaaaagactggatggatccgttgactttaagaagaattggatccaatataaggagggctttggtcatctcagtcccaccggcacaactgaattttggctcggaaatgagaaaatccatctgatatctactcagtcagcgatcccgtacgcacttagggtggagctcgaagactggaatgggcgaaccagcactgcggactatgcaatgtttaaggtgggacccgaggccgataagtacaggcttacctatgcttactttgcagggggcgacgccggcgacgcctttgacgggtttgactttggcgatgatccctccgataaattctttactagtcacaacggtatgcagttcagcacatgggacaacgataatgacaagttcgaggggaattgtgccgagcaggacggttctggatggtggatgaacaagtgccacgcgggtcacctcaatggcgtgtactatcagggaggaacatacagcaaggccagtactccgaatgggtacgataacgggattatttgggccacttggaaaacccgatggtactcaatgaaaaagacgactatgaaaatcattccgtttaacagacttacaattggcgagggacagcagcaccatctgggcggagcaaaacaggtaagaccggagcaccctgccgaaaccgaatacgactccctgtacccagaagacgatctc

SEQ ID NO: 209896 - DNA, 1359 bp, Artificial Sequence
  derived and/or modified sequence
atgtcttggtctttacatccaaggaatttaattttatatttttatgcacttttatttttatcatcaacttgtgttgcatatgtcgctaccagagataattgttgtattcttgatgaaagatttggaagttattgtccaacaacatgtggaattgcagattttctttcaacatatcaaacaaaggttgataaagatttacaatctttagaagatattcttcatcaagttgaaaataagacaagtgaagtaaagcaattaattaaagcaatacaacttacatataatccagatgaatcttctaaaccaaatatgattgatgctgctactcttaaatcaagaaaaatgttagaggaaattatgaaatatgaagcatccattttaactcatgattcatctattcgttatttacaagaaatatataattcaaataatcaaaaaattgtaaatcttaaagagaaagtagcacaacttgaagcacaatgtcaagaaccatgtaaagatactgttcaaatacatgatattacaggaaaagattgtcaagatattgcaaataaaggtgctaaacaatctggtttatattttattaaaccacttaaagctaatcaacaattcttagtatattgtgaaatagacggatcaggaaatggatggactgtatttcaaaaaagacttgatggatcagtcgattttaaaaagaattggattcaatataaagaaggattcggacatttatcacctacaggtactactgaattctggttgggtaatgaaaaaattcatttaatttcaactcaatctgcaattccatatgctttaagagttgaattagaagattggaatggtagaaccagtacagcagattatgcaatgtttaaggttggacctgaagcagataagtatagattgacatatgcttattttgcaggaggagatgcaggagatgcattcgatggttttgattttggtgatgatccatctgataaattttttacatcacataatggaatgcaatttagtacatgggataatgacaatgataaattcgaaggaaattgtgcagagcaagatggatccggatggtggatgaataagtgtcatgctggacatcttaatggagtttattatcaaggtggaacatattctaaagcatctactccaaatggatatgataatggaattatttgggcaacatggaaaacaagatggtattcaatgaaaaaaacaaccatgaaaattattccatttaatagattaacaataggagaaggacaacaacatcatcttggaggagcaaaacaagttagaccagaacatccagctgaaacagaatatgatagtctttatccagaagatgatttg

SEQ ID NO: 209897 - DNA, 1359 bp, Artificial Sequence
  derived and/or modified sequence
atgtcatggtcactccatccaaggaatctgatcctctatttttatgccctcctattcttatcttctacatgcgtggcatatgtcgcgacacgcgataattgctgtatcttagatgagaggtttggatcctattgccctactacatgtgggattgccgattttttatctacatatcagacaaaagtggataaagaccttcagtcccttgaagacatcttacaccaggttgaaaacaaaacatccgaagtaaaacagctcatcaaagccatccagctaacatataaccccgatgaatcctcgaaacctaatatgatcgatgcggctacacttaaatctaggaagatgcttgaagaaatcatgaaatatgaggctagtatacttacacatgatagttccattaggtatttgcaggagatatataactcaaataaccaaaaaatcgtgaatctgaaagagaaagtggcacagctcgaggctcagtgccaggaaccctgtaaagatactgtgcagatacatgatattacagggaaagattgccaggatatcgcaaataaaggagctaaacagtcaggactatatttcataaaaccacttaaagcaaatcagcagtttctggtgtattgtgaaatcgatggaagtggaaatggatggactgttttccagaaacgtctcgatgggagtgtcgattttaagaaaaattggatccagtacaaagaaggattcggacacctgtcccccacaggaacaacagaattttggttagggaatgaaaaaatccacctaatctccactcagtccgcaattccctacgctttgagggtggaactggaagattggaacggaagaacaagtacagccgattatgcaatgttcaaagtagggccagaagctgataaatatcgccttacttatgcctatttcgcaggaggagatgccggggatgcattcgatggatttgatttcggagacgacccctccgacaaattcttcacttcccataatggaatgcagttttccacatgggataatgataacgacaaattcgaaggaaattgcgccgaacaggatggatccgggtggtggatgaataaatgccacgcaggacaccttaatggggtgtattatcaggggggaacatattctaaagcctctactccaaacggatacgataatgggattatatgggctacatggaaaactcggtggtattccatgaaaaaaactacaatgaaaatcatcccgttcaaccgactaacaataggagaagggcagcagcatcatctcgggggagccaaacaggttaggcctgaacatcctgctgaaacagaatatgattccctgtaccctgaagacgacctt

SEQ ID NO: 209898 - DNA, 1359 bp, Artificial Sequence
  derived and/or modified sequence
atgtcttggtcactccatcctaggaatctaatcctatacttttatgccctgctcttcctcagctcaacctgcgtggcatacgtggctactagagataactgttgcattcttgacgagcgattcgggtcctactgcccgaccacctgcggcatcgctgatttcctgtccacataccagaccaaagtggacaaggatcttcagtcactggaggacattctccatcaggtggagaataagactagcgaggtcaaacagttaatcaaagccatccagctgacatacaatcccgacgaatcttctaagcctaatatgatcgacgccgcgaccctaaagtcccgtaaaatgctagaagagataatgaaatacgaggcttcaatactgacgcatgactcctccattcgctatctgcaggagatatacaactcaaataatcagaaaatcgtgaacctgaaggaaaaagtggcgcagctggaagcccagtgccaggagccatgcaaggacacggtccagattcacgatattaccggcaaggattgccaggacatcgccaacaagggggccaagcagtccggcctgtatttcattaaaccacttaaggcgaatcagcagtttctcgtttactgtgagatagacggatctgggaatggatggacggtgttccaaaaaaggctggacggatccgtcgactttaagaagaattggatccaatacaaagaggggttcgggcacctctccccaaccggaacgaccgagttttggctgggcaatgaaaaaatacacctgatctctacacagagcgccatcccctatgcccttcgcgtggaactggaagactggaacgggaggacatccaccgcagattacgcgatgtttaaagtggggcccgaggccgacaaataccgtctaacatacgcatatttcgcgggcggcgacgcgggagacgccttcgacgggttcgatttcggagatgatccttctgacaagttcttcaccagccacaacggtatgcaattctctacgtgggacaacgacaacgataagttcgaagggaactgcgcagaacaggatggcagcgggtggtggatgaacaagtgtcatgccggacatctgaatggagtgtactaccaagggggcacatattctaaggcaagcaccccaaatggctatgataatggcataatctgggcaacctggaagacccgatggtactcgatgaagaagaccacaatgaagattatcccctttaatagactgaccatcggcgagggacagcaacaccacctgggcggcgccaaacaggttcgacccgagcacccagccgagaccgagtatgactctctgtatccagaagatgacttg

SEQ ID NO: 209899 - DNA, 1359 bp, Artificial Sequence
  derived and/or modified sequence
atgtcatggtcactccaccctcgaaaccttatcctttacttttatgctctgttgttcttaagttcaacttgcgtggcttatgttgcaacacgtgacaactgctgcatattggatgaaagatttggctcttactgcccaactacttgtgggatagccgacttcctgagtacttaccaaactaaagtcgacaaggatttacagtcattagaagacatccttcaccaagttgagaacaagacatctgaagttaagcagcttataaaggcaattcagcttacttataacccagatgagtcctcaaagcctaacatgattgacgcagcaactcttaaaagcaggaagatgttggaggagattatgaagtacgaggcttcaatcctcacccatgattcctcgataaggtatctccaagagatctacaattctaacaatcaaaaaattgttaaccttaaggaaaaagttgcccagttagaggcgcaatgtcaggaaccttgtaaggatacagtgcaaattcatgacattacagggaaagactgtcaagacattgcaaataaaggtgctaagcaatcaggactttactttattaagcctttgaaggccaaccagcagttccttgtttattgtgagatcgacggtagcggcaatgggtggacagtgtttcaaaaaaggcttgatgggagtgtcgattttaagaaaaattggatacaatataaggaggggtttggacatttatcgccaacaggaacaaccgagttttggcttggtaatgaaaaaatccaccttatttctacccaaagcgctattccgtatgctcttagggtcgagcttgaagactggaacggaaggacctcaacagcagattacgctatgtttaaagtgggacctgaagctgacaagtacaggcttacatatgcctattttgcgggaggtgatgctggggacgcattcgatggttttgattttggtgatgatccttcagataagttcttcacctcgcataatggtatgcagttttcaacttgggacaacgataacgacaagtttgaggggaactgcgcagagcaagacgggtcaggatggtggatgaacaaatgccacgctggacatctgaacggggtgtattatcagggagggacgtattcgaaagctagtacacctaacggctatgataatggcatcatctgggctacttggaagactcgctggtacagcatgaagaaaaccactatgaagatcataccttttaacaggcttactattggggaaggtcagcaacaccatttgggtggggcaaaacaggtccgtcctgaacatcctgcagagaccgaatacgactctttgtaccctgaggatgatctg

SEQ ID NO: 209900 - DNA, 1359 bp, Artificial Sequence
  derived and/or modified sequence
atgtcgtggagccttcacccacgcaatttgatcctttatttctatgccctgttatttcttagtagcacatgcgtggcgtatgttgcaaccagggacaactgttgtatattggacgagcgcttcggatcgtactgccctacaacctgcggtatagctgacttcctgtcaacctatcagacaaaggtcgacaaagacctccagtcactggaagatattttgcatcaggttgagaataagacaagcgaagtcaaacaactgattaaagcgattcagctaacctacaatcccgatgaaagcagtaagcccaacatgatcgatgcggctacattaaagagccgcaagatgctggaagagattatgaaatacgaggcaagcatcctgacccatgacagtagtattcgctacctccaggagatctacaatagcaataatcagaagattgttaacctgaaggaaaaagtggcccaattagaagcacagtgtcaggaaccttgtaaggataccgtgcaaattcatgacattaccggcaaggattgccaagacatcgccaacaagggcgcgaaacaaagtggcctctatttcattaaacccctcaaggctaatcagcagtttctggtgtactgtgaaattgatgggagcggcaatggatggaccgtcttccagaaacgactggacgggagcgtggacttcaagaaaaattggattcagtacaaggaaggcttcggtcacctgtcccctacaggcacaacagaattctggctgggcaatgaaaagatccacctgatatctacacagtctgcaattccctacgctctgcgggtggagctcgaagactggaatggtcgcacgtctaccgcagattacgccatgttcaaggtcgggcctgaggctgacaagtatcgtctgacctacgcttatttcgctggtggggacgccggggatgctttcgacggattcgactttggtgatgacccttcagacaaatttttcactagccataacggcatgcagttttccacttgggataatgataatgataagtttgaaggaaattgtgcagaacaggatgggtcaggttggtggatgaacaaatgccatgcaggacacctgaacggggtttattaccagggcggtacttacagcaaagcttctactccaaatggctatgacaacggcattatttgggcaacttggaagactaggtggtacagcatgaagaagacgactatgaagattatcccctttaataggctgactataggcgagggccaacagcatcatttgggcggcgcaaagcaggtccgcccagaacatccggcagaaacagagtatgactcattatacccggaagacgatctt

SEQ ID NO: 209901 - DNA, 1359 bp, Artificial Sequence
  derived and/or modified sequence
atgagctggagcctgcatcctaggaatctcatcctgtacttctatgccctgctcttcctctcctcaacctgcgtagcttacgtcgccacccgcgataattgttgcattctggacgaaaggtttggtagctactgtcccactacttgtggtatcgctgactttctctcaacttaccaaaccaaagtggataaggacctgcagtctctggaggacattttgcatcaggtggagaacaagacatccgaagttaaacagctgatcaaggccatacagttgacatataaccctgatgaatcatcaaagcctaatatgatcgatgctgctactctcaagagcaggaagatgctggaagaaatcatgaaatatgaggctagcattctgactcatgactccagcatcaggtatctgcaggagatttacaattctaacaatcagaaaatcgtcaacttgaaagaaaaagtggctcagctggaagcgcagtgccaagagccctgtaaggacactgtccaaattcacgatatcactggaaaagactgccaggacatcgcgaacaagggcgccaaacagagcggactgtatttcatcaagcctttgaaggccaatcaacaattcctggtgtactgcgaaatcgatggatccggtaacggatggacggtattccagaaaaggctcgatggctcagtggacttcaagaagaactggattcaatataaagaaggattcggacacctttctccgacgggcacgacagagttctggctcggcaacgagaaaatccacctcatctccacccagtctgccatcccatatgcattgagggtcgagttggaagattggaacggtagaactagcactgctgattacgccatgttcaaggttggccctgaggcggacaagtacagattgacttacgcctacttcgccggaggagatgccggcgacgcatttgacggtttcgacttcggcgacgatccatctgataagttcttcactagccataacggtatgcagtttagcacttgggacaacgataacgacaagttcgagggcaactgcgctgagcaggatggatcaggatggtggatgaacaagtgccatgcaggtcacttgaacggagtgtactaccaaggtggtacatactcaaaggcatctactcccaacggatacgacaacggtatcatttgggctacctggaagaccaggtggtactctatgaaaaagactacaatgaagatcataccatttaatcgcctcactattggtgagggccaacagcaccatctgggaggtgccaaacaagtgaggccagagcacccagctgagaccgagtatgattccctgtaccctgaggacgacctt

SEQ ID NO: 209902 - DNA, 1359 bp, Artificial Sequence
  derived and/or modified sequence
atgtcctggtcgctgcacccaaggaatcttatactgtatttctacgcattactgttcttgtctagcacctgcgtggcctatgtagccacaagggataattgttgcatcctggacgagcgctttggaagctactgcccgaccacatgcgggatagcagacttcctatccacataccagaccaaggtagataaagacctgcagtccctggaggatatcctgcaccaggtcgaaaataaaacctccgaggttaaacagctgattaaagccattcagctcacatacaaccctgatgaatcgtcaaaaccgaatatgatcgatgcggccacattaaagagtcggaagatgctggaggaaattatgaagtacgaggcctccatactgacccacgactctagtatcagatacttgcaggaaatctacaactctaacaaccagaaaatcgtgaatttgaaagagaaggtggctcagctggaagcccaatgccaggaaccctgtaaagataccgtgcagattcatgatatcactggcaaagattgtcaggacattgccaacaagggtgccaagcagagcggcctctacttcattaaaccattaaaagctaatcagcagtttctggtgtactgtgagattgatggatcggggaacggttggaccgtctttcagaaaagacttgacggctcagttgactttaaaaagaactggatccagtacaaagaaggcttcgggcatctatcaccgaccgggaccacggaattttggctgggcaatgagaagatccacctgatcagcacacagtcagcaataccgtatgcacttcgagtcgagttagaagactggaacgggcgcaccagtaccgccgactatgcaatgttcaaggtgggacctgaagccgataagtaccgattaacctatgcctacttcgccggaggtgacgcgggagacgcatttgacgggttcgacttcggcgatgatccctcggataagttctttacttcgcacaatggaatgcagttttccacttgggacaatgataatgataaatttgagggaaactgcgcagaacaagacggatcgggctggtggatgaacaaatgtcacgcagggcatctgaatggtgtgtactaccagggcggtacctattccaaggcttctacccccaatggatacgacaacggcattatctgggccacctggaagacaaggtggtactccatgaagaaaacaacgatgaagatcattccctttaatcgccttaccataggcgagggacagcagcatcacctcggcggggcgaagcaagtgcggcccgagcacccagccgaaactgagtacgacagcctctaccccgaagatgatttg

SEQ ID NO: 209903 - DNA, 1359 bp, Artificial Sequence
  derived and/or modified sequence
atgtcttggagtctgcaccccagaaaccttatcctgtacttttacgcccttctattcctgtcctcaacttgcgtggcgtatgtggcgacaagggataattgctgcatcctggatgagcgatttgggagctactgtccaactacctgcgggattgctgactttctgtccacgtaccaaaccaaggtggataaagatcttcagagtttagaggacatccttcatcaggtggagaataagaccagcgaggtgaaacagctgatcaaggccatccagctgacttataaccccgacgaatctagcaaacccaatatgatcgacgcggcaacactcaagtcccgcaagatgctcgaggagatcatgaagtacgaggcgagcatactgacccatgattccagtatccggtatctccaggagatctataactctaataatcagaagatcgtgaacctcaaggagaaggttgcccagcttgaagctcagtgtcaagagccctgcaaggacaccgtgcagattcacgatatcaccgggaaggattgtcaggacattgccaataagggtgcaaagcagtcaggactctactttattaaacctttgaaagcaaatcagcagtttctggtctattgcgagatcgacggatcaggcaacggctggacggtattccaaaagagacttgacgggagcgtggactttaaaaagaattggatccagtataaggaaggtttcggtcacctctccccgacaggcacgactgagttttggctcggtaatgagaagattcaccttatttccacacagtcagcgattccttacgctctgagagttgagctagaggattggaacggcagaactagcacggcagactacgcgatgttcaaagtgggtccagaagcagacaagtacaggctaacgtatgcgtatttcgccggtggggatgcgggcgacgcctttgatggcttcgatttcggggacgatccaagcgacaaatttttcacctcacataacgggatgcagtttagcacttgggataatgataatgataagttcgaaggaaattgtgcggaacaggacgggtctggctggtggatgaataaatgccatgcgggccatcttaacggagtttattatcaggggggcacatactcaaaagcctccaccccgaacggttatgacaacggcatcatttgggccacctggaaaacccgctggtacagcatgaagaagactactatgaagattataccctttaaccggctgaccatcggggaggggcagcaacatcacctgggcggcgcaaaacaggtgcgtcccgagcatccagccgagactgagtacgattctctgtatcctgaggacgatctc

SEQ ID NO: 209904 - DNA, 1359 bp, Artificial Sequence
  derived and/or modified sequence
atgagctggtctctgcaccctcggaatctaatactctacttctatgctctgctctttttgagctccacttgtgtagcgtacgttgcaactagagacaactgctgcattctagatgagagattcggttcctattgcccgacgacttgtggcattgctgactttctgagtacgtatcagaccaaagtcgacaaggatcttcagagtctggaggatatacttcaccaggtggagaacaaaacaagtgaggtgaagcagttgattaaggccatacagctgacctataatccagacgaatcatctaagccaaatatgattgatgcagctaccctgaaatcaagaaagatgctggaggagattatgaaatatgaggctagcattctgacccatgatagtagcatccggtacctgcaggagatatataacagcaataaccagaagatcgtgaacttgaaagagaaagtggcacagctcgaagcccagtgccaggagccatgcaaggacaccgttcaaattcacgatatcaccggcaaggactgccaggatatagcgaacaagggtgcaaaacagtctgggctctacttcataaaacctctgaaagctaaccagcagttcctggtgtactgtgagatcgacggaagcggaaacgggtggactgtcttccagaagagactcgatggatctgtggacttcaaaaaaaattggatccaatataaagagggctttggccatttatcgcccacaggcactaccgagttttggctgggcaatgaaaagatccacctgataagcacccagagtgctatcccatacgcgttgagagtcgagctggaggattggaacggccgtacgtcaaccgctgattatgccatgtttaaggtcggcccagaggcagataagtaccgactcacctacgcttatttcgccggtggggatgctggtgacgcttttgatggcttcgactttggagatgacccaagcgacaaatttttcactagccacaacggaatgcagttctccacctgggataatgataacgacaagtttgagggaaactgcgcggagcaggacgggtccggctggtggatgaataagtgccacgcaggccacctgaacggcgtctactatcagggagggacttacagcaaggcctctaccccgaatggatatgacaatggcattatttgggctacttggaaaacaagatggtactctatgaagaagacaacaatgaagattatcccctttaacaggctcactatcggcgagggccagcagcaccatctggggggagcaaaacaagttcgccccgagcacccagccgaaacggagtatgatagcttgtaccccgaggatgatctg

SEQ ID NO: 209905 - DNA, 1359 bp, Artificial Sequence
  derived and/or modified sequence
atgtcgtggagcctgcacccacggaacctgattctgtatttctatgcattactatttctgagcagcacctgcgtggcatacgttgctacacgtgacaattgctgcattcttgatgaaagattcggctcatattgcccgacgacctgcggcattgcggattttctgagcacttatcagaccaaggtcgataaggacctgcaatccctggaggacatcctgcaccaggtcgaaaacaagacctctgaggtgaaacagctgatcaaagctattcaattgacctataatccggacgagagctctaaacctaatatgatcgacgccgcgacgctgaagagccgcaagatgctggaggaaattatgaaatacgaggcgagcatccttactcatgatagctctattcgctatctccaagaaatctacaattccaataaccaaaagatagtcaacttgaaggagaaagtggctcagctggaggcacagtgccaggaaccttgtaaggataccgttcagattcatgatatcacaggcaaggattgtcaggacatcgctaataagggggcgaagcagtctggcttgtatttcatcaagcctctgaaggcgaatcaacagttcctggtgtactgcgaaattgatggctctggcaatggatggacggtttttcagaaacgattggacggtagcgtggatttcaagaaaaattggatccaatacaaagaaggctttggccatttgagtccgaccggtaccacggagttctggctggggaatgagaaaatccacctgatctctacacaaagcgccatcccatatgctttgagggtcgaactggaggactggaacggccgtacgagcactgcggactatgcaatgtttaaagtcggtcctgaggcggacaaataccgcttgacctatgcgtactttgctggcggtgacgcaggcgacgccttcgacggttttgatttcggtgatgatccaagcgataagtttttcacttcgcacaatggcatgcagttttctacctgggacaatgacaacgacaagttcgagggtaactgcgcagaacaggacggtagcggctggtggatgaacaaatgccatgccggtcacttgaacggagtctactaccagggtggtacctacagcaaagcttcaaccccgaatggttacgacaacggtatcatctgggcgacttggaagactaggtggtacagcatgaagaagaccacgatgaaaatcatcccgtttaaccgactgacgatcggtgagggtcagcagcatcaccttggtggagcgaagcaagtccgtcctgagcatccagctgaaaccgaatacgatagcctgtatcctgaagatgactta

SEQ ID NO: 209906 - DNA, 1359 bp, Artificial Sequence
  derived and/or modified sequence
atgagctggtccctacatccgcgcaatctgatattgtacttttatgccctgcttttcctatcctcaacttgcgtggcctacgtcgctacacgggacaactgctgcattctcgacgagcgcttcggaagctattgcccaacaacctgcggaattgcggacttcttgtctacctatcagaccaaggtcgacaaggacctgcagtctctggaggacatcctgcaccaggtggaaaacaaaacatcggaggtcaagcagctgatcaaagcaattcagctgacctacaatcccgatgagagctccaagcctaacatgatcgacgccgcaacccttaaatccaggaaaatgctcgaggaaatcatgaaatacgaagccagcatactgacccacgattcatctatacggtacttgcaggagatttacaattccaataatcagaagatagtgaacctgaaagaaaaagtggcccagctggaggcccagtgtcaggagccatgcaaggacaccgttcagattcatgatatcactggtaaggattgccaggatatcgccaataaaggcgccaaacagtctggcttgtactttataaaaccactcaaagccaatcagcagttcctggtgtactgtgaaatagatggctcgggaaatggatggaccgtgttccagaagcgtctggatgggtcggtcgacttcaaaaaaaactggatccaatataaagagggcttcggacatctgtcacctacaggcacgaccgagttctggctgggcaatgaaaagattcatctgatttctacccagagcgctattccctatgctttgcgtgtggagctggaagattggaatgggcggactagtaccgctgactatgctatgttcaaggtgggaccagaagctgataagtatcgcctgacgtacgcctacttcgcggggggggacgctggtgatgccttcgatgggtttgattttggagatgacccctctgacaagttcttcacttcacataacggaatgcaattttcgacctgggataacgataacgacaagttcgagggaaactgcgccgaacaagacggtagcgggtggtggatgaataagtgccatgcaggacatctaaacggcgtttactaccagggcggaacatatagcaaagcgagcacacccaacggttatgacaatgggattatctgggccacatggaagacccggtggtattctatgaaaaagacgaccatgaagatcattcccttcaatcgcttgaccatcggggagggccagcaacaccacctggggggtgcaaaacaggtccggccagagcaccccgctgaaacggagtatgattctctatacccggaggatgatttg

SEQ ID NO: 209907 - DNA, 1359 bp, Artificial Sequence
  derived and/or modified sequence
atgtcttggagtttgcatcctagaaacctgattctctacttctatgctctgctgttcttgtccagtacttgcgtggcctacgttgcgactcgggataattgttgcatcttggacgaaagattcggttcatattgccctactacctgtgggattgccgatttcctgtccacgtaccagacaaaggtggataaggacctgcagtctctggaggatatcctccaccaggtggaaaacaaaacttcggaagtcaagcagctgattaaggctattcaacttacctacaatcctgatgaaagctccaagccgaacatgatagacgcggccacgcttaaatccagaaagatgttggaagagattatgaagtatgaagcctctatactgacccatgattcatccatccgatatctgcaggagatatataacagcaacaaccagaaaattgtgaacctaaaggaaaaagttgctcagttggaggcccaatgccaggaaccatgcaaagatactgttcagatccatgatatcacagggaaggactgccaggatatagctaataagggggcgaagcagagcgggttgtatttcattaagccactcaaggcaaatcagcagttcctggtgtactgtgagatagatggtagtggtaacggctggaccgtctttcagaaacggctcgacggcagtgttgattttaaaaaaaattggattcagtataaggaaggctttgggcatctctctcctactggcaccaccgagttttggctgggaaatgaaaagattcatctaatcagcacccagtctgccattccctatgcattacgtgtcgagttagaggattggaatgggcggacctctaccgccgactacgcaatgtttaaagtgggccccgaagccgataaatatagattgacctacgcgtatttcgcaggaggcgacgctggagacgcattcgatggcttcgatttcggggacgatccatcagacaaattctttaccagccataatgggatgcagttcagtacgtgggataacgataacgataagttcgagggtaactgtgccgaacaagatgggtccggatggtggatgaataaatgccatgccggacatctgaacggagtctattatcagggtgggacctattccaaggcgtctactccgaacggctatgataatggcatcatttgggctacgtggaagacgagatggtacagcatgaagaagaccacaatgaaaattatcccgttcaaccgactgaccatcggggagggccagcaacaccacttaggcggggcaaagcaagtgcgacctgaacacccagcagaaacagagtatgatagtctctatcctgaagatgatctg

SEQ ID NO: 209908 - DNA, 1359 bp, Artificial Sequence
  derived and/or modified sequence
atgtcatggtctctccaccctaggaatcttatattatatttttatgcactccttttcttgtcgtccacatgcgtggcttacgttgctactcgcgataattgttgtatccttgacgaacgattcggtagctactgtccgacaacctgcggtatcgccgacttcctaagcacataccagacaaaggtagacaaagatcttcaatcgttagaggatatacttcaccaggttgaaaataagacgtcagaggtcaaacaacttataaaggctatccagcttacttacaatccagatgagtcgtctaaaccaaacatgattgatgctgctactcttaaatctagaaaaatgcttgaagagatcatgaagtacgaggcaagtattctaactcatgacagttccatcaggtatcttcaagaaatttataactccaataatcagaaaatagtgaatttgaaagaaaaagtagcccaattggaagctcagtgtcaggaaccgtgtaaagatactgttcaaatacatgatattactggcaaggattgccaggacatcgcaaataagggagcaaaacaatcgggcctttatttcatcaaaccacttaaagccaaccagcaatttctggtttattgtgaaattgatggatctggtaacggctggactgttttccagaaacgattggatggatctgtagatttcaagaaaaattggatccagtacaaagagggattcggacacctatccccaaccggtaccaccgaattctggcttggaaacgagaagattcacctcatttcgacgcaatcagcaattccctatgctttacgcgtcgaacttgaagattggaacggacgtacttcaacagctgactatgccatgtttaaagttggaccagaagccgataagtatcgtttaacgtacgcttacttcgcaggaggcgacgcaggagacgcattcgacggatttgattttggagatgatccatcagacaaattctttacatcccacaatggaatgcaattctccacatgggataacgacaacgacaagtttgagggaaactgtgcagaacaagacggttcaggatggtggatgaataaatgccatgcaggacatttgaacggagtgtattaccaaggaggaacttactctaaggcaagtacgccaaacggatatgacaacggaattatttgggctacttggaagactagatggtatagtatgaaaaagaccactatgaagattataccgtttaatcgtttgacgattggagagggacagcaacaccatctaggaggagcaaaacaggttcgaccagaacatcctgctgaaactgaatacgattctttgtacccagaagatgatctc

SEQ ID NO: 209909 - DNA, 1359 bp, Artificial Sequence
  derived and/or modified sequence
atgtcatggtcactccacccccgtaacctgatcctgtacttctatgcccttctgtttctgagttccacgtgtgttgcctacgtggctacccgggacaactgctgcatcctggacgagcggttcggcagctactgcccaactacatgcggcattgccgacttcttgagtacctatcagaccaaggtggacaaggatctgcagagcttggaggatatcctgcatcaggtggagaacaagacctccgaggtaaagcagctgattaaagccattcagttaacttataatccagacgaaagttccaaaccgaatatgattgacgccgcaacgctgaagtccagaaaaatgctggaggagatcatgaaatacgaggcttccatcctcacacatgatagttcaatacgctacctacaggagatttacaatagtaataatcagaagattgtgaatctaaaagaaaaggtagcgcagctggaggcccagtgccaggagccttgcaaagacacagttcagatacacgatattaccggtaaggactgccaggatatcgctaacaaaggcgcaaagcagagcggactgtatttcataaagcctttgaaggccaatcaacagttcctggtttattgtgagatcgatggaagcggcaatggatggactgtgtttcagaagcgactcgacgggtcagtcgattttaagaagaattggatccaatacaaggaagggttcgggcatctgtcacccacgggaaccaccgaattttggttgggaaacgaaaagatccacctgattagtacacagagtgcaatcccatatgcactcagagtagaactcgaggattggaatggccgcacctccactgccgactatgcaatgttcaaagttggaccagaagctgacaagtaccgcctcacatacgcatattttgcaggtggcgatgctggcgatgctttcgacggctttgattttggcgacgatcccagcgacaaattctttacatctcacaacggaatgcagttttctacatgggataatgacaacgataagttcgaaggcaactgcgcagagcaagacggatccggctggtggatgaataaatgtcatgccggccatctcaacggggtatactaccaagggggcacgtattccaaggccagcacgccaaatggttacgataacggaatcatttgggcgacctggaagacgcggtggtactcaatgaaaaagaccactatgaaaattatcccctttaaccgcctcaccatcggagaaggtcagcagcatcacctcgggggagccaaacaggtgagaccagagcaccccgcggagacagagtatgattctctatatcccgaggacgaccta

SEQ ID NO: 209910 - DNA, 1359 bp, Artificial Sequence
  derived and/or modified sequence
atgtcctggagcttacaccctaggaatcttatattgtatttttatgctttgctgttcctctctagcacctgtgtggcttatgtggccactagggataactgttgcattctggatgagagattcgggagttactgccccaccacttgtggtatcgccgatttcctgtctacttaccagacaaaagtcgacaaggatctgcagtccctggaagacatattgcatcaggtcgaaaacaagacctcagaggtaaaacaactgatcaaggccattcaactcacatacaatccggacgagtctagcaagcccaatatgatcgacgcagcaaccctaaaatctcggaaaatgctcgaagagatcatgaagtatgaagccagcatcctaactcacgatagtagtatacgctatctccaagagatctacaactccaataatcagaagattgttaatctcaaggaaaaagtagcacagcttgaggcgcagtgccaggaaccttgcaaggacaccgtccaaatacatgacattaccgggaaggattgtcaggacattgccaacaagggcgccaaacagtctgggttgtacttcatcaagcctttaaaggcgaaccaacaatttctggtgtattgcgagatcgatggaagcggaaatggctggaccgtttttcaaaagcgcttggacgggtcggtcgatttcaagaagaattggatccagtataaagaaggctttggccatttgagcccaacaggcacgactgagttctggctgggtaacgagaaaatccatctgatctcaacgcagagcgcaattccctatgccttgagggtggaattggaggactggaatgggaggacatcaaccgccgattacgccatgttcaaggtaggacccgaggccgataagtacagactgacatatgcatacttcgcgggcggggacgcaggagatgcatttgacggattcgattttggtgatgacccatcggataagttttttaccagccataacgggatgcagttctctacttgggacaatgacaacgataagtttgagggaaactgcgccgagcaggacggctccggatggtggatgaataaatgccacgctggacacctgaatggagtctactaccaaggcgggacgtatagcaaggcctccactcccaatggatacgacaatggaatcatttgggctacatggaaaacgcgctggtattcgatgaagaaaaccacaatgaagataattccattcaatcgtctgaccataggcgaaggtcaacaacatcatctgggcggggcaaaacaagtgaggccagagcacccagctgagactgaatacgacagtctctacccagaggacgacttg

SEQ ID NO: 209911 - DNA, 1359 bp, Artificial Sequence
  derived and/or modified sequence
atgtcctggtcactgcaccctaggaacctgatattgtatttctatgccctgctcttcctatcaagcacttgcgttgcatacgttgcaactcgggacaattgctgtatactagatgagaggttcgggtcttactgcccaaccacatgtggcattgccgattttttaagcacttaccagacaaaagtggacaaggacctgcaatccctagaggacatcctgcatcaggtcgaaaataagacctccgaggtcaaacagctgatcaaagctatccaactgacatataaccccgatgagagctcaaaacccaatatgatcgacgccgcaactctgaagtctcggaagatgttagaggagataatgaagtacgaggcttctatacttacacacgattcctctataaggtatctgcaggagatctacaatagtaataaccagaagatcgttaatttaaaagagaaagtggcacaactggaggctcagtgtcaggagccatgcaaggacacagtacaaatccacgacattaccgggaaggactgccaggatattgccaacaaaggcgcaaaacaaagtggcctctatttcataaaacctctcaaggctaaccaacagtttctcgtttattgcgaaattgatggatccgggaacggctggacagtctttcagaagaggttagatggcagtgtagactttaagaagaattggattcagtacaaagaggggttcggccacttatcccccaccggaactactgaattctggctaggtaatgagaaaatccacctgattagtacacagagtgcaattccctacgcactgagagtggaactagaggactggaacggcagaacatctaccgctgactacgcaatgtttaaggtcggccccgaagccgacaaataccgactcacctacgcctacttcgccggcggtgacgcaggcgacgcctttgacgggtttgacttcggcgacgaccccagcgataaattcttcacttcccacaatggcatgcagtttagtacatgggacaatgataatgataagttcgagggcaactgtgcagaacaggatggttctggatggtggatgaataaatgtcacgccggacacctgaatggtgtatactaccaaggcgggacttatagcaaagcttctactcctaacggctacgacaatggaatcatctgggctacttggaaaacacggtggtacagtatgaaaaaaaccaccatgaaaataataccctttaatcgtttaacaatcggagaaggtcagcaacatcatctggggggggccaaacaggttcggccagagcaccccgcagagaccgagtatgattccctgtacccagaagatgatctc

SEQ ID NO: 209912 - DNA, 1359 bp, Artificial Sequence
  derived and/or modified sequence
atgagctggtcactgcatccacgcaatctgattctgtacttttacgctttgcttttcctgagcagcacctgtgtggcctatgtcgctacacgcgacaactgttgtattctggacgaaaggttcggaagttactgcccgaccacctgcggaattgctgatttccttagcacctaccagacgaaggttgataaagacctgcaaagcttagaggatatcctccatcaagtcgagaacaaaactagcgaggtgaagcagctgatcaaagcaattcagctcacgtacaatccagacgagagctccaagccaaacatgatcgatgctgcgacactcaagagtaggaagatgctcgaggaaatcatgaaatatgaagcatctatactgacccatgactccagcatacggtatctgcaggagatctacaattcgaataatcagaaaatagtgaatctgaaagaaaaggtggcccagttagaagcgcagtgccaagagccttgcaaagatactgtgcagatccatgatatcactgggaaggactgtcaggatattgccaataaaggagcaaagcagagcggactgtacttcatcaaacccttgaaagctaatcagcaatttttagtctactgcgaaatcgacggatctggcaatggatggacagtctttcagaagaggctcgacggcagcgtagacttcaaaaagaactggatacagtacaaagagggtttcggacatctgagcccaactggcactacagaattctggctgggcaacgaaaagatccatctcatatctacacagtctgctatcccatacgcacttcgtgtcgaactcgaagattggaatggcaggacatcaaccgctgattacgcaatgttcaaggtgggcccagaagcagataagtaccgcttgacctacgcatatttcgcaggcggcgacgctggggacgctttcgacggatttgatttcggtgacgatcctagtgataaattctttacaagtcataacggcatgcagttcagcacttgggataacgacaatgataaattcgaaggcaactgcgccgagcaagacggctctggatggtggatgaacaaatgtcatgccggccacttgaatggtgtttactatcagggcgggacctactcaaaggcttccactccaaacggatacgacaacggaataatttgggcgacatggaagacccgatggtactccatgaagaaaaccaccatgaaaatcataccatttaatagacttactatcggggagggacagcaacaccacctggggggcgcaaagcaggtcagaccagaacaccctgccgagacagagtatgattcactctatcccgaggatgatctt

SEQ ID NO: 209913 - DNA, 1359 bp, Artificial Sequence
  derived and/or modified sequence
atgtcatggagtctccatcctcgcaacctcatcctctacttctacgcgttgttattcctcagcagcacctgcgtagcatatgtagctaccagggataactgctgcatactggatgagcgctttggctcgtactgtcctactacctgcggcatcgcagacttcctgagtacgtaccagacgaaagttgacaaggatctacaaagcttggaggacatcctccaccaagtagaaaacaaaacatcagaagtaaaacagcttatcaaggccatacaactgacttacaaccctgacgaatcgtccaagcccaacatgatcgatgcagcgacattgaagagccggaagatgttggaggaaatcatgaaatacgaagcctccattctgactcacgacagctctatcagatatctccaggaaatttacaattcgaacaaccagaagatcgtgaatctcaaagaaaaagttgctcaacttgaagctcagtgccaagaaccgtgtaaggatacggtgcagatccacgatataacgggcaaagattgccaggacatcgcaaataagggggccaagcaatcaggactctacttcatcaaacccctgaaagctaaccagcaatttttagtatactgtgaaatcgatgggagtgggaacgggtggactgtgttccagaaacgcctcgacggctccgtagatttcaagaaaaattggattcagtacaaggagggtttcggtcatctaagtccaacgggaaccactgagttctggctgggaaatgagaaaatccacctcatatctacccagagtgccatcccctacgccttgagggtggaattggaggattggaatggccggacttcaaccgccgattatgcaatgtttaaggtcggaccggaggccgataagtaccggctgacatatgcatactttgctggaggggacgctggagacgcttttgatggattcgactttggcgatgaccccagtgataaattttttacctctcacaatgggatgcaattttccacatgggacaacgacaacgacaagttcgagggaaattgtgccgagcaagatggatctgggtggtggatgaataagtgccacgcggggcacctcaacggcgtatattaccagggcgggacttacagtaaggctagcacgccaaacggctacgataatggaatcatttgggccacttggaaaaccaggtggtattctatgaaaaagacgaccatgaagatcattccgttcaaccggctgactatcggcgaaggccagcagcaccatctagggggcgcgaaacaggtccgccccgagcatccggcagagaccgagtacgattctctgtaccctgaggacgacctc

SEQ ID NO: 209914 - DNA, 1359 bp, Artificial Sequence
  derived and/or modified sequence
atgagctggagtctgcatcccagaaatttaattctgtacttttatgcactactcttcctctcctctacatgcgtcgcctatgtggcaacccgggataactgctgtatcctggacgaacggttcgggagctattgcccaacgacctgtgggatcgcagattttttgtctacataccagacaaaagtggacaaggatctgcagagtctggaagatatcctgcaccaggtggaaaacaagacaagtgaagtgaagcagctcataaaggcaatacagctaacgtacaatcccgacgaatcctccaagccaaatatgatcgatgccgccactctgaagtcccggaagatgttagaggaaatcatgaagtacgaagcttccatcctcactcatgactccagcatccgatacctgcaggagatttacaattcaaacaaccagaaaattgtgaatctgaaggagaaggtggctcagttagaggctcagtgtcaggagccatgtaaggacacagtacagatccatgatattaccgggaaggattgccaagacatcgcaaataaaggcgctaagcagagcggcctgtacttcataaagcccttgaaggccaatcagcagtttctggtgtattgtgagatagacgggtccggaaatgggtggacagtgttccaaaagcgtctggacggatccgtagactttaagaagaattggattcagtacaaagagggcttcggccacctttcacccacaggcaccacagagttctggctgggaaacgagaagatccatctgatcagtacgcaaagtgcaatcccttacgcattgagagtggagttggaggactggaatggccgcacaagcactgcagactacgcgatgttcaaggtgggaccagaggctgacaagtaccggcttacctacgcatactttgccgggggagacgccggagatgcatttgacgggttcgattttggggatgaccccagtgacaagttcttcacatcacataatgggatgcaattttcaacatgggataatgataatgataagttcgagggcaactgcgcggagcaggacgggtctggatggtggatgaataagtgccacgccgggcatctcaacggtgtatactatcagggggggacctattcaaaggcatcaacacccaatggatacgacaacgggataatctgggcgacctggaagaccaggtggtactcaatgaaaaagactactatgaagattatccctttcaaccggctgacaattggagagggtcagcagcaccacttggggggcgcaaaacaggttcgcccagagcatccagcggagactgaatacgatagcctctatccagaggacgatctc

SEQ ID NO: 209915 - DNA, 1359 bp, Artificial Sequence
  derived and/or modified sequence
atgtcatggagtctgcaccctaggaacctgatactgtacttttatgctctcctgttcctcagctcaacctgtgtggcctatgtcgctacaagagataattgttgcatccttgacgagcgcttcggaagttattgccctacaacctgcggtattgccgactttctttcaacctatcagaccaaagtggataaagatctgcagagcctcgaggatatccttcaccaggtcgagaataagaccagtgaggtgaaacagctgattaaggctattcaactgacctacaatcctgatgaatctagtaaacccaacatgatcgatgctgcaacactgaaatccaggaagatgctcgaggaaattatgaagtatgaggccagcatcctgacacacgactccagtattagataccttcaagagatttacaacagcaataaccagaaaatagttaatttgaaagaaaaagtcgcccagttggaagcacagtgccaagagccgtgtaaagatacagtgcaaatacacgatattacgggtaaagactgccaagacatcgctaacaaaggcgccaaacaaagtggactgtattttatcaagcctctgaaggcaaatcagcaattcctggtgtattgcgagatcgacggaagtggtaacggctggaccgtttttcagaaacggcttgacggttccgttgactttaagaagaactggattcaatataaagagggatttggacacttgtctccaaccggaactacagagttttggctgggcaatgaaaaaatacaccttatctctacccagagcgccattccctacgccctgcgggttgaactggaggattggaacggccgaacgtctactgcggattacgccatgttcaaggtcgggcctgaggctgataaatacaggttgacttatgcttattttgccggcggggacgcgggtgatgcctttgacgggtttgatttcggcgatgacccttctgacaaatttttcacttcacataatggcatgcagttctctacatgggacaacgacaacgataagttcgaaggaaattgcgccgaacaggatggtagtggatggtggatgaacaaatgccacgctggccacctgaatggtgtgtattaccagggaggaacgtatagcaaggcttccaccccgaatggttatgataatggcataatttgggccacctggaagaccagatggtatagcatgaagaagaccacaatgaagatcatccccttcaatcggttgaccattggcgaaggtcagcagcatcacctcggcggcgcaaagcaggtcaggccagaacaccccgccgagactgagtacgacagtttgtaccctgaggacgacctg

SEQ ID NO: 209916 - DNA, 1359 bp, Artificial Sequence
  derived and/or modified sequence
atgtcatggtccctacaccctcggaatttgatcctgtatttctacgctttattgtttctgtcatcaacctgtgtcgcttatgtagcaacccgggataattgctgtattttagacgaacggtttggctcctattgtccaacaacctgcggcatagccgactttttatctacctaccagactaaagttgataaggacctccagagcctcgaggatattctgcaccaagtggaaaacaagacatccgaggtgaagcagctgattaaagcaatccagttgacctacaaccctgacgaatccagcaaacccaacatgatcgacgccgccacactaaaatcacgcaagatgcttgaggagattatgaagtacgaagctagcatcctcacccacgacagctctatcaggtacctccaagaaatttataactctaataatcagaaaattgtcaatctgaaggagaaagtggctcagcttgaagcacagtgtcaggaaccttgtaaagacacagtgcagatacacgacatcacaggaaaggattgccaggatattgccaacaagggcgcaaaacagtctgggttgtactttattaagcctctgaaggccaatcagcagttcctggtctattgcgagatcgacggctcagggaacggctggacagttttccagaaaagattagacgggagcgtcgacttcaaaaagaattggatccagtataaagaaggctttgggcacctgagtcctaccggtaccacggagttctggttaggcaacgagaagatacatctgatttcaactcagagcgctatcccttatgctttgcgcgttgaactagaggattggaatggcaggacaagcaccgcagactacgcgatgtttaaagtggggcccgaggctgacaaatacaggttgacctacgcttattttgccggaggagatgctggcgacgctttcgatggtttcgactttggcgacgatccatcagacaaattctttacgagccacaatggaatgcagttttcgacttgggacaacgataatgataaatttgagggaaattgtgccgaacaagacggttctgggtggtggatgaacaagtgccacgccggccacctaaacggtgtgtattaccagggaggcacctattcaaaggccagcacccctaatgggtatgataatggcattatctgggcaacttggaagacaaggtggtactccatgaagaaaactaccatgaaaatcatccctttcaacaggctgaccatcggggagggtcaacagcatcaccttgggggcgccaaacaagtgcgacccgagcaccccgctgagacagagtatgacagcttgtatcccgaggacgatctt

SEQ ID NO: 209917 - DNA, 1359 bp, Artificial Sequence
  derived and/or modified sequence
atgagctggtcgcttcatccccgcaatctcattctgtacttttacgccctgttattcctgagttcgacctgcgtggcgtacgtggccacccgcgacaactgttgcatactggacgagcgcttcggtagctattgtcctactacttgcggtatcgccgactttctctctacgtaccaaactaaggtggataaggacctgcagagtttggaagacatcctccaccaagtggaaaacaagacgagtgaggttaagcagttgatcaaggcgatccagttgacatataaccctgatgagagctctaaacccaacatgattgacgccgcgactttgaagagtagaaagatgttggaagaaatcatgaaatacgaggcgagcattctgacgcacgattcgtccatccggtatctgcaagagatctacaactcaaataaccagaagatcgtcaacttaaaggagaaggtagcccagctggaggcccaatgccaggagccctgtaaagacaccgtgcaaatacatgatatcacaggaaaggactgccaggacattgccaataagggcgccaagcagagcggactgtactttattaagcctttgaaagccaaccagcagttcctagtttactgcgagatagatggtagcggcaatggctggaccgtgtttcagaagcgtctcgacggttctgttgacttcaaaaaaaattggattcagtacaaagagggattcggacacctgtcgcctacggggacaaccgaattctggctgggcaacgaaaagatccacttgatctcgacccagtccgccattccctacgccctgcgagtagaactcgaggattggaatggacgtacgtccacggccgactacgctatgttcaaggtcggcccagaggctgataagtaccgtctcacatacgcttacttcgccggcggagacgcgggcgacgcgttcgatggattcgacttcggcgacgacccgtctgacaagttctttacaagccataacggcatgcagttctccacctgggataatgataacgataaattcgaaggtaactgtgccgaacaggacggtagtggatggtggatgaacaaatgccacgccggccatctcaacggtgtatattaccagggcggaacctattctaaggcttccacacctaatggctatgataacggcatcatctgggccacctggaagacccgctggtattccatgaagaaaaccacgatgaagataatccccttcaaccgcctaaccattggcgaaggccaacagcaccacctcggaggcgcgaagcaggtccgtccggaacatccggccgaaaccgaatacgattcgctatacccggaggacgatctg

SEQ ID NO: 209918 - DNA, 1359 bp, Artificial Sequence
  derived and/or modified sequence
atgtcctggtccctccacccccggaacctcatcctatacttttacgccctactcttcttgagttcgacctgcgtcgcctatgtcgcaactcgggataattgctgcattctggacgagcgttttggtagctactgtcctacgacctgcggcatcgctgattttctgagcacgtatcagaccaaggtggataaagacctccagtcgttggaggatatcctccaccaggtcgaaaataagacctcggaggtaaagcaactaatcaaggcgatccagctaacctacaacccggacgagagctctaaacccaatatgattgatgctgctacgttgaagtctcgtaagatgctagaagagatcatgaagtacgaagcctcaattttgacccacgattcgagcatccgttacctccaggagatctataactcgaataaccaaaagattgtcaacttgaaggagaaggtggcccaacttgaggctcagtgccaggagccgtgcaaggacactgtccagatccacgacatcactggcaaggattgccaggacatcgcaaacaagggagctaagcaaagtggcctctacttcatcaagccgctgaaggctaatcagcagttcctggtgtactgtgagatcgacggttccggcaacggctggaccgtcttccagaagcgcttggacggatccgttgatttcaagaagaactggatccaatacaaggaaggcttcgggcacctctcgcctactggcacgactgagttctggctgggcaatgagaagatccacctcatcagcactcagagcgcaatcccgtatgccttgcgtgtagagctggaagactggaacggacgcacttccactgcggattacgccatgttcaaggtcggcccggaggctgacaagtaccgccttacctacgcctacttcgccggaggtgatgccggcgacgcattcgacggttttgattttggggacgatccctcggacaaattcttcacgtcccacaacggtatgcagtttagcacttgggataatgataacgacaagttcgagggaaactgcgcggaacaggacggttctgggtggtggatgaataagtgccatgctggtcacctgaacggggtttactaccagggtggcacctacagtaaggcgtccacccccaatggatacgataatggcatcatctgggctacctggaagactcgctggtacagcatgaaaaagactaccatgaagatcatccctttcaacaggttgaccatcggagagggccaacagcatcacctcggtggagctaagcaggttcgccccgaacacccagccgagaccgagtacgactctctctaccctgaggatgatctg

SEQ ID NO: 209919 - DNA, 1359 bp, Artificial Sequence
  derived and/or modified sequence
atgagctggtcactccacccccgaaaccttattctgtacttctacgccctgttgtttctgtcatccacttgtgtagcttatgtcgctacacgggataattgttgcatccttgatgagaggtttgggagctactgtccgacgacgtgcggtatcgccgatttcctatcaacataccagactaaggtagataaggacctacagtccttagaggacattctgcatcaggtggaaaacaagaccagcgaggtaaaacagcttatcaaggccattcagctcacttacaaccctgatgagtcctcaaaacctaacatgatagacgcggccaccctgaagtcgcgcaagatgttggaggagattatgaagtacgaggcatcgatcttaacacacgactcctcaattaggtacttgcaggagatctataactctaataatcagaagattgtgaatctgaaagagaaggttgcccaactcgaagctcagtgtcaggaaccatgtaaagataccgtccaaatccacgatattacaggcaaggattgccaggacattgcaaacaagggcgcgaagcagagtggcctgtatttcataaaacccctgaaagcgaaccagcagtttcttgtgtattgcgaaattgacgggtcgggtaatggctggacggtgttccagaagcgcttggacggctccgtggactttaaaaagaattggattcagtataaggagggctttggccatctttcgccaactggcacaaccgaattctggctgggtaatgaaaagatccatctgatcagtacgcaatccgctatcccatacgcattgcgcgtcgagcttgaggattggaatggaagaacttcaacggctgactatgccatgttcaaagtcgggcccgaagctgataagtaccgactgacgtacgcatacttcgctgggggcgatgcaggcgacgcgttcgacggattcgattttggggacgaccccagtgacaagttctttacatcccacaacggcatgcaatttagcacatgggacaatgacaacgataagtttgaagggaactgtgccgagcaagacgggagtggctggtggatgaacaagtgccatgctgggcacctcaatggtgtatactatcagggaggcacgtacagtaaggcatccacaccgaacggatatgataatggcattatttgggccacctggaagactaggtggtattccatgaagaaaacaaccatgaaaatcatccctttcaacagactgacaatcggcgagggacagcagcaccacctggggggcgctaagcaagttcgtccagaacaccctgcagaaaccgagtacgactctctgtatcccgaggacgacctc

SEQ ID NO: 209920 - DNA, 1359 bp, Artificial Sequence
  derived and/or modified sequence
atgtcatggtctctgcatcccaggaacctgattttgtacttttacgccttgcttttcctgtcctctacctgcgtggcgtacgtggcgactagagacaattgctgtattttggacgaaaggtttggttcctactgccctacgacctgtggcatcgccgattttctcagcacatatcagaccaaggtcgacaaggaccttcagtccctggaggatatccttcatcaggtcgagaacaagacgtctgaggttaagcagctgatcaaggccatccagttgacatacaaccctgatgagagctccaagccaaatatgattgacgcggctaccctcaagtccaggaagatgctggaggaaatcatgaagtacgaagctagtattctgacccatgactcctccatccggtacctccaggaaatctacaatagtaacaaccaaaagattgtgaatctcaaggagaaggtggcccagctggaagctcagtgccaggagccatgcaaggacactgtgcagatacacgacatcactggcaaagactgccaggacatcgctaataagggggccaaacaatctggcctttacttcattaagccgctgaaggcgaaccagcagttcctggtctattgcgaaatagacgggtccgggaatggctggacggtgttccagaaaagactagatgggtctgtggacttcaagaaaaactggatccagtataaggaaggatttgggcatctgtctcccactggtacaaccgagttttggctgggcaacgagaaaattcacctcatttcaacccagtccgccataccctacgctttgagggtggaactggaggactggaacggacgcactagcaccgccgactacgctatgtttaaggtagggccagaggctgacaagtacaggctgacatacgcttacttcgctggcggtgacgctggcgacgcttttgatgggttcgactttggtgatgacccctcagataagttttttacctcccacaacggcatgcagttttccacctgggataacgacaacgataagttcgagggtaactgcgccgagcaggatggctccgggtggtggatgaataagtgtcacgctggtcacctcaatggtgtgtactatcaaggcggcacttatagtaaagcctcgactccgaacggctacgataatggtatcatctgggctacgtggaagaccaggtggtatagtatgaaaaaaacaactatgaagattattccctttaaccggctaacaatcggcgagggacagcagcatcatctcggaggagcaaaacaggtccggcccgagcatcccgctgaaacagagtacgacagcctgtaccccgaggacgacctc

SEQ ID NO: 209921 - DNA, 1359 bp, Artificial Sequence
  derived and/or modified sequence
atgtcatggtctctccatcccagaaatctaatcctgtacttctatgctctgctcttcttgagctcaacgtgtgtcgcctatgttgccaccagggacaattgctgtattttagacgaacggtttgggtcatattgccccactacttgcggaatcgcagacttcctttctacttaccaaacgaaagttgataaagatctgcagtctcttgaggacatactgcatcaagtcgaaaataaaacgagtgaagttaaacagctgatcaaggcaattcagctgacttacaatcctgacgagtcatccaaacctaacatgatcgacgcggctacactcaagtcgcgtaaaatgctcgaggaaataatgaaatatgaggcatccatcctgacccatgattccagcattcggtatttgcaggagatttataactctaataatcaaaaaattgttaaccttaaagagaaagtggctcagctggaggcgcagtgccaagagccatgcaaggataccgtacagatacatgacattacaggaaaggattgtcaggatatagccaataagggggccaagcagtcaggcctgtactttataaaacctcttaaagcaaaccagcagttcctggtgtactgcgaaattgatggcagcggcaatggatggaccgtgtttcagaaaaggctggatgggagtgttgatttcaagaagaactggatccaatacaaggagggcttcggtcatctgtctccaaccgggacaaccgaattctggctcgggaacgagaagatccatttgatatcaacacaatctgccataccatacgccctcagagtggagttggaggactggaacgggcgcacctccacagccgattatgcgatgttcaaagtgggaccagaggctgacaagtacaggctcacgtatgcatactttgccggaggagatgcgggtgacgcatttgatggctttgattttggcgatgaccctagtgataaattcttcacctcacacaatggcatgcaattcagcacttgggataacgacaacgacaaatttgaggggaattgtgccgagcaggacggcagcgggtggtggatgaataagtgtcatgccggccacctgaatggcgtgtactaccagggcggcacatacagcaaagcatccaccccaaacggatatgataatggcataatttgggctacctggaaaacccggtggtattctatgaaaaaaacaaccatgaagataattccattcaataggctcaccataggtgaaggccagcagcaccacctcggcggggcaaagcaagtcaggcctgagcatccagctgagaccgaatatgactccctctatcctgaggatgatctg

SEQ ID NO: 209922 - DNA, 1359 bp, Artificial Sequence
  derived and/or modified sequence
atgtcttggtctttgcaccctcggaacctcattctgtatttctatgcccttctgtttctcagttccacatgtgttgcctatgtcgcaacaagagataactgttgtatcctggatgaaaggttcgggtcctattgtcctacaacttgtggaatagctgattttctttctacttatcagactaaagtggataaagatctccaatccttagaagacatactccatcaggttgaaaacaaaacatcggaggttaaacagctgataaaagctatacaactcacttataacccagacgaatcttccaaaccaaacatgatcgacgcagctactctgaaaagtaggaaaatgctcgaagaaatcatgaaatacgaagcgtctatcctaacacatgattcatccataaggtaccttcaggaaatctacaactcaaataaccagaaaatcgttaatctcaaggaaaaagtggcccagcttgaagcccagtgtcaggagccatgcaaagatacagttcagatacatgacataactggaaaagattgtcaggatatcgcgaacaagggagctaaacaatcagggctttactttattaagccactgaaagctaaccagcagttcctcgtgtactgcgaaatcgatgggtctggaaatgggtggacagtgttccagaaaaggctggatggatctgtcgatttcaagaaaaattggattcagtataaggagggattcgggcacctctctccaacaggaacaactgaattctggttgggaaatgagaagatccacttgatcagtactcagtcagctataccttacgccttacgggtagaattggaagattggaatgggagaacttctactgcagattatgcaatgttcaaagtcgggcccgaggctgataagtatcggcttacatatgcatactttgctggaggagacgcaggggatgcttttgatggattcgacttcggagatgatccctccgacaaattttttacatctcataatggaatgcagttttcaacatgggacaatgataatgataaattcgaagggaactgtgctgaacaggatggatcaggatggtggatgaacaaatgccatgcaggacacctgaatggggtttattatcaggggggaacatactcaaaagcctccacacccaacgggtacgacaacgggataatatgggcaacttggaagacaagatggtattctatgaaaaaaactacaatgaaaataataccatttaaccggctaactatcggggagggacagcagcatcatctcgggggagccaaacaggtgcggccagagcaccccgccgaaactgaatatgattccctttatcccgaagatgatctg

SEQ ID NO: 209923 - DNA, 1359 bp, Artificial Sequence
  derived and/or modified sequence
atgtcctggagcctccatcctagaaaccttatattgtatttttatgccctcctgtttttgtcgtctacgtgtgtcgcttatgtggcaacacgtgataattgctgtatcctcgatgagcggtttggatcttactgccccacaacttgtggcattgcggatttcttgtcaacttaccaaaccaaagttgacaaggatttgcagagtttggaggacatccttcatcaagtagagaacaagacatcggaggtgaagcagctaattaaggccatccaactgacgtacaatccggacgaatcgtccaagccgaatatgatcgatgcggccacattgaaatcaagaaagatgctagaggaaatcatgaagtacgaggcctctatactaacccatgattcttcaattagatatctgcaggagatttataacagcaacaatcagaaaatcgtaaacctcaaggaaaaagttgcgcagcttgaggcgcaatgtcaagaaccatgtaaggacaccgtgcagattcacgacattactggtaaggactgccaggacatagcgaataagggagccaaacagtcgggactgtattttattaaacccctgaaggctaatcaacagtttcttgtctattgtgaaattgacggatcgggaaatggctggaccgttttccagaagcgactcgatggctcagttgatttcaagaagaattggatccaatataaggagggcttcggacatttgtcacccacaggaaccaccgagttctggctgggcaacgaaaagatccacctgatttctacacaatctgctatcccttatgctctccgtgtcgagcttgaggactggaacggtcgaacatcgacggccgactacgcaatgtttaaggtcggtccagaggctgacaagtaccgcctcacctacgcatactttgctggtggtgatgcaggcgatgccttcgacggtttcgacttcggggatgatccttccgacaagttctttacttctcataatggtatgcagttctcgacctgggataatgataatgataagttcgagggaaactgtgcggagcaggatgggtcaggttggtggatgaacaagtgccatgcaggccatctcaacggtgtttactatcagggtgggacgtacagcaaggcgagcactcctaatggctatgacaatggcattatctgggcgacctggaagactcgctggtactcgatgaagaaaacgacgatgaaaattatcccttttaacaggctcaccatcggcgaaggacagcaacaccacttaggaggggctaagcaagttcgccccgaacaccctgccgagaccgaatatgattctctttaccccgaagacgacctt

SEQ ID NO: 209924 - DNA, 1359 bp, Artificial Sequence
  derived and/or modified sequence
atgtcatggtcactccatccaaggaacttgatactgtatttctacgctttactcttcctgtcctctacttgcgtggcctacgtggctacgagagataactgttgcatccttgacgagcggttcggatcatactgtccaacaacctgtggcatcgccgacttcctgtctacataccagaccaaggtggacaaggatttgcagtctctagaggacattctgcaccaggtggagaacaagacgtcggaggttaagcagctgatcaaagccatccagctgacgtacaacccggatgagtcctcaaaacccaatatgatcgatgcagctacgctaaaatcacggaagatgctcgaagagattatgaagtatgaggcgtctattcttacccatgacagttctatccgctacttgcaggaaatttataattctaataaccagaaaatcgtcaatctgaaggagaaggttgcacaactggaggcgcagtgccaggagccatgcaaggacacagtgcagattcacgacattaccggtaaggactgtcaagacatcgccaataagggtgctaagcaatccgggctgtattttatcaaacctctcaaagctaatcaacagttcctggtgtattgtgagattgatggatctgggaacggatggaccgtatttcaaaagagattggatggaagtgtagatttcaaaaaaaattggatccagtataaggaggggttcggtcatctcagcccgactggaaccacagagttctggctcgggaatgagaaaatccacctaatcagcacccaatccgccattccatacgcattgcgagttgagctcgaggactggaacgggagaacctccacagccgattacgctatgtttaaggttggcccggaggccgacaagtacaggctgacctatgcatactttgcaggcggggacgctggcgatgccttcgacggcttcgattttggagacgatccttctgataagtttttcacatctcataacggcatgcagttctctacctgggataacgacaatgataagtttgaggggaactgcgcagagcaggatgggagcggttggtggatgaataagtgtcacgctgggcatcttaacggtgtctactaccagggagggacttacagcaaagcttctaccccgaatgggtacgacaacggcattatctgggcaacctggaaaactcgctggtacagcatgaaaaaaaccactatgaaaatcatcccatttaacaggttaacaatcggtgaggggcaacagcaccacctggggggcgctaagcaggtaaggcctgagcacccagctgagaccgagtatgatagtctgtaccctgaggacgattta

SEQ ID NO: 209925 - DNA, 1359 bp, Artificial Sequence
  derived and/or modified sequence
atgtcgtggtcgttacatccgcgaaatctaatattatatttttatgcgttattatttttatcgtcgacgtgtgtagcgtatgtagcgacgcgtgataattgttgtatattagatgaacgttttggttcgtattgtccgacgacgtgtggtatagcggattttttatcgacgtatcaaacgaaagtagataaagatctacaatcgttagaagatatactacatcaagtagaaaataaaacgtcggaagtaaaacaattaataaaagcgatacaattaacgtataatccggatgaatcgtcgaaaccgaatatgatagatgcggcgacgctaaaatcgcgtaaaatgttagaagaaataatgaaatatgaagcgtcgatattaacgcatgattcgtcgatacgttatctacaagaaatatataattcgaataatcaaaaaatagttaatttaaaagaaaaagttgcgcaattagaagcgcaatgtcaagaaccgtgtaaagatacggtacaaatacatgatataacgggtaaagattgtcaagatatagcgaataaaggtgcgaaacaatcgggtttatattttataaaaccgctaaaagcgaatcaacaatttttagtatattgtgaaatagatggttcgggtaatggttggacggtatttcaaaaacgtctagatggttcggttgattttaaaaaaaattggatacaatataaagaaggttttggtcatctatcgccgacgggtacgacggaattttggttaggtaatgaaaaaatacatctaatatcgacgcaatcggcgataccgtatgcgctacgagtagaattagaagattggaatggtcgaacgtcgacggcggattatgcgatgtttaaagttggtccggaagcggataaatatcgactaacgtatgcgtattttgcgggtggtgatgcgggtgatgcgtttgatggttttgattttggtgatgatccgtcggataaattttttacgtcgcataatggtatgcaattttcgacgtgggataatgataatgataaatttgaaggtaattgtgcggaacaagatggttcgggttggtggatgaataaatgtcatgcgggtcatttaaatggtgtttattatcaaggtggtacgtattcgaaagcgtcgacgccgaatggttatgataatggtataatatgggcgacgtggaaaacgcgatggtattcgatgaaaaaaacgacgatgaaaataataccgtttaatcgtttaacgataggtgaaggtcaacaacatcatttaggtggtgcgaaacaagtacgtccggaacatccggcggaaacggaatatgattcgttatatccggaagatgatcta

SEQ ID NO: 209926 - DNA, 1359 bp, Artificial Sequence
  derived and/or modified sequence
atgagctggtccctgcaccctagaaaccttatcctgtacttttacgcattgctgttcctgtcgtcaacctgcgtggcttatgtggcaacccgagataactgctgcattctcgatgagcgattcgggtcttactgccccaccacttgcggcattgccgattttctgagtacttaccagactaaggtggacaaggatctgcagtccctggaggacatattacaccaggtcgagaacaaaacgagcgaagtgaaacagcttattaaggctattcaactcacatataatcctgacgagtcctcaaagccaaacatgatcgatgcagctacgctcaagagtcgcaagatgttagaggagattatgaagtacgaagcctctatacttacccatgactcttccattaggtacctccaagagatttacaactcaaacaatcagaagatagtaaacttgaaagaaaaggtcgcgcaactcgaagctcagtgccaggaaccatgcaaggatacagtccagatccatgatatcaccgggaaggattgccaggatatcgccaacaagggagcgaagcagagcggcctgtatttcatcaaacccctgaaggccaatcaacagttccttgtgtactgcgaaattgacggctccgggaacggatggacagtatttcagaagagattagacggttctgtggattttaagaaaaactggatacagtacaaggaggggttcggtcacctgtcccccacaggcacaacggagttttggctcgggaacgaaaagatccacttgatttccacgcagtcagccattccttatgccttgagggttgaactcgaggattggaacgggcgaacaagcaccgctgactatgccatgttcaaagtggggcccgaggccgataaatatcgactcacctatgcctattttgctggtggcgatgctggcgatgcttttgatgggttcgatttcggggatgacccctccgacaagttctttacgtcgcacaacggcatgcagttcagcacctgggataacgataatgacaagtttgagggcaactgtgcagagcaagacgggtcaggatggtggatgaacaaatgccatgcagggcatcttaatggggtctactaccagggaggcacttactcgaaagcttcaactccgaacggatacgacaatggaatcatttgggccacatggaagactcgctggtatagtatgaagaagaccacaatgaaaataatccccttcaaccgattaaccattggcgagggccagcaacatcatctggggggggccaaacaagtgagacccgaacacccggccgaaaccgagtatgattcactgtaccccgaggatgaccta

SEQ ID NO: 209927 - DNA, 1359 bp, Artificial Sequence
  derived and/or modified sequence
atgagctggagcctgcacccccgcaacctgatcctgtacttctacgccctgctgttcctgagcagcacctgcgtggcctacgtggccacccgcgacaactgctgcatcctggacgagcgcttcggcagctactgccccaccacctgcggcatcgccgacttcctgagcacctaccagaccaaggtggacaaggacctgcagagcctggaggacatcctgcaccaggtggagaacaagaccagcgaggtgaagcagctgatcaaggccatccagctgacctacaaccccgacgagagcagcaagcccaacatgatcgacgccgccaccctgaagagccgcaagatgctggaggagatcatgaagtacgaggccagcatcctgacccacgacagcagcatccgctacctgcaggagatctacaacagcaacaaccagaagatcgtgaacctgaaggagaaggtggcccagctggaggcccagtgccaggagccctgcaaggacaccgtgcagatccacgacatcaccggcaaggactgccaggacatcgccaacaagggcgccaagcagagcggcctgtacttcatcaagcccctgaaggccaaccagcagttcctggtgtactgcgagatcgacggcagcggcaacggctggaccgtgttccagaagcgcctggacggcagcgtggacttcaagaagaactggatccagtacaaggagggcttcggccacctgagccccaccggcaccaccgagttctggctgggcaacgagaagatccacctgatcagcacccagagcgccatcccctacgccctgcgcgtggagctggaggactggaacggccgcaccagcaccgccgactacgccatgttcaaggtgggccccgaggccgacaagtaccgcctgacctacgcctacttcgccggcggcgacgccggcgacgccttcgacggcttcgacttcggcgacgaccccagcgacaagttcttcaccagccacaacggcatgcagttcagcacctgggacaacgacaacgacaagttcgagggcaactgcgccgagcaggacggcagcggctggtggatgaacaagtgccacgccggccacctgaacggcgtgtactaccagggcggcacctacagcaaggccagcacccccaacggctacgacaacggcatcatctgggccacctggaagacccgctggtacagcatgaagaagaccaccatgaagatcatccccttcaaccgcctgaccatcggcgagggccagcagcaccacctgggcggcgccaagcaggtgcgccccgagcaccccgccgagaccgagtacgacagcctgtaccccgaggacgacctg

SEQ ID NO: 209928 - DNA, 1362 bp, Artificial Sequence
  derived and/or modified sequence
atgagctggagcctgcaccccagaaacctgatcctgtacttctacgccctgctgttcctgagcagcacctgcgtggcctacgtggccaccagagacaactgctgcatcctggacgagagattcggcagctactgccccaccacctgcggcatcgccgacttcctgagcacctaccagaccaaggtggacaaggacctgcagagcctggaggacatcctgcaccaggtggagaacaagaccagcgaggtgaagcagctgatcaaggccatccagctgacctacaaccccgacgagagcagcaagcccaacatgatcgacgccgccaccctgaagagcagaaagatgctggaggagatcatgaagtacgaggccagcatcctgacccacgacagcagcatcagatacctgcaggagatctacaacagcaacaaccagaagatcgtgaacctgaaggagaaggtggcccagctggaggcccagtgccaggagccctgcaaggacaccgtgcagatccacgacatcaccggcaaggactgccaggacatcgccaacaagggcgccaagcagagcggcctgtacttcatcaagcccctgaaggccaaccagcagttcctggtgtactgcgagatcgacggcagcggcaacggctggaccgtgttccagaagagactggacggcagcgtggacttcaagaagaactggatccagtacaaggagggcttcggccacctgagccccaccggcaccaccgagttctggctgggcaacgagaagatccacctgatcagcacccagagcgccatcccctacgccctgagagtggagctggaggactggaacggcagaaccagcaccgccgactacgccatgttcaaggtgggccccgaggccgacaagtacagactgacctacgcctacttcgccggcggcgacgccggcgacgccttcgacggcttcgacttcggcgacgaccccagcgacaagttcttcaccagccacaacggcatgcagttcagcacctgggacaacgacaacgacaagttcgagggcaactgcgccgagcaggacggcagcggctggtggatgaacaagtgccacgccggccacctgaacggcgtgtactaccagggcggcacctacagcaaggccagcacccccaacggctacgacaacggcatcatctgggccacctggaagaccagatggtacagcatgaagaagaccaccatgaagatcatccccttcaacagactgaccatcggcgagggccagcagcaccacctgggcggcgccaagcaggtgagacccgagcaccccgccgagaccgagtacgacagcctgtaccccgaggacgacctgtag

SEQ ID NO: 209929 - DNA, 1362 bp, Artificial Sequence
  derived and/or modified sequence
atgtcctggtccctgcacccccggaacctcatcctttacttctatgcactcttgttccttagttctacgtgtgttgcttatgttgctacacgggacaactgttgcatactggatgagagatttgggagttattgtccgacaacttgtggcatagcggattttctatctacctatcagaccaaggtggataaagaccttcagtcgttggaagacatcctgcaccaggtggaaaacaagacctccgaggtgaagcagttaatcaaagcaattcagctaacctacaatcccgacgagtcatcaaagccgaacatgatcgacgcagcaacattgaagtcacgcaagatgctggaagagatcatgaagtacgaagcaagcatcctgactcacgacagttccataagatatctacaggaaatctataatagtaacaaccagaaaatcgtcaatttgaaagagaaagtggctcagctggaagctcagtgccaggaaccttgcaaagacaccgtgcaaatccacgatatcaccgggaaggattgtcaggacattgctaacaaaggggcaaagcagtctggcctttactttattaagccattgaaagcaaatcaacaattcctagtgtactgtgagatcgatggatcaggaaatggttggaccgtcttccaaaaacgcctggatgggagcgtggacttcaagaaaaactggattcagtataaggaggggttcggacacttgtctccgacaggcaccacagagttttggctgggaaacgaaaagattcacctgatcagcactcagagcgccattccttatgccctacgcgtggaactggaagattggaacggccggacatcaactgctgactatgccatgttcaaggtgggaccagaggccgataagtataggttgacttacgcatacttcgcgggtggcgacgccggagacgcgttcgacggctttgatttcggggatgatccctccgataaattctttacttctcataacggcatgcagttcagcacttgggacaatgacaacgacaagtttgagggcaactgcgctgaacaagatggatcagggtggtggatgaataaatgtcacgctgggcacctgaacggcgtgtattaccagggaggtacatattcaaaagcttccactcctaatggctacgacaacggcatcatatgggcaacttggaaaaccagatggtacagcatgaagaagactacaatgaaaataataccgtttaatcggctgactatcggagagggacagcaacaccatctaggcggcgcgaaacaggtgcgccccgaacacccagcagaaaccgaatatgactccctgtacccagaagacgacctgtag

SEQ ID NO: 209930 - DNA, 1362 bp, Artificial Sequence
  derived and/or modified sequence
atgtcctggagcctgcaccccaggaacctgatcctgtacttctacgccctgctcttcctgagcagcacctgtgtggcctacgtggccacccgggacaactgctgcatcctggatgaaagatttggcagctactgccccaccacctgtggcattgctgacttcctgagcacctaccagaccaaggtggacaaggacctgcagagcctggaggacatcctgcaccaggtggagaacaagaccagcgaggtgaagcagctgatcaaggccatccagctgacctacaacccagatgagagcagcaagcccaacatgattgatgctgccaccctgaagagcaggaagatgctggaggagatcatgaagtatgaggccagcatcctgacccatgacagcagcatccgctacctgcaggagatctacaacagcaacaaccagaagatcgtgaacctgaaggagaaggtggcccagctggaggcccagtgccaggagccctgcaaggacacagtgcagatccatgacatcaccgggaaggactgccaggacatcgccaacaagggggccaagcagagcggcctgtacttcatcaagcccctgaaggccaaccagcagttcctggtgtactgtgaaattgatggcagcggaaatggctggacagtgttccagaagaggctggatggctctgtggacttcaagaagaactggatccagtacaaggagggcttcggccacctgagccccaccggcaccacagagttctggctgggcaatgagaagatccacctgatcagcacccagagcgccatcccctatgccctgcgggtggagctggaggactggaatggccgcaccagcacagctgactatgccatgttcaaggtgggccctgaggccgacaagtaccgcctgacctacgcctactttgctggaggagatgctggagatgcctttgatggctttgattttggagatgaccccagcgacaagttcttcaccagccacaacggcatgcagttcagcacctgggacaatgacaatgacaagtttgagggcaactgtgccgagcaggacggcagcggctggtggatgaacaagtgccacgccggccacctgaatggagtgtactaccagggcggcacctacagcaaggccagcaccccaaatggctatgacaatggcatcatctgggccacctggaagacccgctggtacagcatgaagaagaccaccatgaagatcatccccttcaaccggctgaccatcggggagggccagcagcaccacctgggcggggccaagcaggtgcggcctgagcaccctgctgagacagaatatgacagcctgtacccagaagatgacctgtag

SEQ ID NO: 209931 - DNA, 1659 bp, Artificial Sequence
  derived and/or modified sequence
tgacactacaaggctcggagctccgggcactcagacatcatgagttggtccttgcacccccggaatttaattctctacttctatgctcttttatttctctcttcaacatgtgtagcatatgttgctaccagagacaactgctgcatcttagatgaaagattcggtagttattgtccaactacctgtggcattgcagatttcctgtctacttatcaaaccaaagtagacaaggatctacagtctttggaagacatcttacatcaagttgaaaacaaaacatcagaagtcaaacagctgataaaagcaatccaactcacttataatcctgatgaatcatcaaaaccaaatatgatagacgctgctactttgaagtccaggaaaatgttagaagaaattatgaaatatgaagcatcgattttaacacatgactcaagtattcgatatttgcaggaaatatataattcaaataatcaaaagattgttaacctgaaagagaaggtagcccagcttgaagcacagtgccaggaaccttgcaaagacacggtgcaaatccatgatatcactgggaaagattgtcaagacattgccaataagggagctaaacagagcgggctttactttattaaacctctgaaagctaaccagcaattcttagtctactgtgaaatcgatgggtctggaaatggatggactgtgtttcagaagagacttgatggcagtgtagatttcaagaaaaactggattcaatataaagaaggatttggacatctgtctcctactggcacaacagaattttggctgggaaatgagaagattcatttgataagcacacagtctgccatcccatatgcattaagagtggaactggaagactggaatggcagaaccagtactgcagactatgccatgttcaaggtgggacctgaagctgacaagtaccgcctaacatatgcctacttcgctggtggggatgctggagatgcctttgatggctttgattttggcgatgatcctagtgacaagtttttcacatcccataatggcatgcagttcagtacctgggacaatgacaatgataagtttgaaggcaactgtgctgaacaggatggatctggttggtggatgaacaagtgtcacgctggccatctcaatggagtttattaccaaggtggcacttactcaaaagcatctactcctaatggttatgataatggcattatttgggccacttggaaaacccggtggtattccatgaagaaaaccactatgaagataatcccattcaacagactcacaattggagaaggacagcaacaccacctggggggagccaaacaggtcagaccagagcaccctgcggaaacagaatatgactcactttaccctgaggatgatttgtagaaaattaactgctaacttctattgacccacaaagtttcagaaattctctgaaagtttcttccttttttctcttactatatttattgatttcaagtcttctattaaggacatttagccttcaatggaaattaaaactcatttaggactgtatttccaaattactgatatcagagttatttaaaaattgtttatttgaggagataacatttcaactttgttcctaaatatataataataaaatgattgactttatttgca

SEQ ID NO: 209932 - DNA, 1362 bp, Artificial Sequence
  derived and/or modified sequence
atgagctggagcctgcacccccggaacctgatcctgtacttctacgcgctcttattccttagtagtacctgtgtagcgtacgtcgccactcgcgacaattgttgtatcctagacgagcggttcggctcctactgtcctactacctgtgggattgccgattttctgtccacttaccagactaaggtagacaaggatctgcagagcctggaagatatcctccatcaggtggagaataagacttcggaggtcaagcagctgatcaaagcaattcagctaacgtacaatcccgatgagtcctctaaacccaatatgatcgacgccgctacgcttaaatctagaaagatgctcgaagaaatcatgaaatacgaggcatccatcctcacacacgactcaagcatccgttacttgcaggagatttacaatagcaataatcagaaaatagttaatctgaaagaaaaagtggctcagttggaggctcaatgccaagagccctgtaaagacacagttcagattcacgacataaccggaaaagattgtcaagatatcgccaacaagggagctaagcagagcgggctgtatttcatcaaacccttaaaggcaaaccagcagttcctcgtgtattgcgagattgatggctcagggaacggatggacagtgtttcagaaaaggttggatggctcagtggactttaagaaaaactggatccaatataaagagggtttcggacacctgagccccaccggtaccacagaattttggttgggaaatgagaaaattcacctaatctcgacccaatctgctatcccgtacgctttgcgcgtggaacttgaagactggaatggacggacctctacagctgactacgccatgtttaaagttgggcctgaggccgacaagtaccgccttacgtacgcctatttcgccggcggggatgccggggacgccttcgatggatttgatttcggcgacgatccctcagacaagttcttcacatcacataatggcatgcaattttccacttgggacaatgacaatgataagtttgagggaaactgcgccgagcaagatggaagtggttggtggatgaataagtgccatgccggtcaccttaatggcgtttactatcaaggcggcacgtatagcaaggctagcacaccaaacggctacgataacggcataatctgggccacttggaagacccggtggtatagcatgaagaagactactatgaagattattcccttcaaccgactgaccatcggagagggacagcagcaccatctcggcggggctaagcaggtgagaccagagcatcccgccgagaccgaatatgactccttataccctgaagacgacttgtag

SEQ ID NO: 209933 - DNA, 1362 bp, Artificial Sequence
  derived and/or modified sequence
atgtcctggagtctgcacccacggaatctgattctgtacttttacgccctgcttttcctgtcatctacctgtgtggcctacgtggccactcgggataattgctgtatcctagatgaaagatttggcagttattgtcccacaacctgtgggatcgccgacttcctatctacataccaaactaaagtcgataaagatctccagtctctggaggatatcctgcaccaggtggagaacaaaacttccgaagtcaagcaactcatcaaagcaattcagttaacctacaaccctgatgaatcatcaaagcccaacatgattgacgccgcaaccctcaagtctcggaagatgcttgaagagatcatgaagtacgaagcatccattcttacacacgattcttccatccgatatttgcaagagatctacaactccaacaatcagaagatcgtgaacctgaaggagaaggtggctcagctggaggcgcagtgtcaagagccctgcaaggataccgtgcagatacacgacattactggcaaggattgccaggacatcgccaacaagggggcaaaacagtctggcctctatttcatcaagcctctgaaggcaaatcagcagttcttggtgtactgtgagatcgatgggtcgggcaatggctggaccgttttccagaagcggctggacggctcagtggatttcaagaagaattggatccagtacaaggaagggttcgggcacctgagccccaccggcaccaccgaattttggctcggcaatgaaaagatccatttgattagcacacagagcgcaataccctacgccctgagggtggaactggaggattggaatgggagaacttctacagcagactatgctatgttcaaagttggacccgaagctgataagtataggcttacttatgcctacttcgctggaggtgatgcaggagacgctttcgatgggttcgatttcggggacgatccaagcgataagttcttcacctctcataacggaatgcagttctccacttgggataacgacaacgacaaattcgagggcaattgcgccgagcaggatggctctggatggtggatgaacaaatgtcacgcaggccacctgaacggagtctactatcagggtggcacctactctaaggcgagtaccccaaacggatacgataacggcatcatatgggctacctggaagacacgatggtatagcatgaagaagaccaccatgaaaattattccttttaaccggttgactattggcgaaggacagcaacaccacctcggcggagctaagcaggtacgccctgaacacccagccgagacagaatacgattccctctatcctgaagacgatctctag

SEQ ID NO: 209934 - protein, 16 aa, Artificial Sequence
  derived and/or modified sequence
ADSGEGDFLAEGGGVR

SEQ ID NO: 209935 - protein, 20 aa, Artificial Sequence
  derived and/or modified sequence
ADSGEGDFLAEGGGVRKLIK

SEQ ID NO: 209936 - protein, 644 aa, Artificial Sequence
  derived and/or modified sequence
MFSMRIVCLVLSVVGTAWTADSGEGDFLAEGGGVRGPRVVERHQSACKDSDWPFCSDEDWNYKCPSGCRMKGLIDEVNQDFTNRINKLKNSLFEYQKNNKDSHSLTTNIMEILRGDFSSANNRDNTYNRVSEDLRSRIEVLKRKVIEKVQHIQLLQKNVRAQLVDMKRLEVDIDIKIRSCRGSCSRALAREVDLKDYEDQQKQLEQVIAKDLLPSRDRQHLPLIKMKPVPDLVPGNFKSQLQKVPPEWKALTDMPQMRMELERPGGNEITRGGSTSYGTGSETESPRNPSSAGSWNSGSSGPGSTGNRNPGSSGTGGTATWKPGSSGPGSTGSWNSGSSGTGSTGNQNPGSPRPGSTGTWNPGSSERGSAGHWTSESSVSGSTGQWHSESGSFRPDSPGSGNARPNNPDWGTFEEVSGNVSPGTRREYHTEKLVTSKGDKELRTGKEKVTSGSTTTTRRSCSKTVTKTVIGPDGHKEVTKEVVTSEDGSDCPEAMDLGTLSGIGTLDGFRHRHPDEAAFFDTASTGKTFPGFFSPMLGEFVSETESRGSESGIFTNTKESSSHHPGIAEFPSRGKSSSYSKQFTSSTSYNRGDSTFESKSYKMADEAGSEADHEGTHSTKRGHAKSRPVRGIHTSPLGKPSLSP

SEQ ID NO: 209937 - protein, 289 aa, Artificial Sequence
  derived and/or modified sequence
MFSMRIVCLVLSVVGTAWTADSGEGDFLAEGGGVRGPRVVERHQSACKDSDWPFCSDEDWNYKCPSGCRMKGLIDEVNQDFTNRINKLKNSLFEYQKNNKDSHSLTTNIMEILRGDFSSANNRDNTYNRVSEDLRSRIEVLKRKVIEKVQHIQLLQKNVRAQLVDMKRLEVDIDIKIRSCRGSCSRALAREVDLKDYEDQQKQLEQVIAKDLLPVVNLQVTANNLLVARVTTEETPHLKARAIKWQMRPEVKPIMKEHIAPREAMLNLALSEVSTLLLWGSLPCPPRLS

SEQ ID NO: 209938 - protein, 13 aa, Artificial Sequence
  derived and/or modified sequence
GLIDEVNQDFTNR

SEQ ID NO: 209939 - DNA, 1932 bp, Artificial Sequence
  derived and/or modified sequence
atgttcagcatgcgcatcgtgtgcctggtgctgagcgtggtgggcaccgcctggaccgccgacagcggcgagggcgacttcctggccgagggcggcggcgtgcgcggcccccgcgtggtggagcgccaccagagcgcctgcaaggacagcgactggcccttctgcagcgacgaggactggaactacaagtgccccagcggctgccgcatgaagggcctgatcgacgaggtgaaccaggacttcaccaaccgcatcaacaagctgaagaacagcctgttcgagtaccagaagaacaacaaggacagccacagcctgaccaccaacatcatggagatcctgcgcggcgacttcagcagcgccaacaaccgcgacaacacctacaaccgcgtgagcgaggacctgcgcagccgcatcgaggtgctgaagcgcaaggtgatcgagaaggtgcagcacatccagctgctgcagaagaacgtgcgcgcccagctggtggacatgaagcgcctggaggtggacatcgacatcaagatccgcagctgccgcggcagctgcagccgcgccctggcccgcgaggtggacctgaaggactacgaggaccagcagaagcagctggagcaggtgatcgccaaggacctgctgcccagccgcgaccgccagcacctgcccctgatcaagatgaagcccgtgcccgacctggtgcccggcaacttcaagagccagctgcagaaggtgccccccgagtggaaggccctgaccgacatgccccagatgcgcatggagctggagcgccccggcggcaacgagatcacccgcggcggcagcaccagctacggcaccggcagcgagaccgagagcccccgcaaccccagcagcgccggcagctggaacagcggcagcagcggccccggcagcaccggcaaccgcaaccccggcagcagcggcaccggcggcaccgccacctggaagcccggcagcagcggccccggcagcaccggcagctggaacagcggcagcagcggcaccggcagcaccggcaaccagaaccccggcagcccccgccccggcagcaccggcacctggaaccccggcagcagcgagcgcggcagcgccggccactggaccagcgagagcagcgtgagcggcagcaccggccagtggcacagcgagagcggcagcttccgccccgacagccccggcagcggcaacgcccgccccaacaaccccgactggggcaccttcgaggaggtgagcggcaacgtgagccccggcacccgccgcgagtaccacaccgagaagctggtgaccagcaagggcgacaaggagctgcgcaccggcaaggagaaggtgaccagcggcagcaccaccaccacccgccgcagctgcagcaagaccgtgaccaagaccgtgatcggccccgacggccacaaggaggtgaccaaggaggtggtgaccagcgaggacggcagcgactgccccgaggccatggacctgggcaccctgagcggcatcggcaccctggacggcttccgccaccgccaccccgacgaggccgccttcttcgacaccgccagcaccggcaagaccttccccggcttcttcagccccatgctgggcgagttcgtgagcgagaccgagagccgcggcagcgagagcggcatcttcaccaacaccaaggagagcagcagccaccaccccggcatcgccgagttccccagccgcggcaagagcagcagctacagcaagcagttcaccagcagcaccagctacaaccgcggcgacagcaccttcgagagcaagagctacaagatggccgacgaggccggcagcgaggccgaccacgagggcacccacagcaccaagcgcggccacgccaagagccgccccgtgcgcggcatccacaccagccccctgggcaagcccagcctgagcccc

SEQ ID NO: 209940 - DNA, 1935 bp, Artificial Sequence
  derived and/or modified sequence
atgttcagcatgagaatcgtgtgcctggtgctgagcgtggtgggcaccgcctggaccgccgacagcggcgagggcgacttcctggccgagggcggcggcgtgagaggccccagagtggtggagagacaccagagcgcctgcaaggacagcgactggcccttctgcagcgacgaggactggaactacaagtgccccagcggctgcagaatgaagggcctgatcgacgaggtgaaccaggacttcaccaacagaatcaacaagctgaagaacagcctgttcgagtaccagaagaacaacaaggacagccacagcctgaccaccaacatcatggagatcctgagaggcgacttcagcagcgccaacaacagagacaacacctacaacagagtgagcgaggacctgagaagcagaatcgaggtgctgaagagaaaggtgatcgagaaggtgcagcacatccagctgctgcagaagaacgtgagagcccagctggtggacatgaagagactggaggtggacatcgacatcaagatcagaagctgcagaggcagctgcagcagagccctggccagagaggtggacctgaaggactacgaggaccagcagaagcagctggagcaggtgatcgccaaggacctgctgcccagcagagacagacagcacctgcccctgatcaagatgaagcccgtgcccgacctggtgcccggcaacttcaagagccagctgcagaaggtgccccccgagtggaaggccctgaccgacatgccccagatgagaatggagctggagagacccggcggcaacgagatcaccagaggcggcagcaccagctacggcaccggcagcgagaccgagagccccagaaaccccagcagcgccggcagctggaacagcggcagcagcggccccggcagcaccggcaacagaaaccccggcagcagcggcaccggcggcaccgccacctggaagcccggcagcagcggccccggcagcaccggcagctggaacagcggcagcagcggcaccggcagcaccggcaaccagaaccccggcagccccagacccggcagcaccggcacctggaaccccggcagcagcgagagaggcagcgccggccactggaccagcgagagcagcgtgagcggcagcaccggccagtggcacagcgagagcggcagcttcagacccgacagccccggcagcggcaacgccagacccaacaaccccgactggggcaccttcgaggaggtgagcggcaacgtgagccccggcaccagaagagagtaccacaccgagaagctggtgaccagcaagggcgacaaggagctgagaaccggcaaggagaaggtgaccagcggcagcaccaccaccaccagaagaagctgcagcaagaccgtgaccaagaccgtgatcggccccgacggccacaaggaggtgaccaaggaggtggtgaccagcgaggacggcagcgactgccccgaggccatggacctgggcaccctgagcggcatcggcaccctggacggcttcagacacagacaccccgacgaggccgccttcttcgacaccgccagcaccggcaagaccttccccggcttcttcagccccatgctgggcgagttcgtgagcgagaccgagagcagaggcagcgagagcggcatcttcaccaacaccaaggagagcagcagccaccaccccggcatcgccgagttccccagcagaggcaagagcagcagctacagcaagcagttcaccagcagcaccagctacaacagaggcgacagcaccttcgagagcaagagctacaagatggccgacgaggccggcagcgaggccgaccacgagggcacccacagcaccaagagaggccacgccaagagcagacccgtgagaggcatccacaccagccccctgggcaagcccagcctgagcccctag

SEQ ID NO: 209941 - DNA, 870 bp, Artificial Sequence
  derived and/or modified sequence
atgttcagcatgagaatcgtgtgcctggtgctgagcgtggtgggcaccgcctggaccgccgacagcggcgagggcgacttcctggccgagggcggcggcgtgagaggccccagagtggtggagagacaccagagcgcctgcaaggacagcgactggcccttctgcagcgacgaggactggaactacaagtgccccagcggctgcagaatgaagggcctgatcgacgaggtgaaccaggacttcaccaacagaatcaacaagctgaagaacagcctgttcgagtaccagaagaacaacaaggacagccacagcctgaccaccaacatcatggagatcctgagaggcgacttcagcagcgccaacaacagagacaacacctacaacagagtgagcgaggacctgagaagcagaatcgaggtgctgaagagaaaggtgatcgagaaggtgcagcacatccagctgctgcagaagaacgtgagagcccagctggtggacatgaagagactggaggtggacatcgacatcaagatcagaagctgcagaggcagctgcagcagagccctggccagagaggtggacctgaaggactacgaggaccagcagaagcagctggagcaggtgatcgccaaggacctgctgcccgtggtgaacctgcaggtgaccgccaacaacctgctggtggccagagtgaccaccgaggagaccccccacctgaaggccagagccatcaagtggcagatgagacccgaggtgaagcccatcatgaaggagcacatcgcccccagagaggccatgctgaacctggccctgagcgaggtgagcaccctgctgctgtggggcagcctgccctgcccccccagactgagctag

SEQ ID NO: 209942 - DNA, 1935 bp, Artificial Sequence
  derived and/or modified sequence
atgttttccatgcggattgtttgcttggtgctatccgtagtgggcacggcatggacagcagattctggcgaaggagactttctggccgagggtgggggagtacgaggcccccgcgtcgtggagagacaccagagcgcttgcaaggacagcgattggcccttttgcagtgacgaggactggaactacaagtgtccgtctggctgtcgcatgaagggccttattgatgaagtgaatcaggatttcacaaatagaatcaacaagttgaagaacagcctctttgaataccagaagaacaataaggacagtcacagtctgacaaccaacatcatggagatcctaaggggcgacttcagtagcgctaacaatcgtgacaatacctataatagggtgtcagaagaccttagatctcggatcgaagttctcaagcgcaaggtcatcgagaaggttcagcacattcagctgctacaaaagaacgtgagagctcaacttgttgacatgaagagacttgaagtagacatcgatattaagattaggagttgtagagggtcatgttctcgggctctcgctagagaagtggatttaaaggactacgaggaccaacagaagcagctcgagcaagttatagcaaaagatctgctccccagcagggaccggcagcatcttcccttgattaagatgaagcccgtccccgacctggtgccaggtaatttcaaatcccagttgcagaaggtgcctcccgaatggaaagccctgactgatatgccccagatgagaatggagttggagagacccgggggcaatgaaattactcggggcgggtccacctcatatggaaccggatctgagaccgagtcacccaggaatccatcttcagcaggttcatggaactctggctcatcaggccccggaagtacagggaacaggaaccctggatcaagcggcacgggcggcactgccacttggaagcctggttcttctgggcctggctcaaccggctcctggaattctggttcttcagggaccggatcgacgggaaaccaaaatccagggagccctagacccggatccactggcacctggaacccaggaagctccgagaggggtagcgcggggcattggacatcagagagttccgtgtcgggatccaccgggcagtggcatagcgagtcaggctccttccggcccgactcacctggatctggaaatgcccggccaaataacccagactgggggacatttgaggaggtctctggaaatgttagccctggtacacggagagagtaccatacagaaaaactcgtgacatcaaagggagacaaggagctgcgaaccgggaaagagaaagtcacttcaggtagtactacgacaacccgccgatcatgttccaaaacagtgacaaaaactgttattggtccagatgggcacaaggaagtaacaaaggaagtcgtgactagcgaggatggttccgactgccctgaagctatggacctgggtaccttgtctggcatcggtacgcttgacggcttcagacaccgccacccagatgaagccgccttcttcgataccgcgtccaccggtaagacgtttcctggctttttctccccgatgttgggagaattcgtgtcagaaacagagtcccgcgggagcgaaagcgggattttcactaacacgaaagaaagcagttctcatcatccgggcattgccgaattcccaagcaggggcaagagcagctcctattcaaaacagtttacaagtagcacttcatataaccgcggggattcaacctttgagtccaagagttataaaatggctgacgaagctggatccgaagctgatcacgagggcactcatagcaccaagcgcggacacgccaagagcaggcccgttagaggtatccatacctccccactaggtaaacccagcttgtcaccttag

SEQ ID NO: 209943 - DNA, 870 bp, Artificial Sequence
  derived and/or modified sequence
atgttttccatgaggatcgtatgtctggtcctcagcgtggtgggtacggcctggacagctgacagtggagagggggatttccttgccgagggaggaggagttcgtgggcccagggtggttgaacgccaccagagcgcctgcaaagatagtgactggccattttgctctgatgaggattggaactataaatgtcccagtgggtgccgaatgaaaggcctcattgatgaggtgaaccaggactttacgaacagaattaataaactcaagaactcattgttcgaatatcagaagaataataaggatagtcacagcttgacgacaaatataatggagatcctgagaggtgatttcagctcagcaaacaatagagataatacatacaatagagtgagtgaagatctgcgctcccgaattgaagtgctaaagcgaaaggtgatcgagaaggttcaacacatccaattactgcagaaaaacgtgagagctcagctggtggatatgaagagactggaggtggacattgacatcaagatccgttcttgtaggggctcttgctcaagagcattggcccgggaagttgacctgaaagattacgaagatcagcaaaaacaactcgagcaggtgatcgcgaaggatcttctacctgtcgtaaatttgcaggttacagccaataatctccttgtggcccgcgtgactacagaggagactcctcacctgaaagctagagcaataaagtggcagatgcggcctgaagtgaaacccattatgaaggagcacatcgcacccagagaggctatgctgaacctcgcactctctgaagtgtctactctactcctgtggggcagtctaccatgcccaccccgcctcagctag

SEQ ID NO: 209944 - DNA, 1935 bp, Artificial Sequence
  derived and/or modified sequence
atgttctccatgagaattgtgtgcctggtgctgtctgtggtgggcacagcctggacagctgacagcggggagggggacttcctggccgagggcggcggcgtgcggggcccccgggtggtggagcggcaccagagcgcctgcaaggacagcgactggcccttctgcagtgatgaggactggaactacaagtgccccagcggctgcaggatgaagggcctgattgatgaggtgaaccaggacttcaccaaccgcatcaacaagctgaagaacagcctgtttgagtaccagaagaacaacaaggacagccacagcctgaccaccaacatcatggagatcctgcggggggacttcagcagcgccaacaacagagacaacacctacaacagagtgtctgaggacctgcggagccgcatcgaggtgctgaagaggaaggtgattgagaaggtgcagcacatccagctgctgcagaagaatgtgcgggcccagctggtggacatgaagaggctggaggtggacatcgacatcaagatccgcagctgccggggcagctgcagccgggccctggcccgggaggtggacctgaaggactatgaggaccagcagaagcagctggagcaggtgattgccaaggacctgctgcccagccgggaccggcagcacctgcccctcatcaagatgaagcctgtgcctgacctggtgcccggcaacttcaagagccagctgcagaaggtgcccccagagtggaaggccctgacagacatgccccagatgaggatggagctggagaggcctggaggaaatgagatcacccggggcggcagcaccagctatggaactggaagtgaaacagagagccccaggaaccccagcagcgctggctcctggaacagcggcagcagcggccctggcagcactggaaacagaaatcctggcagcagcggcactggaggaacagccacctggaagccaggcagcagcggccctggcagcacaggctcctggaacagcggcagcagcggcaccggcagcacaggcaaccagaaccctggcagcccccggcccggcagcacaggcacctggaaccctggcagcagcgagcggggcagcgctggccactggaccagcgagagctctgtgtctggcagcacaggccagtggcacagcgagagcggcagcttccggccagacagccctggcagcggaaatgcccggcccaacaacccagactggggcacctttgaggaggtgtctggaaatgtgtccccaggcacccggcgggagtaccacacagagaagctggtgaccagcaaaggagacaaggagctgaggacaggcaaggagaaggtgaccagcggcagcaccaccaccacccggcgcagctgcagcaagacagtgaccaagacagtcatcggcccagatggccacaaggaggtgaccaaggaggtggtgaccagtgaagatggcagtgactgcccagaggccatggacctgggcaccctgtctggaattggcaccctggatggcttccgccaccgccacccagatgaagctgccttctttgacacagccagcacaggcaagaccttccctggcttcttcagccccatgctgggggagtttgtgtctgaaacagagagccggggcagcgagagcggcatcttcaccaacaccaaggagagcagcagccaccaccctggcattgctgagttccccagccggggcaagagcagcagctacagcaagcagttcaccagcagcaccagctacaacagaggagacagcacctttgagagcaagagctacaagatggctgatgaagctggcagcgaggccgaccacgagggcacccacagcaccaagaggggccacgccaagagcaggcctgtgcggggcatccacaccagccccctgggcaagcccagcctgagcccctag

SEQ ID NO: 209945 - DNA, 870 bp, Artificial Sequence
  derived and/or modified sequence
atgttctccatgagaattgtgtgcctggtgctgtctgtggtgggcacagcctggacagctgacagcggggagggggacttcctggccgagggcggcggcgtgcggggcccccgggtggtggagcggcaccagagcgcctgcaaggacagcgactggcccttctgcagtgatgaggactggaactacaagtgccccagcggctgcaggatgaagggcctgattgatgaggtgaaccaggacttcaccaaccgcatcaacaagctgaagaacagcctgtttgagtaccagaagaacaacaaggacagccacagcctgaccaccaacatcatggagatcctgcggggggacttcagcagcgccaacaacagagacaacacctacaacagagtgtctgaggacctgcggagccgcatcgaggtgctgaagaggaaggtgattgagaaggtgcagcacatccagctgctgcagaagaatgtgcgggcccagctggtggacatgaagaggctggaggtggacatcgacatcaagatccgcagctgccggggcagctgcagccgggccctggcccgggaggtggacctgaaggactatgaggaccagcagaagcagctggagcaggtgattgccaaggacctgctgcctgtggtgaacctgcaggtgacagccaacaacctgctggtggcccgggtgaccacagaggagaccccccacctgaaggcccgggccatcaagtggcagatgaggcctgaggtgaagcccatcatgaaggagcacatcgccccccgggaggccatgctgaacctggccctgtctgaggtgtccaccctgctgctgtggggcagcctgccctgccccccccggctgtcctag

SEQ ID NO: 209946 - DNA, 2248 bp, Artificial Sequence
  derived and/or modified sequence
aggatgggaactaggagtggcagcaatcctttctttcagctggagtgctcctcaggagccagccccacccttagaaaagatgttttccatgaggatcgtctgcctggtcctaagtgtggtgggcacagcatggactgcagatagtggtgaaggtgactttctagctgaaggaggaggcgtgcgtggcccaagggttgtggaaagacatcaatctgcctgcaaagattcagactggcccttctgctctgatgaagactggaactacaaatgcccttctggctgcaggatgaaagggttgattgatgaagtcaatcaagattttacaaacagaataaataagctcaaaaattcactatttgaatatcagaagaacaataaggattctcattcgttgaccactaatataatggaaattttgagaggcgatttttcctcagccaataaccgtgataatacctacaaccgagtgtcagaggatctgagaagcagaattgaagtcctgaagcgcaaagtcatagaaaaagtacagcatatccagcttctgcagaaaaatgttagagctcagttggttgatatgaaacgactggaggtggacattgatattaagatccgatcttgtcgagggtcatgcagtagggctttagctcgtgaagtagatctgaaggactatgaagatcagcagaagcaacttgaacaggtcattgccaaagacttacttccctctagagataggcaacacttaccactgataaaaatgaaaccagttccagacttggttcccggaaattttaagagccagcttcagaaggtacccccagagtggaaggcattaacagacatgccgcagatgagaatggagttagagagacctggtggaaatgagattactcgaggaggctccacctcttatggaaccggatcagagacggaaagccccaggaaccctagcagtgctggaagctggaactctgggagctctggacctggaagtactggaaaccgaaaccctgggagctctgggactggagggactgcaacctggaaacctgggagctctggacctggaagtactggaagctggaactctgggagctctggaactggaagtactggaaaccaaaaccctgggagccctagacctggtagtaccggaacctggaatcctggcagctctgaacgcggaagtgctgggcactggacctctgagagctctgtatctggtagtactggacaatggcactctgaatctggaagttttaggccagatagcccaggctctgggaacgcgaggcctaacaacccagactggggcacatttgaagaggtgtcaggaaatgtaagtccagggacaaggagagagtaccacacagaaaaactggtcacttctaaaggagataaagagctcaggactggtaaagagaaggtcacctctggtagcacaaccaccacgcgtcgttcatgctctaaaaccgttactaagactgttattggtcctgatggtcacaaagaagttaccaaagaagtggtgacctccgaagatggttctgactgtcccgaggcaatggatttaggcacattgtctggcataggtactctggatgggttccgccataggcaccctgatgaagctgccttcttcgacactgcctcaactggaaaaacattcccaggtttcttctcacctatgttaggagagtttgtcagtgagactgagtctaggggctcagaatctggcatcttcacaaatacaaaggaatccagttctcatcaccctgggatagctgaattcccttcccgtggtaaatcttcaagttacagcaaacaatttactagtagcacgagttacaacagaggagactccacatttgaaagcaagagctataaaatggcagatgaggccggaagtgaagccgatcatgaaggaacacatagcaccaagagaggccatgctaaatctcgccctgtcagaggtatccacacttctcctttggggaagccttccctgtccccctagactaagttaaatatttctgcacagtgttcccatggccccttgcatttccttcttaactctctgttacacgtcattgaaactacacttttttggtctgtttttgtgctagactgtaagttccttgggggcagggcctttgtctgtctcatctctgtattcccaaatgcctaacagtacagagccatgactcaataaatacatgttaaatggatgaatgaattcctctgaaactct

SEQ ID NO: 209947 - DNA, 928 bp, Artificial Sequence
  derived and/or modified sequence
agcaatcctttctttcagctggagtgctcctcaggagccagccccacccttagaaaagatgttttccatgaggatcgtctgcctggtcctaagtgtggtgggcacagcatggactgcagatagtggtgaaggtgactttctagctgaaggaggaggcgtgcgtggcccaagggttgtggaaagacatcaatctgcctgcaaagattcagactggcccttctgctctgatgaagactggaactacaaatgcccttctggctgcaggatgaaagggttgattgatgaagtcaatcaagattttacaaacagaataaataagctcaaaaattcactatttgaatatcagaagaacaataaggattctcattcgttgaccactaatataatggaaattttgagaggcgatttttcctcagccaataaccgtgataatacctacaaccgagtgtcagaggatctgagaagcagaattgaagtcctgaagcgcaaagtcatagaaaaagtacagcatatccagcttctgcagaaaaatgttagagctcagttggttgatatgaaacgactggaggtggacattgatattaagatccgatcttgtcgagggtcatgcagtagggctttagctcgtgaagtagatctgaaggactatgaagatcagcagaagcaacttgaacaggtcattgccaaagacttacttcccgtggtaaatcttcaagttacagcaaacaatttactagtagcacgagttacaacagaggagactccacatttgaaagcaagagctataaaatggcagatgaggccggaagtgaagccgatcatgaaggaacacatagcaccaagagaggccatgctaaatctcgccctgtcagaggtatccacacttctcctttggggaagccttccctgtccccctagactaagttaa

SEQ ID NO: 209948 - DNA, 1935 bp, Artificial Sequence
  derived and/or modified sequence
atgttcagcatgcggatcgtgtgcctggtgctgagcgtggtgggcaccgcatggactgccgactctggtgagggcgatttcctggccgaaggtgggggagtgcgcggaccgagggtcgttgagcggcatcaatctgcctgcaaggactcagattggccattttgttcggacgaggattggaattataagtgtccatctggctgcagaatgaaaggcctgattgacgaagtgaaccaggatttcacaaacagaatcaacaagctcaagaatagtctgtttgaatatcaaaaaaataacaaagactcacacagcctgaccaccaacatcatggagatactacgcggcgattttagctctgctaacaaccgcgataatacctacaacagggtctccgaagacttgagatcacggatagaagtgctcaagcgcaaggtgatcgagaaggtccaacatattcagctcctgcagaaaaacgtgagagctcagttggtcgacatgaagcggcttgaagtggatatcgatatcaagatcaggtcctgtcgcgggtcttgcagccgggcacttgctagagaagtcgacctgaaggactacgaggatcagcagaaacagctggagcaggtgatagcgaaagacttgctgccctctagggacagacagcatctgcctctcatcaaaatgaaacctgtgcctgacctcgtcccaggtaacttcaagtcccagctccagaaggtccccccggagtggaaggccctaaccgacatgccacaaatgcgcatggaacttgaacggcctgggggaaatgagatcacacgtggtggctccacttcatacggtacaggctctgagaccgaaagtcctaggaaccctagctccgcgggcagctggaatagcggctcctctggccctggaagcaccgggaatcggaaccccgggtcatccggaactggcggaactgctacttggaaacccggatcaagtggcccgggcagcacaggctcatggaactcaggctctagcggaacaggctctacgggcaaccagaatcccggctccccccggccaggaagcaccggaacctggaacccgggatctagtgagagaggcagcgctggccattggacaagtgaatcatctgtttccggaagtaccggtcaatggcactctgaatcaggtagctttagacctgactctccagggagcggaaacgcacggccgaacaaccccgactgggggaccttcgaggaagtgtcagggaacgtttctccagggactaggagggaatatcacaccgagaagctggtcaccagcaaaggagataaggagttaaggactggaaaggagaaagttaccagtggctccaccactaccacaaggcgatcttgctccaagacggtgacgaaaacagtgattggcccagacggacacaaggaggtaacaaaagaagtggtgacctcagaggacggctcggattgccccgaggctatggacctcggaacactcagtgggattggcaccttggatggatttaggcaccggcaccccgatgaggcagcgtttttcgacactgcttctacgggcaaaacattccctgggttcttttctcccatgttgggtgaatttgtgtccgagacggaaagcaggggcagtgaaagcgggattttcactaatacaaaggaatctagttcacaccacccaggtattgctgagtttccgtcacgcgggaagtcctcatcttacagtaagcagttcacctctagcacatcttacaaccgtggagattcaactttcgaaagcaagtcatacaaaatggctgatgaggcagggagcgaagccgaccatgaagggacacacagcacaaaaagaggacatgccaagagtagacccgtccgggggattcacacttcaccattgggcaaaccgtcactgagcccatag

SEQ ID NO: 209949 - DNA, 870 bp, Artificial Sequence
  derived and/or modified sequence
atgttcagcatgcggatcgtgtgcctggtgctgagcgtggtgggcaccgcatggaccgcagactccggggagggtgacttccttgctgaaggcggaggtgttcgaggcccacgggtggtcgagagacatcagtctgcctgcaaagatagcgattggcctttttgttccgatgaggattggaattacaagtgtccgtctggctgcagaatgaagggcctaatcgatgaagtcaaccaggactttacaaatagaattaacaagctgaagaactccctgttcgaatatcagaagaataataaagattcacattcccttactacaaacataatggaaatcctgcgcggcgacttcagttctgcgaacaacagagacaatacctataatagagtaagtgaggatctgcgcagcagaatcgaggtcctgaaaagaaaggtgatcgagaaggtccaacacattcagcttctccagaagaatgtgcgcgcccagctggtggatatgaagcgactagaagtggatatcgacatcaagataaggtcttgtagggggtcatgcagtagagccctagctcgcgaggtggatttgaaggattacgaggaccagcagaaacagctggaacaagtcattgccaaagacctgttacccgtcgtcaatctccaggtgacagctaataatctcttggtggcccgggtaacgaccgaagagactccacaccttaaagctagagccatcaaatggcagatgagacccgaggttaaacccatcatgaaggagcacattgcacctagagaagccatgctgaacctggccctgtcagaagttagcaccctcctcttatggggctctctgccgtgtcctcctaggcttagctag

SEQ ID NO: 209950 - DNA, 1935 bp, Artificial Sequence
  derived and/or modified sequence
atgttcagtatgcgcatcgtttgtttagtgttgtctgttgttggtacagcctggacggctgattcgggagagggcgactttctggccgaaggaggcggagtccggggaccaagggtcgttgaaagacaccaatccgcttgcaaagacagtgattggccgttctgctctgacgaggattggaactacaagtgtccaagtggttgcaggatgaagggactgatcgatgaagtgaatcaagacttcacaaacagaatcaacaaattaaagaacagcctcttcgagtaccagaagaacaacaaggattcccattccctgacgaccaatatcatggagatcctcaggggagacttctctagtgccaataacagggataacacgtacaatagagtgagcgaagacctccggtcccgaatcgaggtcctgaaacggaaggtgattgaaaaggtccagcatattcagttgctgcagaaaaacgtgcgcgctcaacttgttgatatgaagaggttggaggtggacattgacatcaaaatccgaagctgcagaggatcttgctcccgcgctctggcgagggaagttgacctcaaagactatgaagaccaacaaaaacagctggaacaagtaatcgccaaggatctccttccctcacgagatcggcaacacttacctctgattaagatgaagccggtgcctgacctcgtgccgggtaatttcaaatcccagctacagaaggtgcctcccgagtggaaggctctcaccgacatgcctcagatgcggatggaattggagcgacctgggggtaatgaaataacacgcggtggctccacatcatatgggaccgggtcagaaaccgaatccccgcgaaatccttctagcgctggttcttggaattccggcagttcaggacccggaagtactggcaaccggaatcccggtagctccggtacaggcggaacagcgacctggaaaccaggatcatccgggccaggaagcactggctcttggaacagcggatcaagtgggacgggcagcactggaaatcagaacccgggttcaccacgacccggtagtacaggcacgtggaaccctgggtcttcggagcggggtagcgcaggacactggactagtgagagttctgtgagcggttccactggccagtggcattccgaatcaggatccttcaggcctgacagcccagggtccggaaacgcaagacctaacaaccctgactgggggaccttcgaagaagtgagcggcaacgtgtcccctggtacacggcgagaatatcatacggagaagctcgtgactagcaagggggataaggaacttagaacaggcaaggagaaagtaacaagcgggagcaccacaacaacaagacgctcttgcagtaagacagtcaccaagactgtgattgggcctgatggccataaagaagtgaccaaggaagttgtgactagcgaggacggctcggattgcccagaagccatggaccttgggacactgagcggcattgggactctggatggatttaggcatcggcatcctgatgaagctgcattttttgatactgccagcacggggaaaacattcccgggattcttcagtcctatgctaggagagttcgtgagtgaaactgaatcacggggatccgaatcgggtatctttacaaataccaaggagtccagttctcaccaccccggaatcgcggaattcccaagtcggggaaagtctagtagttacagcaagcagttcacgagcagcacctcctacaatcgaggcgactctactttcgagtctaagtcctacaaaatggctgacgaagccggaagtgaggcagaccacgaggggacccactccaccaagcggggacatgcaaaaagtagacctgttaggggcatacacactagcccactgggaaagccatcactctccccgtag

SEQ ID NO: 209951 - DNA, 870 bp, Artificial Sequence
  derived and/or modified sequence
atgttcagtatgcgtatagtgtgtctggtgctctcagttgtgggcaccgcctggacggctgatagtggagagggcgatttccttgctgaaggaggtggcgtccgcggacccagggtggtcgaacgccaccagtctgcctgtaaggattcagattggcccttttgttctgatgaggactggaactataaatgtccctcgggctgcagaatgaaggggctgattgatgaggtgaatcaggactttactaaccgaataaataagctaaaaaatagcctatttgagtaccagaagaacaacaaagactcccactccttaacaaccaatattatggaaatattaagaggcgacttctcgagtgctaacaatagagataacacttataatagagtgagtgaggatctacgatcgcggatcgaggttttgaagcgcaaggtgatcgagaaggtccaacacatccagctgctccagaagaacgtgagagcccaacttgtcgatatgaaacgcctggaagtggatattgacatcaagatcagaagctgccggggttcttgctccagggctctcgcaagggaagtggatttaaaagattatgaagatcagcagaaacagctagaacaggtgatcgctaaagacttgctgcctgttgtgaatctgcaggtaactgccaataacctattagtggctcgagtcactacagaggagaccccgcacctgaaagctcgggcaataaaatggcaaatgcgtcctgaggtgaaaccgataatgaaggagcacattgccccacgggaagctatgctgaacttggctttgtctgaggtttcgacgcttctgttgtgggggtctctgccttgtcccccacggctgtcttag

SEQ ID NO: 209952 - protein, 539 aa, Artificial Sequence
  derived and/or modified sequence
MEVPQPEPAPGSALSPAGVCGGAQRPGHLPGLLLGSHGLLGSPVRAAASSPVTTLTQTMHDLAGLGSETPKSQVGTLLFRSRSRLTHLSLSRRASESSLSSESSESSDAGLCMDSPSPMDPHMAEQTFEQAIQAASRIIRNEQFAIRRFQSMPDGFVFKMPWKPTHPSSTHALAEWASRREAFAQRPSSAPDLMCLSPDRKMEVEELSPLALGRFSLTPAEGDTEEDDGFVDILESDLKDDDAVPPGMESLISAPLVKTLEKEEEKDLVMYSKCQRLFRSPSMPCSVIRPILKRLERPQDRDTPVQNKRRRSVTPPEEQQEAEEPKARVLRSKSLCHDEIENLLDSDHRELIGDYSKAFLLQTVDGKHQDLKYISPETMVALLTGKFSNIVDKFVIVDCRYPYEYEGGHIKTAVNLPLERDAESFLLKSPIAPCSLDKRVILIFHCEFSSERGPRMCRFIRERDRAVNDYPSLYYPEMYILKGGYKEFFPQHPNFCEPQDYRPMNHEAFKDELKTFRLKTRSWAGERSRRELCSRLQDQ

SEQ ID NO: 209953 - DNA, 1620 bp, Artificial Sequence
  derived and/or modified sequence
atggaggtccctcagccggagccggcgcctggatctgcattgtctcctgccggtgtctgcggaggcgctcagcggccagggcacctgccaggactgctgctgggatctcatggcttgctggggtcccctgtgcgcgcagcggcatcgtcccctgttacaactctgactcaaacgatgcatgacctggcaggacttgggtccgagaccccaaaaagccaggtcgggactctattgttcagatccagatcccgtttgacccacctgtccctgtctcggagggcgagtgagagctcattgagtagcgagtcttctgagtcatcagacgccgggctgtgtatggattccccctctccaatggacccgcacatggctgagcagacctttgagcaagcgatccaggccgcgtcccggatcatcagaaacgaacaattcgcaatcaggcgatttcagtcgatgcctgatggatttgtcttcaaaatgccctggaaacctacacacccctcatcaacccacgctttagctgagtgggcgtcccgcagagaggccttcgcccaaagaccatcaagtgcacccgatcttatgtgtctgagccccgacaggaaaatggaggtagaggagctcagtccactcgccttgggcagattttcactgacccccgctgagggcgataccgaagaggacgatggctttgtggatattctcgagagcgacctgaaagacgacgacgccgtgcctcctggaatggagagtctcattagcgccccactcgtcaaaactctggaaaaggaagaagaaaaagacctggtcatgtactccaaatgccaacggctgtttagaagcccctctatgccgtgctctgtgattcgccctatccttaagcggcttgaacggccacaagatcgggacaccccagtgcaaaacaagagacgaaggtctgtcacaccccccgaggaacagcaagaggctgaagaacccaaggccagagtgttgcgttctaaatctctctgtcatgacgagatagaaaacctgcttgacagcgatcatcgggaactcattggggactactccaaagccttcctgctgcagacggtcgacggtaaacaccaagatcttaagtatatatctcccgaaacgatggtcgccttgctgaccggcaaattcagtaacatagtggataagtttgtaatagtggactgcagatacccctacgaatatgagggcgggcacattaagacagcagttaacttgccattggaacgagacgccgagtcattcctgctaaagtccccaatcgccccatgctccctcgataaacgcgttattctaatatttcactgcgaattctcttctgaacggggtccacggatgtgccgcttcatccgggagcgggaccgcgcagttaatgactatccctccctgtactatccagagatgtatattctgaagggagggtataaggagttttttccccagcatcccaatttctgcgagccccaagactatcgcccgatgaatcacgaagcgttcaaggacgagttgaagacctttagactcaaaacacgctcctgggccggagagcggagcaggcgagagctgtgttcccgccttcaggatcagtag

SEQ ID NO: 209954 - DNA, 1620 bp, Artificial Sequence
  derived and/or modified sequence
atggaggtgccccagcctgagcccgcccctggcagcgccctgagccctgctggggtgtgtggcggggcccagaggcctggccacctgcccggcctgctgctgggcagccacggcctgctgggcagccctgtgcgggctgctgccagcagccctgtgaccaccctgacccagaccatgcatgacctggccggcctgggcagcgagacccccaagagccaggtgggcaccctgctcttccgcagccgcagccggctgacccacctgagcctgagccggcgggccagcgagagcagcctgagcagcgagagcagcgagagcagtgatgctggcctgtgcatggacagccccagccccatggacccccacatggccgagcagacctttgagcaggccatccaggccgccagccgcatcatcagaaatgagcagtttgccatccgccgcttccagagcatgccagatggctttgtgttcaagatgccctggaagcccacccaccccagcagcacccacgccctggccgagtgggccagcagaagagaggcctttgcccagaggcccagcagcgccccagacctgatgtgcctgagcccagacaggaagatggaggtggaggagctgagccccctggccctgggccgcttcagcctgaccccagctgagggggacacagaggaggatgatggctttgtggacatcctggagagtgacctgaaggatgatgatgctgtgcccccaggcatggagagcctcatcagcgcccccctggtgaagaccctggagaaggaggaggagaaggacctggtgatgtacagcaagtgccagaggctcttccgcagccccagcatgccctgcagcgtcatccggcccatcctgaagaggctggagcggccccaggaccgggacacccctgtgcagaacaagagaagaagatctgtgaccccacctgaggagcagcaggaggccgaggagcccaaggcccgggtgctgcggagcaagagcctgtgccatgatgaaattgagaacctgctggacagcgaccaccgggagctgattggagactacagcaaggccttcctgctgcagacagtggatggcaagcaccaggacctgaagtacatcagccctgagaccatggtggccctgctgaccgggaagttcagcaacatcgtggacaagtttgtgattgtggactgccgctacccctatgaatatgaaggaggccacatcaagacagctgtgaacctgcccctggagagagatgctgagagcttcctgctgaagagccccatcgccccctgcagcctggacaagagggtcatcctgatcttccactgtgagttcagcagcgagcggggccccaggatgtgccgcttcatccgggagcgggacagagctgtgaatgactaccccagcctgtactacccagagatgtacatcctgaagggcggctacaaggagttcttcccccagcaccccaacttctgtgagccccaggactaccggcccatgaaccacgaggccttcaaggatgagctgaagaccttccggctgaagaccaggtcctgggccggggagaggagcagaagagagctgtgcagccggctgcaggaccagtag

SEQ ID NO: 209955 - DNA, 1620 bp, Artificial Sequence
  derived and/or modified sequence
atggaggtgccccagcccgagcccgcccccggcagcgccctgagcccagctggcgtgtgcggcggtgctcagcggccaggacacctacccggactgctgctaggttcccatgggctgttgggtagcccagtgcgcgctgccgcgagctcacctgttacaaccttaacccagactatgcatgatctggccggactgggtagtgagacgccaaagtcacaagtcgggaccctgctattcagatcccggtcccgcctgacccatctttcactgtcccgccgggcatcagagagctccctgtcaagcgaatcatctgaaagctccgatgccggcctgtgtatggacagcccgagccctatggacccccacatggcggagcaaacctttgaacaagccattcaggccgctagcagaattattcgaaacgaacagttcgccattcgaaggttccagagcatgccggatggtttcgtcttcaagatgccctggaagcctacccatccctcttctacccacgccttggccgagtgggccagcagacgcgaagctttcgctcagcgccccagtagcgcccccgacctcatgtgtcttagccccgatcgcaagatggaagtggaggaattatccccactcgctctcggcagattttcactcaccccagccgagggggacacagaggaggacgatggctttgtggatattctggaatcagatctgaaagacgatgatgctgtgccccctggaatggagagtcttatttcagcgccactcgtgaagaccctagagaaggaggaagaaaaagatttagtcatgtatagcaaatgccaacgcctcttcaggtcaccctctatgccctgctcggtgatccgcccaatcctgaagcggctcgaacgccctcaggaccgggacacacctgtgcagaataagcgtagacgctccgtgacaccacccgaggagcagcaggaggccgaggaacccaaagctagagtcctgaggtcgaagtctctgtgtcatgacgaaattgagaaccttctggattcagaccacagagaactgatcggggattacagtaaggctttcttgctgcaaaccgttgatggaaagcatcaggaccttaagtatataagtcccgaaactatggttgccctcttgactggtaaattctctaacatcgttgataagttcgttattgttgactgccgatatccatatgaatatgaaggcggacatattaaaaccgccgtgaacctcccattggagagggacgccgaatcatttctgctgaaatcccctatcgctccctgtagcctggataaaagggtcattctgatttttcactgtgagttctcttccgaaagaggaccgcggatgtgcagatttatccgggagagggatcgtgccgtcaacgactacccatccctgtactacccagagatgtatatcctgaaaggcggatataaagaatttttcccacagcatccaaatttttgtgaaccccaggattatcgccccatgaatcacgaggccttcaaagacgagttaaagaccttcagactgaagacaaggagctgggctggtgagaggtccaggcgcgaactgtgttcgcgcctacaagatcagtag

SEQ ID NO: 209956 - DNA, 1620 bp, Artificial Sequence
  derived and/or modified sequence
atggaggttccccagccagagcctgccccaggtagcgcgctgagtcctgcgggagtatgtggtggagctcagcgacctggccacctgcccggtctgctcctcggaagtcatggcctcctagggagccccgttcgggctgcagcctcctctcccgttacaactttgactcaaacaatgcacgacttagctggcctgggcagcgagacacctaaatctcaggtcgggacccttctctttcgctctcggagtcgattgactcatctgagtctatcaaggcgtgctagcgaaagttctctgtctagcgaatctagtgagagcagcgacgcaggtttgtgcatggacagtccaagcccaatggacccgcatatggcagaacaaactttcgaacaggccattcaagctgcgtctcgcattattcgcaacgaacaatttgctatacggcgatttcagtccatgcccgacgggtttgtctttaaaatgccttggaaacctacacacccctcctcgacccacgccttggcagagtgggcttcaaggagggaggcatttgctcagcgaccgtcctcagcgccagatctcatgtgcctgagccccgatagaaagatggaagtagaagaactgtccccccttgctcttgggaggttttctttaactcccgctgaaggtgacaccgaagaggacgatggtttcgtggacattttagagagcgacctgaaagatgatgacgcagtgcctcctggcatggaaagcctcataagcgcacctttggtaaaaaccttagaaaaagaggaggagaaagacctggtgatgtacagcaagtgtcagagattgttccgttctccgtcaatgccatgtagcgttattaggcctatactgaagcgcctcgaacgcccacaggatcgggacacacccgttcagaacaagcgaagacggagcgtgacacctccggaggagcagcaggaggctgaggagcctaaagcccgagtgctgcggagcaaaagcctctgtcacgatgagatcgaaaacctgctcgacagcgatcacagagagctgattggggactattccaaggcattccttcttcagacagttgacggtaaacaccaagatctcaaatacatcagtccagaaaccatggtggcacttctaaccggcaaattcagtaacattgtcgacaaattcgtgattgtggactgcaggtacccgtatgagtatgaggggggtcacattaagaccgcggtaaatctgcccttagaacgggatgccgagtcttttttgttgaaatcacctatcgccccttgctctcttgataagcgcgtcatactcatctttcactgcgagttttcatctgaacggggacctaggatgtgtcgcttcatccgagaacgagaccgagccgtgaatgactacccatcgctctattatcccgagatgtacattctgaaaggaggctacaaggaattttttccacagcaccctaacttctgcgagccacaggattaccggccaatgaatcatgaagcctttaaggatgaattgaagacctttagactcaagacaaggagctgggccggtgaaaggtcgcggcgagagttatgtagtcgacttcaggatcagtag

SEQ ID NO: 209957 - DNA, 1978 bp, Artificial Sequence
  derived and/or modified sequence
acccctcgcccgctgcctccctcggcccagccagctgtgccggcgtttgttggctgccctgcgcccggccctccagccagccttctgccggccccgccgcgatggaggtgccccagccggagcccgcgccaggctcggctctcagtccagcaggcgtgtgcggtggcgcccagcgtccgggccacctcccgggcctcctgctgggatctcatggcctcctggggtccccggtgcgggcggccgcttcctcgccggtcaccaccctcacccagaccatgcacgacctcgccgggctcggcagcgaaaccccaaagagtcaggtagggaccctgctcttccgcagccgcagccgcctgacgcacctatccctgtctcgacgggcatccgaatcctccctgtcgtctgaatcctccgaatcttctgatgcaggtctctgcatggattcccccagccctatggacccccacatggcggagcagacgtttgaacaggccatccaggcagccagccggatcattcgaaacgagcagtttgccatcagacgcttccagtctatgccggatggatttgtcttcaagatgccatggaagcccacacatcccagctccacccatgctctggcagagtgggccagccgcagggaagcctttgcccagagacccagctcggcccccgacctgatgtgtctcagtcctgaccggaagatggaagtggaggagctcagccccctggccctaggtcgcttctctctgacccctgcagagggggatactgaggaagatgatggatttgtggacatcctagagagtgacttaaaggatgatgatgcagttcccccaggcatggagagtctcattagtgccccactggtcaagaccttggaaaaggaagaggaaaaggacctcgtcatgtacagcaagtgccagcggctcttccgctctccgtccatgccctgcagcgtgatccggcccatcctcaagaggctggagcggccccaggacagggacacgcccgtgcagaataagcggaggcggagcgtgacccctcctgaggagcagcaggaggctgaggaacctaaagcccgcgtcctccgctcaaaatcactgtgtcacgatgagatcgagaacctcctggacagtgaccaccgagagctgattggagattactctaaggccttcctcctacagacagtagacggaaagcaccaagacctcaagtacatctcaccagaaacgatggtggccctattgacgggcaagttcagcaacatcgtggataagtttgtgattgtagactgcagatacccctatgaatatgaaggcgggcacatcaagactgcggtgaacttgcccctggaacgcgacgccgagagcttcctactgaagagccccatcgcgccctgtagcctggacaagagagtcatcctcattttccactgtgaattctcatctgagcgtgggccccgcatgtgccgtttcatcagggaacgagaccgtgctgtcaacgactaccccagcctctactaccctgagatgtatatcctgaaaggcggctacaaggagttcttccctcagcacccgaacttctgtgaaccccaggactaccggcccatgaaccacgaggccttcaaggatgagctaaagaccttccgcctcaagactcgcagctgggctggggagcggagccggcgggagctctgtagccggctgcaggaccagtgaggggcctgcgccagtcctgctacctcccttgcctttcgaggcctgaagccagctgccctatgggcctgccgggctgagggcctgctggaggcctcaggtgctgtccatgggaaagatggtgtgggtgtcctgcctgtctgccccagcccagattcccctgtgtcatcccatcattttccatatcctggtgccccccacccctggaagagcccagtctgttgagttagttaagttgggttaataccagcttaaaggca

SEQ ID NO: 209958 - DNA, 1620 bp, Artificial Sequence
  derived and/or modified sequence
atggaggtgccccagcccgagcccgcccccggcagcgccctgagccccgccggcgtgtgcggcggcgcccagagacccggccacctgcccggcctgctgctgggcagccacggcctgctgggcagccccgtgagagccgccgccagcagccccgtgaccaccctgacccagaccatgcacgacctggccggcctgggcagcgagacccccaagagccaggtgggcaccctgctgttcagaagcagaagcagactgacccacctgagcctgagcagaagagccagcgagagcagcctgagcagcgagagcagcgagagcagcgacgccggcctgtgcatggacagccccagccccatggacccccacatggccgagcagaccttcgagcaggccatccaggccgccagcagaatcatcagaaacgagcagttcgccatcagaagattccagagcatgcccgacggcttcgtgttcaagatgccctggaagcccacccaccccagcagcacccacgccctggccgagtgggccagcagaagagaggccttcgcccagagacccagcagcgcccccgacctgatgtgcctgagccccgacagaaagatggaggtggaggagctgagccccctggccctgggcagattcagcctgacccccgccgagggcgacaccgaggaggacgacggcttcgtggacatcctggagagcgacctgaaggacgacgacgccgtgccccccggcatggagagcctgatcagcgcccccctggtgaagaccctggagaaggaggaggagaaggacctggtgatgtacagcaagtgccagagactgttcagaagccccagcatgccctgcagcgtgatcagacccatcctgaagagactggagagaccccaggacagagacacccccgtgcagaacaagagaagaagaagcgtgaccccccccgaggagcagcaggaggccgaggagcccaaggccagagtgctgagaagcaagagcctgtgccacgacgagatcgagaacctgctggacagcgaccacagagagctgatcggcgactacagcaaggccttcctgctgcagaccgtggacggcaagcaccaggacctgaagtacatcagccccgagaccatggtggccctgctgaccggcaagttcagcaacatcgtggacaagttcgtgatcgtggactgcagatacccctacgagtacgagggcggccacatcaagaccgccgtgaacctgcccctggagagagacgccgagagcttcctgctgaagagccccatcgccccctgcagcctggacaagagagtgatcctgatcttccactgcgagttcagcagcgagagaggccccagaatgtgcagattcatcagagagagagacagagccgtgaacgactaccccagcctgtactaccccgagatgtacatcctgaagggcggctacaaggagttcttcccccagcaccccaacttctgcgagccccaggactacagacccatgaaccacgaggccttcaaggacgagctgaagaccttcagactgaagaccagaagctgggccggcgagagaagcagaagagagctgtgcagcagactgcaggaccagtag

SEQ ID NO: 209959 - protein, 580 aa, Artificial Sequence
  derived and/or modified sequence
MEVPQPEPAPGSALSPAGVCGGAQRPGHLPGLLLGSHGLLGSPVRAAASSPVTTLTQTMHDLAGLGSETPKSQVGTLLFRSRSRLTHLSLSRRASESSLSSESSESSDAGLCMDSPSPMDPHMAEQTFEQAIQAASRIIRNEQFAIRRFQSMPVRLLGHSPVLRNITNSQAPDGRRKSEAGSGAASSSGEDKENDGFVFKMPWKPTHPSSTHALAEWASRREAFAQRPSSAPDLMCLSPDRKMEVEELSPLALGRFSLTPAEGDTEEDDGFVDILESDLKDDDAVPPGMESLISAPLVKTLEKEEEKDLVMYSKCQRLFRSPSMPCSVIRPILKRLERPQDRDTPVQNKRRRSVTPPEEQQEAEEPKARVLRSKSLCHDEIENLLDSDHRELIGDYSKAFLLQTVDGKHQDLKYISPETMVALLTGKFSNIVDKFVIVDCRYPYEYEGGHIKTAVNLPLERDAESFLLKSPIAPCSLDKRVILIFHCEFSSERGPRMCRFIRERDRAVNDYPSLYYPEMYILKGGYKEFFPQHPNFCEPQDYRPMNHEAFKDELKTFRLKTRSWAGERSRRELCSRLQDQ

SEQ ID NO: 209960 - DNA, 372 bp, Artificial Sequence
  derived and/or modified sequence
atgagttcaggcgggagccccggctgcctacgactcgctgaggggtgccctaaccatcgggcctgggtgcgctggaaccggcggcagccacactctgcattcctaatcgcttcacacctgttcctcagcgtgctcgtttggtttaacagctttcaagggcttgaattggagagtgaaaatcctcggcaccttttgtggaatgtctgtcttgtggtgctggtgtgtccatcctctagccttgcgtgcagattccaggtgtatcagaggactttctgcagtgtggagagccatcgaactaaaagaaaaattcttcagctgttcgccaacatcctgccctatctctataaacagccgtacacgaaaaaacattag

SEQ ID NO: 209961 - DNA, 1743 bp, Artificial Sequence
  derived and/or modified sequence
atggaagtaccacaacccgagcctgcacccggcagcgctctatctcccgcaggagtgtgcggcggcgcacagaggcccggccacttgcccggccttctcctcggaagtcacggtttacttgggtcaccagttcgagcggccgcctcctctccggttactactcttactcagaccatgcacgatcttgctggtctcgggtctgagacccccaagtctcaagtaggcacgctgctgttccgtagtcggagcaggctgacccatttaagcctaagcagaagagcttcagaaagttccctttcatcggagagctccgaaagctcagatgcaggcctgtgtatggattctccatcacctatggacccacacatggccgagcagacgttcgagcaagcgattcaggcggcatctaggatcattagaaatgagcaatttgcaattcgtagatttcaatccatgccagtcaggttgctgggccactcacctgtcctgagaaatatcacaaactcccaggcccctgatggtaggaggaaatccgaggctggaagcggtgcagctagttcctccggagaagacaaggagaatgatggcttcgtcttcaagatgccctggaagcccacacatccaagctctacacacgccctggctgagtgggcaagcagacgtgaagcgttcgcacagcgaccgtcctcggcacctgacctaatgtgcttgtctccagacagaaagatggaggtggaggagctgtctccattagccctaggacggttttcactgacccccgcagagggggacacagaagaggacgatggcttcgtcgacattctcgagagcgacttgaaagatgacgatgcagtacctcccggaatggagtctctgatctcggctccactggtgaaaactctggagaaggaggaggagaaagacctcgtaatgtattcgaagtgtcagcgcctcttcagaagtccttctatgccctgttcagtgattcgcccaatactcaagaggctggagaggcctcaggacagggacacccccgtgcagaacaagagacgtcgaagcgtgacaccaccagaagagcagcaggaagcagaagagcccaaagccagggttttaagaagtaagagcctctgccacgacgagatcgaaaatcttctcgattcagaccacagggagcttataggggactatagcaaggccttcctccttcagacggttgacggaaaacaccaggatctgaaatacatctccccagagacaatggtcgccttgctaaccggcaagttttctaacatcgtggacaagttcgtgattgttgactgccgctatccttacgagtacgagggcggtcacatcaaaaccgcagtaaatttacctctcgaacgcgacgccgagtccttcctcttgaagagcccgattgctccttgttccctggacaaaagagtgatcttgatattccactgcgagttctcaagtgaaagagggcccagaatgtgccgatttatacgagaacgggatcgagctgtgaatgactaccctagcctgtactaccccgagatgtatattctcaagggggggtataaggagttcttcccccagcaccccaatttctgtgagccccaggactacaggccaatgaaccatgaggcttttaaagacgagctgaagacttttcggctgaagacgcgctcatgggctggagaacgcagccggagagaactgtgctctagacttcaagatcagtag

SEQ ID NO: 209962 - DNA, 1743 bp, Artificial Sequence
  derived and/or modified sequence
atggaggtgccccagcctgagcccgcccctggcagcgccctgagccctgctggggtgtgtggcggggcccagaggcctggccacctgcccggcctgctgctgggcagccacggcctgctgggcagccctgtgcgggctgctgccagcagccctgtgaccaccctgacccagaccatgcatgacctggccggcctgggcagcgagacccccaagagccaggtgggcaccctgctcttccgcagccgcagccggctgacccacctgagcctgagccggcgggccagcgagagcagcctgagcagcgagagcagcgagagcagtgatgctggcctgtgcatggacagccccagccccatggacccccacatggccgagcagacctttgagcaggccatccaggccgccagccgcatcatcagaaatgagcagtttgccatccgccgcttccagagcatgcctgtgcggctgctgggccacagccctgtgctgaggaacatcaccaacagccaggccccagatggaagaaggaagtctgaggccggcagcggggccgccagcagcagcggggaggacaaggaaaatgatggctttgtgttcaagatgccctggaagcccacccaccccagcagcacccacgccctggccgagtgggccagccggcgggaggcctttgcccagaggcccagcagcgccccagacctgatgtgcctgagcccagacaggaagatggaggtggaggagctgagccccctggccctgggccgcttcagcctgaccccagctgagggggacacagaagaagatgatggctttgtggacatcctggagagtgacctgaaggatgatgatgctgtgcccccaggcatggagagcctcatcagcgcccccctggtgaagaccctggagaaggaggaggagaaggacctggtgatgtacagcaagtgccagaggctcttccgcagccccagcatgccctgcagcgtcatccggcccatcctgaagaggctggagcggccccaggaccgggacacccctgtgcagaacaagagaagaagatctgtgaccccacctgaggagcagcaggaggccgaggagcccaaggcccgggtgctgcggagcaagagcctgtgccatgatgaaattgagaacctgctggacagcgaccaccgggagctgattggagactacagcaaggccttcctgctgcagacagtggatggcaagcaccaggacctgaagtacatcagccctgagaccatggtggccctgctgaccgggaagttcagcaacatcgtggacaagtttgtgattgtggactgccgctacccctatgaatatgagggcggccacatcaagacagctgtgaacctgcccctggagagagatgctgagagcttcctgctgaagagccccatcgccccctgcagcctggacaagagggtcatcctgatcttccactgtgagttcagcagcgagcggggccccaggatgtgccgcttcatccgggagcgggacagagctgtgaatgactaccccagcctgtactacccagagatgtacatcctgaagggcggctacaaggagttcttcccccagcaccccaacttctgtgagccccaggactaccggcccatgaaccacgaggccttcaaggatgagctgaagaccttccggctgaagaccaggtcctgggccggggagaggagccggcgggagctgtgcagccggctgcaggaccagtag

SEQ ID NO: 209963 - DNA, 1743 bp, Artificial Sequence
  derived and/or modified sequence
atggaggtgccccagcccgagcccgcccccggcagcgccctgagccccgccggtgtttgtggcggagcccagcggccagggcaccttcccggccttctccttggctcacacgggctgttgggcagtcctgttagagctgcagcaagtagcccggtcacgactctcacccagactatgcatgatttggccggattaggttctgagacccccaaatcccaggtgggaactctcctgtttcgcagtaggtctaggttaacacacctgtcacttagcagaagagcatcagaaagctccctgtcatccgaatcttccgagtcttccgacgcagggttgtgcatggacagtccctctcctatggatccccacatggctgagcagaccttcgaacaagccatccaggcggctagccggatcattcgaaacgaacagtttgccattcgaaggtttcagtctatgcccgtcaggttgctcggccattcaccagtgctgcgcaatataaccaattcacaggctccagacggacgtcggaagagtgaggcagggtccggggctgcttcaagctcaggcgaagacaaggaaaatgacggctttgtgtttaaaatgccgtggaagccaacacacccaagcagcacgcacgcactcgcagagtgggcctctcgccgagaggccttcgctcagaggccttcctcagccccagacttgatgtgcctaagtcccgatagaaaaatggaagttgaggaactgtctccattggccttggggaggtttagcctgaccccggccgaaggcgacacagaggaagacgacggcttcgtggacattctcgagtcggatctcaaggacgacgatgccgtgccgccggggatggagtccctgattagcgcccctcttgtaaagactcttgagaaggaggaagaaaaagatctggtgatgtattctaagtgtcagcgtcttttcagaagcccgtctatgccatgtagcgtgatcaggcccattctcaagaggctggaaaggccacaagatagggatacacccgttcaaaacaaaagacgacggtccgtcacacctcccgaggagcagcaggaggccgaggagcccaaggctcgggttctgcgctccaagtcgctgtgccacgatgaaatcgaaaatctgctggactccgaccaccgtgagctgatcggggactactcgaaggcattcctgctccagactgttgacgggaagcaccaggacttgaaatacatctccccggaaacgatggtggctctcctcacagggaaatttagtaacatagtggataaattcgtcatcgtggactgccggtacccatacgaatacgaaggaggccatatcaagactgctgtgaatttgcctcttgaacgggatgctgaatcattcttgctgaagagtccaattgctccatgttcactggataagagagtcatcctgatttttcactgcgaatttagctcggagagggggccgaggatgtgtcgattcatcagagagcgcgacagagcagtgaatgactaccccagtctttattacccagaaatgtatattcttaaaggcggttataaggaattctttcctcagcatcctaacttttgcgaaccacaggactatcgtcccatgaaccacgaggctttcaaggatgagctgaaaacatttcgtctgaagacacggtcctgggcgggagaaagatcccgcagagagttgtgtagccgcctccaggaccagtag

SEQ ID NO: 209964 - DNA, 1743 bp, Artificial Sequence
  derived and/or modified sequence
atggaggtccctcagccagagccagcaccaggaagcgccctttcacccgcaggggtctgcggcggtgcccagagacccggtcacctacccggactgctccttggcagtcacggattactggggagcccggtgagggccgctgcctcttcaccagtgaccactctgacgcagaccatgcacgatctcgcaggccttgggagtgaaaccccaaagagccaagtgggaacgctgctgttccggtctaggtctcggttgacccacctgagtctctctcggagggctagcgaaagttctctgtcctcggagtctagcgagagttccgatgcaggactctgcatggacagcccctcccctatggacccacatatggctgaacagacattcgaacaggccattcaggcggcatcccgcatcattagaaatgagcaatttgccatccgacggttccaatcaatgccagtcaggctgctgggccactcccccgtgctcagaaacatcacgaactcccaggcacccgatggaagaaggaaaagtgaagcgggaagcggggctgcctctagttccggcgaggataaggaaaacgacggtttcgtttttaaaatgccttggaagcctacccacccatcttccacacatgccttggcggaatgggcttcccgcagagaggcattcgctcaacggcctagtagcgcacccgacctgatgtgtctgtcacccgaccggaaaatggaggtggaggaactgtctcctctagccttaggcaggttttccttgacacccgctgaaggggatactgaggaggatgatggtttcgtggatatcctagagagcgatttgaaagacgatgatgcagtgcctccagggatggagtccctcatctcggcaccacttgttaaaactctggagaaagaagaggaaaaggatttagtgatgtattccaagtgtcagcgattgtttaggagtccaagtatgccatgtagtgtaatccgaccaattttgaagcggttagaaagacctcaagaccgggatacccccgtccagaataagaggagacgatccgtgacaccaccagaagaacagcaggaagccgaggaaccgaaggcgagggtgttacgctcaaaatccctgtgccacgatgagatcgagaacctgctcgacagtgatcatcgagagctgattggagattactcaaaggctttcctgttacaaacagtggatggcaaacaccaggacctaaagtatatctcgccggagacaatggtcgccttgctgactggaaaattcagtaatatagtggacaaattcgtaattgtagactgtcgctacccatacgagtacgaggggggacacatcaagacagccgtcaacttgcctctggagcgcgatgccgaaagctttctcctcaaatctcccattgccccatgcagtctcgacaaaagagtgattctgatctttcactgcgagttttcctctgaacgcggacccaggatgtgccggttcattcgggaacgggaccgtgccgttaacgactacccctccctgtactacccagaaatgtacattcttaaggggggttacaaggaattcttcccacagcacccaaacttctgtgaacctcaggattaccggcctatgaaccacgaagcgtttaaggatgagctgaagacgtttagactgaagactaggagttgggccggagagagatcgaggcgtgagttgtgttccaggctccaggaccagtag

SEQ ID NO: 209965 - DNA, 3594 bp, Artificial Sequence
  derived and/or modified sequence
gcgtgaccttgattgagttaatgaacttcacgcctcagcgtccaggtctgtaaaatggggtgtctaacgcagaccgtacagcccagctgggtttagcaaacttccgggagccagttggagcctctccccatccctagcggtgatcccaggtgacgacatgccgcggggggtcctgcggaggccaccctagggcgttgctgctgcctttgggagtgtggagctccaaaccatgtcgcgagaggcggattttgggaggccgggatcctcgcgccagggggatgtgcgagggtgtgggataaatcttaattcctccggcccacccaaagcctggaaatccagcctccgcgcctcttgccctgcgggccccgccctcagtcccgccctcatctaacccgctaccccattggtggcgtccggcggcgcggctgctgttatttttcgaatatataaggaggtggaagtggcagctgcaactagaggcttccctggctggtgcctgagcccggcgtccctcgccccccgccctccccgcatccctctcctccctcgcgcctggccctgtggctcttcctccctccctccttccccccccccccacccctcgcccgctgcctccctcggcccagccagctgtgccggcgtttgttggctgccctgcgcccggccctccagccagccttctgccggccccgccgcgatggaggtgccccagccggagcccgcgccaggctcggctctcagtccagcaggcgtgtgcggtggcgcccagcgtccgggccacctcccgggcctcctgctgggatctcatggcctcctggggtccccggtgcgggcggccgcttcctcgccggtcaccaccctcacccagaccatgcacgacctcgccgggctcggcagcgaaaccccaaagagtcaggtagggaccctgctcttccgcagccgcagccgcctgacgcacctatccctgtctcgacgggcatccgaatcctccctgtcgtctgaatcctccgaatcttctgatgcaggtctctgcatggattcccccagccctatggacccccacatggcggagcagacgtttgaacaggccatccaggcagccagccggatcattcgaaacgagcagtttgccatcagacgcttccagtctatgccggtgaggctgctgggccacagccccgtgcttcggaacatcaccaactcccaggcgcccgacggccggaggaagagcgaggcgggcagtggagctgccagcagctctggggaagacaaggagaatgatggatttgtcttcaagatgccatggaagcccacacatcccagctccacccatgctctggcagagtgggccagccgcagggaagcctttgcccagagacccagctcggcccccgacctgatgtgtctcagtcctgaccggaagatggaagtggaggagctcagccccctggccctaggtcgcttctctctgacccctgcagagggggatactgaggaagatgatggatttgtggacatcctagagagtgacttaaaggatgatgatgcagttcccccaggcatggagagtctcattagtgccccactggtcaagaccttggaaaaggaagaggaaaaggacctcgtcatgtacagcaagtgccagcggctcttccgctctccgtccatgccctgcagcgtgatccggcccatcctcaagaggctggagcggccccaggacagggacacgcccgtgcagaataagcggaggcggagcgtgacccctcctgaggagcagcaggaggctgaggaacctaaagcccgcgtcctccgctcaaaatcactgtgtcacgatgagatcgagaacctcctggacagtgaccaccgagagctgattggagattactctaaggccttcctcctacagacagtagacggaaagcaccaagacctcaagtacatctcaccagaaacgatggtggccctattgacgggcaagttcagcaacatcgtggataagtttgtgattgtagactgcagatacccctatgaatatgaaggcgggcacatcaagactgcggtgaacttgcccctggaacgcgacgccgagagcttcctactgaagagccccatcgcgccctgtagcctggacaagagagtcatcctcattttccactgtgaattctcatctgagcgtgggccccgcatgtgccgtttcatcagggaacgagaccgtgctgtcaacgactaccccagcctctactaccctgagatgtatatcctgaaaggcggctacaaggagttcttccctcagcacccgaacttctgtgaaccccaggactaccggcccatgaaccacgaggccttcaaggatgagctaaagaccttccgcctcaagactcgcagctgggctggggagcggagccggcgggagctctgtagccggctgcaggaccagtgaggggcctgcgccagtcctgctacctcccttgcctttcgaggcctgaagccagctgccctatgggcctgccgggctgagggcctgctggaggcctcaggtgctgtccatgggaaagatggtgtgggtgtcctgcctgtctgccccagcccagattcccctgtgtcatcccatcattttccatatcctggtgccccccacccctggaagagcccagtctgttgagttagttaagttgggttaataccagcttaaaggcagtattttgtgtcctccaggagcttcttgtttccttgttagggttaacccttcatcttcctgtgtcctgaaacgctcctttgtgtgtgtgtcagctgaggctgggggagagccgtggtccctgaggatgggtcagagctaaactccttcctggcctgagagtcagctctctgccctgtgtacttcccgggccagggctgcccctaatctctgtaggaaccgtggtatgtctgccatgttgcccctttctcttttcccctttcctgtcccaccatacgagcacctccagcctgaacagaagctcttactctttcctatttcagtgttacctgtgtgcttggtctgtttgactttacgcccatctcaggacacttccgtagactgtttaggttcccctgtcaaatatcagttacccactcggtcccagttttgttgccccagaaagggatgttattatccttgggggctcccagggcaagggttaaggcctgaatcatgagcctgctggaagcccagcccctactgctgtgaaccctggggcctgactgctcagaacttgctgctgtcttgttgcggatggatggaaggttggatggatgggtggatggccgtggatggccgtggatgcgcagtgccttgcatacccaaaccaggtgggagcgttttgttgagcatgacagcctgcagcaggaatatatgtgtgcctatttgtgtggacaaaaatatttacacttagggtttggagctattcaagaggaaatgtcacagaagcagctaaaccaaggactgagcaccctctggattctgaatctcaagatgggggcagggctgtgcttgaaggccctgctgagtcatctgttagggccttggttcaataaagcactgagcaagttgagaaa

SEQ ID NO: 209966 - DNA, 1743 bp, Artificial Sequence
  derived and/or modified sequence
atggaggtgccccagcccgagcccgcccccggcagcgccctgagccccgccggcgtgtgcggcggcgcccagagacccggccacctgcccggcctgctgctgggcagccacggcctgctgggcagccccgtgagagccgccgccagcagccccgtgaccaccctgacccagaccatgcacgacctggccggcctgggcagcgagacccccaagagccaggtgggcaccctgctgttcagaagcagaagcagactgacccacctgagcctgagcagaagagccagcgagagcagcctgagcagcgagagcagcgagagcagcgacgccggcctgtgcatggacagccccagccccatggacccccacatggccgagcagaccttcgagcaggccatccaggccgccagcagaatcatcagaaacgagcagttcgccatcagaagattccagagcatgcccgtgagactgctgggccacagccccgtgctgagaaacatcaccaacagccaggcccccgacggcagaagaaagagcgaggccggcagcggcgccgccagcagcagcggcgaggacaaggagaacgacggcttcgtgttcaagatgccctggaagcccacccaccccagcagcacccacgccctggccgagtgggccagcagaagagaggccttcgcccagagacccagcagcgcccccgacctgatgtgcctgagccccgacagaaagatggaggtggaggagctgagccccctggccctgggcagattcagcctgacccccgccgagggcgacaccgaggaggacgacggcttcgtggacatcctggagagcgacctgaaggacgacgacgccgtgccccccggcatggagagcctgatcagcgcccccctggtgaagaccctggagaaggaggaggagaaggacctggtgatgtacagcaagtgccagagactgttcagaagccccagcatgccctgcagcgtgatcagacccatcctgaagagactggagagaccccaggacagagacacccccgtgcagaacaagagaagaagaagcgtgaccccccccgaggagcagcaggaggccgaggagcccaaggccagagtgctgagaagcaagagcctgtgccacgacgagatcgagaacctgctggacagcgaccacagagagctgatcggcgactacagcaaggccttcctgctgcagaccgtggacggcaagcaccaggacctgaagtacatcagccccgagaccatggtggccctgctgaccggcaagttcagcaacatcgtggacaagttcgtgatcgtggactgcagatacccctacgagtacgagggcggccacatcaagaccgccgtgaacctgcccctggagagagacgccgagagcttcctgctgaagagccccatcgccccctgcagcctggacaagagagtgatcctgatcttccactgcgagttcagcagcgagagaggccccagaatgtgcagattcatcagagagagagacagagccgtgaacgactaccccagcctgtactaccccgagatgtacatcctgaagggcggctacaaggagttcttcccccagcaccccaacttctgcgagccccaggactacagacccatgaaccacgaggccttcaaggacgagctgaagaccttcagactgaagaccagaagctgggccggcgagagaagcagaagagagctgtgcagcagactgcaggaccagtag

SEQ ID NO: 209967 - protein, 844 aa, Artificial Sequence
  derived and/or modified sequence
MGPGAPFARVGWPLPLLVVMAAGVAPVWASHSPHLPRPHSRVPPHPSSERRAVYIGALFPMSGGWPGGQACQPAVEMALEDVNSRRDILPDYELKLIHHDSKCDPGQATKYLYELLYNDPIKIILMPGCSSVSTLVAEAARMWNLIVLSYGSSSPALSNRQRFPTFFRTHPSATLHNPTRVKLFEKWGWKKIATIQQTTEVFTSTLDDLEERVKEAGIEITFRQSFFSDPAVPVKNLKRQDARIIVGLFYETEARKVFCEVYKERLFGKKYVWFLIGWYADNWFKIYDPSINCTVDEMTEAVEGHITTEIVMLNPANTRSISNMTSQEFVEKLTKRLKRHPEETGGFQEAPLAYDAIWALALALNKTSGGGGRSGVRLEDFNYNNQTITDQIYRAMNSSSFEGVSGHVVFDASGSRMAWTLIEQLQGGSYKKIGYYDSTKDDLSWSKTDKWIGGSPPADQTLVIKTFRFLSQKLFISVSVLSSLGIVLAVVCLSFNIYNSHVRYIQNSQPNLNNLTAVGCSLALAAVFPLGLDGYHIGRNQFPFVCQARLWLLGLGFSLGYGSMFTKIWWVHTVFTKKEEKKEWRKTLEPWKLYATVGLLVGMDVLTLAIWQIVDPLHRTIETFAKEEPKEDIDVSILPQLEHCSSRKMNTWLGIFYGYKGLLLLLGIFLAYETKSVSTEKINDHRAVGMAIYNVAVLCLITAPVTMILSSQQDAAFAFASLAIVFSSYITLVVLFVPKMRRLITRGEWQSEAQDTMKTGSSTNNNEEEKSRLLEKENRELEKIIAEKEERVSELRHQLQSRQQLRSRRHPPTPPEPSGGLPRGPPEPPDRLSCDGSRVHLLYK

SEQ ID NO: 209968 - DNA, 2535 bp, Artificial Sequence
  derived and/or modified sequence
atgggccccggcgcccccttcgccagagtgggctggcccctgcccctgctggtggtgatggccgccggcgtggcccccgtgtgggccagccacagcccccacctgcccagaccccacagcagagtgcccccccaccccagcagcgagagaagagccgtgtacatcggcgccctgttccccatgagcggcggctggcccggcggccaggcctgccagcccgccgtggagatggccctggaggacgtgaacagcagaagagacatcctgcccgactacgagctgaagctgatccaccacgacagcaagtgcgaccccggccaggccaccaagtacctgtacgagctgctgtacaacgaccccatcaagatcatcctgatgcccggctgcagcagcgtgagcaccctggtggccgaggccgccagaatgtggaacctgatcgtgctgagctacggcagcagcagccccgccctgagcaacagacagagattccccaccttcttcagaacccaccccagcgccaccctgcacaaccccaccagagtgaagctgttcgagaagtggggctggaagaagatcgccaccatccagcagaccaccgaggtgttcaccagcaccctggacgacctggaggagagagtgaaggaggccggcatcgagatcaccttcagacagagcttcttcagcgaccccgccgtgcccgtgaagaacctgaagagacaggacgccagaatcatcgtgggcctgttctacgagaccgaggccagaaaggtgttctgcgaggtgtacaaggagagactgttcggcaagaagtacgtgtggttcctgatcggctggtacgccgacaactggttcaagatctacgaccccagcatcaactgcaccgtggacgagatgaccgaggccgtggagggccacatcaccaccgagatcgtgatgctgaaccccgccaacaccagaagcatcagcaacatgaccagccaggagttcgtggagaagctgaccaagagactgaagagacaccccgaggagaccggcggcttccaggaggcccccctggcctacgacgccatctgggccctggccctggccctgaacaagaccagcggcggcggcggcagaagcggcgtgagactggaggacttcaactacaacaaccagaccatcaccgaccagatctacagagccatgaacagcagcagcttcgagggcgtgagcggccacgtggtgttcgacgccagcggcagcagaatggcctggaccctgatcgagcagctgcagggcggcagctacaagaagatcggctactacgacagcaccaaggacgacctgagctggagcaagaccgacaagtggatcggcggcagcccccccgccgaccagaccctggtgatcaagaccttcagattcctgagccagaagctgttcatcagcgtgagcgtgctgagcagcctgggcatcgtgctggccgtggtgtgcctgagcttcaacatctacaacagccacgtgagatacatccagaacagccagcccaacctgaacaacctgaccgccgtgggctgcagcctggccctggccgccgtgttccccctgggcctggacggctaccacatcggcagaaaccagttccccttcgtgtgccaggccagactgtggctgctgggcctgggcttcagcctgggctacggcagcatgttcaccaagatctggtgggtgcacaccgtgttcaccaagaaggaggagaagaaggagtggagaaagaccctggagccctggaagctgtacgccaccgtgggcctgctggtgggcatggacgtgctgaccctggccatctggcagatcgtggaccccctgcacagaaccatcgagaccttcgccaaggaggagcccaaggaggacatcgacgtgagcatcctgccccagctggagcactgcagcagcagaaagatgaacacctggctgggcatcttctacggctacaagggcctgctgctgctgctgggcatcttcctggcctacgagaccaagagcgtgagcaccgagaagatcaacgaccacagagccgtgggcatggccatctacaacgtggccgtgctgtgcctgatcaccgcccccgtgaccatgatcctgagcagccagcaggacgccgccttcgccttcgccagcctggccatcgtgttcagcagctacatcaccctggtggtgctgttcgtgcccaagatgagaagactgatcaccagaggcgagtggcagagcgaggcccaggacaccatgaagaccggcagcagcaccaacaacaacgaggaggagaagagcagactgctggagaaggagaacagagagctggagaagatcatcgccgagaaggaggagagagtgagcgagctgagacaccagctgcagagcagacagcagctgagaagcagaagacacccccccaccccccccgagcccagcggcggcctgcccagaggcccccccgagccccccgacagactgagctgcgacggcagcagagtgcacctgctgtacaagtag

SEQ ID NO: 209969 - DNA, 3523 bp, Artificial Sequence
  derived and/or modified sequence
ctcctcctcctcccctccgtcggtcagtcagtccgcgaggagagtccgcggtggcggcgacggtggcgagagccgcgggggccgtaggaagccaaccttccctgcttctccggggccctcgccccctcctccccacaaaatcagggatggaggcgcctccccggcaccctcttagcagccctccccaggaaaagtgtcccccctgagctcctaacgctccccaacagctacccctgccccccacgccatggggcccggggccccttttgcccgggtggggtggccactgccgcttctggttgtgatggcggcaggggtggctccggtgtgggcctcccactccccccatctcccgcggcctcactcgcgggtccccccgcacccctcctcagaacggcgcgcagtgtacatcggggcactgtttcccatgagcgggggctggccagggggccaggcctgccagcccgcggtggagatggcgctggaggacgtgaatagccgcagggacatcctgccggactatgagctcaagctcatccaccacgacagcaagtgtgatccaggccaagccaccaagtacctatatgagctgctctacaacgaccctatcaagatcatccttatgcctggctgcagctctgtctccacgctggtggctgaggctgctaggatgtggaacctcattgtgctttcctatggctccagctcaccagccctgtcaaaccggcagcgtttccccactttcttccgaacgcacccatcagccacactccacaaccctacccgcgtgaaactctttgaaaagtggggctggaagaagattgctaccatccagcagaccactgaggtcttcacttcgactctggacgacctggaggaacgagtgaaggaggctggaattgagattactttccgccagagtttcttctcagatccagctgtgcccgtcaaaaacctgaagcgccaggatgcccgaatcatcgtgggacttttctatgagactgaagcccggaaagttttttgtgaggtgtacaaggagcgtctctttgggaagaagtacgtctggttcctcattgggtggtatgctgacaattggttcaagatctacgacccttctatcaactgcacagtggatgagatgactgaggcggtggagggccacatcacaactgagattgtcatgctgaatcctgccaatacccgcagcatttccaacatgacatcccaggaatttgtggagaaactaaccaagcgactgaaaagacaccctgaggagacaggaggcttccaggaggcaccgctggcctatgatgccatctgggccttggcactggccctgaacaagacatctggaggaggcggccgttccggcgtgcgcctggaggacttcaactacaacaaccagaccattaccgaccaaatctaccgggcaatgaactcctcgtcctttgagggtgtctctggccatgtggtgtttgatgccagcggctctcggatggcatggacgcttatcgagcagcttcagggtggcagctacaagaagattggctactatgacagcaccaaggatgatctttcctggtccaaaacagataaatggattggagggtcccccccagctgaccagaccctggtcatcaagacattccgcttcctgtcacagaaactctttatctccgtctcagttctctccagcctgggcattgtcctagctgttgtctgtctgtcctttaacatctacaactcacatgtccgttatatccagaactcacagcccaacctgaacaacctgactgctgtgggctgctcactggctttagctgctgtcttccccctggggctcgatggttaccacattgggaggaaccagttccctttcgtctgccaggcccgcctctggctcctgggcctgggctttagtctgggctacggttccatgttcaccaagatttggtgggtccacacggtcttcacaaagaaggaagaaaagaaggagtggaggaagactctggaaccctggaagctgtatgccacagtgggcctgctggtgggcatggatgtcctcactctcgccatctggcagatcgtggaccctctgcaccggaccattgagacatttgccaaggaggaacctaaggaagatattgacgtctctattctgccccagctggagcattgcagctccaggaagatgaatacatggcttggcattttctatggttacaaggggctgctgctgctgctgggaatcttccttgcttatgagaccaagagtgtgtccactgagaagatcaatgatcaccgggctgtgggcatggctatctacaatgtggcagtcctgtgcctcatcactgctcctgtcaccatgattctgtccagccagcaggatgcagcctttgcctttgcctctcttgccatagttttctcctcctatatcactcttgttgtgctctttgtgcccaagatgcgcaggctgatcacccgaggggaatggcagtcggaggcgcaggacaccatgaagacagggtcatcgaccaacaacaacgaggaggagaagtcccggctgttggagaaggagaaccgtgaactggaaaagatcattgctgagaaagaggagcgtgtctctgaactgcgccatcaactccagtctcggcagcagctccgctcccggcgccacccaccgacacccccagaaccctctgggggcctgcccaggggaccccctgagccccccgaccggcttagctgtgatgggagtcgagtgcatttgctttataagtgagggtgcatgtccgttccgaggaatgggatttaatgacctttgatgccaacccatatgacagcgtgaaaaaaatcaaagaacatgtccggtctaagaccaaggttcctgtgcaggaccaggttcttttgctgggctccaagatcttaaagccacggagaagcctctcatcttatggcactgacaaagagaagaccatccaccttaccctgaaagtggtgaagcccagtgatgaggagctgcccttgtttcttgtggagtcaggtgatgaggcaaagaggcacctcctccaggtgcgaaggtccagctcagtggcacaagtgaaagcaatgatcgagactaagacgggtataatccctgagacccagattgtgacttgcaatggaaagagactggaagatgggaagatgatggcagattacggcatcagaaagggcaacttactcttcctggcatcttattgtattggagggtgaccaccctggggatggggtgttggcaggggtcaaaaagcttatttcttttaatctcttactcaacgaacacatcttctgatgatttcccaaaattaatgagaatgagatgagtagagtaagatttgggtgggatgggtaggatgaagtatattgcccaactctatgtttctttgattctaacacaattaattaagtgacatgatttttactaatgtattactgagactagtaaataaatttttaaggcaaaatagagcattcaaagcca

SEQ ID NO: 209970 - DNA, 4070 bp, Artificial Sequence
  derived and/or modified sequence
agtcagtccgcgaggagagtccgcggtggcggcgacggtggcgagagccgcgggggccgtaggaagccaaccttccctgcttctccggggccctcgccccctcctccccacaaaatcagggatggaggcgcctccccggcaccctcttagcagccctccccaggaaaagtgtcccccctgagctcctaacgctccccaacagctacccctgccccccacgccatggggcccggggccccttttgcccgggtggggtggccactgccgcttctggttgtgatggcggcaggggtggctccggtgtgggcctcccactccccccatctcccgcggcctcactcgcgggtccccccgcacccctcctcagaacggcgcgcagtgtacatcggggcactgtttcccatgagcgggggctggccagggggccaggcctgccagcccgcggtggagatggcgctggaggacgtgaatagccgcagggacatcctgccggactatgagctcaagctcatccaccacgacagcaagtgtgatccaggccaagccaccaagtacctatatgagctgctctacaacgaccctatcaagatcatccttatgcctggctgcagctctgtctccacgctggtggctgaggctgctaggatgtggaacctcattgtgctttcctatggctccagctcaccagccctgtcaaaccggcagcgtttccccactttcttccgaacgcacccatcagccacactccacaaccctacccgcgtgaaactctttgaaaagtggggctggaagaagattgctaccatccagcagaccactgaggtcttcacttcgactctggacgacctggaggaacgagtgaaggaggctggaattgagattactttccgccagagtttcttctcagatccagctgtgcccgtcaaaaacctgaagcgccaggatgcccgaatcatcgtgggacttttctatgagactgaagcccggaaagttttttgtgaggtgtacaaggagcgtctctttgggaagaagtacgtctggttcctcattgggtggtatgctgacaattggttcaagatctacgacccttctatcaactgcacagtggatgagatgactgaggcggtggagggccacatcacaactgagattgtcatgctgaatcctgccaatacccgcagcatttccaacatgacatcccaggaatttgtggagaaactaaccaagcgactgaaaagacaccctgaggagacaggaggcttccaggaggcaccgctggcctatgatgccatctgggccttggcactggccctgaacaagacatctggaggaggcggccgttccggcgtgcgcctggaggacttcaactacaacaaccagaccattaccgaccaaatctaccgggcaatgaactcctcgtcctttgagggtgtctctggccatgtggtgtttgatgccagcggctctcggatggcatggacgcttatcgagcagcttcagggtggcagctacaagaagattggctactatgacagcaccaaggatgatctttcctggtccaaaacagataaatggattggagggtcccccccagctgaccagaccctggtcatcaagacattccgcttcctgtcacagaaactctttatctccgtctcagttctctccagcctgggcattgtcctagctgttgtctgtctgtcctttaacatctacaactcacatgtccgttatatccagaactcacagcccaacctgaacaacctgactgctgtgggctgctcactggctttagctgctgtcttccccctggggctcgatggttaccacattgggaggaaccagttccctttcgtctgccaggcccgcctctggctcctgggcctgggctttagtctgggctacggttccatgttcaccaagatttggtgggtccacacggtcttcacaaagaaggaagaaaagaaggagtggaggaagactctggaaccctggaagctgtatgccacagtgggcctgctggtgggcatggatgtcctcactctcgccatctggcagatcgtggaccctctgcaccggaccattgagacatttgccaaggaggaacctaaggaagatattgacgtctctattctgccccagctggagcattgcagctccaggaagatgaatacatggcttggcattttctatggttacaaggggctgctgctgctgctgggaatcttccttgcttatgagaccaagagtgtgtccactgagaagatcaatgatcaccgggctgtgggcatggctatctacaatgtggcagtcctgtgcctcatcactgctcctgtcaccatgattctgtccagccagcaggatgcagcctttgcctttgcctctcttgccatagttttctcctcctatatcactcttgttgtgctctttgtgcccaagatgcgcaggctgatcacccgaggggaatggcagtcggaggcgcaggacaccatgaagacagggtcatcgaccaacaacaacgaggaggagaagtcccggctgttggagaaggagaaccgtgaactggaaaagatcattgctgagaaagaggagcgtgtctctgaactgcgccatcaactccagtctcggcagcagctccgctcccggcgccacccaccgacacccccagaaccctctgggggcctgcccaggggaccccctgagccccccgaccggcttagctgtgatgggagtcgagtgcatttgctttataagtgagggtagggtgagggaggacaggccagtagggggagggaaagggagaggggaagggcaggggactcaggaagcagggggtccccatccccagctgggaagaacatgctatccaatctcatctcttgtaaatacatgtccccctgtgagttctgggctgatttgggtctctcatacctctgggaaacagacctttttctctcttactgcttcatgtaattttgtatcacctcttcacaatttagttcgtacctggcttgaagctgctcactgctcacacgctgcctcctcagcagcctcactgcatctttctcttcccatgcaacaccctcttctagttaccacggcaacccctgcagctcctctgcctttgtgctctgttcctgtccagcaggggtctcccaacaagtgctctttccaccccaaaggggcctctccttttctccactgtcataatctctttccatcttacttgcccttctatactttctcacatgtggctccccctgaattttgcttcctttgggagctcattcttttcgccaaggctcacatgctccttgcctctgctctgtgcactcacgctcagcacacatgcatcctcccctctcctgcgtgtgcccactgaacatgctcatgtgtacacacgcttttcccatatgctttcttcatgttcagtcacatgtgctctcgggtgccctgcattcacagctacgtgtgcccctctcatggtcatgggtctgcccttgagcgtgtttgggtaggcatgtgcaatttgtctagcatgctgagtcatgtctttcctatttgcacacgtccatgtttatccatgtactttccctgtgtaccctccatgtaccttgtgtactttcttcccttaaatcatggtattcttctgacagagccatatgtaccctaccctgcacattgttatgcacttttccccaattcatgtttggtggggccatccacaccctctccttgtcacagaatctccatttctgctcagattccccccatctccattgcattcatgtactaccctcagtctacactcacaatcatcttctcccaagactgctcccttttgttttgtgtttttttgaggggaattaaggaaaaataagtgggggcaggtttggagagctgcttccagtggatagttgatgagaatcctgaccaaaggaaggcacccttgactgttgggatagacagatggacctatggggtgggaggtggtgtccctttcacactgtggtgtctcttggggaaggatctccccgaatctcaataaaccagtgaacagtgtgactcgg

SEQ ID NO: 209971 - DNA, 2535 bp, Artificial Sequence
  derived and/or modified sequence
atgggcccaggagcgccctttgcccgggttggttggcccctgcccttgttggttgtgatggcagctggcgtagcacctgtctgggcctcccatagtccacatctgccaagaccccacagccgcgtgccacctcacccctcttctgaacgccgggccgtctatataggcgctctgttccccatgagcgggggctggccaggaggtcaagcttgtcagccagcagtggaaatggcactcgaggatgtgaattcgcgcagagatattctgcctgattacgaattgaagttgattcaccatgactccaaatgcgatcctggccaggcaaccaagtacctgtatgaattgctgtataatgatcccatcaagataatactgatgccagggtgctcttcagtgagcactcttgtcgctgaggccgcaaggatgtggaacctgatcgtgctgtcatatggaagctcttccccggctttatcaaatcgtcaaagatttccgacctttttcagaactcaccccagtgctacactgcacaaccccacccgggtgaagctgtttgagaaatggggttggaagaaaatagccacgatccagcagacaaccgaagtgttcactagtaccttagacgacctcgaggagagagtaaaggaggccggcattgagataacatttcggcagagttttttctctgaccctgcagtgccagtgaaaaatttgaaacggcaggacgctagaattattgtcgggctattctacgaaaccgaggcccgtaaggtgttttgtgaggtgtacaaagaaaggctctttggcaagaaatacgtctggtttctgatcggatggtatgccgacaattggttcaaaatatacgatccctcaatcaattgtactgtagatgaaatgaccgaggcggtggaggggcacattactactgaaatagtgatgttgaatccagctaatacacgctcaatatctaacatgacatcccaagaattcgtcgagaagttaacaaagcgactgaagcggcatcccgaggaaacaggggggtttcaggaggcgccattggcctatgatgctatctgggccctcgccctggccctgaacaagacctcaggcgggggcgggaggtccggtgtccggctcgaggattttaattataacaaccaaacaataacggatcagatatacagggcaatgaatagtagttctttcgaaggtgtatctgggcacgtcgtcttcgatgcatcaggaagcaggatggcatggaccctgatagagcagttacaaggcggaagctataagaaaattggatattatgattcaactaaggatgacctgagctggtccaagaccgataagtggataggcggttcaccccccgcagatcaaacacttgtcattaaaaccttccgcttcctgtcgcagaagctcttcatctcggtgtctgttctttctagcctcggaatcgtcctagctgttgtgtgcctcagtttcaatatctacaactctcatgtaaggtacatccagaatagtcaacctaacctgaacaacttgaccgcagtcggctgctcactcgctcttgccgcagtgttccctctgggcttagatggttaccacattggccgtaatcaattccccttcgtctgtcaggctaggctgtggttactcggcctgggcttttcactgggttatgggagtatgttcaccaaaatctggtgggtccacaccgtcttcacgaaaaaggaggaaaagaaggagtggcggaagaccctggaaccatggaaactttacgcaacagttggactgctggtgggaatggacgttctgacgttggcaatctggcagatcgtggatcccctccaccggacaatcgagactttcgctaaagaagaaccaaaggaagacattgacgtttctatcctcccacagctggagcattgctcttcccggaaaatgaatacctggttaggaattttctacgggtataagggcttgctgctactcctagggatcttcttagcttacgagacgaagtctgtgtcaactgagaagataaatgaccaccgggccgtcggcatggctatctacaacgtcgcggtactgtgcctcatcaccgcaccagtgactatgattctgtcatcccaacaggacgcggcctttgctttcgcgagcctcgccattgtgttcagcagctacatcacattggttgtgctgttcgtacctaaaatgcggcgactgatcacgcggggcgagtggcaaagcgaggcccaggacaccatgaagacagggtcgagcactaacaacaacgaagaggagaagtctcggttgcttgaaaaagaaaatcgcgagctcgaaaaaataattgcggaaaaggaggagcgcgttagtgaactcaggcatcaattgcaatctcggcaacaacttcgcagcagacggcaccccccaaccccacccgagccaagtggagggctgcctcgaggaccacccgagccacccgacagactctcttgtgacggaagcagggttcatctgctatataaatag

SEQ ID NO: 209972 - DNA, 2535 bp, Artificial Sequence
  derived and/or modified sequence
atgggccccggcgccccctttgcccgagtgggctggccacttccccttctggtcgtgatggcagccggggttgctccagtctgggcatcccactctccccacctgcctcggccccactcacgagttccaccacaccccagctcagaacgccgcgccgtatatatcggagcccttttcccaatgtccggcggatggccaggcgggcaggcctgtcaacccgcagttgaaatggcgctggaagacgtaaattcgcgacgggacatcctgcctgattacgagctcaaactgatccatcacgattctaaatgcgatcctggacaggctacaaagtatctgtacgagctattgtataacgaccctatcaagataattctcatgcccggatgttcaagtgtgagcacgctcgtggcagaagctgcccggatgtggaacttgatcgtcctatcatacggtagctccagcccagctctctcaaatcgacagaggttccctacgttctttcgtacgcacccatctgctacactccacaaccccaccagggtgaaactattcgagaagtggggatggaaaaagatcgcgaccatccaacagacgacggaggtgtttaccagcaccctcgacgaccttgaggagcgtgtcaaggaagccgggatcgagattaccttccggcagagcttcttttctgaccctgccgtcccggttaaaaatctcaagcggcaggacgctcgcattatcgtgggactgttctatgaaaccgaagctcgtaaagtattttgtgaggtctacaaggagcgattattcgggaagaagtatgtgtggttcctgattggctggtacgctgacaactggtttaagatctacgaccctagcatcaattgcacagtcgacgagatgactgaggcagtggagggccatatcactacggagattgtgatgctgaatccagcaaataccagatccatttcaaatatgacctcccaggagttcgtggaaaaactgactaaacggctgaagcggcacccagaagaaacaggaggctttcaggaagcccctctggcatatgacgccatctgggccctggcgcttgccctaaataagacttccggcggtggaggtcgcagcggcgtccgactcgaggacttcaattacaataaccagaccatcactgaccagatttatcgggctatgaacagctctagtttcgagggggttagcgggcatgtcgtgttcgacgcctcgggatccaggatggcctggacactcattgagcagttgcagggaggatcctacaagaagatcgggtactatgactccaccaaagacgacctctcctggagtaagaccgacaagtggatcgggggctccccccctgctgaccagacgcttgtcattaagaccttccggttcctgagtcagaaacttttcatctccgttagcgtgctgagttccctgggcatcgtgctggcagtggtgtgcctcagcttcaatatttataacagccacgtgaggtatatccagaatagccaacccaatctgaataatctaacggctgtaggctgcagtctcgccttagccgccgtctttcccctcggactggatggataccatattggtaggaaccagttcccattcgtttgccaggccagactgtggttgctgggcctgggcttttcccttgggtatggatccatgtttacaaagatttggtgggtgcacaccgtgtttacaaaaaaagaagagaagaaagaatggcggaagaccctggaaccctggaaactatacgctactgttggtctcctcgtcggcatggacgtgctgactcttgccatttggcaaatcgtggacccactgcatcgtactatcgagacctttgcaaaagaggagcccaaggaggacatcgacgtaagcatactccctcagctggaacactgctcctccagaaagatgaacacctggctcggcattttctacgggtacaaaggattactgttactgttgggcatttttttagcctatgagaccaaatcagtgtcgacagagaagattaatgatcacagagccgttggtatggcaatctacaatgtcgccgtgctctgccttattaccgcacctgtgactatgattctgtcttcacagcaagatgccgcttttgcgtttgcctctctggcaatcgttttctcatcatacattaccctggtagtactgtttgtacctaaaatgcggaggctcatcactaggggagagtggcagtcagaagcacaggataccatgaaaaccgggagcagtacgaacaacaacgaggaagaaaagtcgcggttattggaaaaggagaatcgcgaactggagaagattatcgccgagaaggaagagcgcgtgagcgaactaaggcaccaactgcagagcagacagcagctgcgaagccggcgacaccctccaacgcccccagaaccaagcggggggctgccccgcgggccccccgagccccccgaccggctttcttgtgacggctcacgcgtccatttgctgtataagtag

SEQ ID NO: 209973 - DNA, 2535 bp, Artificial Sequence
  derived and/or modified sequence
atgggccctggggccccctttgcccgggtgggctggcccctgcccctgctggtggtgatggccgccggcgtggcccctgtgtgggccagccacagcccccacctgccccggccccacagccgggtgcccccccaccccagcagcgagcggcgggctgtgtacatcggggccctcttccccatgtctgggggctggccaggcggccaggcctgccagcctgctgtggagatggccctggaggatgtgaacagcagaagagacatcctgcctgactatgagctgaagctgatccaccacgacagcaaatgtgaccccggccaggccaccaagtacctgtatgagctgctgtacaatgaccccatcaagatcatcctgatgcctggctgcagctctgtgtccaccctggtggccgaggccgccaggatgtggaacctgattgtgctgtcctatggcagcagcagccctgccctgagcaaccggcagcgcttccccaccttcttccgcacccaccccagcgccaccctgcacaaccccaccagggtgaagctgtttgagaagtggggctggaagaagatcgccaccatccagcagaccacagaggtgttcaccagcaccctggatgacctggaggagcgggtgaaggaggccggcatcgagatcaccttccggcagagcttcttcagtgaccctgctgtgcctgtgaagaacctgaagaggcaggatgcccgcatcatcgtgggcctcttctatgaaacagaggccaggaaggtgttctgtgaggtgtacaaggagcggctgtttgggaagaagtatgtgtggttcctgattggctggtacgccgacaactggttcaagatctatgaccccagcatcaactgcaccgtggatgagatgacagaagctgtggagggccacatcaccacagagatcgtgatgctgaacccagccaacaccaggagcatcagcaacatgaccagccaggagtttgtggagaagctgaccaagaggctgaagaggcaccctgaggagaccggcggcttccaggaggcccccctggcctatgatgccatctgggccctggccctggccctgaacaagaccagcggcggcggcggccgcagcggcgtgcggctggaggacttcaactacaacaaccagaccatcacagaccagatctaccgggccatgaacagcagcagctttgaaggagtgtctggccacgtggtgtttgatgccagcggcagcaggatggcctggaccctcatcgagcagctgcagggcggcagctacaagaagattggctactatgacagcaccaaggatgacctgtcctggagcaagacagacaagtggattggaggcagccccccagctgaccagaccctggtgatcaagaccttccgcttcctgagccagaagctgttcatctctgtgtctgtgctgagcagcctgggcatcgtgctggccgtggtgtgcctgtccttcaacatctacaacagccacgtgcgctacatccagaacagccagcccaacctgaacaacctgacagctgtgggctgcagcctggccctggccgctgtgttccccctgggcctggatggctaccacatcggcaggaaccagttcccctttgtgtgccaggcccggctgtggctgctgggcctgggcttcagcctgggctacggctccatgttcaccaagatctggtgggtgcacacagtgttcaccaagaaggaggagaagaaggagtggaggaagaccctggagccctggaagctgtatgccaccgtgggcctgctggtgggcatggatgtgctgaccctggccatctggcagatcgtggaccccctgcacaggaccatcgagacctttgccaaggaggagcccaaggaggacattgatgtgtccatcctgccccagctggagcactgcagcagcaggaagatgaacacctggctgggcatcttctacggctacaagggcctgctgctgctgctgggcatcttcctggcctatgagaccaagtctgtgtccacagagaagatcaatgaccacagagctgtgggcatggccatctacaacgtggccgtgctgtgcctgatcacagcccctgtgaccatgatcctgagcagccagcaggatgctgcctttgcctttgccagcctggccatcgtgttcagcagctacatcaccctggtggtgctgtttgtgcccaagatgagaagactcatcaccagaggagagtggcagagcgaggcccaggacaccatgaagacaggcagcagcaccaacaacaatgaggaggagaagagccggctgctggagaaggaaaatcgggagctggagaagatcatcgccgagaaggaggagcgggtgtctgagctgcggcaccagctgcagagccggcagcagctgcggagccgccgccacccccccaccccacctgagcccagcggcggcctgccccggggccccccagagcccccagaccggctgagctgtgatggcagccgggtgcacctgctgtacaagtag

SEQ ID NO: 209974 - DNA, 2535 bp, Artificial Sequence
  derived and/or modified sequence
atgggccccggcgcccccttcgcccgggtgggctggcccctgcccctgctcgtggtgatggccgcaggtgttgcacctgtgtgggcctcacattccccccatcttccgaggccccattctcgggtcccgccgcatccttcctcagagaggcgcgcagtctacataggggccctttttcctatgtccggaggatggcctggaggacaggcctgtcagcccgccgtcgaaatggccctcgaagacgttaattcaaggcgggacatcctgcccgactatgagctgaagttgatccaccacgacagtaagtgcgaccctgggcaggctactaagtatttgtacgagctgctctacaacgacccgattaaaattatcctcatgcccggatgttcttccgtgagcacacttgttgcagaggcagctcgtatgtggaatctgatagtgttgagctatggctctagtagccctgccctgtcaaaccggcagcgattccctacattcttccgtacccacccaagcgctacgctccacaaccccacccgtgtgaaattgttcgaaaaatggggctggaagaagatcgcgaccatacagcagacaaccgaggtgttcacgagcaccttggacgacctggaggagcgagtaaaagaggccggaatcgaaatcacctttcgacagagcttcttttcagatcccgccgtgcctgtaaaaaatctgaagaggcaggacgcgcgcatcatcgtcggcctgttttacgagacagaggcgagaaaagtcttctgtgaggtgtataaggagcgccttttcggcaagaagtacgtgtggttcctaatcggttggtatgcagacaactggttcaaaatttacgatcccagcattaattgcactgtagatgagatgacagaagcggtggagggccatattaccacggagatcgtcatgctgaacccagcaaatacgcgctcaatttctaatatgactagccaggaatttgtcgagaaacttacaaaacggctcaagagacaccctgaggaaacgggtggattccaggaagcacctctggcatatgacgcgatttgggctctggcactagcattgaataaaacctctggtgggggtggaaggtccggggtcaggctggaagatttcaactataataatcagaccataaccgatcaaatttatagggctatgaacagttccagtttcgagggagtgagtggccatgtggtcttcgacgcaagtggatccaggatggcatggactttaattgagcaactgcaggggggctcctacaagaagattggatattacgacagcacaaaggatgatctgtcttggtccaagaccgataagtggatcgggggttcaccacctgctgaccagaccctggtcattaaaaccttccgcttcctctcgcagaagctctttatctctgtctccgtgttgtccagtctcggtatcgtactggccgttgtatgcctctctttcaatatctacaatagccatgtccggtacatccagaacagccagcctaatcttaacaaccttaccgcagttgggtgtagccttgctctggccgcagttttcccgttaggtctcgatggctaccacataggcaggaaccagtttccatttgtgtgtcaggccaggctgtggctgctgggacttggtttcagcctgggctatggaagtatgtttactaagatatggtgggtccacacggtttttacaaagaaagaggaaaaaaaagagtggcggaaaaccctggagccttggaagctgtatgccacagtcggcctgttggtgggaatggacgtgcttacgctcgccatttggcagattgtggaccccctgcaccgaacaatcgaaactttcgctaaggaagaaccaaaggaggacattgacgtgtccatattgcctcagcttgaacattgcagctctaggaaaatgaatacctggctcggcatcttttatggatacaaagggctgctgctgctgctgggcatctttctggcctacgagacaaaatccgtgtccaccgagaagatcaacgaccaccgcgccgtcggaatggctatctataatgtagccgtactgtgcttaatcacggcccccgtgactatgattttaagctcacagcaggacgccgcattcgctttcgcctcccttgcgatagtgtttagcagctacattacactggtagtgttgttcgtgcctaaaatgcgacgcctcattactcgaggcgaatggcaatcagaggcacaggatactatgaagacaggatcaagtaccaataataacgaagaagagaagagtcggctgttggagaaggagaacagagagctggagaagattatcgcggagaaagaagagagagtatccgagctccgtcaccagctccagtctcggcagcagttgcggtctagacggcatccacccacaccccctgagccatcaggaggcctccctaggggccctcccgagccacccgatcgtctgtcttgtgacgggagccgggtgcaccttttgtacaagtag

SEQ ID NO: 209975 - DNA, 2535 bp, Artificial Sequence
  derived and/or modified sequence
atgggccccggcgcccccttcgcccgggtgggctggcccctgcccttacttgtggtcatggccgccggtgtggctcccgtgtgggccagtcacagcccccacctgccaagacctcactcgcgggtgccaccccacccatcttccgagagacgagctgtgtatataggcgctctcttcccaatgagtggtgggtggcctggtggacaggcctgtcagcccgccgtggagatggctttagaagatgttaactctaggagagatatcctgccagattacgaactcaaactgatacaccacgattctaaatgtgacccaggccaagccacaaaatacctgtatgagcttttgtataatgacccgattaaaattattttgatgcccggctgttccagtgtttccactctggtggccgaagccgcaagaatgtggaacctgattgttctgagctacggctcttcttctcccgcactgtccaatcggcagcgcttcccaactttcttccgcactcatccgtcggccacactgcataatcctacccgcgtgaagttgtttgagaaatggggttggaaaaagatcgctacaatccagcaaaccactgaagtttttacgagcacattggacgatcttgaggaacgggttaaggaggctggcatcgagatcacattcaggcagtccttttttagcgaccccgccgtacccgtgaaaaatctcaaaagacaggatgcccgcataatcgtgggcctcttctatgaaacagaggctagaaaagttttttgcgaagtgtataaagagagactgtttggcaagaaatatgtgtggtttctcataggttggtacgcagacaattggtttaagatctatgacccaagcatcaactgtacagtggacgagatgaccgaggcggttgagggccacattactacagagatagtcatgctcaaccccgcgaacactagaagcatcagcaacatgacctcacaagagtttgttgaaaaacttactaagagactcaaacggcaccctgaggaaaccgggggatttcaggaggctccccttgcgtacgacgctatctgggctctggccttggccctgaataaaacttcagggggcggcggccgcagcggagtgcgtctagaagattttaactacaacaatcaaactatcactgaccaaatttacagggccatgaattctagttcttttgaaggcgtgagtggccacgtggtgtttgacgcctccgggagccggatggcttggacattgatcgagcaactccaaggcggctcttataaaaaaataggatactacgatagtacaaaggatgacctgtcttggagtaaaaccgataagtggatcgggggaagcccccctgccgaccaaacactggtgattaagaccttcagatttctgtctcagaaactgtttattagtgtctctgttctgagcagcctgggtattgtgttggcagtcgtttgtctgagctttaatatttataactcccatgtgagatatatccagaactctcagccgaaccttaacaatctgacagctgtcgggtgctcattggcgctggcagctgttttccctctcggcctggacggatatcacatcggtagaaaccaatttccattcgtttgtcaggccaggttgtggctcctcggcctgggcttctcactggggtacggttcaatgtttaccaagatctggtgggtgcatactgtgttcactaaaaaagaagagaagaaagagtggaggaagaccctcgagccttggaagctctatgccacagtgggcttgctggtgggaatggacgtgctcacgctggctatctggcagattgttgacccacttcatcgtacaattgagacattcgcgaaggaagagccaaaagaggatattgatgtgtctatattacctcagttggaacactgctcatcaagaaagatgaacacctggttgggcattttctatggctacaagggacttctgctgctccttggcattttcttagcttatgaaactaaaagtgtgtctactgagaaaataaacgaccatagggctgtgggcatggccatctataacgtggcagtcttgtgcttgattacagcacccgttacaatgatcctttccagtcaacaggatgccgcctttgcgttcgcaagcctggccattgtgttttcctcgtacattaccctggtggttcttttcgtgccaaagatgcgcaggctcattacaagaggagagtggcagagtgaggcccaagacacgatgaagacaggttcttctaccaataataatgaagaggaaaaatccaggttgctcgagaaagaaaatagagaactggagaagatcatcgcggaaaaagaggagagggtgtccgaactaaggcatcagttacaatcaagacagcagctccgcagtcggaggcaccccccaacgcctcctgagccatccggcggcttgccacgcggtccacccgaacctccagaccgactatcatgcgacgggtcccgagtacacttgctttacaagtag

SEQ ID NO: 209976 - DNA, 2535 bp, Artificial Sequence
  derived and/or modified sequence
atgggccctggcgcaccattcgccagggtgggttggcccctcccattactggttgtgatggcagccggagtggcgccagtatgggctagtcattcacctcatttaccacgtccacatagtcgggtccccccacatccttccagtgagagaagggctgtctatattggggctctcttccccatgtccgggggatggcctggcggacaggcttgtcaaccggctgtggaaatggcactggaggatgtgaatagccgaagagacattctgcccgactatgaactcaagctgatccaccatgactccaaatgtgacccaggccaggctaccaagtacttgtacgagctgttgtataatgacccaatcaagatcattctcatgcccggttgctcatccgtgtccacgctggtggccgaggcagcgagaatgtggaatcttattgtccttagctacggcagtagttctccagctctgtccaataggcaaagatttcccaccttttttcgcactcatccaagcgctactctgcataatcccacacgcgtcaagcttttcgaaaagtggggctggaagaagattgccactatccagcagaccacagaggttttcacaagcacactggacgacctagaagagcgcgtgaaagaggccggaatagagattacctttagacagagttttttctctgacccagccgtcccggtgaaaaatttgaagcgacaggacgcacgtataatagttgggcttttttacgaaaccgaggcacgaaaagtcttctgtgaggtctacaaagagcggttgttcggaaaaaagtacgtctggtttctgatcgggtggtacgctgataattggtttaagatctacgatccatctatcaattgtacagtggacgagatgacagaggccgtggagggtcacattactaccgagattgtaatgcttaatcctgcgaatacccggagcatctccaacatgacatcccaggaatttgttgaaaagttgacaaaacggctcaagcggcaccctgaggagactgggggttttcaggaagcacctctggcatatgatgcaatctgggctctggcccttgccctcaataaaacttccgggggaggagggagaagtggagttcggctcgaggattttaattataacaatcagacaattaccgaccaaatttacagggctatgaatagctccagtttcgagggagtgagcgggcatgttgtcttcgatgcctctggcagccgcatggcctggaccctcattgagcagctgcaagggggtagctacaagaagatcggttactatgattcaaccaaagacgatcttagttggtccaagaccgacaagtggataggaggatccccccctgccgaccagaccttagtcattaaaacatttaggtttcttagtcagaagctctttatttctgtgtccgtgctgtcatccttaggcatagtgcttgccgtggtatgtctgagctttaacatctacaactcccacgtccggtacatccagaatagccagccaaacctgaataatctgaccgctgtgggatgtagtttggccctggctgcagtttttcccctcggtctcgacggctatcacattgggcgtaaccaattcccttttgtgtgccaggctagactgtggctgttggggctgggcttcagcttgggctacggaagcatgtttacaaaaatatggtgggtgcataccgttttcaccaagaaagaagagaagaaggagtggaggaagacactcgagccatggaagctttatgccaccgtcggactcctggtggggatggatgtgctcacactggctatttggcagatagtcgatcctctgcatcgtactattgagaccttcgcaaaagaggagcccaaggaggacatcgacgtgtccatattaccacaactggagcactgtagctccagaaaaatgaacacctggctcgggattttctacggatacaagggactcctgcttctacttggcatatttctcgcttacgagaccaagtctgtctcgacagagaaaattaatgaccatagggcagtgggcatggccatctacaacgtggccgtgctgtgtttgataactgcacctgtgactatgatcctgtcatcccagcaggatgcagccttcgcgtttgctagcctcgccatagtcttctccagctacattacactggtcgtgctctttgtaccgaaaatgcgtcgtctgattacacgaggggagtggcagagtgaagcccaagacacaatgaagacagggtcttcaaccaacaataatgaggaagaaaaatctagacttctcgagaaggagaatagggaactcgagaagattatagcggaaaaggaggaaagagtcagcgagctgaggcaccaactccagagtcgccaacagctccggtccaggcgacaccctcccacgcccccagagccgagtggtgggttgccccgaggacctcctgagcctcccgataggctgagttgcgatgggtccagggtgcatctgctgtataagtag

SEQ ID NO: 209977 - DNA, 2535 bp, Artificial Sequence
  derived and/or modified sequence
atgggcccaggtgctcccttcgcccgtgtcgggtggcctcttcctttactcgtggtcatggcagcaggggtcgctccagtttgggcgtcgcactcaccacaccttccacgtcctcactctagagtaccaccacacccatcgtcggaacgccgtgccgtgtacataggagcactgtttcctatgtcaggaggctggccagggggacaagcctgtcaaccagccgtggagatggccctcgaggatgtgaattcccgaagagatattctacccgactacgagctcaagttaattcatcatgatagtaagtgcgatccaggccaggccactaagtacttgtacgagctgctctacaatgaccccatcaagattatcctcatgcctggctgctctagcgtctctacactggtcgctgaggcagctcgaatgtggaatctgatcgtgctctcttacggctcctccagtccagctctgtcgaataggcaaagattccccaccttcttccgcactcatccaagtgctacgctacacaaccccacacgcgtcaagcttttcgaaaagtggggctggaaaaagattgccaccatacagcagacaacggaagtgtttacctcaaccctagatgatctcgaagaaagggtgaaggaagccggaattgagattacctttaggcagtcgtttttctcagatccggctgtacccgtgaagaacttaaagaggcaggatgctcgaattatcgtggggctcttttacgaaacagaagcgcgaaaggtattctgcgaggtatataaggagcggctcttcggcaaaaaatacgtctggttccttatcggttggtacgctgataactggttcaaaatttacgaccccagcataaactgtacagtggacgagatgacagaggcagtggaggggcacatcaccaccgagattgtcatgctgaatcccgctaacacgagaagtataagtaatatgacttctcaggaatttgtggaaaaactgacaaaacgcctgaagagacacccagaggagaccgggggttttcaggaggccccattggcctatgacgccatttgggcattagccttggctctcaataagacttccggtggaggcggacgtagtggagtgcgcttagaggacttcaactataacaatcagactattaccgaccagatttaccgcgctatgaattcaagttcctttgagggagtaagcggacacgtggtattcgacgcttctggatctcgaatggcgtggacattgatcgaacaactgcaggggggatcatataagaaaatagggtattatgatagtacgaaggatgacctctcttggagcaagacagataaatggattggaggtagcccacctgctgatcagactcttgtgattaagacttttagattcttgagccagaagctgtttatctccgtatctgtactgtcctctctgggtattgtgctggccgtggtctgcctctctttcaatatctataacagccacgtccggtatatccagaattcgcagccgaatctgaacaaccttaccgccgtcggctgcagcctggcactcgcggctgtgttcccgctgggattagatggctaccacatagggcgaaaccaattcccgtttgtgtgccaagccaggctctggttactgggcctcgggtttagcctgggctacgggagcatgttcaccaagatttggtgggtccatacagtatttaccaagaaggaggaaaagaaggagtggcggaagaccctcgagccttggaagctgtacgctactgtaggccttctggtgggaatggacgtgctcaccttggcgatatggcagatcgtagaccccttgcaccgcaccatcgagacctttgcaaaggaagagcctaaagaagacatagatgtgtctatcctcccccagctcgagcactgttcaagcagaaaaatgaacacttggctgggcatcttttatgggtacaaggggctcttactgctgctggggatcttcctcgcatacgagacgaagtccgtcagtacagagaagattaatgaccatcgggctgttggcatggccatctacaacgtggccgtgctgtgtttaatcacggcaccagttacaatgattcttagctcccagcaggatgccgcatttgctttcgcctccctggcaatcgtgtttagttcttacattacgcttgttgtgctgttcgtgccaaaaatgcggaggttgattacaaggggcgagtggcaatccgaggctcaggacacgatgaagacaggctcgtccaccaataataatgaggaggaaaaatcacgtcttctagaaaaggaaaacagagagttagaaaaaattatcgctgagaaagaggagagggtctccgagctccggcaccagcttcagagcaggcagcagctcagatcacgaaggcaccccccaacaccacccgagcccagtggagggctgcctagaggccctcctgaaccgccagaccggctgagttgcgatggcagtcgagtccacctgttgtacaagtag

SEQ ID NO: 209978 - DNA, 2535 bp, Artificial Sequence
  derived and/or modified sequence
atgggccctggcgcaccctttgccagggtgggttggcctctgcccttattagtggttatggccgcaggtgtggcacctgtatgggcatctcactcaccacatctcccgagaccccattctcgggttcctccacacccctctagcgagagacgcgcagtgtatatcggagctctttttcctatgtccgggggttggcccggaggccaggcctgtcaaccggctgtggaaatggccttggaggacgttaacagccgcagagacatattaccagactacgagctaaaactgattcatcacgactctaaatgcgaccctggtcaggcaacgaaatatttatacgagctgttgtacaatgacccaatcaagataatactgatgccgggatgcagcagcgtaagcaccttggtagctgaagctgcaaggatgtggaacctgatcgtgctgagctacggtagtagcagtccagctttaagcaatcggcagaggttccccacattctttagaactcacccaagtgctacgcttcacaatccaacaagggttaaattgttcgaaaaatggggatggaaaaagatagctaccatacaacagactacagaggtatttaccagcaccctggatgacctggaagaaagagttaaagaagccggaattgagataactttcaggcagagttttttttccgatcctgctgtccccgttaaaaacttgaagagacaggatgctcgcatcatcgtagggttgttctatgagacagaggcccgaaaggtattttgcgaagtttataaagagaggctatttgggaaaaagtacgtttggttcttgattgggtggtatgccgataactggttcaagatctatgacccttccataaactgtacggtcgacgaaatgaccgaggcagttgagggacacatcacaacagaaatcgtgatgcttaatcccgctaatacccgttcgatcagtaatatgacctcacaggagttcgtcgaaaagctcacaaagagactgaaacgacatccagaagagaccggcggatttcaagaggcacccctagcatacgatgccatttgggcccttgctctggctctgaacaagacatctggtggtggaggcaggagcggcgtccgactggaggacttcaattataacaatcagaccatcaccgaccagatttatagagcaatgaattcttctagcttcgagggggtcagcgggcacgtggtcttcgacgcctcagggagccggatggcttggacattgattgaacagcttcaagggggatcttataagaagatcggatactatgactccactaaggacgatctgtcctggagcaaaaccgacaagtggataggcggtagcccccctgctgaccaaacactcgtcataaaaacgttcaggttcttatcacaaaaactgttcatctctgtgtccgtgctctcctccctcgggattgtgttggccgtcgtttgcctttctttcaacatctataactcacacgttcgctatatccagaactcccagcccaacctcaacaacctcacggcggtggggtgttccctcgcgctagccgctgtgtttcctctggggctggacggctatcacatcggtcgcaaccaatttcctttcgtatgtcaggccaggctctggctgctgggtctgggcttttctttaggatacgggtcgatgtttacaaaaatctggtgggtgcataccgtgttcacgaagaaggaggaaaagaaagaatggcgcaagactctcgagccatggaagctttacgctactgttggactgcttgttgggatggatgttcttaccctggccatctggcagattgttgaccctctgcatcggaccattgaaacttttgcaaaagaagaaccgaaagaggatattgacgtatctatcctgccgcagctggagcactgtagtagccgaaaaatgaatacctggctaggaatcttttatgggtataaaggtctgctgttactcctcgggatattcctggcatatgaaaccaaaagtgtctctacggagaagattaacgaccatagggctgtgggcatggccatttacaacgtggcagtcctgtgtcttatcactgcgcctgtgacgatgatcctgtctagccagcaagatgctgccttcgctttcgcgtccctggccatcgtcttctcatcatatattaccctggtggttcttttcgtgccgaagatgagaagactgattactcggggagaatggcagagcgaggctcaagacacaatgaagaccggttctagtacgaacaacaacgaggaagaaaaaagtaggctgctggagaaagagaaccgggaactagagaagatcatcgctgagaaggaagaacgcgtgtccgagttaagacaccagctgcagagcagacagcagctgcgaagcagaagacacccaccaactcccccagaacctagcggtgggcttcccaggggacctcctgaacctccagataggctctcgtgcgacggcagtagggtccacctgctctataagtag

SEQ ID NO: 209979 - DNA, 2535 bp, Artificial Sequence
  derived and/or modified sequence
atgggcccaggtgcaccattcgccagggtgggctggcccttgccgctgttagtggtgatggcagccggagttgctcctgtgtgggcatctcacagccctcacctgccaagaccccatagtagggtgcctcctcacccctcatcagagcgtcgcgctgtgtacattggcgctctctttcctatgtctggtggatggcctggaggccaggcctgtcagcccgcagttgagatggcactcgaagacgtaaacagccgccgagacatcttgcctgactacgaactcaagcttatccatcatgatagcaaatgcgaccccggacaggcaaccaagtatttatacgaactgctgtataacgaccctattaagattatacttatgcctgggtgcagtagcgtgagtacactggtggccgaagccgctcggatgtggaacctgatcgttctgagctacggaagttcctcacccgcactgagtaatcggcagcgctttccaactttttttagaacccaccccagtgcaaccctgcacaatccgacacgcgtaaagctttttgagaagtggggatggaagaagatagcgacgatccaacagacgacagaggtgtttactagtaccctggacgacctggaagagcgcgttaaagaggccggaattgaaatcacttttcgtcagagcttcttttccgaccccgcagtgcccgtaaagaacctgaagaggcaggatgcgcgtatcatcgtgggactcttctacgaaaccgaggctagaaaggtcttctgcgaagtctacaaggagagactctttggcaagaaatatgtctggttccttattggatggtacgccgataactggtttaaaatatatgacccttcaatcaattgtaccgttgacgaaatgactgaagcggtcgaaggtcacatcacgaccgaaattgtcatgcttaacccggctaacacaaggtcaatttccaatatgacatcccaggaatttgtggagaaattaacgaagagactgaaacggcatcctgaagagaccgggggatttcaagaggcccctctcgcatatgacgccatttgggcactcgccctggctctgaataagacctccggcggtggagggaggagcggagtgaggctggaggactttaactataacaaccagaccattacagaccaaatctatcgggcaatgaactccagctccttcgagggggtgtcggggcatgtggtctttgacgccagtgggagtcgaatggcatggacacttattgagcagctccaaggcggatcatataaaaaaatcgggtattacgactctacaaaggatgatctgtcatggtccaagactgacaaatggatcggcggtagcccgcctgccgatcagaccttggttattaaaacctttagatttttatctcagaagctgtttatcagcgttagcgtgcttagttcccttggaatcgtgctcgccgtcgtgtgtctgtctttcaacatctacaattcccacgtccgctacatccaaaacagccagccaaaccttaataatcttaccgccgtcggctgttctctggcgttggctgctgtattccctcttgggctggatggttaccatatcggccgtaaccaatttccatttgtctgtcaggctcgcttgtggctactgggcctgggatttagtttgggatatggcagcatgtttacaaagatttggtgggtccacactgttttcaccaaaaaggaggagaagaaggaatggcgaaaaacgctggagccctggaaactgtacgctaccgtgggactgttggtggggatggatgtgctgacactcgcaatttggcagattgttgacccactgcatagaactatagagacgtttgccaaggaagagcctaaggaagatatcgacgtgagcatactgcctcagcttgagcactgcagcagtagaaaaatgaacacatggttaggcatcttttacgggtataaaggattactgctgctgttgggcatcttccttgcgtatgagacaaagtctgtaagcacagaaaagattaatgatcatagggctgtagggatggcgatttacaacgtggcggtattatgcctcattaccgcgcctgtgacaatgatcctaagctcacagcaggacgctgcttttgcgttcgcttccctcgccattgtcttctccagttacatcaccctggttgtgcttttcgtacctaaaatgcgacgtctgatcacccgcggtgaatggcagtctgaggcacaggataccatgaaaactggttcgagcactaacaacaacgaggaagagaagtcacgattgcttgaaaaggagaacagagagttggagaagattatagctgaaaaggaggaacgcgtgagtgaactgcggcatcagctgcagtctagacagcagcttagatcccgaagacatccaccaacacccccagagccttcaggcggtttgcctagaggaccccctgagccaccggatcgcctgtcatgcgatggctcaagggtgcacctgctttacaagtag

SEQ ID NO: 209980 - DNA, 2535 bp, Artificial Sequence
  derived and/or modified sequence
atggggccaggagcaccgttcgcccgagtgggttggcctctgcccctgctggtggttatggccgctggtgtggcccctgtttgggcgtcacactcccctcatctgccaaggccacacagccgggtcccaccccacccttcatccgaaaggcgagctgtgtacatcggagccttatttccgatgtccggcggttggcccggtggccaggcttgccagcctgctgtagagatggctctggaggatgtgaatagtcggcgagacattctccctgactatgagttgaaactgatccatcacgactctaagtgcgatccagggcaggcaacaaaatacctttacgaactgctgtataacgaccctatcaagataattcttatgccagggtgttccagtgtgagtacactggtcgctgaggcagctcggatgtggaatctcatcgtgctgagctacggttcttcctctcctgcactaagcaaccgacaacgcttcccgactttttttcgaactcatccaagcgcaacgttacacaaccctaccagagttaagctgttcgaaaagtggggatggaaaaagattgctacaattcagcagaccacggaggttttcactagtacactagatgatctggaggagagggtcaaagaagctggcattgagataacttttcgacaaagctttttcagtgatcctgctgtgccggtaaagaatcttaaaagacaggacgccagaataattgtgggactattctacgagacggaggcacgaaaagttttctgcgaagtatacaaggagagattgtttgggaagaagtatgtctggtttcttatagggtggtatgccgacaactggtttaaaatctatgacccctctatcaattgtacggttgatgaaatgactgaggctgtggaagggcacattactactgagatcgtgatgctgaaccccgctaatacccgatcaatcagcaatatgacctctcaagaattcgtcgaaaagttgaccaaacgcttaaagcgccacccggaggaaactggcggatttcaggaggcccctctggcctatgatgctatatgggccctcgcacttgctttgaataaaacttccggaggcggaggacgatcaggagtccgcttggaggacttcaactacaacaaccaaaccatcaccgatcagatctaccgagccatgaatagctcgagcttcgagggagtttcgggtcacgtcgtatttgacgccagtgggtcaagaatggcctggaccctgatcgaacaactgcagggcggttcctataaaaaaattggatattatgactccacaaaggatgatctgtcctggtctaagacggacaagtggataggcggatcaccccctgccgatcagacccttgtgatcaaaacttttcgatttctgagccaaaagctgtttatttccgtgtccgtgctgagctccctgggcattgtcctcgctgtagtctgcctctccttcaacatatacaactcgcatgtccgatacatccagaattcacagccaaacctcaataacctcaccgcagttggatgctccctggcccttgccgctgtcttccctctggggctggacgggtatcacattgggcgaaaccagttcccatttgtttgtcaggctcgcctatggttgctgggcttaggcttcagccttggctatggttctatgtttaccaaaatctggtgggtgcataccgtattcaccaagaaagaagagaagaaagaatggcggaagactctggaaccatggaagttatatgcgaccgtgggactcctcgttggcatggatgtcctgaccctggccatctggcagatagtggacccacttcataggactatcgaaacattcgccaaagaggagcccaaggaggatatcgacgtgtctatattgcctcagcttgagcattgctcttccagaaagatgaacacttggttggggattttctatggatacaaaggtctgcttcttcttctgggcatcttcttggcctacgaaacgaaaagcgtgagcacggaaaagatcaacgatcaccgcgctgtggggatggccatttacaacgtcgccgtcctgtgcctgattacagccccagtgaccatgatcctctcctcacaacaggacgccgcattcgccttcgcgagccttgcaattgtattctccagttatatcacactcgtcgtgctgttcgtcccaaaaatgcggagattgatcacccggggtgaatggcagtccgaggctcaggataccatgaaaaccggctctagcactaataacaacgaggaagagaaatcccgactgttggagaaagaaaaccgagagttggaaaaaatcatagctgagaaggaggaacgcgtgagtgagctcagacatcagctccagagtcgacagcaacttcggagcagacgccacccacccactcctcccgagcctagcggtggactcccccgtggaccacccgaacctcccgacaggctttcctgcgacggcagcagggtgcatctcctatataaatag

SEQ ID NO: 209981 - DNA, 2535 bp, Artificial Sequence
  derived and/or modified sequence
atgggaccaggggctccttttgctcgagtggggtggccactgccactgttggtagtcatggcagcaggggtcgcgcctgtttgggcctcacattccccccatttacctcgcccacattcccgggtcccaccccatccatcttccgagaggagggctgtttacataggtgcactgtttccaatgtccggaggctggcctggcggtcaagcctgccagcctgccgtggaaatggccctcgaagatgtgaactcccgcagagatatcctgcccgactatgagttgaaactgatacatcatgactcaaaatgcgatccagggcaagcgactaagtatctgtacgagttgctgtacaatgatcccattaagattatcctgatgccaggatgctccagtgtgagcaccctggtcgcggaagctgccagaatgtggaacctgatcgtgttgtcctatggttcttcgtcacccgcattgtcgaacaggcagaggttcccaactttttttcggacccacccctctgccacgttgcataaccccacacgtgtcaaactctttgagaagtggggatggaagaagatcgcaactatacagcaaacaaccgaggtgttcacttcaactctggatgacctggaggagcgggtcaaggaagccggtatagaaatcacatttagacaatcctttttttctgacccggcagtgccggtcaaaaatctaaagaggcaggatgcacgcatcatagtgggtctgttctacgagacagaagcaaggaaggtgttctgcgaagtttataaagagaggttgtttgggaagaaatatgtgtggttcctaattgggtggtatgcagacaactggtttaagatttacgacccgtcaatcaattgcacggtggacgaaatgactgaggccgtcgagggccacattaccacagaaatcgttatgctgaatccagctaatacacggtctattagcaacatgacctcccaagagtttgtggaaaagctgaccaagaggctcaagcggcacccggaggagaccggaggatttcaggaggcgccattggcatacgatgcaatctgggctctcgccctcgcgttaaacaaaactagcggtggagggggaagaagcggtgtgcgactcgaagatttcaactacaataatcagacaataaccgatcagatatatagggccatgaacagcagctcatttgagggggtgtctggccatgtggttttcgacgccagtggctctcggatggcctggacactaatcgaacaactccagggtggctcatataagaagatcggttattacgatagcaccaaggacgacctaagctggtcgaagacagacaaatggataggaggatcccctccggctgatcagaccttagtgatcaaaaccttcaggtttctgtcacagaagcttttcattagtgtgagtgtactctcctctctggggattgtgctggccgttgtgtgtttatccttcaatatatacaactctcatgtgaggtatatccaaaattctcaaccaaacttaaataacctcaccgcagtgggatgctctcttgccctggcggctgttttcccacttggcctggacggataccacataggtcgtaaccagtttccttttgtttgtcaggcaagattgtggctgttgggcttgggcttctccctgggatacgggtcgatgtttaccaaaatatggtgggtgcacacagtgttcaccaaaaaggaagaaaagaaagaatggcgcaaaactctggaaccctggaagttgtatgctacggtcgggctcctagtgggcatggatgtgctgacgctggccatctggcagatcgtggacccactccatcggacaatcgaaacatttgcaaaggaagaacctaaagaggacatcgacgtgagtatactccctcagttggagcactgtagcagcaggaagatgaacacctggctgggaatattctacgggtataaaggactattgctgttactgggtatattcttggcttacgaaaccaagagcgtgagcaccgagaagattaacgaccaccgggcagtgggaatggccatatataatgtggccgttctctgcctgattacagcccctgtgaccatgatcttatcttcccaacaggacgcggcattcgcgtttgcaagtctcgcgattgtgttttcctcctatatcacgttagtggtgctgttcgtgccaaaaatgcggcgtctcattactcggggtgagtggcagagtgaggctcaagacactatgaaaacaggcagcagcaccaacaataatgaggaggaaaagtccaggctcttggagaaggagaaccgggaactggagaagatcatcgccgaaaaggaagagcgcgttagcgaactacgacaccagctgcagagccgacagcagttacgttcaagacgccacccacctacgcccccagagccctccggcggtttacctagaggccctcctgaaccacccgatcgtctgagctgcgatgggtctcgtgtccacctgctatataaatag

SEQ ID NO: 209982 - DNA, 2535 bp, Artificial Sequence
  derived and/or modified sequence
atgggcccaggggctccttttgctcgagttggatggccacttccactgctcgtggtcatggcagccggagtagctcccgtctgggcctctcactcacctcacctgcctagaccgcactcacgggtgccacctcatccgagttccgagcgtagggcagtgtacatcggggcactcttcccgatgagcggcggttggcccggagggcaggcctgccaacccgctgtggaaatggccttggaagatgtgaattcacgtcgggacattctgccggattacgaactcaaactcatccaccacgattccaagtgcgatcccggtcaggccaccaaatatctctacgagctactgtataatgatccaattaagatcattctgatgccgggatgtagcagcgtctcaacgttggttgccgaggcagccaggatgtggaatttaattgtactttcctatgggtcttcatcaccagcactgtcaaacagacagaggttcccaacgttcttccgtacacatcccagcgcaacactacacaaccctacaagagtgaaactcttcgagaagtggggttggaaaaagatcgccacaatccagcaaacgacagaagtgttcacctctacattggacgacttggaagagcgggtgaaagaggcaggcattgaaatcacttttagacaatcctttttctccgaccccgctgttcccgttaagaatctaaaaaggcaggacgcgagaattatcgttggcctattttacgagacagaagccagaaaagtgttttgtgaggtctataaggagcgcctgttcgggaaaaagtacgtttggttcctgattggctggtatgccgacaattggttcaagatatatgacccgtccatcaattgtactgtagacgagatgaccgaggcggttgaggggcatatcactactgaaattgtcatgctgaatccagccaatactagatctattagcaacatgacaagccaggaatttgtggagaagctaactaagaggctgaagcgacaccctgaggaaactggcggattccaggaggcccctctggcttacgacgccatttgggcactcgctttagctctaaacaaaacatccggaggcggtgggagatcaggagtgaggctggaggatttcaactacaataaccagacaatcactgaccagatttatcgcgcaatgaatagctcatccttcgagggcgtatcagggcatgtggtgttcgacgccagtgggtcccgaatggcgtggacactgatcgagcagcttcagggcggatcttacaaaaagattggatactatgattcaacaaaagatgacttgagttggagcaaaaccgataagtggattggcggttctccacccgcagaccagaccctggttattaagacgttccgcttcctcagccagaagctcttcattagtgtctctgtattatcatctctgggcatcgtgctggccgtagtctgcctgtcctttaatatttataattctcacgtgagatacatacagaattcccaacccaacctgaataatctgaccgccgttggatgttccctcgccctcgcggcagtcttccccctgggactcgatgggtatcacatcggtcgcaaccagttccccttcgtttgccaagcgagactatggctattaggtctgggcttctccctcggttacggaagtatgttcaccaaaatttggtgggtgcacacggttttcacgaaaaaggaagagaaaaaggaatggcgaaaaacgcttgaaccttggaagttgtatgcgaccgttgggttgctggtgggtatggatgtccttactctggctatttggcagattgtcgaccctctgcacagaactattgagacctttgctaaagaagagcctaaggaggacattgacgtgtcaatcctcccacaacttgagcactgctcatcacgtaagatgaatacctggctgggtatattctacggctacaaaggacttcttttgctacttggaattttcctggcctatgaaaccaaatcagtcagcactgaaaaaataaacgatcatcgcgcagttggcatggccatatacaacgtggccgtattatgcctgattactgcgcctgttactatgatcctgtcctcacaacaagacgctgcatttgccttcgcctctctggctattgtgttctcgtcatatatcactctcgtagtgttgttcgtccccaagatgcgcagactgattacaaggggggagtggcagagtgaagctcaagacactatgaagacaggttcttccacgaataataatgaggaggagaagtctaggttactcgaaaaagaaaatcgagaattggagaagatcattgccgaaaaggaggagagagtcagcgaactacgccaccagctgcaatctcgccagcagctcagatcacgccgtcacccccctactccacccgagcctagcggtggcctgcccaggggccctccagagcccccagatcgcctcagttgcgacggctcacgagtccatctgctgtacaagtag

SEQ ID NO: 209983 - DNA, 2535 bp, Artificial Sequence
  derived and/or modified sequence
atggggccaggggctccattcgcgcgtgttggatggccactgcccctcttagtggtgatggccgcaggggtcgctccagtgtgggctagtcacagccctcacctgcctcgaccacacagtagggtgccaccacacccatcatctgagaggcgcgctgtctatatcggagctctcttccccatgagtggcggttggcctggcggacaggcctgccagcccgcagtcgagatggccctggaagacgttaacagccggagggatattctccctgattatgaattgaagctgattcaccatgattcaaagtgtgatccaggacaggccaccaagtatctctatgagttgctctacaatgacccaattaaaattatcctgatgccgggatgctcctctgtgagcaccctggtcgctgaggccgctaggatgtggaatcttatcgttctctcctatggcagttcctcaccggctcttagcaataggcagcgcttcccaacgttctttcggacccacccatcagcaaccctgcataaccccactagagttaaactcttcgagaaatggggttggaagaaaatcgcaaccatacagcagaccacagaagtcttcacaagtacgcttgacgacctggaggagagggtcaaggaagctggcatagaaattacattccggcaaagcttcttcagcgaccctgccgtcccggtcaaaaacctgaagaggcaggacgctcgcatcatagtggggctcttctatgaaaccgaggcacggaaagttttttgcgaggtgtacaaggagcggctgtttggcaaaaagtatgtgtggttcttgataggctggtatgcagataactggttcaaaatttacgatccaagcatcaattgtacagtcgatgagatgacagaagcagtggaaggacacattacaaccgagatcgtgatgctgaaccctgcaaacaccaggtccattagtaatatgactagccaagaattcgtcgagaagctgactaagcggttgaagcggcacccagaagagaccggcggatttcaagaagctcccctggcttacgacgcgatttgggcccttgccttggcactgaacaagacctctgggggaggaggacgatctggagtacggctggaggactttaactataataatcagaccatcacagaccagatttaccgagccatgaattcttcctcctttgagggcgtttccggccacgttgtttttgacgcctcaggtagtcggatggcctggaccctgatcgagcagctccagggagggtcttataaaaaaatcggctattatgattccaccaaggacgatctttcctggagcaaaacagacaaatggatcggcggatccccgcctgccgatcagactctcgtgattaagacgttcagattcctaagccaaaagctcttcatcagcgtctccgtcctaagctccctcgggatagtgcttgccgtcgtgtgtctctcctttaatatttacaactcccatgtgagatacatacagaacagtcaaccaaacctgaataatctaaccgctgttggatgctcacttgctcttgccgcagtgtttcctctcgggctggatgggtaccatattgggaggaatcagttccccttcgtgtgtcaagctcggctgtggctgctggggctcggcttctctctgggttatggatcaatgttcacaaaaatctggtgggtccacactgtcttcaccaaaaaggaagaaaaaaaagaatggcgtaagacccttgagccatggaaactatatgctacggtgggactgcttgtgggcatggacgttctgactctggccatttggcagattgtggaccccctccaccgtaccatcgagactttcgctaaggaggagcctaaagaggatatcgacgtatcaatattgccgcagttagagcactgctccagcagaaagatgaacacctggctgggcatattctacggatacaagggcctgctgttgctcttgggaatcttccttgcttatgaaacgaagtcagtgagcacagaaaaaatcaatgatcatagagccgtggggatggccatttataacgtcgccgtgctctgcctcatcacggccccagtcacaatgatcctttcttcccagcaggacgcagccttcgctttcgcctctctagctattgtgttttcaagttatatcacacttgtcgtgctttttgtgcctaaaatgcgaaggctgatcactcgaggagagtggcagagtgaagctcaggatactatgaagaccgggagttccactaacaacaacgaggaggagaagagtaggctcctggaaaaagaaaaccgcgagttggaaaaaatcatcgccgagaaagaggagagggtgtccgaactgaggcatcagcttcagtctcgccaacagctgcgcagcagaagacacccaccgacaccgccagagccctccgggggtctacctcgaggccctcctgaacctcctgatcggctctcctgcgacggctcaagagtacacctcctttataagtag

SEQ ID NO: 209984 - DNA, 2535 bp, Artificial Sequence
  derived and/or modified sequence
atggggcctggggcacctttcgccagagttgggtggccattaccgctcttggtcgtgatggccgcaggcgtggctcctgtatgggccagccatagtccgcatcttcctaggcctcatagccgggttccgcctcacccttcctccgagcgccgagccgtgtatattggagccctcttccccatgtccggcggatggccgggaggacaagcgtgtcagcccgcagtggaaatggccctggaagatgtcaattctcgaagagacattctgcccgactatgagcttaaactgatccaccacgactcaaaatgtgatcccggacaggcaacaaagtatttgtacgaactcctgtataatgatcccattaagattattctgatgccgggttgcagcagtgtctccacacttgtggccgaggccgctaggatgtggaaccttatcgtcttatcctacggatccagcagtccggcactgagcaacaggcagcgcttcccaaccttcttcagaacccacccatctgcaactttacacaacccgacaagagttaaactgttcgaaaaatggggctggaagaagattgcaacgatccagcagactactgaagtcttcacaagtacactcgacgacttagaagaacgcgtgaaagaagctgggatagagattacctttagacagtccttcttctctgaccctgctgtgcctgtgaagaacctaaaaagacaagacgcaaggatcattgtcggcttgttttatgaaactgaggcccgaaaggtgttttgcgaggtatataaggaacggctgtttggaaaaaagtatgtgtggtttctgattgggtggtatgcggataattggtttaaaatatatgacccttccatcaactgcacggtggacgagatgacggaagccgtcgagggccacatcactaccgaaattgtcatgctcaatccagcgaatactcgctcgattagcaacatgacgagtcaggagttcgtggagaaacttactaagaggcttaagcgacaccctgaagaaaccgggggttttcaggaggctccgctcgcatacgatgccatctgggcactggcccttgcactgaataagacctcagggggaggcggacggagcggcgtgcggctcgaagacttcaactacaataaccagacgatcactgaccagatctaccgtgccatgaacagcagctcctttgagggagtctccggacacgtggtgttcgacgccagtggaagtcgcatggcgtggactctcattgagcagctccagggaggatcatacaagaagatcgggtactatgatagcacaaaggatgacttatcctggtccaagaccgataagtggatcgggggttcgccccctgccgaccagaccctggtgatcaaaacgttccgcttcctctctcagaagctctttatatccgtgagcgtgctgtcatcactggggatagtgctggccgtggtctgtcttagttttaacatctataacagtcatgtgcggtacatccagaacagccagccaaacttaaataatctgaccgccgtgggatgctcattggccttggccgctgtattccctttggggctggacggataccatattgggagaaaccagtttccttttgtttgccaggccagactgtggcttctgggcctcggcttctcactggggtacggctctatgttcaccaagatttggtgggtgcataccgtgtttaccaaaaaggaggagaagaaggagtggcgcaaaactttagaaccctggaagctgtatgccacggtagggttgctagtaggaatggatgtacttactctggccatttggcagattgttgatcccctccacagaactattgagaccttcgcaaaggaagaacccaaggaagacattgacgtgtccatcctgccccagctggaacattgttcctcacggaaaatgaatacctggctcgggatcttctatggctacaaaggactcctgttactcctcgggattttccttgcttatgagaccaaaagcgtcagcactgaaaaaattaacgatcacagggccgttggcatggctatctataatgtggccgtgttatgcctcatcacagcacctgtgaccatgatactgtcatcccagcaagacgctgctttcgcgttcgctagtctcgcaatcgtgttctcaagctatataaccctggtggtgctgttcgttccaaaaatgcggcgactgatcactagaggcgagtggcaatccgaagcccaggacacaatgaaaaccggctcctctacaaataacaacgaagaggagaagtcaagacttctcgaaaaggagaatagagaacttgagaaaattatcgccgagaaggaagaaagagttagcgagctccggcaccagttgcagagccgtcagcaactgcgcagccggaggcatccaccaacccccccagagcctagcgggggactgcccagaggtccccctgagccaccagacagactctcatgcgatggctctcgcgttcacctgctctacaaatag

SEQ ID NO: 209985 - DNA, 2535 bp, Artificial Sequence
  derived and/or modified sequence
atgggcccaggagccccatttgcccgtgtcggctggcccctgcccctgctggtggtgatggcagccggagtggctcccgtgtgggccagtcatagtccacacctacccaggccccactctcgagtcccgcctcatccatcgagtgaaaggagggcagtctatatcggtgctctctttcctatgtccggcggttggcctgggggtcaggcatgccaaccagcagtcgaaatggctttagaggacgttaacagcaggcgggatattctgcccgattacgaactcaaactgatccatcacgacagcaaatgcgatccgggtcaagcaacgaaatacctgtatgagcttctatacaatgaccccatcaagatcattctgatgcccggatgcagcagcgtatccacgctagttgcagaagctgcgagaatgtggaacctgatcgttctcagctatggatcatcttccccagcactgtctaaccgccagagattccctacgttttttcgcactcacccctcggccactctgcacaacccaacccgagtcaaactgttcgaaaagtggggttggaagaaaatcgccaccatccagcagaccacagaagtgttcacaagtactcttgacgatttggaggaaagggtcaaagaggccggaatcgagattacattcagacagagtttcttctctgatcctgcagtgccggtgaagaacttaaagcggcaggatgcacggatcattgtgggactcttctatgagaccgaagcacgcaaagttttctgtgaggtctacaaggaacgcctcttcggtaaaaaatatgtgtggtttctgattggctggtatgcggataattggttcaaaatttatgatccttccatcaactgtactgtcgacgagatgaccgaggccgtggagggtcacattactacggagatagtgatgctgaatcctgcgaatacccgctcaatcagcaatatgacctcacaagaatttgtggaaaaattgacaaaacggctgaagcgtcatcccgaagagacaggtggctttcaagaggcgcctctcgcctatgatgccatctgggctctggccttggccctgaataagacatccgggggaggaggcagaagtggcgtccggcttgaggattttaattataacaaccagaccatcacagatcagatctatagggccatgaactcctcctcctttgagggggtctctggtcatgtcgtcttcgatgcttctggatctcggatggcctggactctgatcgagcaactccaggggggatcctacaagaaaattggttactatgattccacgaaggatgatttgagttggagcaaaactgataagtggattggcggttcacctcccgctgaccagacgttagtcattaagacgttcagattcctgtcgcagaagttattcatttccgttagcgttttgagttccctaggaatcgtgctcgcagtggtgtgcttatcattcaacatttacaacagccatgttagatacatacaaaacagccagcccaatctaaacaacctcacagcagtgggttgtagcctggccctggctgctgtctttcctctcggcttagatgggtatcacatagggagaaatcagttcccattcgtctgtcaggccagattgtggcttctgggtttagggttctctctcggctatgggtccatgttcacgaagatctggtgggtgcataccgttttcactaaaaaagaggagaaaaaggaatggaggaaaacactggagccatggaagctctacgccacagtggggctgctggtcggcatggatgtcctcacacttgccatttggcagattgtggaccctctccatcggaccattgaaacttttgcgaaggaggagccaaaggaggacattgacgtgtctattctgccccagctcgagcattgctcttccaggaagatgaacacctggctcggcatattctacggctataaggggcttctgcttttattgggaatattcctcgcctatgaaactaaatccgtatctacagagaagatcaatgaccaccgcgctgttggcatggccatctacaacgtcgctgttctgtgtctgattacagctccagtgactatgatcttgagcagccagcaggacgctgccttcgcgttcgcctcattggccattgtcttctcgtcttatattacattggttgttctatttgtccctaagatgcgacgtctgatcactcggggagagtggcagtccgaagcccaggatacaatgaaaacagggagcagcaccaataacaacgaagaggagaagagccgtctgttggagaaggagaatagagaactcgagaagatcatcgccgaaaaagaagagcgcgtgtccgagttgaggcatcagttacagagccggcagcagctcaggtcgaggcggcacccaccgaccccacccgaaccgtctgggggacttccaagagggccaccagagccacccgatcggcttagttgtgatggcagcagggtgcacctgctctacaaatag

SEQ ID NO: 209986 - DNA, 2535 bp, Artificial Sequence
  derived and/or modified sequence
atggggccaggcgctcctttcgcacgggtagggtggccgctgcccttgttagtggtgatggcggcaggcgtggccccagtctgggcctcccactctcctcacttgcccaggccacactccagagtgccccctcacccctccagcgaacggagggcagtgtatatcggagcattattccctatgagcggaggttggcccggagggcaggcctgtcaaccagccgtggagatggctctcgaagatgtgaattctcgcagggatatcctgcccgactatgagctcaaactgattcaccacgatagcaagtgcgatccgggtcaggctaccaagtatctctacgagcttctgtataatgaccccataaagatcatattgatgccaggatgttcgtctgtgagtacactggtcgccgaggcagccaggatgtggaatctgattgtgctgtcctacgggtcatcctcaccagccttgagtaaccgccagcgcttcccaacgttttttagaactcatccttccgcaactctgcacaaccccacccgagtcaagctgtttgagaagtggggctggaaaaagatcgcgaccattcagcagacaacagaggtcttcacatctaccctagatgatctcgaggaaagggtgaaggaagcaggaattgaaatcaccttcaggcagagttttttttcggaccccgcagtgcccgtaaagaacttgaagcggcaggatgcccgaattatcgtgggcctattttacgagaccgaagccaggaaggtgttctgcgaggtgtacaaagaaaggttatttggcaaaaaatatgtgtggttcttgattggatggtatgccgataattggtttaagatatacgacccctctattaactgcactgtggatgagatgactgaagccgtagaaggccacatcaccacagagatagtgatgctgaaccccgctaatacacgctcaatctccaatatgacctcgcaggagttcgtggaaaaactgacgaaacggcttaagcgacatcctgaggagactggcggattccaagaagcaccactggcttacgatgctatttgggccttggccctggccctaaacaagacctcagggggagggggacggtccggagtcagactggaagacttcaactataataaccagacaatcaccgaccagatatatcgcgctatgaatagcagcagctttgaaggagttagtggacacgtggtgtttgatgccagtggctctagaatggcatggacgcttatagagcagctccaaggtgggagctataagaagatcggttactacgactcaacaaaggatgacctaagctggagcaagacagacaaatggattggtggaagccccccagccgatcaaaccctggtaataaaaacgtttcgattcctttcacagaaattatttataagcgtgagcgtgttatcgagtctgggcattgtcctagccgtcgtgtgcctctcgttcaatatatataattcccacgtccggtacatccagaacagccagccaaacctgaataatctcacagctgtggggtgctccctggcattggccgcagtttttcccctgggcctggacggataccacatcgggaggaaccagtttcctttcgtgtgtcaggcccgtctctggctcttggggctgggattttctctggggtacggcagcatgtttaccaagatatggtgggttcacaccgtattcacaaagaaagaggaaaagaaggaatggaggaagacactagagccttggaaattatacgctaccgtcggactgctcgttgggatggatgtgctgaccctagctatctggcagatcgtcgaccccctgcataggaccatagagacctttgctaaagaggaaccaaaagaggatatagacgtgtctatcctaccacaactggagcattgcagctcccggaagatgaacacgtggctgggcatattctacggctataaggggctactcttgctccttggaatatttctcgcctatgaaactaaaagcgtgagcacggagaagatcaatgaccaccgcgctgtgggcatggctatctacaacgtggccgtgctgtgcttgattaccgccccagtgaccatgatcctgtcttctcagcaggacgccgctttcgcctttgcctcgttggccatcgtgttcagctcttatataactttagtcgttctgtttgtcccgaaaatgaggagactcatcactagaggcgagtggcagagtgaagcgcaggacacaatgaagacaggcagctccacaaacaataacgaagaagaaaagtctcgattgctggagaaggagaaccgggagctggagaaaataatagccgagaaggaagaaagagtgtcagaactgagacatcaactacagagcagacaacagctccgctcccggagacatccacctacgccacccgaaccgtccggcggtttgcccagaggacctccggaacccccagatagacttagttgcgatggcagtcgagtgcacctgctgtataaatag

SEQ ID NO: 209987 - DNA, 2535 bp, Artificial Sequence
  derived and/or modified sequence
atgggacctggcgctcctttcgccagagtcgggtggcctcttccactactcgttgtgatggcagctggtgttgcccctgtgtgggcgtcacacagcccacacctgccccgacctcacagtcgagtccctcctcatccttcctcggagcgaagagccgtgtatattggggctctcttccctatgtcaggcggatggccgggagggcaagcctgtcagcctgccgtggagatggccttggaggacgtgaattcacgcagagacattctgccggattacgaattgaaactaatacaccacgactccaagtgcgatccaggccaggccacaaagtatttatatgagctgttgtacaatgacccgataaagatcatattgatgccgggatgcagcagcgttagtactctggtggcggaggcggcacgaatgtggaacctcatcgtgctaagttatgggtcgagctcccctgccttgagcaatcgccaacgatttccaaccttcttcaggacgcacccaagcgccactttacacaatcctacaagggtgaaactttttgaaaaatggggatggaaaaaaatcgccaccatccagcagacaactgaggtgttcacttctactctggatgacctggaagagcgtgttaaggaagccggaattgaaataactttcaggcagagcttctttagcgatccagcagtgcctgtaaagaatctcaagcgtcaagacgcaagaattatagtgggactattctatgagactgaagctagaaaggtgttttgtgaggtgtataaggagcgattgttcgggaagaagtacgtatggtttttaattgggtggtatgctgacaactggttcaagatctacgatcctagtattaactgcacagttgatgagatgactgaagctgtagagggacatatcactacagagatcgtgatgttaaaccccgctaatacacggtccatctctaacatgacgtcccaagagttcgtggaaaagctaacaaagagactgaaacgacacccagaagaaaccggtggcttccaggaggcgccactggcctacgatgcaatttgggcactggcactcgccctcaacaaaacctccggcggtggcggtaggtccggcgtgcgcctggaggacttcaactataataaccagacgatcaccgaccaaatctacagggctatgaatagctcctccttcgagggcgtaagtggacacgtcgtgtttgacgcaagtggttcccggatggcatggacactgattgagcaactccaggggggatcatacaagaagattggatattatgactcaaccaaagatgatctctcatggagcaagactgataaatggatcgggggttctccccctgcagatcagactctggttataaagacgtttagatttctgagccagaaactgtttatatcagtgagcgtgttgagcagccttgggattgtactcgccgtcgtgtgcttgtcttttaatatatacaatagtcacgtgcgctatatccaaaacagccagcccaaccttaacaacctcactgcggtaggctgttctcttgccctggcagcggtttttccgctggggttggacggctaccacattggacgaaatcagttccctttcgtctgccaggcaaggctgtggcttcttggtctggggttctccctgggctacggctccatgtttacgaagatctggtgggtgcataccgtcttcactaagaaggaagaaaaaaaggaatggagaaagacactggagccctggaaactgtatgccacggtaggactccttgtcgggatggatgtgctgaccttggccatctggcagatcgtcgaccctctacatagaactattgaaacgttcgctaaggaagaacccaaggaagacattgacgtgagtatcctgccccaattggaacactgcagctccagaaagatgaacacctggcttggcattttttatggatataaaggcctcttgttactgctggggatattcctggcatacgaaacaaaaagcgtttccaccgaaaagattaatgatcacagagcggtcggaatggccatctacaatgtggccgtgctttgcctaattacagctcccgtgaccatgattctcagctcccaacaggatgcagcctttgcttttgctagcctagcaattgttttcagctcatatattactctggtcgtactcttcgtgcccaagatgcgtcggctgataacccgcggagagtggcagtccgaggcccaggacaccatgaaaacaggatctagtaccaacaataacgaggaggagaagtcgaggttactcgagaaagaaaaccgcgaattggagaagataattgccgagaaggaggaacgggtaagcgagctgcggcatcagctgcagtctcggcagcaactgcgctccaggcggcatccccctacccccccagagccttccggcggtttgcctaggggaccccctgaaccccctgatagactgagttgcgacgggagcagggtgcacctgctgtataaatag

SEQ ID NO: 209988 - DNA, 2535 bp, Artificial Sequence
  derived and/or modified sequence
atggggccaggggctcccttcgctagggtcggctggccactgcccctgctggttgttatggcagcgggagtggcccctgtgtgggctagccatagtccacatcttccaagacctcatagccgagtacctccgcatccgagctctgaacggagagctgtatatataggggcactgttcccaatgtccgggggatggccaggtgggcaagcctgtcagccggcagtagaaatggcactggaggacgtaaattctcggagggacatactgcctgactacgaactaaagctgattcaccatgacagtaaatgcgaccctggtcaggcgactaaatatttgtacgagttgttgtacaacgaccccattaagatcattttaatgcctgggtgcagttcagtgtctaccctggtcgcagaagccgcacggatgtggaacctgattgtgctgtcatacggatcttcctctcccgctctgtcaaatcgccaaaggtttccaacattttttcgcacacatccttcggcaacgttgcacaatccaactcgtgtgaagctgttcgaaaaatggggatggaagaaaatagctactatccaacagacaactgaggtgttcaccagtactctagatgatttggaggagcgtgtaaaagaggctgggatcgaaataacctttaggcagtcctttttcagtgatcctgccgtccctgttaaaaacctcaaaagacaagacgctagaataatcgttggactgttctatgagactgaagcgagaaaggtattctgtgaggtctataaggaacggctgtttgggaaaaaatatgtttggtttctaattgggtggtatgccgacaattggtttaaaatctacgacccatctattaactgtacagtagacgagatgaccgaggcagtggagggacacattactactgagattgtaatgctgaatcccgcaaacacgaggagtatctctaatatgacctctcaggaatttgtggagaagctgaccaaacggctaaagagacaccctgaggagactggcggtttccaagaggccccattggcgtatgacgcaatctgggccctcgcacttgctctcaacaaaacctctgggggaggcggtcgatctggggtccgactggaggattttaactacaataaccaaacgatcactgaccaaatctatcgtgcgatgaactcgagctcctttgaaggggtatcaggccatgtagtcttcgatgctagcggaagccgtatggcatggacgcttattgagcaattgcaagggggatcctataaaaaaattgggtactatgacagtactaaggacgacctttcttggtcaaagacggacaaatggatcggcggaagcccacctgcagaccagactctcgtcataaagaccttccgcttcctgtcccagaaactgttcataagcgtgagcgtgttgagcagcctggggattgtgctggcagtggtgtgtctgtcctttaacatttataattcgcacgtgcgttacatccagaactcgcaaccgaaccttaacaatttaactgcagtgggctgcagccttgcactcgccgctgtatttcctctgggtttggacggataccatattggacgaaaccagttcccttttgtctgccaggccagactgtggctccttggactggggttctcgctcggttatggctccatgttcaccaagatatggtgggtgcacactgtctttacgaagaaagaagaaaagaaggaatggcgcaaaacccttgaaccatggaaactgtatgcaactgtggggctccttgtcgggatggacgtgcttacgttagccatctggcagatagtggaccctctgcacaggactatcgagacattcgccaaggaggagccaaaagaggatatcgacgtttccattcttccccagctggagcattgcagctcccgaaagatgaacacttggctggggattttttacggatacaaaggcttactgctgctcctgggaatttttctcgcgtatgagacaaaaagcgttagtacagagaaaattaatgatcaccgtgccgtgggcatggcgatctacaatgtggccgtactatgcttgataaccgcacctgtcacaatgatcctgtcgagccagcaggacgcagcctttgcctttgcttcactggccatcgttttttcctcctacataacgctggttgtgttgttcgtgccgaaaatgagaaggctcatcacacgcggagagtggcagagcgaagcccaggacactatgaaaaccggctcaagtaccaacaacaacgaggaggagaaatcccgcctattagagaaagagaatcgcgagctcgaaaagataattgccgagaaagaagagcgtgtatccgagctacggcaccagctgcagagtaggcagcagctgcggtcacggaggcatcctcctaccccacctgagccatctggcggtctgcctagaggaccacccgagcctccagacagactgtcttgtgacggatcgagggtacatctcttatacaagtag

SEQ ID NO: 209989 - DNA, 2535 bp, Artificial Sequence
  derived and/or modified sequence
atggggccaggcgcaccattcgccagggtaggatggccactccctttattagtcgtaatggcggcaggtgtggcacctgtgtgggccagtcattctccccacttgcccaggccccacagtcgtgttcctccgcatccttccagcgaaaggcgggctgtgtacatcggagccctgtttcccatgagcggcggttggcctggtggacaggcttgccagcccgcagtcgagatggccctggaggatgtgaacagccggagggatatcctccctgattatgagctgaaactcattcatcatgactcaaagtgtgaccccggacaggccacaaagtatctctatgagctattatacaacgatccaatcaaaatcatactaatgcctggatgctcgagcgtctccactctggtggctgaggcggctaggatgtggaacctgattgtgctgtcatacgggagctcttctcctgccctttctaatcggcaaaggtttccgacattttttcgcacccatcctagcgccactctccacaacccaacacgggtcaagctatttgagaaatggggctggaagaagatagctaccatccagcagacaacggaagtgtttacctccactcttgacgacctggaggaaagagtcaaggaggccggaatcgaaatcaccttcaggcagagcttcttctctgacccagcagtgccagtgaagaatcttaagcggcaggatgccagaatcatcgtcgggctgttctacgagaccgaggccaggaaagtgttctgtgaagtttacaaggaaaggctgtttggtaagaaatacgtatggttcttaatcggttggtatgccgataactggttcaagatttacgatccctccattaattgtacagtggatgaaatgacagaggctgtggagggccacattactactgagatagttatgctaaatcctgctaatacacggtccatatcaaacatgacgagccaggagttcgtcgagaaactgacaaagcgcctcaagcggcatcccgaagagactgggggattccaagaggcacctctggcttatgacgccatctgggctcttgcactcgctcttaacaagacatctggaggcggtggtcgatctggcgttcgactcgaagacttcaactataacaaccagacaattacagatcagatctatagggccatgaacagcagctcatttgaaggcgtttccggacacgtagtgttcgatgcatctggctctaggatggcctggacactgatcgaacagttgcagggagggtcctataagaagatcgggtactacgacagcacgaaagacgacttatcctggagtaaaactgataagtggatcggagggtccccaccagcagaccagaccttagtcatcaagacgttcagatttctgagtcagaaactgtttatttccgtgtctgtactttcatcgctgggtatagtgctggcagtagtgtgcctgtcattcaacatttataattcccatgtccgctacatacaaaatagccagccaaacctgaacaatctaactgccgtcggctgcagcctggccttggcagctgttttccctttaggactcgatggctatcacattggtcgcaaccagtttccatttgtgtgccaagcacgactttggcttttggggctagggttctctttgggatatggttcaatgttcaccaagatttggtgggtgcataccgtgttcactaaaaaggaggagaaaaaagagtggcggaagaccctggagccctggaagctttatgcgaccgtgggcctgctcgtggggatggacgtccttactctggctatttggcaaatcgtagaccctctgcatcgaacaatcgaaaccttcgccaaagaggagcccaaagaggatatcgatgtgtctatccttcctcaactcgagcattgctcctcaaggaagatgaacacctggctggggatcttttatgggtacaaaggcttattgttgctgctgggtatttttcttgcatatgagacaaagtcagtgagcactgaaaaaatcaatgaccaccgggcagtcggcatggccatatataacgtcgctgttctgtgccttatcactgcccctgtgacaatgattctttcttcccagcaggatgccgctttcgcctttgcatcattggcaatcgtttttagctcttatattaccctagtggtcctgtttgtgcctaaaatgcgccgactgataactcgtggagaatggcagtccgaggcacaagataccatgaaaaccggatcatcaaccaataacaatgaagaggaaaagtcccgcttgttagagaaggaaaaccgagaattagagaagattatcgccgagaaggaggaacgcgtgagtgaactcaggcatcagctgcaaagtagacaacagcttagatctaggagacatccgccaactccgcctgaaccttcagggggattacccagaggtccgcctgagccgccagatcgcctgtcctgtgacggatcaagagtacacttactttacaaatag

SEQ ID NO: 209990 - DNA, 4065 bp, Artificial Sequence
  derived and/or modified sequence
agtcagtccgcgaggagagtccgcggtggcggcgacggtggcgagagccgcgggggccgtaggaagccaaccttccctgcttctccggggccctcgccccctcctccccacaaaatcagggatggaggcgcctccccggcaccctcttagcagccctccccaggaaaagtgtcccccctgagctcctaacgctccccaacagctacccctgccccccacgccatggggcccggggccccttttgcccgggtggggtggccactgccgcttctggttgtgatggcggcaggggtggctccggtgtgggcctcccactccccccatctcccgcggcctcactcgcgggtccccccgcacccctcctcagaacggcgcgcagtgtacatcggggcactgtttcccatgagcgggggctggccagggggccaggcctgccagcccgcggtggagatggcgctggaggacgtgaatagccgcagggacatcctgccggactatgagctcaagctcatccaccacgacagcaagtgtgatccaggccaagccaccaagtacctatatgagctgctctacaacgaccctatcaagatcatccttatgcctggctgcagctctgtctccacgctggtggctgaggctgctaggatgtggaacctcattgtgctttcctatggctccagctcaccagccctgtcaaaccggcagcgtttccccactttcttccgaacgcacccatcagccacactccacaaccctacccgcgtgaaactctttgaaaagtggggctggaagaagattgctaccatccagcagaccactgaggtcttcacttcgactctggacgacctggaggaacgagtgaaggaggctggaattgagattactttccgccagagtttcttctcagatccagctgtgcccgtcaaaaacctgaagcgccaggatgcccgaatcatcgtgggacttttctatgagactgaagcccggaaagttttttgtgaggtgtacaaggagcgtctctttgggaagaagtacgtctggttcctcattgggtggtatgctgacaattggttcaagatctacgacccttctatcaactgcacagtggatgagatgactgaggcggtggagggccacatcacaactgagattgtcatgctgaatcctgccaatacccgcagcatttccaacatgacatcccaggaatttgtggagaaactaaccaagcgactgaaaagacaccctgaggagacaggaggcttccaggaggcaccgctggcctatgatgccatctgggccttggcactggccctgaacaagacatctggaggaggcggccgttctggtgtgcgcctggaggacttcaactacaacaaccagaccattaccgaccaaatctaccgggcaatgaactcttcgtcctttgagggtgtctctggccatgtggtgtttgatgccagcggctctcggatggcatggacgcttatcgagcagcttcagggtggcagctacaagaagattggctactatgacagcaccaaggatgatctttcctggtccaaaacagataaatggattggagggtcccccccagctgaccagaccctggtcatcaagacattccgcttcctgtcacagaaactctttatctccgtctcagttctctccagcctgggcattgtcctagctgttgtctgtctgtcctttaacatctacaactcacatgtccgttatatccagaactcacagcccaacctgaacaacctgactgctgtgggctgctcactggctttagctgctgtcttccccctggggctcgatggttaccacattgggaggaaccagtttcctttcgtctgccaggcccgcctctggctcctgggcctgggctttagtctgggctacggttccatgttcaccaagatttggtgggtccacacggtcttcacaaagaaggaagaaaagaaggagtggaggaagactctggaaccctggaagctgtatgccacagtgggcctgctggtgggcatggatgtcctcactctcgccatctggcagatcgtggaccctctgcaccggaccattgagacatttgccaaggaggaacctaaggaagatattgacgtctctattctgccccagctggagcattgcagctccaggaagatgaatacatggcttggcattttctatggttacaaggggctgctgctgctgctgggaatcttccttgcttatgagaccaagagtgtgtccactgagaagatcaatgatcaccgggctgtgggcatggctatctacaatgtggcagtcctgtgcctcatcactgctcctgtcaccatgattctgtccagccagcaggatgcagcctttgcctttgcctctcttgccatagttttctcctcctatatcactcttgttgtgctctttgtgcccaagatgcgcaggctgatcacccgaggggaatggcagtcggaggcgcaggacaccatgaagacagggtcatcgaccaacaacaacgaggaggagaagtcccggctgttggagaaggagaaccgtgaactggaaaagatcattgctgagaaagaggagcgtgtctctgaactgcgccatcaactccagtctcggcagcagctccgctcccggcgccacccaccgacacccccagaaccctctgggggcctgcccaggggaccccctgagccccccgaccggcttagctgtgatgggagtcgagtgcatttgctttataagtgagggtagggtgagggaggacaggccagtagggggagggaaagggagaggggaagggcaggggactcaggaagcagggggtccccatccccagctgggaagaacatgctatccaatctcatctcttgtaaatacatgtccccctgtgagttctgggctgatttgggtctctcatacctctgggaaacagacctttttctctcttactgcttcatgtaattttgtatcacctcttcacaatttagttcgtacctggcttgaagctgctcactgctcacacgctgcctcctcagcagcctcactgcatctttctcttcccatgcaacaccctcttctagttaccacggcaacccctgcagctcctctgcctttgtgctctgttcctgtccagcaggggtctcccaacaagtgctctttccaccccaaaggggcctctccttttctccactgtcataatctctttccatcttacttgcccttctatactttctcacatgtggctccccctgaattttgcttcctttgggagctcattcttttcgccaaggctcacatgctccttgcctctgctctgtgcactcacgctcagcacacatgcatcctcccctctcctgcgtgtgcccactgaacatgctcatgtgtacacacgcttttcccgtatgctttcttcatgttcagtcacatgtgctctcgggtgccctgcattcacagctacgtgtgcccctctcatggtcatgggtctgcccttgagcgtgtttgggtaggcatgtgcaatttgtctagcatgctgagtcatgtctttcctatttgcacacgtccatgtttatccatgtactttccctgtgtaccctccatgtaccttgtgtactttcttcccttaaatcatggtattcttctgacagagccatatgtaccctaccctgcacattgttatgcacttttccccaattcatgtttggtggggccatccacaccctctccttgtcacagaatctccatttctgctcagattccccccatctccattgcattcatgtactaccctcagtctacactcacaatcatcttctcccaagactgctcccttttgttttgtgtttttttgaggggaattaaggaaaaataagtgggggcaggtttggagagctgcttccagtggatagttgatgagaatcctgaccaaaggaaggcacccttgactgttgggatagacagatggacctatggggtgggaggtggtgtccctttcacactgtggtgtctcttggggaaggatctccccgaatctcaataaaccagtgaacagtgtga

SEQ ID NO: 209991 - DNA, 3523 bp, Artificial Sequence
  derived and/or modified sequence
ctcctcctcctcccctccgtcggtcagtcagtccgcgaggagagtccgcggtggcggcgacggtggcgagagccgcgggggccgtaggaagccaaccttccctgcttctccggggccctcgccccctcctccccacaaaatcagggatggaggcgcctccccggcaccctcttagcagccctccccaggaaaagtgtcccccctgagctcctaacgctccccaacagctacccctgccccccacgccatggggcccggggccccttttgcccgggtggggtggccactgccgcttctggttgtgatggcggcaggggtggctccggtgtgggcctcccactccccccatctcccgcggcctcactcgcgggtccccccgcacccctcctcagaacggcgcgcagtgtacatcggggcactgtttcccatgagcgggggctggccagggggccaggcctgccagcccgcggtggagatggcgctggaggacgtgaatagccgcagggacatcctgccggactatgagctcaagctcatccaccacgacagcaagtgtgatccaggccaagccaccaagtacctatatgagctgctctacaacgaccctatcaagatcatccttatgcctggctgcagctctgtctccacgctggtggctgaggctgctaggatgtggaacctcattgtgctttcctatggctccagctcaccagccctgtcaaaccggcagcgtttccccactttcttccgaacgcacccatcagccacactccacaaccctacccgcgtgaaactctttgaaaagtggggctggaagaagattgctaccatccagcagaccactgaggtcttcacttcgactctggacgacctggaggaacgagtgaaggaggctggaattgagattactttccgccagagtttcttctcagatccagctgtgcccgtcaaaaacctgaagcgccaggatgcccgaatcatcgtgggacttttctatgagactgaagcccggaaagttttttgtgaggtgtacaaggagcgtctctttgggaagaagtacgtctggttcctcattgggtggtatgctgacaattggttcaagatctacgacccttctatcaactgcacagtggatgagatgactgaggcggtggagggccacatcacaactgagattgtcatgctgaatcctgccaatacccgcagcatttccaacatgacatcccaggaatttgtggagaaactaaccaagcgactgaaaagacaccctgaggagacaggaggcttccaggaggcaccgctggcctatgatgccatctgggccttggcactggccctgaacaagacatctggaggaggcggccgttctggtgtgcgcctggaggacttcaactacaacaaccagaccattaccgaccaaatctaccgggcaatgaactcttcgtcctttgagggtgtctctggccatgtggtgtttgatgccagcggctctcggatggcatggacgcttatcgagcagcttcagggtggcagctacaagaagattggctactatgacagcaccaaggatgatctttcctggtccaaaacagataaatggattggagggtcccccccagctgaccagaccctggtcatcaagacattccgcttcctgtcacagaaactctttatctccgtctcagttctctccagcctgggcattgtcctagctgttgtctgtctgtcctttaacatctacaactcacatgtccgttatatccagaactcacagcccaacctgaacaacctgactgctgtgggctgctcactggctttagctgctgtcttccccctggggctcgatggttaccacattgggaggaaccagtttcctttcgtctgccaggcccgcctctggctcctgggcctgggctttagtctgggctacggttccatgttcaccaagatttggtgggtccacacggtcttcacaaagaaggaagaaaagaaggagtggaggaagactctggaaccctggaagctgtatgccacagtgggcctgctggtgggcatggatgtcctcactctcgccatctggcagatcgtggaccctctgcaccggaccattgagacatttgccaaggaggaacctaaggaagatattgacgtctctattctgccccagctggagcattgcagctccaggaagatgaatacatggcttggcattttctatggttacaaggggctgctgctgctgctgggaatcttccttgcttatgagaccaagagtgtgtccactgagaagatcaatgatcaccgggctgtgggcatggctatctacaatgtggcagtcctgtgcctcatcactgctcctgtcaccatgattctgtccagccagcaggatgcagcctttgcctttgcctctcttgccatagttttctcctcctatatcactcttgttgtgctctttgtgcccaagatgcgcaggctgatcacccgaggggaatggcagtcggaggcgcaggacaccatgaagacagggtcatcgaccaacaacaacgaggaggagaagtcccggctgttggagaaggagaaccgtgaactggaaaagatcattgctgagaaagaggagcgtgtctctgaactgcgccatcaactccagtctcggcagcagctccgctcccggcgccacccaccgacacccccagaaccctctgggggcctgcccaggggaccccctgagccccccgaccggcttagctgtgatgggagtcgagtgcatttgctttataagtgagggtgcatgtccgttccgaggaatgggatttaatgacctttgatgccaacccatatgacagcgtgaaaaaaatcaaagaacatgtccggtctaagaccaaggttcctgtgcaggaccaggttcttttgctgggctccaagatcttaaagccacggagaagcctctcatcttatggcattgacaaagagaagaccatccaccttaccctgaaagtggtgaagcccagtgatgaggagctgcccttgtttcttgtggagtcaggtgatgaggcaaagaggcacctcctccaggtgcgaaggtccagctcagtggcacaagtgaaagcaatgatcgagactaagacgggtataatccctgagacccagattgtgacttgcaatggaaagagactggaagatgggaagatgatggcagattacggcatcagaaagggcaacttactcttcctggcatgttattgtattggagggtgaccaccctgggcatggggtgttggcaggggtcaaaaagcttatttcttttaatctcttactcaacgaacacatcttctgatgatttcccaaaattaatgagaatgagatgagtagagtaagatttgggtgggatgggtaggatgaagtatattgcccaactctatgtttctttgattctaacacaattaattaagtgacatgatttttactaatgtattactgagactagtaaataaatttttaaggcaaaatagagcattcaaagcca

SEQ ID NO: 209992 - DNA, 2535 bp, Artificial Sequence
  derived and/or modified sequence
atgggccctggcgctccctttgccagagtcggctggcctcttccgctcttggtagttatggccgctggcgttgctccagtctgggcatcccatagcccacacttgccaaggccccatagcagggtccctccgcacccttcttccgagagacgtgcagtctatataggggccctgttcccaatgtccggaggctggcccggcggacaggcttgtcaacccgccgttgagatggccctagaagacgtgaacagcaggagagacattctgccagattacgagctgaaattgattcaccatgatagcaagtgcgaccctggccaagctacgaagtacctgtacgaactcctctataacgacccgatcaaaatcatcctcatgcctggctgttccagtgtctccactctggtggctgaggctgccagaatgtggaatctaatcgttctgagctacggctcctcctccccagccctgagtaatcgccaacgttttcccactttcttcagaacacatccctccgcaactctgcataaccctactcgggtgaagctatttgagaaatggggttggaagaagatcgcaaccatacagcaaacaactgaagtctttacaagcaccttggacgacctggaagagcgcgtgaaggaggccggcatagagatcacattcaggcagagcttcttctctgacccagcagtccccgtgaaaaacctgaagcgccaggacgcacgaatcattgtcggcttgttctatgagaccgaagcacgcaaagtgttctgcgaagtttataaagagagactgttcggcaagaagtacgtttggttcctgattggctggtacgccgacaactggtttaagatttatgacccctcaattaattgcacagtagacgagatgaccgaggccgtagagggacacataactacagagattgtaatgttgaatccggcaaatacaagaagtataagtaatatgacctcacaagaatttgtcgaaaaacttacaaaaagactgaaaagacacccagaggaaaccgggggctttcaggaggcaccactcgcttacgacgccatctgggccctcgctctcgccttgaataagaccagtggcggcggcggacgttcaggtgtgaggcttgaggattttaattataacaaccaaacgattacagaccaaatctatcgggcaatgaatagctcatcctttgaaggtgttagcgggcacgtggtcttcgacgctagtgggtctcgcatggcctggacactcatagaacagttacagggtgggagctacaaaaagatcggatactacgattcgactaaagacgacctatcgtggtcaaaaaccgacaaatggattggtgggtcccccccagcagaccagaccctggttatcaagacctttaggttcctcagtcagaagctcttcatctcagtcagcgttttgtccagtctcggaatcgtcctggccgtggtttgtttgagctttaatatctataacagccatgtccgatatattcagaactctcaacctaacctaaataaccttacagctgtcgggtgtagcctggcactggctgcggtgttcccactgggactcgatggctaccatatcggacgcaatcagttccctttcgtttgccaagctcgcctctggttactcggattgggcttctccctgggttatggttccatgttcaccaaaatttggtgggtacacaccgtattcacgaaaaaagaggagaagaaagaatggaggaaaacattagaaccctggaaactttacgctacggtaggactgctcgtgggaatggatgtgctcacactggcgatctggcagatcgtggaccccctgcaccggaccatcgagactttcgccaaagaagaacctaaggaggacatcgatgtatcaatcctccctcagttagagcactgttcttctcgcaaaatgaacacctggttaggcatcttttacggatacaaaggtctcctgctgcttctgggcatcttcttggcttacgagactaagagcgtttcaactgagaagatcaatgaccatcgtgccgtcgggatggctatctacaacgtcgcagtcctttgcttaattaccgctcccgttactatgatcttgagtagccagcaagatgctgctttcgccttcgcctctctggctattgttttctcttcctatataacccttgtcgtactgtttgtccccaagatgcgacgcctcattaccagaggagaatggcaatccgaagctcaggataccatgaaaacaggttcatctactaacaacaacgaagaggaaaagtctcgcctgctcgagaaggagaaccgcgaattggagaagatcatcgcagagaaagaggaacgggtcagtgagctgaggcaccagctgcaatctcggcaacagctgcgctcgcgcaggcatccaccaacccccccagaaccatctggtggcttgcccaggggcccccccgagcccccagatcgcctctcgtgcgacggcagccgtgttcacttgctgtataagtag

SEQ ID NO: 209993 - DNA, 2535 bp, Artificial Sequence
  derived and/or modified sequence
atgggcccgggagccccttttgctcgcgtcggttggccactgccattactggtggtgatggcagcaggagtagcgccagtctgggcctctcactcaccacacctaccgagacctcactcaagagtgccccctcacccgtcttccgagaggagggccgtctatatcggcgccctattccctatgagcggggggtggcctggtggtcaggcctgccagccggcggtagagatggccctcgaagatgttaattcacgacgtgatatccttcccgattacgagcttaagttaatacaccacgatagtaaatgcgatcccggccaagcaactaagtatctgtatgagctgttatacaatgaccccattaagatcattctgatgcccgggtgcagctccgtgtccacgcttgtggccgaagccgctagaatgtggaacctcatcgttctgagctacggtagcagctcccccgccctgtctaacaggcagagatttccgaccttcttcagaacccacccttctgctacgttgcacaatcctaccagagtcaaactgttcgagaagtgggggtggaagaaaattgctactatccaacagacgaccgaagtgtttactagtacactcgacgacctggaggaacgcgttaaggaagccggaattgagataactttcagacagtctttctttagcgaccctgccgtgcccgtcaagaatcttaaaagacaggatgctcgtattatcgtgggcctgttttacgagacggaggcacgcaaagtcttttgtgaagtgtataaggagaggctctttggcaaaaaatatgtctggtttcttattggctggtatgctgataattggtttaaaatttacgacccctcaattaactgcaccgtagatgaaatgactgaagcagtggaagggcacataaccaccgagatcgtgatgctgaatcccgcaaacacacggtcgattagcaatatgactagccaggaattcgtggaaaagctgaccaagcgcttgaagcgtcaccctgaagaaacaggcgggttccaagaggcccccttagcatacgacgccatctgggccctggccctggctcttaacaagacctccggaggagggggacgctcaggggtgcggttagaggactttaactataacaatcagacaataaccgatcaaatctatcgagcaatgaactcctcttccttcgagggagtctccggccatgtcgtgtttgatgccagtggatcgcgcatggcatggactttaatagagcagctacagggcggaagttataagaaaatcggctattacgattcaaccaaggacgaccttagctggtctaaaacagataaatggatcggcggcagcccaccagcggaccagactcttgtaataaagacttttcggttcttaagtcagaagctttttatttctgtgtcagtgctgagctctctcggaatcgttctcgctgttgtctgcctttcattcaatatttacaactcacacgtccggtacattcagaactctcagcctaatcttaacaacttgacagcagtgggatgctccctggccttggccgctgtgtttcctctggggcttgacggatatcacatcggcagaaatcagtttccttttgtgtgccaagccagactctggctcctcggacttgggttttccctgggatatggatctatgtttacaaagatttggtgggttcatacagtgttcacaaagaaggaggaaaagaaggaatggcgaaaaaccctagaaccatggaagttatatgccaccgtgggactgctagtgggcatggacgtgctcacactggcgatttggcaaattgtggacccattacacagaactattgagacattcgcaaaggaagagcccaaggaggatattgacgtgagtatccttccccagcttgagcattgtagcagcagaaagatgaacacttggttgggcatcttctacgggtacaaaggactgctgctcctgcttggcatcttcctggcttatgaaactaaatcagttagcaccgagaagatcaatgatcatagagcagtgggcatggccatttataacgtcgccgttctttgtctgataacggcacctgtgaccatgatattaagcagccaacaagacgccgccttcgctttcgcatcattagccatagtcttcagttcttatatcacattggtggtgctctttgtgcctaaaatgagacggcttatcacaaggggcgagtggcagtccgaggcgcaggatacaatgaagactggctcttcgactaataacaacgaggaagagaagtcccggctgcttgagaaagaaaacagagaactggagaaaattattgcagaaaaggaggaaagagtgagcgaattacggcatcagttacaatctcggcagcagcttcgcagtcgcaggcaccctcctacccctcctgagccttccggcggactgccgcgcggtcctcctgagcctccagaccgtttaagttgtgacgggtcacgcgtacacctgttgtataaatag

SEQ ID NO: 209994 - DNA, 2535 bp, Artificial Sequence
  derived and/or modified sequence
atgggtccaggcgcaccttttgcaagagtgggatggccactgccactcctcgttgtcatggcagctggcgttgcacccgtatgggcttcacattctcctcacctgcctaggccacatagtcgagttcctccccacccttcttcagagcgaagagctgtttatatcggtgcactctttccgatgagtggcggctggcctggggggcaggcctgccagcccgccgtcgagatggctttagaggacgttaattcaagaagagatattctgcccgactacgagctgaaacttatccatcacgatagtaagtgcgatccgggccaggcgacaaagtacctctatgaactgctctacaatgaccctattaagattattctgatgcctgggtgcagtagtgtgtctactctggtggctgaggcagcacgcatgtggaaccttatagttctcagctatggaagttcctcccccgccctcagcaatcggcagagatttcccacattctttaggacacaccccagcgctacactccataatcctacacgggttaagctatttgaaaagtggggctggaaaaaaatagcgacaatccaacagaccactgaggtattcacatccactctagatgaccttgaagagcgagtaaaagaggccggcattgaaattacgtttaggcagtcttttttttctgatcccgcggtgccggtgaaaaacctgaaaaggcaggatgcccgaattatcgtgggactcttttatgaaaccgaagcccggaaagtgttctgcgaggtttacaaggagagactgttcggaaaaaaatacgtatggttccttatcggatggtatgccgacaattggtttaagatatacgacccgtcgatcaattgcactgtggacgagatgactgaagcagtggagggccacattaccacggagatcgttatgctcaatcctgcgaacacgcgatcaatctcaaacatgacatcccaagaattcgtggaaaagttgaccaagagacttaagcgccatcccgaggagaccggtggtttccaagaagcacctctggcctatgacgctatctgggctctcgccctggctctcaacaagacgtctgggggaggaggtcgcagtggcgtgcgcctcgaagattttaattataacaaccagacaattacagaccagatctaccgagctatgaattcctcttccttcgaaggcgtgagtggccacgtggtgtttgatgcgtcaggaagtcgtatggcatggaccctgatcgaacagctccagggggggagctacaagaagatcggatactatgactcaactaaggacgacctgagctggtcaaagacagataagtggattggagggagcccacctgccgaccagactctggttatcaagacatttaggtttctcagccagaaactcttcatctccgtctcagtgctttcttctcttggcatcgtgctcgccgtggtgtgcctctccttcaatatttacaactcccatgttcgatacattcaaaacagccagccaaatctgaataaccttaccgcggtggggtgttctctggccttagccgccgtgtttccactgggccttgacggataccatattggcagaaaccagtttccctttgtttgccaggctcgtctatggctactgggtctcggcttctccctgggttatggctcaatgtttaccaaaatttggtgggtacatacagtttttacaaaaaaggaagaaaagaaggagtggagaaaaacactggagccttggaaactgtacgccacagtgggcctgttggtgggcatggacgtgctcactctcgccatctggcaaattgtggatcctcttcataggacaatagaaaccttcgcgaaggaggagcccaaggaggacatcgatgtaagcattctcccacagctggagcattgttcaagtcgcaaaatgaatacgtggctggggatattctacggctacaagggcctgttattgctcctgggtattttcctcgcatacgaaacaaagtccgtatccaccgaaaaaatcaatgatcatcgagcggtgggtatggctatttacaacgtggctgttctctgtctgatcacagctcctgtcaccatgatcctgagctcccagcaggatgccgcgtttgccttcgctagtttggcaatagtcttctcatcatatattaccctggtagtgctgttcgtgcctaaaatgcgccggctgatcacgcgcggtgaatggcagagcgaagcacaagacactatgaagacaggttcttccacaaacaacaatgaggaggaaaaaagcaggctgttagagaaagagaacagagagttggagaaaattatcgcagagaaagaagaaagagtaagcgagttgagacaccagctccaatctaggcagcagttgcggtcccggaggcatccgccaacaccccctgagcctagtggtggtctcccccgtgggccacctgagcccccagacagactcagctgcgacggaagtagagtccatttgctgtataaatag

SEQ ID NO: 209995 - DNA, 2535 bp, Artificial Sequence
  derived and/or modified sequence
atgggaccaggggccccattcgcccgcgtgggttggcccctccccctactcgtcgtcatggcggctggagtggctccagtatgggccagccacagtccccacctcccaaggcctcatagtagagtacccccccacccatcctccgaacgccgggccgtctacatcggcgctctgttccctatgtcgggaggatggccagggggacaagcgtgtcaacccgccgtagagatggccctcgaggatgtcaattctaggagagatattctacctgactatgaactcaaactgatccatcacgacagcaaatgtgatccgggacaggctactaaatatctctatgagctcctttataatgacccgatcaaaattattctgatgcctggatgctcctccgtgtccacgcttgtagcagaagccgctagaatgtggaacctcatagtgctcagctatggctcaagtagccccgcactgagcaatcgacaaaggttccccaccttcttcagaactcatccatcagcaacactgcataaccccaccagggtgaaacttttcgagaagtggggctggaaaaaaattgcgaccatccagcagactaccgaggtttttacgtcgactcttgatgacctggaagagagggtcaaagaagcgggtattgaaatcacctttagacaatctttctttagtgaccccgccgttccggtcaagaacctcaagcgacaggatgcccgaataattgtaggcctgttctacgagacagaggcaaggaaggttttttgcgaagtttataaagaaagactgtttggaaaaaagtacgtatggttcttgattggatggtacgcagataattggttcaaaatctatgacccctccatcaattgcaccgttgacgaaatgactgaggccgttgagggacacatcacaacagagatcgttatgctaaaccctgctaacactcgcagcatttcaaatatgacctcccaagaattcgtggagaaactgacaaaaagactcaagcgtcatcctgaagaaacaggggggttccaggaagcaccactggcctacgatgccatctgggctctcgcactggcacttaataaaacctcaggcgggggaggaaggtctggcgtacgcctggaagattttaactacaataatcaaacgattacagaccaaatttatcgcgcaatgaatagctccagtttcgagggcgtgtcaggccacgttgtattcgatgcttctggcagcaggatggcatggacactgatcgaacagcttcagggtggatcttataaaaagatcggatattacgacagtaccaaggacgacctgtcctggagcaaaacagacaaatggatcggcggatccccgcctgcagatcaaacccttgtcatcaagacatttaggtttctatcacaaaagctgttcatctccgtgtctgtcttgtcgagcctgggaatagtactagcagtagtttgtctgtcttttaatatctataactctcatgtgcgttatatccaaaactcacaacctaacctgaacaacttaaccgcggtcgggtgctctttggctcttgctgcagtgttccccctcgggctggacggttatcatatcgggagaaatcagttcccttttgtgtgccaagcccgtttatggttgttaggcttgggcttctctctaggttatggatcaatgtttaccaagatctggtgggtgcacactgtgtttacaaaaaaggaggagaaaaaggagtggagaaaaaccttggagccatggaagctttacgccaccgtgggtttgctcgttggaatggatgtgttgaccttggccatctggcagatcgtcgaccccctgcacagaaccattgaaacgttcgctaaagaggagccgaaggaggatattgacgtgagcatactgccacagcttgaacattgcagctccagaaagatgaacacatggctcggcatcttctacggatataaaggtctcctgctcctactgggcatatttctggcttatgaaaccaaatctgtatccacagagaagataaatgaccatagggccgtgggcatggctatttataacgtggcggtgctgtgccttatcaccgcccccgttaccatgatcctgagctcccagcaggacgccgcgttcgccttcgcctcactcgccattgtcttctcctcctatatcaccctcgtggtcctgttcgtccccaagatgaggagactaattaccagaggagagtggcagagcgaagcccaagataccatgaaaactggcagttctaccaacaacaatgaagaagaaaaatccaggctactggagaaggaaaatagggaactggaaaagataatcgcggagaaagaagagcgggttagtgagctgcgtcatcagctgcaaagtcggcagcagttaaggtcacggcgacatccgcctaccccacctgaaccttctgggggtctgccaagaggcccacccgaaccaccagatagactttcctgcgatggatccagagtgcacctactttataagtag

SEQ ID NO: 209996 - DNA, 2535 bp, Artificial Sequence
  derived and/or modified sequence
atggggcctggtgccccctttgcccgcgtgggctggccacttcccctgcttgtcgtaatggccgccggcgtagctcccgtctgggccagtcactctcctcacctgcccaggccgcacagtcgtgttccaccccatccctccagtgaacgtcgcgcagtatacataggagctttatttccgatgagcggcgggtggcccggaggacaggcatgtcagccagctgttgaaatggcacttgaggacgtcaatagcagaagagatatcctacccgactacgagctgaaactgatccaccatgacagtaagtgtgatcccgggcaggcaacgaagtatctgtatgagcttttgtataacgaccccataaaaataatactcatgccgggctgttcctccgtaagcacactagtggcggaggcagctaggatgtggaatcttatcgtcctgagttatggttcttctagccctgcgctctcaaaccgccagagatttcctacattttttcggactcacccaagcgctacattgcacaatcctacgcgtgttaaactctttgagaaatggggctggaaaaagatcgcaacgatccagcagaccaccgaggtgtttacctcaacgctggacgacctggaggagcgtgtcaaggaagcaggcatcgagattacctttcgccagagctttttcagcgatccagcagttccggtgaaaaacctgaagcggcaggatgcccgaattatagtgggactcttttacgagactgaggcgcggaaggtattttgcgaggtttataaggagcgtctgttcggaaagaagtatgtgtggttcctgatcggttggtatgctgataactggtttaagatatatgaccccagtatcaactgtacggtggatgaaatgaccgaagcggtcgaagggcatataaccactgagattgtcatgctcaaccctgcaaacactcgcagtattagtaatatgaccagccaggaattcgtggagaaactgactaaaagactgaaaagacacccagaagagactggcggctttcaagaagcacccctggcttacgacgccatctgggccctggccctggcactgaacaaaacaagcggcggaggcggtaggagcggggtcagactggaggatttcaactataataatcaaacaatcaccgatcaaatctatcgggctatgaatagtagttctttcgagggcgttagcgggcacgtcgtatttgacgctagtgggtctagaatggcatggacacttatcgagcagttacaggggggatcctataagaaaatcggatactatgatagcacaaaggatgacttgtcctggtcaaagaccgacaagtggatcggcggctcaccccctgctgatcagaccctggtcatcaaaactttcaggtttttgagtcaaaaactctttatctccgttagtgtgctatcgagcctgggcatcgtactggcagtcgtctgcctgagttttaacatctacaattcacatgtgagatacatccaaaactcgcagccgaatctgaacaacctcacagctgtcggctgttctcttgccttggccgctgtatttcctctgggtttggatggctaccacatcggacgcaaccagtttccatttgtctgccaggcccgtttgtggctgctggggctgggcttctcattaggttacggatctatgtttacaaaaatttggtgggttcatactgtgttcacaaagaaggaggagaagaaagagtggagaaaaacactggaaccctggaagttatatgcgaccgtgggattactggtagggatggacgtgctgacactggctatttggcaaattgttgacccactgcatagaacaatcgagacattcgcaaaagaggagcccaaagaagatatagacgtcagcatacttccacagctggagcactgcagttctcgcaagatgaatacatggctgggcatcttctacggttacaaaggccttctgttgctgctcggtattttcctggcgtatgaaaccaaatccgtttctacagaaaagatcaatgatcatagggccgtgggcatggcgatctataatgtggctgtgttgtgtctgattactgcgcccgtcaccatgatcttgtcgagtcaacaggatgccgcctttgcttttgcgtctcttgcaattgtgttttctagttatatcactttagtcgtgctgttcgtgcccaaaatgcgccggctaataacccggggtgaatggcagagcgaagcccaggacactatgaaaacaggctctagtacaaacaacaatgaggaggagaaaagcagactgctcgaaaaggaaaaccgcgaactggagaaaattatcgccgagaaggaggaaagggtttcggagctccggcatcagttgcagagccggcagcagttgagaagccggcgccatcccccaactccacccgagccgagcggaggactgccccgcgggccaccggagccacctgatcgcctgtcatgtgacggaagccgcgtccacctcctgtacaagtag

SEQ ID NO: 209997 - DNA, 2535 bp, Artificial Sequence
  derived and/or modified sequence
atggggcctggggcacctttcgcacgtgtgggttggccattgccactgctcgtggtcatggccgcaggagtcgccccagtttgggcatcccattcccctcaccttccccgcccacattctcgcgtccccccacacccatccagtgagcgccgcgccgtctacattggcgccttgttccccatgagcggcggctggcctggcggccaggcgtgccagccagcagttgagatggctttggaagacgtgaatagccggagagacattctgcctgattatgaactcaagctaatccatcacgacagtaagtgtgaccctgggcaggcaaccaaatacctttacgaattgttatataatgatccaattaagattatcctgatgccaggatgcagctctgtcagtacgttagtagctgaagccgccagaatgtggaatctgatagtactttcatacggatcaagcagtcccgcactgtcaaacaggcagcggttccctacattctttagaactcacccctctgctaccctccacaaccctactcgtgtgaaactattcgagaagtggggatggaagaaaattgctacaatacagcagaccacagaggtctttaccagcaccctcgacgacctggaagagcgtgttaaggaggccggaatcgagataactttccgccagtccttttttagcgatcccgcggtacctgttaagaatctcaagcgccaggacgcgaggatcattgtcggcctcttttacgaaactgaagcccgcaaagtcttttgtgaggtttacaaggaaagactgttcggaaagaagtacgtttggtttttaattggctggtatgcagataattggttcaagatttatgacccaagcataaattgcacggtggacgaaatgacagaagccgtggaaggccatatcactacagagatcgttatgctgaatcctgccaacactcggagcataagtaacatgacatcacaagagttcgtggagaagcttacaaagagactgaaacgccaccctgaagaaaccggcggctttcaagaggctcccctcgcttatgatgcaatttgggcactcgcgcttgcacttaacaaaacatccggtgggggcggtagaagtggggtgaggctggaagacttcaactacaacaatcagactatcaccgaccagatctatcgggccatgaacagctcgtcattcgagggggtttcaggccacgtcgtcttcgacgcctccgggtcccggatggcctggacactcattgagcaactgcagggaggtagctacaagaaaattggatactacgattccactaaggatgatttgtcctggtcgaaaacggacaagtggattggcggcagcccgcccgcggaccaaacactggtcattaagacttttcgattcctctcacagaaactgttcatctctgtgtccgttctgtcctctctcggcatcgtgctggcagtggtctgtctatcattcaatatttacaactcccatgtccgctacatacagaactcccagcctaacttaaataacttgactgccgtggggtgttcgctagccctcgcagccgttttccccctgggattggatggataccatattggaagaaatcaattcccctttgtttgccaggcccggttatggttgttgggcctggggttttcactgggctatgggtccatgttcaccaagatatggtgggtgcatactgtgttcaccaagaaagaagaaaagaaagaatggcgcaaaacactcgagccatggaagctttatgccactgtcggcctgctggtgggaatggatgtgttaactctggcaatttggcagatcgtggaccctctgcaccggactattgaaacctttgccaaagaggagccgaaggaagacatcgacgtctcaatactcccccagttggaacattgctccagcaggaaaatgaatacctggctaggaattttttatgggtataaaggtttactgctgttgctgggaattttcctggcatacgagaccaagtccgtctcaactgagaaaatcaacgatcatagagccgtggggatggccatatataacgtagcggtgctgtgtctcataaccgctcctgtgactatgatactgtcgtcccaacaggatgctgcctttgcgttcgcaagcctagcaattgttttcagttcttacatcacactcgttgtcctgttcgtgcccaagatgcggcgacttattacccgtggggagtggcagtccgaagctcaagacacgatgaagaccggctctagcaccaataacaatgaagaggaaaagagtcggctgcttgaaaaggaaaaccgggaattggagaagatcatcgccgagaaggaagaacgggtttccgagctccggcaccagttgcaatcacgtcaacagcttcgctctagacggcacccaccaactccacccgaaccctccggggggctccctagagggccccctgaacctcccgatcggctatcatgtgatggatctcgggtccatctactgtacaaatag

SEQ ID NO: 209998 - DNA, 2535 bp, Artificial Sequence
  derived and/or modified sequence
atgggacccggagctcctttcgccagggtgggatggccgcttcctcttttagttgtgatggctgccggagtagctcccgtctgggcatcacattcgccccatttgccccgaccccacagcagagttcctccccatccgtcttctgaacgccgagcagtgtacatcggggccttgtttccaatgtccgggggctggcccgggggacaagcgtgccagcctgctgtagagatggcgctcgaggacgtcaactcccgccgagatattctgccagactatgagctgaaactaattcatcacgatagtaagtgcgacccaggtcaagcgacaaagtacctgtacgagctgctttataacgacccaattaaaataattctgatgcccggctgcagttccgtatctacgcttgtcgctgaggcggctcgcatgtggaacttaattgttctatcatacggctcatcatccccagcactgtcaaatcggcagcgctttcccacctttttcaggacacacccttccgctacactgcacaatcccacacgcgtgaagctgtttgaaaagtggggatggaaaaagattgcaaccattcagcagacaactgaagttttcacaagtacgttagatgacctcgaggaaagggtgaaggaggcgggcattgaaattaccttccggcaatctttcttctctgacccggctgttcctgtgaagaaccttaaacgccaggacgcacgaataattgtaggtcttttttacgagacggaggcacgaaaagtgttttgcgaagtgtataaagagcgattgttcggaaagaaatatgtctggttcctgatcgggtggtatgccgataactggttcaagatctacgatccatccataaattgcaccgttgatgaaatgactgaggcagttgaaggccacatcaccaccgagattgtgatgctgaatcccgctaatacccgcagcattagtaacatgacatcccaggaatttgtggaaaagctgaccaagagactgaagaggcatcccgaggaaaccggcggtttccaggaggcacctctggcctacgatgctatttgggcccttgccctcgccttgaacaagacatctggggggggaggtagaagtggggtgcggctggaagatttcaactacaataatcagaccataacagatcagatctacagggccatgaattcctcttcgtttgagggagtaagtggacacgtagtattcgatgcctctgggagccgtatggcctggacgctaatcgaacaactgcagggcggatcttataagaagattggctactacgatagcacaaaagacgacctgtcttggagcaaaaccgacaagtggatcgggggcagcccacccgccgatcagacccttgtaattaaaacttttcgttttctgagtcagaaactgtttataagtgttagcgtcctcagcagcctcggaatagtgttagctgtggtatgcctgagcttcaacatctacaatagtcatgtgagatatatccagaacagccagccaaacctcaacaatctcaccgctgtcggctgctccctggcactcgcggctgtgttccctcttggtctggatggctaccatattggaaggaatcagtttccctttgtgtgtcaagcccgcctgtggctgctgggactggggttttccctggggtacggttccatgtttactaaaatctggtgggtgcacacagtgttcaccaaaaaggaggaaaagaaggaatggcgcaagacgcttgaaccttggaagttgtatgcaacagttggactgttggtagggatggacgtgctgacgttggccatctggcagattgtggatccactccaccgcacgatcgagactttcgccaaagaggagcctaaggaggacatcgatgtgtctattctgccccagcttgagcactgctcttccaggaagatgaacacatggctcggcatattctatggctacaagggattgttactcctgctgggcatcttcttagcttatgagacaaaatctgttagcacggaaaaaatcaacgaccacagagccgtgggcatggcaatctacaatgtcgccgtcttatgtctgatcactgctcccgttaccatgatccttagcagccagcaggacgccgcttttgcctttgccagccttgctatcgtcttttcgtcatacattacattagttgttttgttcgtaccaaaaatgagacgactgatcacccgcggcgagtggcagagtgaggcgcaggatacaatgaaaacgggttcatctaccaataataacgaggaggagaagtctaggctcttggagaaagaaaaccgggagctggaaaagattatagccgaaaaggaagagcgggtctcggaactgcgacaccagcttcaatcacggcagcagctgaggtcacgcagacacccaccgacccctccagaaccttccggcggtctacctagaggaccaccagaaccaccggatcgactctcgtgtgacggctctagggtacatctgctttataagtag

SEQ ID NO: 209999 - DNA, 2535 bp, Artificial Sequence
  derived and/or modified sequence
atgggacccggggcgccctttgccagggtcggatggccattgcccctcctcgtggttatggccgcaggtgttgctcccgtttgggcatctcacagtccacatctgccaagacctcactcccgagttcctccccatccatctagcgaacgcagggccgtatatattggcgctctgtttccgatgagtggcggatggcctgggggccaggcctgccagcctgccgtagagatggctttggaagacgtcaattctcgaagagacattttgccggattacgagctgaaacttatccaccacgactccaaatgcgacccaggacaggcaaccaaatacctgtacgagctgctgtataatgaccctatcaagataatcctgatgcccggctgcagttccgttagtactcttgtggcggaggctgctcggatgtggaatctcatcgtcctcagttacggtagttccagccccgcgctcagcaatcgacagaggttcccgaccttttttcgcactcacccttctgctacacttcacaacccaacgcgagtgaagctgtttgagaagtggggatggaagaagatcgcaactatccagcaaaccactgaagtgtttactagcacgctggacgacttggaagaacgagtgaaagaagccggaattgaaatcacttttagacagtcatttttttcagaccctgcggttccggtcaagaatttaaaaagacaggacgcccgaattattgtgggccttttttacgaaacagaggcacggaaggttttttgcgaagtttacaaagagcgtctgttcggaaagaaatacgtatggttcctgattgggtggtatgccgataattggttcaagatatacgacccttcaatcaactgtaccgtcgacgagatgacagaagccgttgagggacatattacaacagagatcgtgatgctgaatccagccaatacgagaagcatttcaaacatgacctcccaggaattcgtggagaagttgactaagcgcctgaagaggcatcctgaagagaccggtggatttcaggaagctcctctggcctacgacgcaatttgggctttggcgcttgcactgaacaagactagcggcgggggaggtcgatccggggttcggcttgaagacttcaattacaacaaccagaccatcaccgatcagatctaccgcgcgatgaattcctcttctttcgagggcgtgtcgggacacgttgttttcgacgcttcaggatcaagaatggcttggaccctgatcgagcagctccagggcggatcctataaaaaaattggctattatgatagtacgaaggacgatctctcttggagcaaaactgacaaatggataggaggctcgcccccagccgaccaaactctggttatcaagacctttcggttcttgtcccagaagttatttatttcagtgagcgtgctcagctccttaggaattgttttagctgtagtgtgcctttcttttaacatttataattcccatgtacgttatatacagaactcacaacccaacttgaataatctgacagccgtaggttgtagccttgccctggccgccgtgtttccactaggactcgatggataccatatcggccgcaatcagtttcccttcgtgtgtcaggcccggctatggttgctaggactagggttttctttgggatacggatccatgtttacaaagatttggtgggtccacacggttttcaccaaaaaagaggaaaagaaagagtggcggaagactcttgagccctggaaactgtatgctaccgttggactgctcgtcgggatggacgtgttgaccctggccatttggcaaatcgttgaccctctacacagaacaatcgagacgtttgcgaaggaagagccaaaagaggacattgacgtgtccatcctgccacagctggagcattgtagtagtcgtaaaatgaatacatggcttggcattttttatggttacaagggcctcctcctgctcctgggcatattccttgcttacgagactaagagtgtgtccaccgagaaaatcaatgatcaccgagcggtgggcatggccatctataatgttgccgtgctgtgtcttataacagcccccgttactatgattctaagttcacagcaggacgcggcatttgcttttgcttctctggctattgtgttttcctcttacatcacactagttgttctcttcgtgcccaagatgaggcgtcttataactcggggcgagtggcaaagcgaggcccaggacaccatgaagactggatcctccacaaacaacaatgaagaggagaagtcacgcttactggaaaaggagaaccgcgaactcgagaagatcatagccgaaaaggaggagcgggttagtgagctaaggcatcagttacaaagcaggcaacagttgcgtagtcgcagacatccgcccacccccccggagccttcaggtgggcttcccagaggcccccctgagccacctgaccgactgtcttgtgatgggtctcgagtacatctcctctacaaatag

SEQ ID NO: 210000 - DNA, 2535 bp, Artificial Sequence
  derived and/or modified sequence
atgggcccaggagccccgttcgcaagagttggttggcctctgccattactggttgtgatggcagctggcgtggcaccggtctgggcaagtcacagcccccacctccccagacctcacagccgtgtccccccacacccaagctctgaacggagggcagtgtacatcggagctctgtttcccatgagcggaggatggccgggcggccaagcctgtcagcctgcagtcgaaatggctctagaagatgtcaactccagaagggatattctgccagattacgagttgaaactaattcaccacgacagcaagtgcgaccccgggcaagcaacaaagtacctctatgaactcctatataatgatcctatcaaaatcatccttatgcccggatgttcctcggtcagcacgctagtggctgaggctgctaggatgtggaatctaatagttctttcctacggtagctccagtccagccttgagtaatagacagcgcttcccgaccttcttccgcactcacccgtccgcaacactgcacaatccaactagggtgaaattgtttgagaagtggggttggaaaaagatcgcgaccatccaacagacaaccgaagtcttcacatcaaccttagatgaccttgaagagcgagttaaggaggctggtattgaaatcaccttccgccaatccttcttctccgaccctgccgtgccagtcaaaaatctgaagcgacaggacgctaggattatagttggcttattttacgaaactgaagcaagaaaggttttttgcgaagtttacaaagagcgcctgttcgggaaaaagtacgtttggtttctgatcggctggtatgcggataattggtttaagatctacgacccaagtataaattgtacagtagatgaaatgacagaggccgtggagggccatatcaccaccgaaatcgttatgcttaatccagccaataccagaagtatctctaacatgactagtcaggagtttgtggaaaagctgacaaaaagactgaaaagacacccagaagaaaccggtggtttccaggaggctccacttgcttatgatgccatctgggccctagcgctcgcattaaacaagacttcaggtggtggcgggcgctctggagttaggctagaagactttaattataataaccagactattacagaccaaatctaccgtgcaatgaactcatcatcttttgaaggggtgtcaggacacgtcgtgttcgacgcctcaggctcgcgcatggcctggacacttatcgagcagcttcaaggaggaagttacaaaaaaataggctattacgattcaaccaaagacgacctatcgtggtccaagacagataagtggatcgggggcagcccgcccgctgaccaaacccttgtaataaagacatttcgctttttgtctcagaaactgtttatcagcgtgtccgtcctcagctcccttggcattgtgttggcagtggtgtgcctgtcttttaatatctataactctcacgtgaggtatatccaaaatagtcaaccaaatctcaataatctcacagcagttggttgttccttagcgttggctgctgtgttccccctaggattagacgggtaccatatcggaaggaatcagttcccatttgtttgccaggctcggttatggctgctcggacttggcttttcactcggctacggctctatgttcaccaagatctggtgggttcacacagtgtttaccaagaaagaggaaaagaaagagtggagaaaaactctcgaaccatggaaattgtatgccacggtgggcctgctggtcggtatggatgtgcttaccctggctatctggcagattgtggaccccctccacagaaccatcgagactttcgcgaaggaagaacctaaagaagacatcgacgtgtcaatcttacctcagctagaacactgcagcagtcggaagatgaacacttggttggggattttttatgggtacaagggcctgctcctactgctgggaatcttcctggcctatgagaccaagtccgtttccactgaaaaaatcaatgaccacagggccgtcggcatggctatctacaatgtcgcagtcttgtgcctgatcacggcccctgtgaccatgatcctgtcttcgcagcaggacgcagcctttgctttcgcgagcctggcgattgtgttctccagctacataactctcgtggtacttttcgtccctaagatgaggaggttaattaccagaggcgagtggcaaagcgaagcacaggacaccatgaagactggcagtagcacaaataacaatgaagaggaaaagtctcgcttattagaaaaggaaaatcgagagctcgaaaagatcatcgccgaaaaggaggaacgggtgtcagagctgcgccaccagctgcaatctcgacaacagctgagatcaagaagacatcctccgacacctcccgagcccagcggcgggctgcctagggggccaccagagcctccagatagactttcctgcgatggctccagagtgcatctgctgtacaagtag

SEQ ID NO: 210001 - DNA, 2535 bp, Artificial Sequence
  derived and/or modified sequence
atgggccctggtgcaccgtttgctcgggttggatggccactccctctgctggttgttatggcagctggagtggcaccagtgtgggccagccactctccccatctacctaggccacattcacgggtccctcctcacccaagcagcgaaagacgcgcagtttacataggagccctctttccaatgtctggcggctggcccggtggtcaggcctgtcagcctgcagttgagatggctctcgaagacgtgaacagcaggagagatatactgcctgactacgagctgaaactcattcatcatgacagtaagtgcgatcctgggcaggcgaccaagtacctgtacgaacttctgtacaatgatcctatcaaaataatacttatgcctgggtgctcctccgtcagtaccctcgtcgctgaggcagcacgaatgtggaatttgattgtgctgtcatatggatcatcgagccctgcacttagtaatagacagagattccccactttcttcaggacccacccttctgcaactctgcataaccccaccagagttaaactgttcgaaaaatggggttggaagaagattgccacaatccaacaaacaacggaagtctttacaagcacattggatgatttggaggagcgggttaaggaggcagggatcgagatcacattccgccagagtttcttttcagatcctgcagtccctgtaaagaacttgaaaagacaagacgccagaataattgtcggactgttctatgagaccgaggcgcgtaaggtcttttgtgaggtctacaaggagagattattcggtaagaaatatgtttggtttcttattggctggtacgccgataattggtttaaaatctacgatccaagcattaactgcactgttgacgaaatgacggaggctgtcgaggggcatatcaccacagagatcgttatgctcaatccagcgaacacaaggagtatttccaacatgacaagtcaagaattcgttgaaaagttgacaaaacgcctcaaacggcatcctgaggaaacgggcgggtttcaggaggcccctctggcctatgacgcgatatgggctctagcattagcactgaataagacgagcggaggtggtgggcgctccggcgtgcgtctggaggacttcaactataacaaccaaactattactgaccagatttacagagccatgaattccagttcatttgagggagtgtccggacatgtcgtctttgacgcttccggatcacgaatggcttggaccctgattgagcaactccagggggggagctacaagaagatcggttactacgatagcaccaaggacgatctgtcatggtccaaaacagataaatggatcgggggatcaccaccggctgaccagacactcgtgataaaaactttccggtttctctctcaaaagctgttcatctccgtctccgtcttatcaagcctcgggattgtcctcgccgtggtttgcttatcctttaacatctacaattcccacgtgcgctacattcaaaactctcagccgaacctgaataacctgaccgcagttgggtgctccttagctctcgccgcggtgttcccactgggcctagacggctaccacattgggcgcaatcagttcccgttcgtatgccaagcccgcctgtggctcctgggactcgggttctcactcggctacggctctatgtttactaaaatctggtgggtccatacggtctttactaagaaggaagagaagaaagaatggcgcaaaactcttgaaccctggaaactttacgcaactgtcggtctcctagtcggcatggacgtcttgaccttagccatttggcaaatcgttgatcctctccatcgcacaattgaaacattcgccaaagaggaacctaaggaagatattgacgtctccattctcccacagctggagcattgctcaagccgtaagatgaatacatggcttggcattttttatggatataaaggcctgttactgctactggggattttcctcgcttacgaaacaaagtccgtctcaaccgagaaaatcaacgaccatagagcggtcggcatggctatctacaatgtagcagtgctctgcctgatcacggccccggtgactatgatcctgagcagccaacaggatgcggcctttgcctttgcctccctcgccatcgtttttagctcctatatcacgctcgttgtcctcttcgtgcccaaaatgaggcgcctcataacacgcggcgagtggcaaagtgaggcccaggacacaatgaaaacgggatcatcaaccaataacaatgaagaggagaaaagccgcctgcttgagaaggaaaacagggaattagagaaaattattgccgagaaggaggagcgtgttagcgagctgagacaccaattgcagagccgtcagcagttgcggagcagaagacatcccccaaccccacccgagccatccgggggactgccccggggacccccagagcctccagatcgtctttcctgcgatggaagtagagtgcatctgttatacaaatag

SEQ ID NO: 210002 - DNA, 2535 bp, Artificial Sequence
  derived and/or modified sequence
atggggcccggggccccgtttgcccgagttggctggccactccccctgttagttgtgatggccgccggggtggccccggtttgggcctctcacagtcctcaccttccccgtccacattcacgtgtacctccccaccctagctcagaacggagagccgtgtacattggcgccctgttccccatgtcaggtggctggcctgggggacaggcttgccaacccgccgttgaaatggcattggaagacgtcaatagtagacgcgatattctgccagattatgagctgaaactcattcatcatgatagtaagtgcgatcctggacaggcaacaaagtatctgtacgaattactctataacgacccaattaagataatcctgatgcctgggtgttcttcagtgtccactctcgtggctgaggccgccagaatgtggaatctcatcgttctgagctatggttccagttctcctgctctgtccaacaggcagcgattccctacctttttcaggacgcaccccagcgcaacgttgcataatcccacacgcgtgaaactgtttgagaaatggggatggaagaagatcgccaccattcaacaaactactgaagtgttcactagtacactggacgacctggaggagagagtgaaagaagccggcatagagatcactttccggcagtcttttttttccgatcccgcggtacccgtcaaaaatcttaagcggcaggatgcgagaattattgtgggcctcttttacgagaccgaagcccgcaaagttttctgcgaggtgtataaagaacgcctgttcggtaagaagtatgtctggtttctgattgggtggtatgcagataactggtttaagatatatgacccctcaatcaactgtacggttgacgagatgacagaggcagtggagggccacataacaaccgagatagtcatgctgaatcctgccaacacccgttcaatcagcaacatgacttcacaagagttcgtggaaaaactcaccaaacgtctgaagaggcaccccgaagagacgggtggtttccaggaagcgcctctggcatatgacgcaatttgggcactcgctctcgcactgaataagaccagtggaggtgggggccgatccggggtcaggctggaggacttcaactataacaaccagactataacagatcagatataccgggcaatgaattccagttccttcgaaggcgtttctgggcacgtggtgtttgacgcatcaggctcaaggatggcctggactctcatagagcagctccagggaggttcctacaaaaagatcggttactacgactcaaccaaggacgacctgtcctggagtaaaacggacaagtggatcggaggttcccctccagcagaccaaactttagttatcaaaacttttcgattcttatcccagaagctgttcatctcagttagtgtcttgagctcactgggcattgtcttggcagtcgtttgcctctcttttaatatttataacagccatgttcgctacatccaaaattcacaaccaaatcttaataatctaactgcagtcggctgctccctggctctcgctgctgtgtttccactgggactggatggttaccacattggacggaatcagttcccattcgtgtgtcaggctcgcctatggttactggggctcggctttagcctgggctacgggtctatgttcacaaaaatctggtgggttcatacagttttcactaaaaaggaggagaaaaaagaatggcgtaaaacactagaaccctggaaactctacgctacggtcggcctactcgtgggtatggacgtcctgaccctggcaatctggcagattgtggacccactgcataggacaatagagactttcgctaaagaagaacctaaggaagatattgacgtttcaatcctcccccagcttgaacattgttcctcacgaaaaatgaacacatggcttgggattttctacgggtataagggcctactgctgctgttagggattttccttgcctacgagactaagagcgtaagtaccgaaaaaatcaatgaccatagagcagttggcatggccatatacaacgtggctgtgctctgcttgatcacggctccagtgactatgatcctgtcaagtcagcaagacgcagcttttgcattcgcatcactagctattgtgttctcaagttacattactctggtggtcctgttcgtgcctaaaatgcgccgcctgatcacccgcggcgaatggcaatcagaggcccaggatacaatgaaaactggatcatcaacaaacaacaatgaggaggaaaaatctagactactcgagaaggagaatcgggagttggagaaaatcatcgccgagaaagaggaacgagttagcgaactgagacaccaactgcagagtagacagcagttaaggagtaggaggcatccacccaccccgcccgaacctagcggaggcctcccacgtggaccacccgagccccctgataggctgagctgtgatggtagtcgagtgcacctcctctataagtag

SEQ ID NO: 210003 - DNA, 2535 bp, Artificial Sequence
  derived and/or modified sequence
atgggaccaggggcccctttcgctagggtcggttggccactgcctctgctagttgtgatggctgcaggggtcgctccggtatgggcttcccactctcctcacctcccccggcctcattctcgagtaccaccccatccctcttcagaacggcgcgcagtatatatcggggccttattcccaatgtcaggcggctggccaggcgggcaggcctgccagcctgctgtcgagatggctttagaagatgtgaacagtagacgcgacatcctgcctgactatgagcttaaactgatccatcatgattccaagtgcgatccaggacaggcgactaagtacctttatgaactgttgtacaacgatcccatcaaaatcattttgatgccgggctgctcatccgtttctacacttgtcgctgaagctgccaggatgtggaacttgattgttctgagctatggctctagctctcccgctctttccaatagacaacgctttcccaccttctttaggactcacccctctgctactctgcataatcctaccagagttaaactgtttgagaagtggggatggaagaagattgccacaatccagcagaccaccgaggtatttacatccacgcttgatgacttggaggaaagggtaaaggaagctggaatcgagatcaccttccggcagagcttttttagcgaccctgccgtgcccgttaaaaacctcaaacgacaggacgcccgtatcatagtgggccttttttacgaaaccgaagcacggaaggtgttctgcgaggtgtataaagagaggcttttcggcaagaaatatgtgtggttcctgattggctggtacgccgacaattggttcaaaatatacgatccctcaattaattgtaccgtcgacgagatgacagaggctgtcgaaggccacatcacaactgaaattgttatgttaaaccctgccaatactcggtcaattagcaatatgacgagccaggagtttgtcgagaaactaactaagcggcttaagcgtcaccctgaggagaccgggggtttccaggaagcacctctcgcctacgatgccatctgggctttggcccttgctctgaataagacctctggagggggtggacgctctggggtaaggcttgaagacttcaattataacaatcaaaccattaccgaccagatttatcgcgccatgaactcctcgtctttcgagggtgttagcggacatgttgtatttgacgcatctgggtccagaatggcctggactttaatcgaacagttgcagggtggaagctataaaaagataggttactacgattccactaaggatgacctctcttggagtaaaactgataagtggatcggcggctcacctcccgctgatcagacgctggtcattaaaacattccgatttttgtcccagaagttattcatcagcgtaagcgtcttaagttctctaggtatagtcctcgctgtcgtgtgcctctccttcaatatatacaattcccatgtccggtacatccagaactcccagcctaatctgaacaacttgaccgcagtgggctgttccctggccctggctgctgtattcccacttggactagatggataccatattggcagaaatcaattcccatttgtctgccaagcacgactttggttactgggactgggcttctcattgggttatgggagcatgttcacgaagatatggtgggttcacacggtgttcaccaagaaggaggaaaagaaagaatggagaaagactttagagccctggaagctttacgccaccgtgggactgctggtggggatggatgttttgacgcttgcaatttggcagatcgtcgatcccctgcataggacaattgaaactttcgctaaagaagaacccaaagaagacattgatgtgtccattcttccccagctcgagcactgctcttccagaaagatgaatacatggctggggattttctacggctacaaaggcctcctgttgctgctgggaatcttcctggcatacgagaccaagagcgtgagcactgaaaagatcaacgaccaccgggcagttggtatggctatctacaatgtagcagttctgtgtttgatcaccgcccctgtgaccatgatcctgtcatcccaacaggacgctgccttcgctttcgcgagccttgcaattgtttttagtagttatatcaccttagtggtgctctttgttccaaagatgcggcggcttatcactcgtggcgagtggcagtccgaagcccaggacacaatgaagactggaagttccacaaataacaatgaggaggagaagtctcgactcttagagaaggagaatagggaactcgagaaaataattgccgagaaggaagagagagtgagcgaactcagacaccaactacagtctcgtcagcaacttcgctcgcgcaggcatccacctacgccccccgagcccagtggaggtctacctcggggtccccctgaacccccagatcggctaagttgtgatggatcacgagttcacctcctctacaagtag

SEQ ID NO: 210004 - DNA, 3523 bp, Artificial Sequence
  derived and/or modified sequence
ctcctcctcctcccctccgtcggtcagtcagtccgcgaggagagtccgcggtggcggcgacggtggcgagagccgcgggggccgtaggaagccaaccttccctgcttctccggggccctcgccccctcctccccacaaaatcagggatggaggcgcctccccggcaccctcttagcagccctccccaggaaaagtgtcccccctgagctcctaacgctccccaacagctacccctgccccccacgccatggggcccggggccccttttgcccgggtggggtggccactgccgcttctggttgtgatggcggcaggggtggctccggtgtgggcctcccactccccccatctcccgcggcctcactcgcgggtccccccgcacccctcctcagaacggcgcgcagtgtacatcggggcactgtttcccatgagcgggggctggccagggggccaggcctgccagcccgcggtggagatggcgctggaggacgtgaatagccgcagggacatcctgccggactatgagctcaagctcatccaccacgacagcaagtgtgatccaggccaagccaccaagtacctatatgagctgctctacaacgaccctatcaagatcatccttatgcctggctgcagctctgtctccacgctggtggctgaggctgctaggatgtggaacctcattgtgctttcctatggctccagctcaccagccctgtcaaaccggcagcgtttccccactttcttccgaacgcacccatcagccacactccacaaccctacccgcgtgaaactctttgaaaagtggggctggaagaagattgctaccatccagcagaccactgaggtcttcacttcgactctggacgacctggaggaacgagtgaaggaggctggaattgagattactttccgccagagtttcttctcagatccagctgtgcccgtcaaaaacctgaagcgccaggatgcccgaatcatcgtgggacttttctatgagactgaagcccggaaagttttttgtgaggtgtacaaggagcgtctctttgggaagaagtacgtctggttcctcattgggtggtatgctgacaattggttcaagatctacgacccttctatcaactgcacagtggatgagatgactgaggcggtggagggccacatcacaactgagattgtcatgctgaatcctgccaatacccgcagcatttccaacatgacatcccaggaatttgtggagaaactaaccaagcgactgaaaagacaccctgaggagacaggaggcttccaggaggcaccgctggcctatgatgccatctgggccttggcactggccctgaacaagacatctggaggaggcggccgttctggtgtgcgcctggaggacttcaactacaacaaccagaccattaccgaccaaatctaccgggcaatgaactcttcgtcctttgagggtgtctctggccatgtggtgtttgatgccagcggctctcggatggcatggacgcttatcgagcagcttcagggtggcagctacaagaagattggctactatgacagcaccaaggatgatctttcctggtccaaaacagataaatggattggagggtcccccccagctgaccagaccctggtcatcaagacattccgcttcctgtcacagaaactctttatctccgtctcagttctctccagcctgggcattgtcctagctgttgtctgtctgtcctttaacatctacaactcacatgtccgttatatccagaactcacagcccaacctgaacaacctgactgctgtgggctgctcactggctttagctgctgtcttccccctggggctcgatggttaccacattgggaggaaccagtttcctttcgtctgccaggcccgcctctggctcctgggcctgggctttagtctgggctacggttccatgttcaccaagatttggtgggtccacacggtcttcacaaagaaggaagaaaagaaggagtggaggaagactctggaaccctggaagctgtatgccacagtgggcctgctggtgggcatggatgtcctcactctcgccatctggcagatcgtggaccctctgcaccggaccattgagacatttgccaaggaggaacctaaggaagatattgacgtctctattctgccccagctggagcattgcagctccaggaagatgaatacatggcttggcattttctatggttacaaggggctgctgctgctgctgggaatcttccttgcttatgagaccaagagtgtgtccactgagaagatcaatgatcaccgggctgtgggcatggctatctacaatgtggcagtcctgtgcctcatcactgctcctgtcaccatgattctgtccagccagcaggatgcagcctttgcctttgcctctcttgccatagttttctcctcctatatcactcttgttgtgctctttgtgcccaagatgcgcaggctgatcacccgaggggaatggcagtcggaggcgcaggacaccatgaagacagggtcatcgaccaacaacaacgaggaggagaagtcccggctgttggagaaggagaaccgtgaactggaaaagatcattgctgagaaagaggagcgtgtctctgaactgcgccatcaactccagtctcggcagcagctccgctcccggcgccacccaccgacacccccagaaccctctgggggcctgcccaggggaccccctgagccccccgaccggcttagctgtgatgggagtcgagtgcatttgctttataagtgagggtgcatgtccgttccgaggaatgggatttaatgacctttgatgccaacccatatgacagcgtgaaaaaaatcaaagaacatgtccggtctaagaccaaggttcctgtgcaggaccaggttcttttgctgggctccaagatcttaaagccacggagaagcctctcatcttacggcattgacaaagagaagaccatccaccttaccctgaaagtggtgaagcccagtgatgaggagctgcccttgtttcttgtggagtcaggtgatgaggcaaagaggcacctcctccaggtgcgaaggtccagctcagtggcacaagtgaaagcaatgatcgagactaagacgggtataatccctgagacccagattgtgacttgcaatggaaagagactggaagatgggaagatgatggcagattacggcatcagaaagggcaacttactcttcctggcatcttattgtattggagggtgaccaccctgggcatggggtgttggcaggggtcaaaaagcttatttcttttaatctcttactcaacgaacacatcttctgatgatttcccaaaattaatgagaatgagatgagtagagtaagatttgggtgggatgggtaggatgaagtatattgcccaactctatgtttctttgattctaacacaattaattaagtgacatgatttttactaatgtattactgagactagtaaataaatttttaaggcaaaatagagcattcaaagcca

SEQ ID NO: 210005 - DNA, 2535 bp, Artificial Sequence
  derived and/or modified sequence
atgggcccaggggccccttttgcccgggtgggttggccactgcctcttctagttgtgatggccgctggcgtcgcacccgtttgggctagccactcaccccacctgcctagacctcactcacgcgtaccgccacacccaagttccgaacgaagggctgtgtacattggggcactgttcccaatgtctggaggatggccgggaggacaggcctgtcagcctgctgttgaaatggccctggaggatgtcaacagtcgacgggatatactgcctgactatgagctcaaacttatacatcatgacagcaagtgcgatccggggcaggctaccaaatacttgtacgagctactttacaacgatccaatcaaaattatccttatgccaggctgcagtagtgtctcgacccttgtagcggaggctgcacgtatgtggaaccttattgtgcttagttatggatctagcagccctgctctaagtaatagacagcgattcccaacattctttcgaactcacccatctgccacactccacaatcctacaagagtgaaactctttgagaaatgggggtggaaaaaaattgcgacaattcaacagaccacagaggttttcacctcaacgctagacgatttggaggaacgtgtaaaggaagccgggattgagatcacattccgccagagtttctttagcgaccccgccgtgcccgttaaaaatctgaagcgtcaggatgctaggattatcgttggtttattctatgaaaccgaggcaaggaaggtgttctgcgaagtgtacaaagaaaggctttttggaaaaaaatatgtgtggtttctgattggttggtatgcagataactggttcaagatctatgatccatccataaattgtaccgtagacgaaatgactgaggcagtggagggacacatcaccacagaaattgtgatgttaaatccagctaacacccgttccatttctaatatgacctcacaggaattcgttgaaaaacttacaaagcggctgaagagacatcccgaagagacaggaggtttccaagaggctcccctggcttatgacgccatctgggcactggcactggcactcaataagacgtcgggagggggtggccgtagtggggtaaggctagaggactttaattataataaccagaccattactgaccaaatctaccgcgccatgaatagtagctctttcgaaggcgtgtccggccacgtcgtgttcgacgcttccggcagtagaatggcttggacactgatcgagcagttgcagggaggcagttacaagaaaatcggctactacgattctaccaaggacgacctatcatggagcaagacagataagtggattggtggttccccgcccgcggaccaaactcttgtcatcaaaacttttagattcctgtctcagaaactttttatttccgtgtcagttctcagtagcctcgggatagtactggccgtagtctgtctgagtttcaacatttataactcccacgtacggtatatccagaactcacaaccaaacctgaataacctgaccgccgtaggctgcagcctggcactggccgctgtttttccacttgggttggatggctatcacattggcagaaatcaatttccattcgtttgccaagctcggctatggctgctggggctagggttctctctcggctatgggtctatgtttacaaaaatttggtgggtgcatactgtgtttacaaagaaagaagagaagaaggagtggagaaagacactagagccctggaaactctacgccaccgtaggactactggtgggaatggacgtattgacattagcaatctggcaaattgtcgatcctctgcacagaactattgaaacttttgccaaggaggaacctaaagaggacatcgacgtgagcatcctgccacagctcgaacactgtagttctagaaagatgaacacatggttagggatattttatggctataagggactcctattgctgttgggtatattcctggcttacgagacaaagtccgtgtcaaccgagaaaattaacgatcatagggctgtcgggatggcaatctacaacgtggcggttctctgtctcatcactgctcccgtcaccatgattctgtcatcccagcaggatgccgcttttgccttcgcaagtctggccatcgtattctcctcctacattaccctggtagtcctgtttgtaccaaagatgagaaggctcatcacccgaggcgagtggcagagcgaggcgcaggataccatgaaaacagggtcatctacgaacaacaatgaagaagaaaaaagtaggctattggaaaaagagaacagagagttagaaaaaataattgctgaaaaagaagaacgcgtgtcagaactcagacaccaattacaatctcgtcagcagcttcgatcccgccgccacccaccaacgccccctgagccttccggaggacttccacggggcccacctgagcctcccgacagactttcctgtgatggcagccgcgtacatctactgtacaagtag

SEQ ID NO: 210006 - DNA, 3523 bp, Artificial Sequence
  derived and/or modified sequence
ctcctcctcctcccctccgtcggtcagtcagtccgcgaggagagtccgcggtggcggcgacggtggcgagagccgcgggggccgtaggaagccaaccttccctgcttctccggggccctcgccccctcctccccacaaaatcagggatggaggcgcctccccggcaccctcttagcagccctccccaggaaaagtgtcccccctgagctcctaacgctccccaacagctacccctgccccccacgccatggggcccggggccccttttgcccgggtggggtggccactgccgcttctggttgtgatggcggcaggggtggctccggtgtgggcctcccactccccccatctcccgcggcctcactcgcgggtccccccgcacccctcctcagaacggcgcgcagtgtacatcggggcactgtttcccatgagcgggggctggccagggggccaggcctgccagcccgcggtggagatggcgctggaggacgtgaatagccgcagggacatcctgccggactatgagctcaagctcatccaccacgacagcaagtgtgatccaggccaagccaccaagtacctatatgagctgctctacaacgaccctatcaagatcatccttatgcctggctgcagctctgtctccacgctggtggctgaggctgctaggatgtggaacctcattgtgctttcctatggctccagctcaccagccctgtcaaaccggcagcgtttccccactttcttccgaacgcacccatcagccacactccacaaccctacccgcgtgaaactctttgaaaagtggggctggaagaagattgctaccatccagcagaccactgaggtcttcacttcgactctggacgacctggaggaacgagtgaaggaggctggaattgagattactttccgccagagtttcttctcagatccagctgtgcccgtcaaaaacctgaagcgccaggatgcccgaatcatcgtgggacttttctatgagactgaagcccggaaagttttttgtgaggtgtacaaggagcgtctctttgggaagaagtacgtctggttcctcattgggtggtatgctgacaattggttcaagatctacgacccttctatcaactgcacagtggatgagatgactgaggcggtggagggccacatcacaactgagattgtcatgctgaatcctgccaatacccgcagcatttccaacatgacatcccaggaatttgtggagaaactaaccaagcgactgaaaagacaccctgaggagacaggaggcttccaggaggcaccgctggcctatgatgccatctgggccttggcactggccctgaacaagacatctggaggaggcggccgttctggtgtgcgcctggaggacttcaactacaacaaccagaccattaccgaccaaatctaccgggcaatgaactcttcgtcctttgagggtgtctctggccatgtggtgtttgatgccagcggctctcggatggcatggacgcttatcgagcagcttcagggtggcagctacaagaagattggctactatgacagcaccaaggatgatctttcctggtccaaaacagataaatggattggagggtcccccccagctgaccagaccctggtcatcaagacattccgcttcctgtcacagaaactctttatctccgtctcagttctctccagcctgggcattgtcctagctgttgtctgtctgtcctttaacatctacaactcacatgtccgttatatccagaactcacagcccaacctgaacaacctgactgctgtgggctgctcactggctttagctgctgtcttccccctggggctcgatggttaccacattgggaggaaccagttccctttcgtctgccaggcccgcctctggctcctgggcctgggctttagtctgggctacggttccatgttcaccaagatttggtgggtccacacggtcttcacaaagaaggaagaaaagaaggagtggaggaagactctggaaccctggaagctgtatgccacagtgggcctgctggtgggcatggatgtcctcactctcgccatctggcagatcgtggaccctctgcaccggaccattgagacatttgccaaggaggaacctaaggaagatattgacgtctctattctgccccagctggagcattgcagctccaggaagatgaatacatggcttggcattttctatggttacaaggggctgctgctgctgctgggaatcttccttgcttatgagaccaagagtgtgtccactgagaagatcaatgatcaccgggctgtgggcatggctatctacaatgtggcagtcctgtgcctcatcactgctcctgtcaccatgattctgtccagccagcaggatgcagcctttgcctttgcctctcttgccatagttttctcctcctatatcactcttgttgtgctctttgtgcccaagatgcgcaggctgatcacccgaggggaatggcagtcggaggcgcaggacaccatgaagacagggtcatcgaccaacaacaacgaggaggagaagtcccggctgttggagaaggagaaccgtgaactggaaaagatcattgctgagaaagaggagcgtgtctctgaactgcgccatcaactccagtctcggcagcagctccgctcccggcgccacccaccgacacccccagaaccctctgggggcctgcccaggggaccccctgagccccccgaccggcttagctgtgatgggagtcgagtgcatttgctttataagtgagggtgcatgtccgttccgaggaatgggatttaatgacctttgatgccaacccatatgacagcgtgaaaaaaatcaaagaacatgtccggtctaagaccaaggttcctgtgcaggaccaggttcttttgctgggctccaagatcttaaagccacggagaagcctctcatcttatggcactgacaaagagaagaccatccaccttaccctgaaagtggtgaagcccagtgatgaggagctgcccttgtttcttgtggagtcaggtgatgaggcaaagaggcacctcctccaggtgcgaaggtccagctcagtggcacaagtgaaagcaatgatcgagactaagacgggtataatccctgagacccagattgtgacttgcaatggaaagagactggaagatgggaagatgatggcagattacggcatcagaaagggcaacttactcttcctggcatcttattgtattggagggtgaccaccctggggatggggtgttggcaggggtcaaaaagcttatttcttttaatctcttactcaacgaacacatcttctgatgatttcccaaaattaatgagaatgagatgagtagagtaagatttgggtgggatgggtaggatgaagtatattgcccaactctatgtttctttgattctaacacaattaattaagtgacatgatttttactaatgtattactgagactagtaaataaatttttaaggcaaaatagagcattcaaagcca

SEQ ID NO: 210007 - DNA, 2535 bp, Artificial Sequence
  derived and/or modified sequence
atgggaccaggcgctccattcgcacgcgtggggtggccgctgccattgctggttgttatggccgccggcgtcgctcctgtgtgggcttcacattctccccacctccccaggccacactctagggtgcctccccacccttcaagcgaaagacgagccgtctacattggtgccctcttcccaatgtccggaggatggcctggaggccaagcttgccagcctgcagttgaaatggccctggaagacgtgaatagccgtcgagatattctccctgactacgaattaaaattgatacaccatgatagcaaatgcgatcccggtcaggctactaaatacctgtacgaactgctctacaatgacccaatcaaaattattctgatgcccggatgctccagcgtctctacacttgtggccgaggccgcccgtatgtggaatctaattgtgttgtcctacggctcatcttctccggccctcagcaataggcagcgatttccaaccttttttcgcacgcacccctctgctaccctgcacaaccccacccgagtgaaactgtttgagaagtggggatggaagaaaattgctaccatccagcaaaccaccgaagtcttcacaagtacgctcgatgacctggaagagagggttaaagaagcagggattgaaatcacattcagacagtcattctttagcgatcccgctgtgccggttaaaaacctgaaaaggcaagatgcccggattattgtcggattgttctatgaaactgaagccagaaaagtattctgtgaggtctacaaggagaggttgttcgggaagaagtacgtatggttcctgatcggatggtacgcagataactggtttaagatatatgatccttcaattaattgtacggtggacgagatgaccgaagcagtggagggccatattacaactgaaatcgtgatgctaaatccggctaatactagatctatttccaacatgacatctcaggagtttgtggaaaaacttacaaaaagactgaaaagacaccctgaagaaacgggcgggtttcaagaagcgccactggcttatgatgcaatctgggcacttgctctggcactaaacaagacatccggaggggggggacggtcaggagtacgtctggaagatttcaactataataatcaaacaatcaccgatcagatctatcgggctatgaattcaagttcgttcgaaggggtttcaggccacgtcgtctttgacgcctccgggtcgcggatggcttggaccttaatagagcagctccaaggaggaagctacaaaaaaatcggttattacgacagtaccaaggacgacctttcatggtctaaaacagataaatggatcggcggatcccctccagctgatcagactctcgttatcaaaacattcagatttctttctcagaaactgttcatatccgtaagcgttctgtcttccctggggattgtactggccgtcgtctgtctcagtttcaacatttacaatagccacgtcagatacattcagaattcccagccaaacctgaacaatttgaccgccgttggctgttcactcgctctggccgctgtgtttcccctcggcctggatggttaccacatcggtcgcaaccagtttcccttcgtgtgccaggctagactgtggctcttgggcctgggtttctccttgggctatggctccatgttcacaaagatttggtgggtacatactgtttttactaagaaagaagagaaaaaggaatggcgaaagaccctagaaccgtggaagctgtacgcaaccgtaggtcttctagtcggtatggatgtactcaccctggccatctggcagatcgttgacccactacatcgcaccatagagacgtttgctaaagaggaaccaaaggaggacattgacgtttccatcttgcctcagttagagcactgttctagtagaaagatgaatacatggctgggcatcttttatggttacaagggcctgctgctgttgcttggaatatttctagcatacgaaactaaatcagtgagtaccgaaaaaattaatgaccacagggctgtgggcatggccatctacaacgtggccgtcttatgtttaataacagcacccgtgaccatgattctgtcatcccagcaggacgccgcattcgcatttgccagcctcgctattgtgttttcgtcgtacatcacacttgttgttctgttcgttccgaagatgagacgtctaattacaagaggcgaatggcaaagcgaagcacaggacacgatgaagaccggatcttcaacaaacaacaacgaggaagagaaaagcaggcttctggagaaggaaaaccgcgaacttgaaaagattatagccgaaaaagaagagcgggtctctgaacttaggcatcagctccagagcagacaacaacttcgaagcagacgccacccacctacacccccggagcccagtggtggcctgccccggggtccacctgaaccccctgacagactctcatgcgacggctcacgagtacacttgctttataagtag

SEQ ID NO: 210008 - DNA, 4070 bp, Artificial Sequence
  derived and/or modified sequence
agtcagtccgcgaggagagtccgcggtggcggcgacggtggcgagagccgcgggggccgtaggaagccaaccttccctgcttctccggggccctcgccccctcctccccacaaaatcagggatggaggcgcctccccggcaccctcttagcagccctccccaggaaaagtgtcccccctgagctcctaacgctccccaacagctacccctgccccccacgccatggggcccggggccccttttgcccgggtggggtggccactgccgcttctggttgtgatggcggcaggggtggctccggtgtgggcctcccactccccccatctcccgcggcctcactcgcgggtccccccgcacccctcctcagaacggcgcgcagtgtacatcggggcactgtttcccatgagcgggggctggccagggggccaggcctgccagcccgcggtggagatggcgctggaggacgtgaatagccgcagggacatcctgccggactatgagctcaagctcatccaccacgacagcaagtgtgatccaggccaagccaccaagtacctatatgagctgctctacaacgaccctatcaagatcatccttatgcctggctgcagctctgtctccacgctggtggctgaggctgctaggatgtggaacctcattgtgctttcctatggctccagctcaccagccctgtcaaaccggcagcgtttccccactttcttccgaacgcacccatcagccacactccacaaccctacccgcgtgaaactctttgaaaagtggggctggaagaagattgctaccatccagcagaccactgaggtcttcacttcgactctggacgacctggaggaacgagtgaaggaggctggaattgagattactttccgccagagtttcttctcagatccagctgtgcccgtcaaaaacctgaagcgccaggatgcccgaatcatcgtgggacttttctatgagactgaagcccggaaagttttttgtgaggtgtacaaggagcgtctctttgggaagaagtacgtctggttcctcattgggtggtatgctgacaattggttcaagatctacgacccttctatcaactgcacagtggatgagatgactgaggcggtggagggccacatcacaactgagattgtcatgctgaatcctgccaatacccgcagcatttccaacatgacatcccaggaatttgtggagaaactaaccaagcgactgaaaagacaccctgaggagacaggaggcttccaggaggcaccgctggcctatgatgccatctgggccttggcactggccctgaacaagacatctggaggaggcggccgttctggtgtgcgcctggaggacttcaactacaacaaccagaccattaccgaccaaatctaccgggcaatgaactcttcgtcctttgagggtgtctctggccatgtggtgtttgatgccagcggctctcggatggcatggacgcttatcgagcagcttcagggtggcagctacaagaagattggctactatgacagcaccaaggatgatctttcctggtccaaaacagataaatggattggagggtcccccccagctgaccagaccctggtcatcaagacattccgcttcctgtcacagaaactctttatctccgtctcagttctctccagcctgggcattgtcctagctgttgtctgtctgtcctttaacatctacaactcacatgtccgttatatccagaactcacagcccaacctgaacaacctgactgctgtgggctgctcactggctttagctgctgtcttccccctggggctcgatggttaccacattgggaggaaccagttccctttcgtctgccaggcccgcctctggctcctgggcctgggctttagtctgggctacggttccatgttcaccaagatttggtgggtccacacggtcttcacaaagaaggaagaaaagaaggagtggaggaagactctggaaccctggaagctgtatgccacagtgggcctgctggtgggcatggatgtcctcactctcgccatctggcagatcgtggaccctctgcaccggaccattgagacatttgccaaggaggaacctaaggaagatattgacgtctctattctgccccagctggagcattgcagctccaggaagatgaatacatggcttggcattttctatggttacaaggggctgctgctgctgctgggaatcttccttgcttatgagaccaagagtgtgtccactgagaagatcaatgatcaccgggctgtgggcatggctatctacaatgtggcagtcctgtgcctcatcactgctcctgtcaccatgattctgtccagccagcaggatgcagcctttgcctttgcctctcttgccatagttttctcctcctatatcactcttgttgtgctctttgtgcccaagatgcgcaggctgatcacccgaggggaatggcagtcggaggcgcaggacaccatgaagacagggtcatcgaccaacaacaacgaggaggagaagtcccggctgttggagaaggagaaccgtgaactggaaaagatcattgctgagaaagaggagcgtgtctctgaactgcgccatcaactccagtctcggcagcagctccgctcccggcgccacccaccgacacccccagaaccctctgggggcctgcccaggggaccccctgagccccccgaccggcttagctgtgatgggagtcgagtgcatttgctttataagtgagggtagggtgagggaggacaggccagtagggggagggaaagggagaggggaagggcaggggactcaggaagcagggggtccccatccccagctgggaagaacatgctatccaatctcatctcttgtaaatacatgtccccctgtgagttctgggctgatttgggtctctcatacctctgggaaacagacctttttctctcttactgcttcatgtaattttgtatcacctcttcacaatttagttcgtacctggcttgaagctgctcactgctcacacgctgcctcctcagcagcctcactgcatctttctcttcccatgcaacaccctcttctagttaccacggcaacccctgcagctcctctgcctttgtgctctgttcctgtccagcaggggtctcccaacaagtgctctttccaccccaaaggggcctctccttttctccactgtcataatctctttccatcttacttgcccttccatactttctcacatgtggctccccctgaattttgcttcctttgggagctcattcttttcgccaaggctcacatgctccttgcctctgctctgtgcactcacgctcagcacacatgcatcctcccctctcctgcgtgtgcccactgaacatgctcatgtgtacacacgcttttcccgtatgctttcttcatgttcagtcacatgtgctctcgggtgccctgcattcacagctacgtgtgcccctctcatggtcatgggtctgcccttgagcgtgtttgggtaggcatgtgcaatttgtctagcatgctgagtcatgtctttcctatttgcacacgtccatgtttatccatgtactttccctgtgtaccctccatgtaccttgtgtactttcttcccttaaatcatggtattcttctgacagagccatatgtaccctaccctgcacattgttatgcacttttccccaattcatgtttggtggggccatccacaccctctccttgtcacagaatctccatttctgctcagattccccccatctccattgcattcatgtactaccctcagtctacactcacaatcatcttctcccaagactgctcccttttgttttgtgtttttttgaggggaattaaggaaaaataagtgggggcaggtttggagagctgcttccagtggatagttgatgagaatcctgaccaaaggaaggcacccttgactgttgggatagacagatggacctatggggtgggaggtggtgtccctttcacactgtggtgtctcttggggaaggatctccccgaatctcaataaaccagtgaacagtgtgactcgg

SEQ ID NO: 210009 - DNA, 2535 bp, Artificial Sequence
  derived and/or modified sequence
atgggcccaggagcaccgtttgcaagagtgggctggcctttgcccctgcttgtggttatggcagcaggagtggcaccagtatgggcctctcacagtccgcacctccctaggccacattcccgagtccccccccacccttcctccgagcgccgggcagtgtatattggggccctgtttcctatgtcaggaggatggccaggtggtcaggcttgccaacccgcagtagagatggcgctggaagatgtcaactccaggcgagatatcctcccagattacgaacttaagctcatccatcatgacagtaagtgcgatcctggccaagctactaagtacctttatgaactcctttacaacgatccaatcaaaattatcttgatgcccggttgctcttccgtatcaacattggtggcagaggcagccagaatgtggaacctgatagtcctctcctatggaagttcttcgcctgcattgagcaatcgccagaggttcccaactttctttcgaacccaccccagtgctaccctgcataaccctacacgggtgaaactgtttgagaaatggggttggaagaagattgctaccattcaacagaccaccgaagtcttcacatccacgctcgacgatttggaagagagagttaaagaggccggtattgagataacgttcagacagtcttttttctctgatcctgctgtgcctgtgaaaaacctaaaacgccaggacgccaggattatcgtgggactgttctatgagaccgaagcccggaaagtgttttgtgaggtctataaggagagattgtttggcaaaaagtacgtctggtttctcattgggtggtatgcagataattggtttaaaatctacgacccgtccattaactgtaccgttgacgagatgactgaggcagtcgaaggccacatcaccaccgagatagtcatgctcaatccagcaaacacaaggtctatcagcaatatgacaagccaggaattcgtcgaaaagctgacaaagaggctgaagcgtcaccccgaagaaacaggagggtttcaggaggcccctctggcctatgacgctatatgggcacttgctctagctttgaataaaaccagtgggggaggcggtagatctggggttagacttgaggacttcaattacaataaccagacaataaccgatcaaatatatagagccatgaatagctcttcctttgaaggcgtgtctggacacgtggtctttgatgcaagcgggagcaggatggcctggactcttatcgagcagctgcagggaggatcctacaagaaaattggctattatgactctacaaaagatgatttgagttggagcaaaacggataagtggatcgggggttccccaccggcggatcagaccttggtgatcaaaacttttagattcctttcacaaaaactctttattagtgtctctgtgttatcaagcctgggcattgtactggctgttgtgtgcctatcatttaacatttacaattcccacgtccggtatatccagaacagtcaacctaatctgaacaatctgacagccgtgggatgttcacttgctctcgctgccgtgtttcctcttggtctagatggctatcatatcggaaggaaccagtttccatttgtctgtcaagcccgactgtggctgctaggactgggatttagtctcggttacggatctatgttcacgaagatctggtgggtgcatacagtgttcactaagaaagaagaaaagaaggaatggagaaagacactcgaaccctggaaattgtacgcaaccgtcggcttactcgtggggatggacgtgctgacattggcaatatggcagattgtggatcctttacacagaacaattgaaacattcgctaaagaggaacctaaagaggacattgacgtctccattctcccacagttggaacattgttcaagccgtaagatgaacacttggctcggaattttttatgggtacaagggcctcctgcttctattgggtattttccttgcatacgaaacaaaatcagttagcaccgaaaaaattaacgaccaccgggctgtcggaatggctatttacaacgttgctgtgctttgcctgataactgcccccgttacaatgatcttaagttctcaacaggatgcagcgtttgcctttgcttcgcttgccattgtatttagttcatatatcaccctggttgtcctatttgtgcctaagatgcgtagattgattactcgcggagaatggcaatcagaggctcaggacactatgaaaactggcagctctacaaataacaacgaagaagagaagtccaggctcctcgaaaaggagaaccgtgagctggaaaagataattgccgaaaaagaagagcgcgtttccgagctccggcaccaattgcaatccagacaacagctaagaagcaggcgacacccaccaacaccaccagaacccagcggcggccttccacggggacctccagagccacctgaccgcctgtcctgcgacggatcaagggtccacctgttatacaagtag

SEQ ID NO: 210010 - DNA, 2535 bp, Artificial Sequence
  derived and/or modified sequence
atgggacccggtgccccatttgcccgcgttgggtggcctctcccactgctggtcgttatggccgctggtgtggccccggtgtgggcgtcacactcaccccacttgccccgtcctcactctcgtgtaccaccccacccgagctccgaaaggcgagccgtatatataggcgcccttttccccatgtctggtgggtggcccggaggccaggcctgtcagcccgccgtcgagatggcactggaagacgttaattcccgcagagacatactccctgattatgaactgaaactgattcatcacgactccaaatgcgaccctggccaggcaaccaagtacctgtacgaactgctgtacaatgacccaatcaaaattattctgatgccaggctgttcatccgtttctacattagtcgccgaagccgcgagaatgtggaatttaatcgtcctaagttatgggagttctagtccggcactgtctaaccgtcaaagatttcctacttttttccggacccatccgtcggcaaccctccacaatcctacacgcgtaaagctattcgagaaatggggatggaagaaaattgcaaccatacagcagacaaccgaggtattcacttctactttagatgatctcgaggaacgtgtgaaagaagctggaattgagattacattccgccaatccttcttttctgaccccgccgtaccggtcaaaaatcttaagcgtcaggacgcgcgtatcattgtggggctgttctacgagacagaggcaaggaaggtgttttgtgaagtgtacaaggagcgattatttgggaaaaagtacgtttggtttctgatcgggtggtacgcggataattggtttaaaatctacgatccatcgataaactgcactgtggacgaaatgactgaggccgtggagggacatatcaccacagagatagtgatgttgaatccagccaacactcgatcgatctcaaacatgacaagccaagaatttgtcgaaaaactcaccaaaagattgaaacggcatccagaggaaacaggcggttttcaagaggcaccactggcatacgacgcaatttgggctctggctctggcgctcaacaagacttccggaggaggtggccggagcggagtcaggctagaagattttaactataataaccagactatcacagatcagatctaccgtgcaatgaacagtagtagcttcgaaggggtttcagggcacgttgtttttgacgccagcggtagcaggatggcttggactttaatagaacagctccaagggggctcatacaagaagatcggatattatgattctacaaaggacgacctcagttggtccaagacagacaagtggatcggcggcagccctcccgccgaccagaccctggtcattaagacgttcaggttcttatctcagaaattattcatctctgtatccgtcctgtccagtctcggcattgtattagcggtggtttgcctcagtttcaacatttacaattcccatgtgcggtacattcagaattcacagccaaatctcaataacctgaccgcggtcggatgctctcttgccctagctgccgtgtttcccctaggtctggacgggtatcacatcgggcggaatcaattcccattcgtgtgtcaagctagactttggctccttggacttggtttctctctgggatacgggtcaatgtttactaaaatctggtgggtgcacaccgtttttacaaaaaaggaggagaaaaaagagtggaggaaaacattagagccatggaaattatacgccacagtcggtcttctggtcgggatggatgtgcttactctcgctatctggcagatcgtagatcctttacatagaactatagagacctttgccaaagaagagcctaaagaagatatcgacgttagtatcttacctcagcttgaacactgctcatctaggaagatgaacacctggttggggatcttttacggctacaagggactgttactgctgctgggcattttccttgcttatgaaacaaagtccgtatccaccgagaaaattaatgatcaccgggccgtcggaatggctatttacaatgttgccgtgctgtgtttgataacagcccccgtaacaatgattctaagctcacagcaggacgctgcctttgcttttgcaagtctggcaatcgtatttagctcatacattacgctggtcgtactcttcgtccctaagatgcgtcgtctgataacaaggggtgaatggcaatctgaggcccaggacacaatgaaaacaggaagctctaccaacaacaacgaagaagagaaaagccggttgcttgaaaaagagaatcgagaactagagaaaatcattgccgagaaggaagaaagagtatcagagctacgtcatcagcttcagtcaagacaacagctgagatctcgaagacaccctcccactccaccagagccttccggaggcctgccccgtggcccgcccgagcccccggacagactgtcctgtgacggtagccgtgtacatttactgtataagtag

SEQ ID NO: 210011 - DNA, 2535 bp, Artificial Sequence
  derived and/or modified sequence
atggggcctggtgccccctttgcccgcgtgggctggccacttcccctgcttgtcgtaatggccgccggcgtagctcccgtctgggccagtcactctcctcacctgcccaggccgcacagtcgtgttccaccccatccctccagtgaacgtcgcgcagtatacataggagctttatttccgatgagcggcgggtggcccggaggacaggcatgtcagccagctgttgaaatggcacttgaggacgtcaatagcagaagagatatcctacccgactacgagctgaaactgatccaccatgactcaaaatgtgatccaggacaggccaccaagtacctctatgagctgctgtacaatgacccaatcaaaataatccttatgccaggctgctcctcagtatcaaccctcgtggcggaggccgccagaatgtggaacctgattgtcctgtcttacggctcttcttctcctgccttatctaacagacaacgcttccccaccttcttccgaacacacccctccgccacccttcataatccaactagagtgaaactttttgagaaatggggctggaaaaagattgccaccatccagcagacaactgaagtatttacttccacactggatgatctggaagagcgtgtgaaggaagccgggatcgaaataacattcagacagtccttcttttcagatcccgccgtgcccgtgaagaatttgaaacgccaagatgccaggatcattgtgggcctgttctatgagaccgaggccaggaaggtgttctgtgaagtgtataaagagagactctttggaaagaagtatgtttggtttctaattggatggtatgctgataattggttcaaaatttatgatccatccattaactgtactgtggatgaaatgactgaagcggtggaaggacatattactacagaaattgttatgttaaatccggctaatacccgttccatttctaacatgactagccaggaattcgtggagaaactcaccaagagattgaagcgccaccccgaggaaaccggaggtttccaggaagctcctttggcctacgatgccatttgggccctcgcccttgcactaaacaagacatcgggcggcggtgggaggtctggagtacgattagaagatttcaactacaataaccaaacaattactgatcagatctatagagccatgaattcctcctcatttgaaggagtatctgggcacgtagtcttcgacgcaagcggcagtagaatggcttggactttaatagaacagcttcagggtggttcttacaagaaaattggatattacgattcaaccaaagacgacctgtcttggagcaaaacggacaaatggatcggaggcagccccccagccgaccaaacactggtgattaagaccttcaggtttctatcccaaaaactgttcattagcgtttctgtcctttcctccctgggcattgtcctcgcagtggtgtgtctgtcatttaacatctataacagtcacgttcgctacatacagaattcgcagcccaatctcaataatctcaccgcagtcggctgcagcctggctctggcagctgttttcccattaggcctggacggttaccatatcggacgcaatcagttcccttttgtatgtcaagcccgcctgtggctgttaggactcggcttttcactgggctacggttccatgtttaccaagatctggtgggtgcacacggtgtttacaaaaaaggaggaaaaaaaagagtggcgaaaaaccttggaaccatggaagctgtatgctacagtcggtttgctggttggcatggacgtgctgactttggctatctggcaaattgtcgacccactgcataggacaatcgaaacgttcgcaaaagaggaaccaaaagaagatatcgatgttagcattttaccgcagctcgaacactgctcctcccggaaaatgaacacatggcttggaattttttatggctataaaggtcttctgctcctgctgggcatctttcttgcctacgaaacaaaaagcgtatctaccgagaaaatcaacgaccatcgtgccgtaggcatggccatctacaacgttgctgtgctgtgtctcatcaccgcacctgtcacaatgattctgtctagccagcaggacgctgccttcgcttttgcctcgttagcaatcgttttcagcagctatatcactctggttgtattgtttgttccaaaaatgcgccggcttatcacgcggggagaatggcagtccgaggctcaggataccatgaaaactggctctagtacaaacaacaatgaagaagagaaatctagattattggagaaggaaaatcgcgagttggagaagattatcgctgaaaaagaagaacgagtgtccgaactgcgccatcaactccaatcaaggcagcagttaagatctcgacggcacccacctaccccaccagagccttctggcggtcttcctagaggtccccctgaacccccagataggctatcttgcgatggctccagagtacaccttttgtataagtag

SEQ ID NO: 210012 - DNA, 2535 bp, Artificial Sequence
  derived and/or modified sequence
atgggacctggcgcaccttttgctcgagttggctggccactacctctgttagtagtgatggctgccggcgtggcgcctgtctgggcaagtcattctcctcacctccctagacctcatagccgcgtgcctccacatcctagttccgaacgaagggccgtttatatcggagcactattccctatgtctggaggatggcctggagggcaggcgtgccagcccgccgtcgagatggctttagaagacgttaattcacgccgggacattctccccgactatgaactgaagctaatccaccacgattctaagtgtgacccaggccaggctaccaaatacttgtacgagcttttatacaacgaccccatcaaaataatccttatgccaggttgctcctccgtcagtacactcgtggctgaagcagccaggatgtggaaccttatagtactcagttatggctccagctcccccgcactgtccaacagacaacggttcccgactttttttcgcacccatccttcagccacactacacaaccctacgcgcgtcaagctgtttgagaagtggggctggaagaaaatcgcaacgattcagcaaacgaccgaggtgttcacatccactctggacgatctcgaagaacgagttaaggaggctggcatcgaaatcacattcaggcagtcgttttttagcgacccagctgttcccgtaaagaacttaaagagacaagacgctagaataatcgttggcctattttatgagaccgaggcaagaaaggtattttgcgaagtgtataaggaacgactcttcggaaaaaaatacgtatggtttctaatcggctggtacgctgacaattggttcaaaatttatgatccctctatcaattgtacagtggacgaaatgacagaggccgtagaaggtcacatcaccaccgagatcgtaatgctaaatcctgccaataccagaagcatttccaatatgacttctcaagaattcgttgagaaattgactaaaaggctaaaaagacacccagaagagactgggggttttcaagaggctcctctagcttacgacgctatatgggctctagccttagctctgaacaagacaagtgggggaggaggacgcagtggcgtcaggctcgaagattttaattataacaatcaaactatcacggatcagatctatagagcaatgaatagcagcagcttcgaaggagtgtcgggccacgtggtgtttgatgcctccggctctcgaatggcttggacactaatagagcagctgcagggggggagttacaaaaagataggctattatgacagcaccaaggacgacctgagctggtctaaaacagataagtggattgggggttcccctccagccgatcagacattggtgataaaaaccttcagattcctttcacagaaactctttattagcgtaagcgtactgtcgtcactgggtatagtgttagccgttgtttgcttgtctttcaacatatataatagccacgtcagatatattcaaaactcacagcctaatctcaataacttgacggcagttgggtgttccctggcccttgcagctgtgttccctctaggcctggacggttaccatatcggcagaaaccagtttccattcgtgtgtcaggcacgactgtggttgctaggccttgggttttccctgggatacggttctatgttcacaaaaatttggtgggtgcacacagtgtttacaaagaaagaggaaaagaaggagtggcgtaaaaccttagaaccatggaaactgtacgctactgtcggattattagtgggaatggacgtgctgaccttggccatctggcagattgtggacccgcttcatcgcacaattgagacgttcgcaaaagaagagcctaaagaagacattgacgtatccatcctaccacagttggagcactgtagctcgcgcaaaatgaacacgtggcttggaatcttttacggttacaagggtttgcttctgctactgggtatctttttggcttacgagactaagagcgtgtcgacagaaaaaatcaatgatcacagggcagtgggaatggctatttataacgtcgccgtgttgtgtctgatcacagcccccgtgactatgatattaagctcgcaacaggacgctgccttcgcatttgcttctttggccatcgtcttcagctcgtatattacattggtcgtgctgtttgtgcctaaaatgaggaggctgatcactaggggagaatggcaaagtgaagcccaggacactatgaaaaccgggtcgtctaccaacaacaatgaagaggaaaaaagccgactccttgagaaagagaaccgcgagttagaaaaaattattgcagaaaaagaagaaagagtaagcgagttacgacatcaactccagagcagacaacagctacgcagtcggcgacacccacctactccccctgagccttctggtgggctcccacgcggaccacccgaacccccagacagactctcttgcgacggctccagggtgcacctgctttacaagtag

SEQ ID NO: 210013 - DNA, 2535 bp, Artificial Sequence
  derived and/or modified sequence
atgggacccggagctcctttcgccagggtgggatggccgcttcctcttttagttgtgatggctgccggagtagctcccgtctgggcatcacattcgccccatttgccccgaccccacagcagagttcctccccatccgtcttctgaacgccgagcagtgtacatcggggccttgtttccaatgtccgggggctggcccgggggacaagcgtgccagcctgctgtagagatggcgctcgaggacgtcaactcccgccgagatattctgccagactatgagctgaaactaattcatcacgatagtaagtgcgacccaggccaggccacgaaatatctgtatgaactgttgtataacgaccctattaaaattattctgatgcccggatgctctagcgtctctaccttggttgcagaggccgccagaatgtggaatctgattgtgctcagttacggttctagttccccggctctatccaacagacaacgtttcccgacattttttagaacacatccgtctgccaccctgcataacccaacacgtgtcaagctcttcgagaaatgggggtggaagaagatagccaccatccaacagaccaccgaagtgtttactagtacactcgacgatctggaagaaagagttaaagaagcgggtatcgagataaccttccgtcaatccttcttttcagatcctgctgtgcccgtgaaaaatctgaaacgccaggacgcccgaattatcgtgggcctgttctacgagacagaagccagaaaagtgttttgcgaagtatacaaggagcggctcttcgggaaaaaatatgtatggtttttaatcgggtggtacgccgacaactggtttaaaatatatgacccttctattaactgtactgtggatgaaatgaccgaggctgttgaaggacatatcactacagagattgtgatgctgaacccagctaataccaggagcatatcaaacatgacttcacaggaattcgtagagaaacttaccaaacggttgaaaagacacccggaagaaactggtggcttccaggaagcacccctcgcgtacgatgcaatctgggctttggccctagctcttaacaagactagcggagggggcggcagatcaggagttcggctggaagattttaattataacaatcaaaccatcactgaccagatttacagggccatgaatagctccagcttcgaaggcgtgtccggccacgtggtattcgacgcctcaggaagtaggatggcctggaccttgattgagcagctacagggagggtcttacaaaaaaattggttactacgacagcactaaggacgatctatcatggagcaaaactgacaaatggatcggtggaagcccgcccgccgaccagactctggtgatcaaaacttttcggtttttgtctcagaaattattcatctccgtttccgtgttgagtagtttaggaatagtattggctgttgtctgtctcagcttcaacatctataacagtcacgtcagatatatccaaaactcacagcctaacctaaacaacctgactgcagtggggtgcagcctggcactagcagctgtgttccccttgggccttgacggataccatatcggaagaaaccagttcccctttgtatgccaggcccgtctctggctgctgggattaggattttccctgggctacggctcaatgtttactaaaatttggtgggtccacactgtctttactaaaaaagaggaaaagaaggaatggcggaagaccctggaaccatggaaactgtatgcaacagtagggcttttggtgggtatggacgtgttgaccttggcaatttggcagatcgttgatccccttcaccgtactattgaaacttttgccaaagaagagccaaaagaagatattgacgtgagcattctgccacagctggaacattgtagttctcgcaaaatgaacacatggctgggtattttctacggttacaaaggactcttgcttttactagggatctttctggcatacgaaaccaaaagtgtgagtacagaaaaaataaacgatcatcgcgctgtaggcatggctatatacaacgtggcagttctgtgtctaattactgcccccgtcaccatgattctttctagccaacaggatgccgccttcgcttttgcctcactggcaatcgtgttttcatcctatatcacacttgtcgtgctgttcgtacccaaaatgcgcaggctgatcacccggggtgaatggcagtcagaggcccaggatactatgaagaccgggagctcaaccaacaataacgaggaagaaaaatcacggctgctggaaaaagagaatagagaactggaaaagatcatcgccgagaaagaagagagggtttcagaattaaggcaccaactccagtcacggcagcaactaaggtccagacgccaccccccaactcctccagagccgagcggaggcttgcccagaggtcctccggaacctcctgatagactgtcctgcgacggatctcgcgtgcacttgctctataagtag

SEQ ID NO: 210014 - DNA, 2535 bp, Artificial Sequence
  derived and/or modified sequence
atgggccccggcgcaccattcgctcgagtgggctggcctcttcccctccttgtggtcatggcagctggggtcgctcccgtatgggcatctcactctccgcaccttcctaggcctcactctagagtgccaccccacccctcgtctgaacgcagggctgtatacataggcgccctcttccctatgagtggaggatggcccggcggacaagcttgccaaccagcggttgagatggctctcgaagacgtgaattcacggcgtgacattctacctgattacgaactcaagctcatccaccacgacagcaaatgtgacccagggcaggctacgaaatatttatacgagttattatacaacgaccctatcaagataattttgatgcctggctgttcctctgtgtccacgttagtggccgaagcagctagaatgtggaaccttatcgtgctttcctacggctcctcatcaccggcccttagtaaccgccagagatttcctacttttttcagaacgcacccatcagctaccctacataatcccacgcgggtgaagttatttgaaaaatggggatggaaaaagatcgccacaatacaacagaccaccgaggtttttacttccacgttagacgatcttgaagagagagtcaaggaagccggcattgagattacattcaggcaaagcttttttagcgaccccgcagttcccgttaagaatctaaagagacaggacgccagaatcatagtgggtctgttctacgaaaccgaggcacgtaaggtgttttgcgaagtgtacaaggagcggttgttcggaaaaaaatatgtgtggtttctgataggatggtacgcagataactggtttaagatttatgacccctccatcaactgcacagtcgatgaaatgaccgaggcagtcgagggacacatcaccacggaaattgtgatgttgaaccctgcaaatacccggtctatcagcaacatgacttcacaggaattcgttgagaagctgactaagcgattaaagagacacccagaagaaacaggtgggttccaggaggctccactggcatatgatgcgatttgggccctcgcattagccctgaacaaaacttctggaggcggaggcagaagcggggtgcgcctggaggactttaactacaacaatcaaacaatcacagatcagatctatcgcgccatgaattctagctcatttgaaggcgtctctgggcatgttgtgtttgatgcctctggtagcaggatggcttggaccttaatagaacaactgcagggtggtagctacaagaagattggctactatgattcaacaaaagatgatctatcctggagtaagacggataaatggattggaggctctccacctgccgatcaaacactagttattaaaacattccgatttctgagccaaaagctcttcatctccgtttcagtgctcagctccttaggcatcgtgttagcggtggtttgcctgagttttaatatctacaattcacatgtgagatacattcaaaattctcaacccaatcttaataacctgactgctgttggttgctctctcgcattagccgctgtgtttccactcgggctagatggataccatataggtaggaaccagttcccgttcgtgtgtcaggctcgcttatggctacttggactcggattctccttggggtatggatccatgttcacaaagatctggtgggttcatactgtgtttaccaaaaaagaagaaaagaaagaatggcgaaagacactggagccctggaagctgtatgccaccgtgggcctcctagtagggatggatgtcctcactcttgcaatctggcaaatagtggaccccctgcaccggaccattgagacctttgcaaaagaagaaccaaaagaagatattgacgtgtccattctgccccaattggaacactgtagcagcagaaagatgaacacctggctgggaatattttatggatataaggggttgctgctgttactgggaatatttttagcatacgagaccaagagcgtcagtacagaaaagattaacgaccatagggctgtgggaatggcaatctataacgtggccgtcttatgcctgataacagctcccgtgaccatgattctctcctcacagcaggacgcagcctttgccttcgcttccctggccattgtcttttcctcatacatcacacttgtcgtgttgttcgtccccaagatgcggaggcttattacccgtggcgaatggcagagtgaggcccaggataccatgaagacaggatctagtactaacaacaacgaagaagaaaaaagcagacttttggaaaaagagaaccgcgaattggagaaaatcattgcagagaaagaggaacgcgtatccgagcttcgccatcagttgcagagccgccagcagctgcgttctcgcaggcaccctcccacccctcccgaaccatccggcggactccccaggggccctccagaacctccagataggctctcttgcgacggatctagagtacacctcctgtataagtag

SEQ ID NO: 210015 - DNA, 2535 bp, Artificial Sequence
  derived and/or modified sequence
atgggacccggtgcccccttcgcccgcgttgggtggcccctgcctctgctggtcgtgatggctgcaggagtcgctcccgtgtgggcctcccattctcctcatctgccccgccctcacagccgagtcccacctcatccgtcaagcgagagacgggcggtttatattggtgccctgttccccatgtcgggcggatggcccggtggtcaggcttgtcaacccgcagtcgagatggccctagaagacgttaactccaggcgcgatatccttcccgattacgaactgaagctgatacaccatgacagcaaatgcgaccctggtcaagcaacaaaatatctttacgagctactgtacaacgatcctatcaaaattatcctgatgccgggctgcagctccgtgagtactctagtcgccgaagccgcaagaatgtggaatctgatcgtccttagttatggcagcagttctcccgctttatctaatagacagcgtttccccacctttttccggacacacccatctgcaactttgcataatcccacacgcgtgaagctcttcgagaagtggggctggaaaaaaatcgcaaccattcaacagactacggaggtattcacttcaacactcgacgacctcgaggaacgagtcaaggaggctgggatcgaaatcacctttaggcaatcattcttcagtgacccagcagttcctgtaaaaaacctgaagagacaagacgcgcggattattgtaggcctgttttatgagaccgaggccagaaaggtattctgtgaagtgtacaaagagagactgttcggaaaaaagtacgtgtggttcctgatcggatggtatgcagacaactggtttaagatctatgatccctcaatcaattgtacagtagatgaaatgaccgaagccgtcgagggccatataacgaccgaaatagtcatgctaaaccctgcaaataccagaagcatttcaaatatgacgagtcaagaatttgtcgagaagttaacaaagcgactgaagagacatcccgaggagactggtggcttccaagaagcgcccttagcctatgacgcaatctgggcacttgccctagccttgaataagacttctggtgggggaggtagaagcggggtgcgcctggaagatttcaactataataaccagacaatcacagaccagatatacagagcaatgaactctagctcctttgagggtgtcagtggtcatgtggtgttcgacgcttcgggatctaggatggcctggactctaatagaacaactgcaggggggttcttataagaagattggttactatgattcaactaaggacgatctctcttggtcgaagacagataaatggatcggaggctcaccacccgctgaccagactcttgtgattaagacctttagattcttgtcgcaaaaactgttcatctcagtcagcgtgttgtcttccttgggcatcgtgctcgccgtcgtgtgcttaagctttaatatttataactcccacgtgaggtatatccaaaatagtcaaccaaatctcaataatctcacagcagttggttgttccttagcgttggctgctgtgttccccctaggattagacgggtaccatatcggaaggaatcagttcccatttgtttgccaggctcggttatggctgctcggacttggcttttcactcggctacggctctatgttcaccaagatctggtgggttcacacagtgtttaccaagaaagaggaaaagaaagagtggagaaaaactctcgaaccatggaaattgtatgccacggtgggcctgctggtgggaatggatgtcctgacactggctatttggcagattgtggaccccctgcacagaacaatcgagacatttgcaaaggaggaacctaaagaggatatcgacgtcagcattctgcctcagcttgaacactgctcctcacgtaagatgaatacctggctgggaatcttctacggttacaaaggactactgctccttctgggaatctttctagcttacgaaaccaagagtgtgagtactgagaaaattaacgaccatagggctgttggcatggcaatctacaatgtggcggtgctttgtttgattacggctcctgttaccatgatcctctccagccagcaggacgcagcctttgcctttgcctccctcgccattgttttttcttcctacatcactttagttgtgctgttcgtacccaagatgcgccgacttatcacaaggggagaatggcaaagcgaagcccaggacacaatgaagactggctcatccaccaataataacgaagaagaaaagagtagactgttagagaaggaaaatagagagttagagaagattatagcagaaaaagaagagcgcgtttccgaattgcgacaccagcttcagtcgcgccaacaactaagatcaaggagacacccaccaaccccgccagagccctcaggtggactccccaggggccctcccgaaccccccgacagactttcctgcgatggtagccgagtgcatttgctatataaatag

SEQ ID NO: 210016 - DNA, 2535 bp, Artificial Sequence
  derived and/or modified sequence
atgggacctggagccccgttcgcccgtgttggctggcctctacctctgctggtcgtaatggctgcaggcgttgcccctgtctgggccagccacagccctcatctcccaagacctcactccagagtgccacctcacccttcctccgaaaggcgtgccgtctacatcggtgctctgttccccatgtcaggcggctggcccggcggtcaggcttgccaaccagccgtcgagatggctctggaggacgtgaattcaagacgcgatattctgccagattacgaactcaagctgattcatcacgacagtaaatgcgatcccggtcaagcgacgaaatatttgtatgaactgctttacaatgatcccattaagatcattctgatgccgggttgttcttcagtatcaactctggttgcagaagccgcgcggatgtggaacttaattgtcctctcttacggttcatcctcccctgctctgagtaatcgacaacggtttcctactttctttagaacgcacccttcagccactctccacaaccctactagagtaaagctgtttgagaagtggggatggaagaagatcgcaacaattcagcagacaacagaggttttcacttcaacattagacgacctggaggagagagtcaaagaggcgggaattgaaattacctttagacagtcattctttagcgaccccgctgtccctgtgaagaacctgaaaaggcaagacgctagaatcatcgtcggcttgttttacgaaaccgaagctagaaaggtattttgtgaagtctacaaggagcggttgtttggaaaaaagtacgtttggtttctgattggatggtacgctgacaattggtttaagatctacgacccatccatcaattgtacggtagacgagatgacagaggcagtagagggtcatataaccacagaaattgtgatgttgaatccggcaaacactagaagtatctctaacatgactagtcaggagttcgtcgaaaaactcaccaaaaggcttaagcggcaccccgaggaaaccggaggcttccaggaagcccctttggcatacgatgcaatttgggccctggcactcgctctcaacaagacttccggtggcggtggtcggtccggcgtcagactcgaggattttaactacaataaccagacaataacagatcagatttaccgggctatgaacagctccagctttgagggagtatcagggcacgtcgtttttgacgcgtcaggtagccgcatggcttggaccctgatcgaacagttacaaggaggctcttataagaaaatcggttactatgatagcaccaaagatgacttgtcatggtccaagacagacaagtggataggaggctcaccacctgctgaccagactctcgtgatcaaaacatttagattcttatcccaaaaattgtttatatctgtgtcggtcttgtcctccctgggcattgtgcttgccgtggtgtgtcttagctttaatatctacaacagccacgtacgttatatccaaaattcccagcccaacctcaataatctaaccgcagtaggttgcagtctggcactcgccgcagtctttcccctgggtctggacggctatcatattggaagaaatcagttcccctttgtgtgtcaagcccgtctgtggcttttgggccttggtttttctctgggttacggttccatgttcacaaagatatggtgggtgcatacggtgtttactaaaaaggaagagaagaaagaatggcgtaagaccctggagccttggaagctctacgcaacagtcggtctgttggtcggcatggacgtgcttactctcgctatatggcaaatagttgaccctctgcacaggaccatcgaaacctttgcaaaagaagagcccaaagaagatatcgatgtgtccatccttcctcagttggaacactgcagttctcgcaaaatgaacacttggctcggcatcttttatggttacaagggtctattactgcttttaggaattttcctggcttatgaaactaaatcagttagcacagaaaaaattaacgaccatagagcagtcggcatggcaatttacaatgtcgcagttctttgtctgattacggctcccgtcactatgattctgtcgtctcagcaggatgcagcgttcgctttcgccagcctggctatcgtgtttagttcctacatcacgttggtcgttttgttcgtgcctaagatgagacgtttgattacccggggcgagtggcaatcagaagcacaagacacaatgaaaaccggaagttccacgaacaacaatgaagaagagaagagtcgactgctggaaaaagaaaatagagagttggaaaagatcatcgctgaaaaggaggaaagggtgtccgagctgcggcatcagttacaaagccgccaacagctaagatctagacgccatccacctacccctcctgaacctagcggcggattacccagaggaccaccagagccccctgatagactgtcttgcgatgggagtagagtgcatttactgtacaaatag

SEQ ID NO: 210017 - DNA, 2535 bp, Artificial Sequence
  derived and/or modified sequence
atgggacccggcgccccattcgcacgcgttggatggcccctcccacttctggtggtcatggctgctggagtggctcccgtttgggcctctcactccccccacctacctcgcccacattctagggtccccccccatccttcgagcgaaagaagggctgtctacataggcgctctgttcccaatgtctggcggctggcctggcgggcaggcttgccaacctgcagtcgaaatggctctcgaggatgtcaactcccggcgcgatatcctcccagattatgaacttaaactgatacatcatgattctaagtgtgaccccggccaagccactaagtatctttatgaactactttacaatgaccctatcaagatcatcctgatgcccggatgtagttccgtcagcacacttgtcgccgaagctgcacgcatgtggaaccttatagtactcagctacggttcctcttcccctgccctctccaatcgacaacggtttccaactttctttcgaactcacccctccgccaccctgcacaacccaaccagagtcaagttgttcgaaaagtggggttggaagaaaatagccaccattcagcaaactaccgaagtattcacaagcaccttagatgatctggaggaacgggtgaaggaggccggaatagagatcacattcagacaaagcttttttagcgacccggccgtgcccgtgaaaaacctgaaaagacaagacgccagaattatagttggacttttctatgagactgaggctcgcaaagtcttctgtgaagtgtataaagagagactcttcggcaaaaagtacgtgtggttcctgataggctggtatgccgataactggttcaaaatctacgatccctccatcaactgcaccgtcgacgaaatgaccgaggctgtcgagggacacattaccactgagatagtgatgctgaaccccgccaacactcgaagcattagtaatatgacatcacaggagtttgtggaaaaactaactaaacgactaaagagacaccccgaagagacaggcggctttcaagaagcccccctggcatatgacgctatctgggctctggcattggccttgaacaagacctccgggggcggtggccggagcggcgtgcggctagaagactttaactacaacaatcaaaccatcaccgaccagatttacagagcaatgaactcatcaagcttcgagggagtgagcggtcatgttgtttttgacgctagtggttcccggatggcctggaccttgattgaacagctccagggcggatcatacaaaaagatcgggtattacgattccactaaagacgacctcagttggtccaagacggacaaatggatcggaggatccccacccgcggatcagacacttgttataaaaaccttcagatttctctcccaaaagctcttcatcagcgtgagtgtgctgtcatccctcggcattgtcctcgccgtcgtttgcctgtcttttaatatttataactcccatgttcgctacatccaaaattcacaaccaaatcttaataatctaactgcagtcggctgctccctggctctcgctgctgtgtttccactgggactggatggttaccacattggacggaatcagttcccattcgtgtgtcaggctcgcctatggttactggggctcggctttagcctgggctacgggtctatgttcacaaaaatctggtgggttcatacagttttcactaaaaaggaggagaaaaaagaatggcgtaaaacactagaaccctggaaactctacgctacggtcggcctactcgtgggcatggacgttctgacactggctatatggcagattgtcgaccccctccaccgcacaattgaaacatttgccaaagaggaaccaaaagaggatatagacgtctccattcttccccagttagaacactgctctagtagaaaaatgaatacatggctaggtattttctacggatacaagggacttttactgctcttaggtattttcctggcctatgaaactaaatctgtttcaacggagaagataaatgatcatcgcgcagtgggcatggcgatctacaacgtggctgtcttgtgcctgataacagcccccgttacaatgatcctcagcagccaacaagacgccgcattcgcattcgcttccctggccattgttttctcttcctatattacactcgtggtgttgtttgtccccaagatgcggcgcttaattacccgcggcgagtggcagagtgaggctcaggacaccatgaagacaggctcgagtactaacaacaacgaggaagagaagtcgcgattactcgaaaaagaaaacagagaactggagaaaattattgccgaaaaggaggaaagagtttccgaactgagacaccagttgcagagcagacagcagttgagaagtagacggcaccccccaactcctccagaacctagtggagggctgcctagaggcccacccgaaccacccgatagattgtcttgcgatggaagtcgtgtgcatcttttgtacaagtag

SEQ ID NO: 210018 - DNA, 2535 bp, Artificial Sequence
  derived and/or modified sequence
atggggcccggcgctccttttgcccgagtgggatggccacttcccctattagtcgtgatggctgctggagtcgcccccgtgtgggcctcccactcaccgcacttacctcgcccccactcccgagttcccccacacccttcctcggagaggcgcgcagtttacatcggcgctttgttccccatgtccgggggttggcccgggggccaagcctgccaaccggctgtcgaaatggcattggaagacgtcaattctcgtcgtgacatcctgcctgactatgaactaaaactcatccaccacgactccaaatgtgacccaggacaagccaccaagtatctctatgaattactgtacaatgatcccattaaaataatactaatgccaggatgcagctctgtctcgactcttgtggctgaagccgctagaatgtggaatctaatcgtcctgtcttatggatccagcagcccagccctatccaaccgacaaagattccctacatttttcagaacacatccctccgcaacactgcacaatcctacccgcgttaagcttttcgagaagtggggatggaaaaagatcgccaccatccagcaaactaccgaggtgttcactagtaccctggacgatctggaggagagggtgaaggaagccgggatcgaaattacttttagacagtcattcttcagcgaccccgctgtacccgttaagaatctcaagaggcaggacgctcgaattatagtaggtcttttctatgaaactgaagcgaggaaagttttttgcgaggtctataaagaacgtctcttcggaaagaaatatgtctggttcctgataggttggtatgccgataattggttcaagatctacgacccctctataaattgtaccgtcgatgagatgaccgaagccgtggaggggcacattacgaccgaaattgtcatgctcaatccagccaacacacgttccattagtaacatgactagccaggagttcgtcgaaaaacttactaagagactgaagcggcaccctgaagagaccggcgggttccaagaagctcccctcgcttacgatgctatctgggccttagctctagccttgaataagactagcggtggcggtggtaggagtggagtgcgccttgaggattttaattataacaaccagacaatcacagatcagatctatcgcgccatgaatagctcgtcattcgaaggcgtttccggccacgtggtgtttgacgccagtggctcacgaatggcatggacactgattgagcagcttcagggcggcagttacaaaaagatcggttactacgactccactaaggacgatttatcttggtcaaagaccgacaagtggatcggaggaagccccccagcagatcagacccttgtgattaaaacctttagattcttgagccaaaagttatttatatccgtgtccgtactttcatctctcggcattgtcctcgctgtggtgtgtctgtcctttaatatctacaattcccacgtgcgctacattcagaattcccaacctaacttaaacaatctgactgcggtgggttgtagcctggcgctggccgcagtgtttccccttgggctcgacggctaccacataggcaggaaccagtttccctttgtatgccaagcgcgtctctggcttcttggcctaggattttcattggggtatggatcaatgttcacaaaaatctggtgggtgcacaccgtgttcactaagaaagaagaaaaaaaggagtggagaaagacactggaaccctggaaactctacgctacagtagggttattggtgggcatggatgtgttgaccctggcaatatggcagatcgtagaccccctgcaccgaacaattgagacattcgccaaggaagaacccaaagaagatatcgacgtgtcaatactgccccaacttgaacactgttctagcaggaaaatgaatacttggctaggaattttttatggatacaaagggttattattgttgctgggcatttttctggcctatgagacaaaaagcgtgagtaccgagaagattaatgatcaccgcgcagtggggatggccatttacaacgtagctgtcctgtgtttgatcaccgctccagtaactatgatcctttctagccagcaagacgccgctttcgccttcgcatccctggctatcgtgttctctagttacatcactctggttgtactgtttgtacccaaaatgcggcgacttataactcgaggagagtggcagagtgaggcccaagacaccatgaagacagggagcagtaccaacaacaacgaagaagagaaaagtcgcctgttagagaaagagaatcgagagctggaaaagattattgcagagaaggaagaacgagtgtcagaactcaggcatcagttacagtctagacaacaactacgatcccgaagacatcctccaactccacccgaaccaagtgggggactgcctcgaggccctccagagcccccagatagactctcctgcgatggttcccgcgtgcatctcctatacaagtag

SEQ ID NO: 210019 - DNA, 2535 bp, Artificial Sequence
  derived and/or modified sequence
atgggtccgggcgcccccttcgcaagggtgggttggccgcttcccttactggtggtcatggcggccggggtggccccggtgtgggcttctcactcaccgcatctcccacggccgcactcaagagttcccccacatccctcttcagagcggcgggccgtttatattggggctctgttcccgatgtctgggggatggcctggtgggcaggcttgccaaccagcggtcgaaatggcactcgaagatgttaacagcagacgtgacattctcccagattatgaactgaaactgatccatcacgatagtaagtgtgaccccgggcaggccactaaatatctgtacgagttattgtacaatgaccccatcaagatcattctcatgcctggctgttcatctgtgagcacactggtggctgaggcagcccgaatgtggaatctgatagtgttgagttatggctcctcttccccggctctgtcaaatagacagaggtttccaaccttcttcagaacacatcctagcgcaacattgcacaatccaactagggtcaagctcttcgagaagtggggctggaagaaaattgcaacgattcaacagactaccgaggtctttacctctactttagacgacctggaagaacgggtgaaggaggcgggcatcgaaataactttcagacagagctttttctcggatccagccgtccctgtaaaaaacttaaagcgacaggatgcccgaattattgtaggactcttctacgagactgaggcaagaaaggtgttttgcgaggtttataaggaaaggcttttcggcaaaaagtatgtgtggttcttaattggatggtatgctgacaactggttcaagatttatgatccatcgattaactgtactgtggacgaaatgactgaggccgtggagggccacattaccacagagatcgtgatgctgaatcctgcgaatactaggagcatcagcaacatgacttctcaggagttcgtcgagaagttgactaaacggctgaaacggcacccggaagagactgggggctttcaggaagctcctctggcttacgatgccatctgggccctggcgttggctctgaataaaacttccggtgggggtgggcggagcggagtgcggctcgaggactttaattacaacaaccagactataacggaccagatttatagggcgatgaactcctcatcctttgagggcgtaagtgggcacgtagtgtttgatgccagtgggtcacgtatggcctggacccttatcgagcagctgcaggggggctcatacaaaaagataggttattacgatagcaccaaggatgatctatcgtggtcaaagactgacaagtggattgggggcagtcctcctgctgatcaaacattggtgatcaaaactttcagatttttatcgcagaagctttttataagcgtttccgtactcagctctctggggatcgtgctggctgtggtgtgcctgtccttcaacatttataattcccacgttagatatattcagaacagccagcctaatctgaacaatctcactgccgtcggctgttccttagccctcgccgctgttttccctctgggactggacggctatcacattggacgaaatcagttcccattcgtgtgtcaagcccgattgtggctccttggtcttgggttctctctgggatacggtagcatgttcacaaaaatatggtgggtacacacagtgttcacaaagaaggaagagaagaaggagtggcgcaaaaccctggaaccatggaagctgtacgcaacggtcggtctgctggtcgggatggacgtgttaaccctggccatctggcagatagtggatccactgcacaggacgattgagacttttgccaaagaggagcccaaggaggatatcgatgtctccatccttccccaactcgagcactgctccagccgaaaaatgaatacctggttgggaatattctacgggtacaagggactcctgctgctcctgggaatcttcctcgcgtatgaaaccaagagcgtgtccacagaaaaaatcaatgaccacagagcagtcggtatggcgatatacaacgtagcggttctctgcctcatcacagcgcctgtcactatgatcctgtcatcgcaacaggacgcagctttcgcttttgcctcattggcaatagttttctcctcctacatcactctggtggtcctgtttgttccgaaaatgcgacggctgattacgagaggggagtggcagagcgaggcccaggacacgatgaaaacaggcagctccactaataacaacgaggaggagaagtcacgactgttggagaaagagaatcgagagcttgagaagatcattgccgaaaaggaggagcgtgtatctgaactgcgccatcagctgcaatctcgtcagcagctgagatctcgaagacatccaccaactccacccgagcctagcggtgggctgccgcgaggacccccagagcctccagatcgcctgtcgtgcgatgggtccagagtgcatcttctatacaagtag

SEQ ID NO: 210020 - DNA, 2535 bp, Artificial Sequence
  derived and/or modified sequence
atgggacccggtgctccattcgcacgggttggttggcctctccccttattggtggttatggccgcaggcgtcgcccccgtgtgggcctctcatagccctcatttgccccgcccgcatagccgggtgccgccacatccaagttcagagaggcgcgcagtctatatcggagctctgttccctatgtctggcggttggcccgggggtcaggcttgccaacctgccgtggagatggctttagaggacgtgaattctcggagggacatcctgccagactacgagttaaagctgatccaccatgactccaaatgtgacccaggccaggctaccaagtacctctatgagctgctctataatgacccaatcaagattatcttaatgcctggatgttcaagcgttagcaccctggtcgcagaagctgccaggatgtggaatctcattgtgttatcctacggctccagttcgcccgcactatctaatcgccagagattcccaacatttttcagaacgcacccgagcgccactctgcataaccccacccgcgtcaaactttttgaaaaatggggatggaaaaagatcgctaccatacaacagactacagaggtgttcacctccactttagacgacctcgaagagcgagtgaaagaggctggcatcgagattacatttagacagagcttcttcagtgaccccgccgtgcccgttaaaaacctcaagcggcaagacgcacgaataatagtcggcctgttctatgaaaccgaagcacgcaaggtcttctgtgaggtctacaaggagaggctcttcggcaaaaaatatgtatggtttctgatcggatggtacgctgacaactggtttaaaatctacgaccctagtatcaattgcaccgtggatgagatgacggaagctgtggaaggccatattacaaccgagatagttatgctgaatcccgctaatacccgctctatctcgaacatgacttctcaggagtttgtggagaaattaactaaaaggttgaagaggcaccccgaggaaaccggcggcttccaggaggcacccctggcgtacgatgccatctgggctctggctttggccctgaacaaaacaagcggaggaggcgggcgctctggtgttaggctggaagatttcaactacaataaccagactattaccgaccagatctacagagcaatgaattcttccagctttgaaggggtgtctgggcacgtggttttcgacgcttcaggaagcaggatggcttggactttgattgaacagctgcagggggggtcatacaaaaagataggctactatgacagcacaaaggatgatctttcctggtccaaaacagataaatggataggaggatcacccccagcagaccaaactctggttattaagacatttaggttcttgtcacaaaaactctttatatctgtgtccgtgctttcgagcttgggtattgtactggccgtggtctgcctgtctttcaacatttacaattctcacgtcaggtatatccagaactcccagccgaacctcaataatctcacagcagtgggctgtagcttggctctggctgcagtttttcccttaggattggacggttaccatattggaaggaaccagttcccttttgtctgtcaggcacggctgtggctcctaggtcttgggttctcacttgggtatgggagcatgtttactaagatttggtgggttcacaccgtgtttacaaaaaaggaggagaagaaggagtggagaaaaactctcgaaccttggaaattgtacgccaccgtcggactactagtgggaatggacgttctgacccttgctatttggcagatcgtggatcctttacacaggaccatcgaaacgttcgcaaaggaggaaccaaaggaggatatcgacgtgagcatcctgcctcagcttgagcattgctcttcaaggaagatgaacacatggcttgggattttctacgggtacaaagggctcctgctgctgctcgggatcttcttggcttacgaaactaaatcagtaagcaccgaaaaaataaacgatcacagagccgtcggaatggcaatttacaatgtagctgtcctctgtttgatcacagcaccggtgactatgatccttagttcccagcaggatgctgcgttcgcttttgccagcctggccatcgttttcagttcttacatcactctggtcgtgctgttcgtgccgaaaatgagacgcctcattactcgcggggagtggcagtccgaggctcaggataccatgaagactgggagctctacaaataacaatgaggaggagaaatcccgcctgttggagaaagagaacagagaattggagaagataatcgccgagaaggaagagagagtgagcgaactgcgccatcagctgcagagccgccagcagctgcgttcccgtcgccaccctcccacaccgcctgaacccagcggaggcctccctcgcggtccgccagagccgcctgacaggctctcttgcgacggatctagggtccacttgctgtacaaatag

SEQ ID NO: 210021 - DNA, 2535 bp, Artificial Sequence
  derived and/or modified sequence
atgggacctggagccccctttgcacgagtgggatggcctctccccttacttgtggtaatggccgctggggtggccccggtatgggcaagccattcgccacacctaccacggccccatagtcgtgtccctccccacccatcaagcgagaggcgcgcagtgtacatcggtgctctctttcctatgtcggggggctggccgggcggccaggcgtgccaacccgccgttgaaatggcactggaagacgttaattctcgcagagacattcttcccgattacgagttgaagctcatccaccacgattccaagtgcgatccggggcaggccacgaaatacctttacgaattgctctacaacgatcccatcaagatcatcctcatgcccggctgttcatcagtgtccacactggtggctgaagctgctagaatgtggaatttaatcgtgctatcctacggtagctcttctcccgccctgtcaaatagacagaggttcccaaccttctttcggacgcatccctccgcgaccttgcacaacccaactagagtcaaactattcgagaaatggggttggaaaaagattgctacaattcaacagaccactgaggtctttacgtctaccctggatgacctggaagaacgcgtaaaggaggccggcatcgaaattacctttagacaaagttttttctccgatcctgccgtgcccgtcaagaatctgaagcggcaggacgcaagaattattgtgggactcttctatgaaacagaagcaaggaaggttttttgtgaggtttacaaagagcgattgtttggcaaaaaatatgtttggttcctgatcggatggtatgcagacaactggttcaaaatctatgacccttccattaattgcacagtcgatgaaatgactgaagccgtggaaggtcacatcacaaccgaaatcgtgatgctcaatccagccaatacgcgtagtatctctaacatgacctctcaagaatttgtagaaaagctgactaaaagactgaaaaggcatcctgaagaaaccgggggttttcaagaggccccactggcctatgatgccatatgggcattggccctggccctcaataagactagcggcggagggggacggtcaggcgtgcggcttgaagattttaactataacaaccagaccataacagaccaaatctaccgcgctatgaatagctcatctttcgagggtgtgagtggccatgtggttttcgatgctagcggttccagaatggcctggacgttgattgaacagctgcaaggcggctcctacaagaaaatcggctattacgatagtaccaaagatgacctgtcttggtcaaaaaccgacaaatggatcggaggatcgcctccagcagatcagactctggtgatcaagacattcagattcctgtcacaaaagctctttatatccgtctcagtgctttcgtccttgggtatcgtcctcgctgtggtctgcctgtcattcaacatctacaattctcatgtgcgatacattcaaaatagccagccgaacctgaacaacctcaccgccgtcggttgttccctggcacttgcggcagttttccccctgggtctagatggttaccacatagggaggaatcagttcccattcgtctgtcaagcccggctgtggctactggggctgggctttagtttgggatatggcagcatgttcactaagatctggtgggtccatacagtctttacaaagaaggaggagaagaaggagtggcggaaaacgctggaaccctggaagctgtacgctaccgtgggcctcctcgtgggaatggacgtgctgacacttgcaatttggcagatagtggatcctctgcatcgaaccatcgagacttttgctaaagaggaaccaaaggaggatattgatgtgagtattcttccccagctggagcactgctccagccgtaaaatgaacacatggctggggattttttatggctataagggactcctgctgctcctgggcattttcctagcatacgagactaagagcgtcagtaccgagaaaatcaacgaccatcgcgccgtgggcatggcaatttacaacgtggccgtgctgtgtctcataacagcaccggtgacaatgattcttagtagccagcaggatgccgcctttgcctttgcatcactcgccattgtgtttagttcttacatcaccctcgtagtcctgttcgtgcccaaaatgcggcggttgatcaccagaggggaatggcagtccgaagcacaggataccatgaaaacgggcagctctacaaataataacgaggaagagaaatcccgtctgctggaaaaagaaaaccgagaacttgagaaaataatagcagaaaaggaagaacgggtgtccgagttacgacatcaactccagtctagacagcagctgcgatcacgaagacatccccccacaccacccgaaccttctggcgggctgcccagagggccacctgaacccccagacaggctgagttgtgacggcagcagagtgcacctgctatataaatag

SEQ ID NO: 210022 - DNA, 2535 bp, Artificial Sequence
  derived and/or modified sequence
atgggccctggggccccgtttgccagagtgggttggcctctccctctgttggtggtgatggcagcgggtgtggcgcccgtctgggcctctcacagccctcacctgcctagacctcattcacgcgtgccaccccaccctagctctgagagaagggcagtgtacattggcgctttgttccccatgagcggagggtggccgggcggccaggcatgccaaccagccgtcgaaatggctctggaggatgtgaatagcagacgcgatattttgccagattacgaactcaagctgatccatcatgactcaaaatgcgaccccggacaggctacgaaatacctgtacgaacttctatataacgaccccataaagatcattctgatgccgggttgctccagcgtatcaaccttagtggcggaggcagcgcgcatgtggaacttaattgtgctaagttatggttcctcttcccctgctctctccaaccgccagaggttccctactttttttagaactcacccctccgccactctgcacaaccctacaagagttaagctgtttgagaaatggggatggaagaaaatcgccactatccaacagacaaccgaggttttcacgtcaactctggatgatctcgaggaacgcgtcaaagaagcaggcatcgagataacctttaggcaatctttctttagcgatcctgcggtgccggtgaaaaatctgaaacgccaagacgccagaatcatcgtggggctgttttacgaaaccgaggcacggaaggttttctgtgaggtgtacaaggaaaggctttttggcaagaaatatgtttggttcctgattgggtggtatgcggataattggtttaagatctatgaccctagcattaactgtacagtcgacgagatgacggaagcggtggaagggcatattacaacagaaattgttatgctcaaccctgccaacacccgctccattagcaacatgaccagtcaggaatttgtggaaaaactcaccaaacgtctgaagcggcaccccgaggaaactggagggttccaagaggctcccttggcatatgatgccatttgggcccttgctctggcgctgaacaaaacttctggaggtggtgggcggtcaggcgtcagactggaggactttaattacaataaccagaccattacggatcagatctaccgcgcaatgaatagtagctccttcgagggggtttccggacacgtcgtgttcgatgcttctgggagccgaatggcctggactttgatcgaacagttgcagggcggctcttacaagaagatcggatattacgatagtaccaaagacgacctgagctggtccaaaactgataaatggattggggggagccctccagccgaccagacgctggttataaaaacattccggttcttgtcccagaaattatttatctcggtctccgtgttgtcaagtctgggaattgtactcgccgttgtctgcctttccttcaacatctacaattcccacgtgagatacatacagaactctcaacccaacctgaacaatttaacagccgtaggatgtagcctagctcttgcggctgttttcccactcggcttggacggctatcacattggtaggaaccagttccccttcgtgtgccaggctcgtctatggctcctgggacttggattttctctgggatacgggagcatgttcacaaagatatggtgggtgcatactgtgttcaccaagaaggaagagaaaaaagagtggcggaaaaccctggagccgtggaagctgtacgccacagtcggcctgctagttggtatggatgtgctgacccttgcgatatggcaaatcgtcgatcctttacataggaccatagaaacattcgctaaggaggaaccaaaagaggacattgatgtgagcattctgccacaattggaacattgttcttctaggaaaatgaacacctggttgggcattttttatgggtataagggactgctgctacttttggggatttttttagcctatgaaaccaagtctgtgagcaccgagaaaatcaatgatcacagagcagtgggtatggccatttacaatgtggccgtcctgtgcctgatcactgcgcctgtgactatgatactgagctcacagcaggacgctgcgttcgcgttcgcaagtctagccattgtgttctcgtcttacattactttagtggtactgttcgtgcccaagatgagaagactgatcaccaggggcgaatggcagtctgaggcccaagatactatgaagaccggttcttctactaacaataatgaagaggagaagtcccggctactggagaaagagaatagggagctggaaaaaattatcgcagagaaggaggaacgggtgtcagagttgcggcaccagctccaatcacgacagcaactccggtcaaggaggcacccaccaacgccccctgaaccatccggaggcctgcctcgcggtccccccgagccccctgataggttgagttgtgatggcagcagggttcatctgctatataaatag

SEQ ID NO: 210023 - DNA, 2535 bp, Artificial Sequence
  derived and/or modified sequence
atgggccccggagcacctttcgcgagagtagggtggcccttgccactcctggtggtgatggccgccggcgtggcaccagtgtgggccagccacagccctcatcttccacggccccactctcgggtgcccccacacccctctagcgagcgacgggccgtctatataggcgcactgtttcccatgagcggtgggtggcccggaggtcaggcttgtcagccagccgttgagatggccctggaggatgtgaacagcaggagagatattttacccgactacgaactcaaactgatacatcatgactcaaagtgcgaccccgggcaggctaccaagtatctgtatgagttactttacaacgaccctatcaaaattattctcatgcccggatgcagcagtgtctcaaccttggtggccgaagcagcccggatgtggaacctgatagtgctcagttacggatcgagcagcccagcactgagtaatcggcagcggtttcctacctttttcagaacacacccctctgccacactgcacaaccctacccgagttaagctgtttgagaagtggggttggaagaaaattgccacaatccagcagactacagaagtgttcacttcaacgcttgatgatctagaggaaagggttaaagaggctggtatcgaaatcactttccgccagtcttttttcagcgacccggcggtccccgtgaagaatctcaagcggcaggacgcccgcattatcgtaggactcttctatgaaacagaggcacggaaggtgttttgcgaggtctacaaggagcgcctgtttggcaaaaagtatgtatggtttctgatcgggtggtacgcggacaactggttcaagatttatgatccttctattaactgtaccgtggacgagatgacagaagcggtggagggacacatcacaactgaaatagtaatgttgaaccctgccaatacccggtccataagtaacatgacatcacaggaattcgtggaaaagctaacaaagcggcttaagaggcacccggaggagacgggaggcttccaggaggcccccttagcttatgatgctatatgggccctggcactggcccttaacaagaccagtggagggggcggaagatctggggtcaggctcgaagacttcaactataataatcaaacaattaccgatcaaatataccgggcaatgaacagttcttcctttgagggcgtaagtggccacgtcgtgtttgacgcgagcggttcacgcatggcctggacactgatcgagcaactgcaagggggcagttataagaagattgggtactacgattctaccaaagacgacttgtcctggtccaaaacagacaagtggatcgggggttcaccgccggctgaccaaactttggtgataaaaacctttcgattcctgtcccagaagttgtttatttccgtgagtgtcctgagttcccttggtatcgtcctggcagtggtgtgtctgtcattcaacatatataattctcatgtgaggtacatccagaacagtcagcctaatctgaataatttgactgccgtgggctgcagtctggccctggcagctgtgttccctcttggtctggacgggtatcatattggtcggaaccagttcccttttgtctgtcaggcccggctgtggttgcttgggctcggtttctccctcggctacggcagtatgttcacaaagatatggtgggtgcataccgtgtttacaaaaaaggaagagaagaaggaatggcgcaaaaccctcgagccttggaagctctatgccacagttggacttctcgtgggcatggacgtgctgaccctcgctatctggcagattgtggaccccttgcatcgtactatcgaaacatttgcaaaagaagaaccaaaagaggacatcgatgtgtctattctaccccaactggagcattgtagttcacgaaagatgaatacttggttggggattttctatggttacaaggggcttcttctccttctgggaatattcttggcctacgagacaaaaagtgtatctactgaaaaaataaatgatcatagggcagtcggcatggcgatatataatgttgcagtgctgtgtttaattaccgccccagtgactatgatcctgagctcgcagcaggacgccgcgtttgcatttgcctctttggccatagttttttcgtcttacattaccctcgttgtgctctttgtgccaaagatgaggagacttattaccaggggcgaatggcagagcgaggcccaggacacaatgaagacaggctcttctacaaacaacaacgaggaggaaaagtctagactgctggagaaggaaaaccgggaactcgaaaaaatcatagccgagaaggaagagagggtatctgaacttaggcaccagctgcagtctcggcagcagctgagatcaaggcgccatccaccaacgccccctgagccatcaggaggactgccacggggcccaccggagcctcccgatcgactgagttgtgacggaagcagggtgcatctcctgtacaagtag

SEQ ID NO: 210024 - DNA, 2535 bp, Artificial Sequence
  derived and/or modified sequence
atgggcccgggcgcgccgttcgcgcgcgttggctggccacttcctctgttggtggttatggctgccggagtcgcacctgtgtgggcctcacactcaccccatcttccacggccccacagtagagtcccgccgcatccctcctctgaaaggagggccgtctacataggggcactgttccccatgtctggggggtggcccggagggcaggcctgtcagccagcggtggagatggcacttgaggacgtgaatagccgacgcgacatccttccggattatgaactgaaactcattcaccacgattctaagtgtgaccccggtcaagctaccaaatatctttacgagctcctttacaatgaccccatcaaaatcatactcatgcctggctgcagttctgtttcaactcttgttgctgaagcggctcggatgtggaatttaatcgtcttgtcatatggcagttcttcacctgcactctcaaataggcagcgttttcccacattcttccgcactcacccaagcgcaactcttcacaaccccacccgcgtgaagttgtttgaaaagtggggctggaaaaagatcgccacaatacagcagactaccgaggtgtttaccagcacgctggatgatctcgaagagagagtgaaggaagccggaatcgaaatcacatttcgccagagcttcttctccgacccggccgttccggtaaagaacttgaagagacaggacgcccgcattatcgtgggactcttttacgagacagaggccaggaaggttttctgcgaagtttacaaagagcgcctcttcgggaaaaaatacgtttggtttcttatcggttggtacgcagacaattggtttaaaatttatgatcctagcattaactgcaccgttgatgagatgaccgaagccgtagagggtcatattacaaccgagattgttatgttgaatcccgctaataccaggtctatcagtaatatgacttcccaggaatttgttgagaagctaactaagcggttaaagcgacatccagaggagacagggggatttcaggaggctccactcgcttacgatgccatttgggcactggccctggcactgaataaaacatcaggtggagggggacggtctggcgttcggcttgaagacttcaactacaataaccaaaccattaccgatcaaatttatagggcaatgaacagctcgagcttcgaaggagtgagcgggcacgttgtctttgacgccagcggctcgaggatggcttggactcttatcgaacagctgcaaggcggatcttataagaagattggatactatgattctacaaaggatgacctgagttggagcaaaaccgataagtggattggagggtctccacctgccgaccagacattggtaatcaagacatttcggtttctgtctcagaagctctttatcagcgtctctgttctcagcagcctgggcatagtgctggcggtagtatgccttagcttcaatatctacaactcccacgtcagatacatccagaacagtcagccaaatctgaataacctcacagctgtcggttgttccctggctttagccgctgtgtttccgcttggcctggatggataccacatcggtcgaaaccagttccccttcgtgtgccaggcccggctctggttattgggactggggttttccctgggctatggcagtatgtttacgaagatctggtgggtccacacagtcttcaccaaaaaagaggagaaaaaagaatggcgtaaaactttggaaccgtggaaactgtacgccacagtgggactgcttgttggaatggatgtgctgaccctcgcaatctggcaaatagtcgatccactccatcgaaccatcgagacattcgccaaagaggagccaaaggaagatattgatgttagtattcttccacagctggagcattgcagtagccggaagatgaacacgtggctaggtattttttatggctacaagggattgctgctccttttgggtatatttttagcctatgaaacaaaatcagtttctaccgagaaaatcaacgaccacagagccgtaggcatggccatttacaatgtagcagttctatgtctcataacagcccccgttaccatgatcctgagttcccaacaggacgctgcctttgcatttgccagtctggccattgtctttagtagctatataaccctagtggtgttatttgtccccaaaatgcggcgcttgattactaggggcgaatggcagtccgaagcccaggacaccatgaagaccggcagctcaacaaataacaatgaggaggagaagtcccgactgctcgaaaaggagaatagggaattagagaagataatagctgagaaggaggagcgcgtcagcgaattgcgacaccagctgcaaagtaggcagcagcttagatccaggcgacatccccccaccccccccgagccttctggcggtctgccaagaggccccccagaaccccctgatcgtttgtcctgcgacgggtccagagtccacctcctttataaatag

SEQ ID NO: 210025 - DNA, 2535 bp, Artificial Sequence
  derived and/or modified sequence
atggggcccggcgctccattcgccagggtcggctggcctcttcctctcctggtcgtgatggccgccggcgtcgcccccgtgtgggcaagccactctccccacctgccccggccccacagcagagtgccgccccatccctcctccgaacgcagggccgtttatattggggcactgtttcctatgtctggcggttggccagggggacaggcatgccaacccgcagtcgaaatggcgctcgaggatgtgaacagtaggcgtgacatcttgccggactacgagttgaaactgattcaccacgattcgaagtgtgaccccggccaagcgactaaatatctgtacgaactcctgtacaacgatcccatcaagattattctgatgccaggatgttcttccgtgtccacacttgtggcagaggcagcgcggatgtggaacctgatcgtgttaagttatggaagctcttcccctgccttatcgaaccgtcagagatttcctacatttttcagaacgcatccctctgctacgctgcataatcctactagagtgaagctttttgaaaagtggggctggaagaagatcgcgacaattcagcagacaaccgaggtcttcacaagtacgctggacgacttggaggaacgcgtgaaggaggcgggaattgagatcacattcaggcagagttttttctccgatccagccgttcccgtgaagaaccttaagcgccaggacgccaggatcatcgtgggactgttctacgagaccgaagcaagaaaagtcttttgtgaggtttataaggaaaggctatttggcaagaagtacgtgtggttcctgattggatggtacgcggacaattggttcaagatctacgacccctccattaactgcacagttgacgaaatgaccgaagccgttgagggccacataactaccgaaattgtgatgcttaatccagctaatacaaggagtatctccaatatgacgagccaggaattcgttgagaagctgacaaaaagactgaagaggcacccagaagagaccggtggcttccaagaggcccccctcgcttacgacgcaatctgggccctggctcttgcacttaacaaaacctccggaggggggggaaggtcaggagtccgcttagaagacttcaactacaacaatcagacaattacggaccagatttaccgggccatgaattcatcctcctttgagggagtctctggccatgtggtgttcgatgccagcggtagtcggatggcgtggaccctgatcgaacagctgcagggggggtcatataaaaagattggctactatgattcaactaaggacgacctaagttggtctaagactgacaagtggattgggggatcgccacctgcagatcagaccctggttatcaaaacctttcggtttcttagccagaaactgttcatatccgttagcgtactgtcctccctgggtatcgtcttggcagtggtgtgcttgtcttttaacatctataattcccacgtcaggtacatacaaaattctcagcccaatttgaacaatcttacagcggtggggtgcagccttgcactcgccgctgtattccctctcggacttgacggataccacatagggcgaaatcaattcccatttgtttgtcaagccaggctgtggctgctgggattagggtttagcctgggatacgggagtatgttcaccaaaatctggtgggtgcatacggtcttcaccaagaaagaagagaaaaaggagtggcgaaagacacttgagccttggaagctctatgctactgtcggactcctggttgggatggatgttttgacgcttgccatttggcagattgtcgatccactacaccgcacaatagagacctttgctaaggaggaacccaaggaggacatcgacgtgtccatcctaccccagctggagcactgtagcagcagaaagatgaacacctggctgggaatcttctatggatataaaggattgctgctgttgctaggaatcttcttggcatatgagacaaagtctgtgtcaacggagaagataaacgatcaccgtgcagtgggcatggcgatctacaacgtggcagtgttatgccttatcaccgcccctgtaaccatgattttatctagccaacaggatgcagcctttgcttttgcttctttagctatcgttttttcttcctatattacattggttgtcctctttgttccaaagatgaggcgcctgatcacacgcggggagtggcagagtgaggcgcaagataccatgaagaccgggagtagcacaaacaataacgaggaggaaaagagtaggctgctcgaaaaggagaacagagagttagagaaaattattgcagagaaagaagagagggtgtctgaactgaggcatcagctacagtctcgccagcaattacgctcaagacgtcaccctccaaccccacctgagcctagtggcggtctgccacgaggtcctccagagccaccagaccggctctcctgcgacggtagtagggtgcatcttctctataagtag

SEQ ID NO: 210026 - DNA, 2535 bp, Artificial Sequence
  derived and/or modified sequence
atgggaccaggagcaccattcgccagagtgggatggcccctgccccttctggtggtgatggccgctggcgtggctcccgtgtgggcatcgcactcccctcacctaccaagacctcacagcagagtcccaccccacccatcatccgagaggagagctgtatacatcggcgcactgttccccatgagtgggggttggcctggcgggcaagcatgccaaccagcagtggaaatggccttggaggacgtcaactcacgccgtgatattctgccagactacgaactcaagcttatccatcatgattccaaatgtgacccagggcaagctaccaagtatctgtatgagctattatacaacgatcccatcaaaattatccttatgcccggttgttcttcagtctccacattggtggccgaagcggcacgcatgtggaatctaatcgttttatcttacggtagcagctcacccgccctctccaataggcaaagattccctacctttttccggacccacccatcagcgacattgcacaacccgacacgagtgaagctgtttgaaaagtggggctggaaaaaaattgcaaccatccagcagacaactgaggtttttacgagtacactggatgatctggaagagagagtcaaagaggcaggtatcgaaatcactttccgacaatcatttttttctgatccggccgtgcctgtgaagaacctgaaaaggcaagatgctaggatcatcgttgggttattctacgagacagaggcgaggaaagtgttttgtgaagtgtacaaagaacgattgttcgggaaaaagtacgtatggttcctcatcggttggtacgcggataactggttcaagatctacgatcccagtatcaattgtaccgtagatgagatgaccgaagctgtggaagggcacattactaccgaaattgtaatgctcaaccccgcaaacacgagatcaatctcgaacatgaccagccaagaattcgtagagaagctcactaagcggctgaagcggcaccccgaggaaacaggaggctttcaggaagcgcctctggcatatgatgccatctgggcattggccctggccctgaataaaacctctggaggcggtggaaggagtggtgtgcgactggaggactttaactataacaatcagacgattacggatcaaatctacagggcaatgaattctagctcctttgagggagtctccggtcacgtcgtgttcgacgcatcgggcagccgaatggcatggactctaattgagcagttgcaagggggttcgtacaagaaaatcgggtactatgattcaacgaaggatgacctgtcttggtcgaagactgataaatggattggaggatccccccccgccgatcagacgcttgtgattaagaccttcaggttcttgagtcagaagttgttcatctccgttagcgtactaagttcgttaggcatcgttctcgcggttgtgtgtctgagctttaatatttacaactctcatgtgcggtatattcagaactcccagccgaatctgaataacctcacagctgttggctgtagtctggctctggctgcggtgtttccacttggcctggacggataccacatcggacgcaatcagttccctttcgtctgccaggcacgactgtggctcctggggttagggttttctctgggctacggatcgatgttcaccaaaatctggtgggtgcacacagtctttacgaaaaaggaggagaagaaggagtggcgcaagaccttggaaccgtggaagctgtatgctaccgtggggctgctggtgggaatggacgtgttgaccctggccatatggcagatcgtcgacccactacaccgcaccattgaaacctttgctaaggaggagcctaaggaagatattgatgtcagcattctgccacaacttgaacactgttcctccaggaagatgaatacttggcttgggatcttctacggctacaagggtttattgctgctactcggtatctttttggcctatgagacgaagtctgtgtccaccgaaaaaataaacgaccatcgggcagtagggatggcaatctacaatgtggcagtcctgtgcctcatcactgcacctgttacaatgatcctctcgtcccagcaggacgcagccttcgcgtttgccagtttagccatcgtgtttagtagttacattaccctggtagtactgttcgtgcctaagatgaggcgcctgattaccaggggggagtggcaatcggaggcccaggataccatgaaaaccggctcctccaccaataataatgaagaagaaaagagtcggctcctcgaaaaggagaaccgggaactggaaaagattattgctgagaaggaagaacgcgtgagtgaactgcgccatcagttgcagtctcgacagcagctacgttctcgacgccacccaccaacaccacctgagcctagtggtgggttgcctagaggaccccctgagccacctgaccgccttagctgtgatggatcgcgggtccatcttctctacaaatag

SEQ ID NO: 210027 - DNA, 3506 bp, Artificial Sequence
  derived and/or modified sequence
ctcctcctcctcccctccgtcggtcagtcagtccgcgaggagagtccgcggtggcggcgacggtggcgagagccgcgggggccgtaggaagccaaccttccctgcttctccggggccctcgccccctcctccccacaaaatcagggatggaggcgcctccccggcaccctcttagcagccctccccaggaaaagtgtcccccctgagctcctaacgctccccaacagctacccctgccccccacgccatggggcccggggccccttttgcccgggtggggtggccactgccgcttctggttgtgatggcggcaggggtggctccggtgtgggcctcccactccccccatctcccgcggcctcactcgcgggtccccccgcacccctcctcagaacggcgcgcagtgtacatcggggcactgtttcccatgagcgggggctggccagggggccaggcctgccagcccgcggtggagatggcgctggaggacgtgaatagccgcagggacatcctgccggactatgagctcaagctcatccaccacgacagcaagtgtgatccaggccaagccaccaagtacctatatgagctgctctacaacgaccctatcaagatcatccttatgcctggctgcagctctgtctccacgctggtggctgaggctgctaggatgtggaacctcattgtgctttcctatggctccagctcaccagccctgtcaaaccggcagcgtttccccactttcttccgaacgcacccatcagccacactccacaaccctacccgcgtgaaactctttgaaaagtggggctggaagaagattgctaccatccagcagaccactgaggtcttcacttcgactctggacgacctggaggaacgagtgaaggaggctggaattgagattactttccgccagagtttcttctcagatccagctgtgcccgtcaaaaacctgaagcgccaggatgcccgaatcatcgtgggacttttctatgagactgaagcccggaaagttttttgtgaggtgtacaaggagcgtctctttgggaagaagtacgtctggttcctcattgggtggtatgctgacaattggttcaagatctacgacccttctatcaactgcacagtggatgagatgactgaggcggtggagggccacatcacaactgagattgtcatgctgaatcctgccaatacccgcagcatttccaacatgacatcccaggaatttgtggagaaactaaccaagcgactgaaaagacaccctgaggagacaggaggcttccaggaggcaccgctggcctatgatgccatctgggccttggcactggccctgaacaagacatctggaggaggcggccgttctggtgtgcgcctggaggacttcaactacaacaaccagaccattaccgaccaaatctaccgggcaatgaactcttcgtcctttgagggtgtctctggccatgtggtgtttgatgccagcggctctcggatggcatggacgcttatcgagcagcttcagggtggcagctacaagaagattggctactatgacagcaccaaggatgatctttcctggtccaaaacagataaatggattggagggtcccccccagctgaccagaccctggtcatcaagacattccgcttcctgtcacagaaactctttatctccgtctcagttctctccagcctgggcattgtcctagctgttgtctgtctgtcctttaacatctacaactcacatgtccgttatatccagaactcacagcccaacctgaacaacctgactgctgtgggctgctcactggctttagctgctgtcttccccctggggctcgatggttaccacattgggaggaaccagtttcctttcgtctgccaggcccgcctctggctcctgggcctgggctttagtctgggctacggttccatgttcaccaagatttggtgggtccacacggtcttcacaaagaaggaagaaaagaaggagtggaggaagactctggaaccctggaagctgtatgccacagtgggcctgctggtgggcatggatgtcctcactctcgccatctggcagatcgtggaccctctgcaccggaccattgagacatttgccaaggaggaacctaaggaagatattgacgtctctattctgccccagctggagcattgcagctccaggaagatgaatacatggcttggcattttctatggttacaaggggctgctgctgctgctgggaatcttccttgcttatgagaccaagagtgtgtccactgagaagatcaatgatcaccgggctgtgggcatggctatctacaatgtggcagtcctgtgcctcatcactgctcctgtcaccatgattctgtccagccagcaggatgcagcctttgcctttgcctctcttgccatagttttctcctcctatatcactcttgttgtgctctttgtgcccaagatgcgcaggctgatcacccgaggggaatggcagtcggaggcgcaggacaccatgaagacagggtcatcgaccaacaacaacgaggaggagaagtcccggctgttggagaaggagaaccgtgaactggaaaagatcattgctgagaaagaggagcgtgtctctgaactgcgccatcaactccagtctcggcagcagctccgctcccggcgccacccaccgacacccccagaaccctctgggggcctgcccaggggaccccctgagccccccgaccggcttagctgtgatgggagtcgagtgcatttgctttataagtgagggtgcatgtccgttccgaggaatgggatttaatgacctttgatgccaacccatatgacagcgtgaaaaaaatcaaagaacatgtccggtctaagaccaaggttcctgtgcaggaccaggttcttttgctgggctccaagatcttaaagccacggagaagcctctcatcttatggcattgacaaagagaagaccatccaccttaccctgaaagtggtgaagcccagtgatgaggagctgcccttgtttcttgtggagtcaggtgatgaggcaaagaggcacctcctccaggtgcgaaggtccagctcagtggcacaagtgaaagcaatgatcgagactaagacgggtataatccctgagacccagattgtgacttgcaatggaaagagactggaagatgggaagatgatggcagattacggcatcagaaagggcaacttactcttcctggcatgttattgtattggagggtgaccaccctgggcatggggtgttggcaggggtcaaaaagcttatttcttttaatctcttactcaacgaacacatcttctgatgatttcccaaaattaatgagaatgagatgagtagagtaagatttgggtgggatgggtaggatgaagtatattgcccaactctatgtttctttgattctaacacaattaattaagtgacatgatttttactaatgtattactgagactagtaaataaatttttaaggcaaaa

SEQ ID NO: 210028 - DNA, 2535 bp, Artificial Sequence
  derived and/or modified sequence
atgggtcccggtgctccatttgcccgcgtggggtggccactgccactgctggtggtgatggcggccggagtcgcgcccgtgtgggcatcccattccccacatctcccaaggccacactctagagtgcctccccacccctcatccgaacgtagagccgtgtacattggtgccctgtttccgatgtccggaggttggccagggggacaggcttgtcagcccgcagtagagatggccctcgaagatgtcaactcccggcgggatatcctgcctgactacgagctcaagttgatacatcatgactctaaatgtgaccctggccaagctactaagtatctgtacgagctgctttataacgatccaataaagataatcctgatgcctggatgctcctcagtgtccaccctggtggccgaagccgcacgaatgtggaacctgatcgtgctttcctatgggtcctcgagtcccgcactttctaatagacagagattccctaccttctttcggactcacccctctgccaccttacacaaccctacacgcgtgaaactgttcgagaaatggggttggaagaagatcgccaccattcagcagacaaccgaggtgtttacgagcaccctggacgaccttgaggagcgcgtaaaggaggccgggatagaaattactttccgacaaagctttttttccgatcccgccgttcctgtgaagaacctgaagcgacaagatgctaggataatcgtgggcttgttctacgagacagaggcccgcaaagtgttctgtgaggtgtataaagagcggctcttcggcaagaagtacgtttggttcctcataggatggtacgctgataactggtttaagatttatgaccctagcataaattgcacagtggatgaaatgactgaggccgtggaggggcatatcacaaccgagattgtaatgcttaatcctgcaaatacgcggtcaatctccaacatgacctctcaggagttcgtcgaaaaacttactaagagactgaagagacacccagaggaaacaggcggcttccaggaggcgcccctcgcttacgatgctatctgggccctagccctggcactaaataaaacctcaggggggggcggacggagcggggtgagattggaggactttaactataataatcagacaattaccgatcagatctaccgggcaatgaactcaagcagcttcgagggcgtgtcagggcatgtggtgttcgatgcctcaggctctaggatggcatggaccttgatcgaacaacttcagggaggcagctacaaaaaaatcggatattacgacagcactaaggatgatctcagttggtccaagactgataaatggataggaggtagcccccctgcagatcagacactggtgatcaagacattccgtttcctcagccagaagttattcatttctgtctcagtcctgagcagccttggcattgttctggccgttgtgtgcctcagtttcaatatctataactcccacgtgcggtatatccagaactcccagccaaatctgaataacttaactgcagtaggctgtagcctggcactggctgctgtgttcccgttaggtctggacgggtatcatataggcaggaaccaattcccattcgtttgccaggcaagactctggctgctgggcctggggttttcactgggctatggctccatgttcactaaaatctggtgggtgcacaccgtttttaccaagaaggaagagaaaaaagaatggagaaagaccctcgaaccctggaaactttacgccacagtgggcctcctggtgggcatggacgttctcactcttgccatttggcagatagtagaccctctccatcgaaccatcgagactttcgccaaggaggagcctaaagaggatatcgatgtctctatcttgccacagctggaacactgttcgtcaaggaagatgaacacatggctgggaatcttctacggttacaaggggctcctactgctccttggaatctttctggcatacgaaactaagtctgtatcaactgagaagattaacgaccacagggctgttggcatggccatttacaacgttgcagttttgtgtctaattactgcccccgtcaccatgatcctgtctagtcagcaggacgccgcctttgccttcgctagcctggctatcgtcttcagctcttacataacactggtcgtgctgttcgtgccaaagatgcgacggcttatcacaaggggcgagtggcagtcagaggctcaagacactatgaagaccggttcttcaactaataacaatgaggaagagaaatccaggcttttggagaaagagaatcgggaactggagaaaattattgctgagaaggaggagcgggtgtccgaactccgtcatcagttgcaaagtcggcagcagctgaggtctaggaggcatccaccaacgccaccagagcctagtggcggccttcctaggggcccccctgaacccccagatcgcctgtcttgcgatgggtccagggttcatctgctgtacaagtag

SEQ ID NO: 210029 - DNA, 2535 bp, Artificial Sequence
  derived and/or modified sequence
atgggaccaggagctccctttgctcgtgtgggctggccgctgccactattggttgtgatggctgccggagtggctcctgtctgggcaagtcactcgccacaccttccgaggcctcactcaagggtcccacctcatccaagcagtgagagaagagccgtatacatcggggctctgtttcctatgtccggaggatggccgggaggccaagcctgtcaaccagccgtcgaaatggcacttgaagatgtgaactccagaagagatatccttcccgattacgagcttaaactgatacaccacgattcaaaatgtgatcccggacaggcaaccaagtacctttacgagttactgtataatgatccaatcaagattatccttatgcctgggtgctcgtctgttagcacgctggtggcagaggccgcacggatgtggaatttaatcgtgctctcttatggaagcagcagtccagccctatccaaccggcagcgtttccctacgtttttccgcacccacccatcagccaccctacacaaccctacaagagtcaagcttttcgaaaaatggggatggaagaagatcgcaaccattcaacagaccacagaagtgtttacttctaccctggatgacctggaagaacgggttaaagaagctggtatcgagattacctttcggcagtctttctttagtgacccagcagtgcccgtcaagaatctgaaaaggcaagatgctagaatcattgtcgggctattttacgagactgaggcccgcaaggtcttttgcgaggtctacaaggagaggctgtttggcaaaaaatacgtttggttcctgataggatggtacgccgataattggtttaaaatatacgatccctccatcaactgcacagtggatgaaatgacggaggcggtggaaggacatatcactacagaaatcgttatgctgaatccagctaatacccgcagtatcagcaacatgaccagccaagaatttgtcgagaaactcaccaagcggctcaaacggcaccccgaggaaaccggaggctttcaagaggctccccttgcttacgacgctatttgggctctggcccttgcactcaacaagacctccggggggggcggccgtagcggcgttcgcttagaggattttaactacaataaccagacaattacagaccagatttaccgagctatgaattcttcttcattcgaaggagtgagtggccacgtagtgttcgatgcatcgggttccaggatggcctggaccctcattgaacagctccaaggtggcagttataaaaagattggctattacgactccacgaaggatgatctgagctggtctaagaccgacaaatggatcggagggagccctccagctgaccagactctagtaatcaaaacatttaggttcctcagccagaaactgttcatttctgtgtcagtgctatcctcccttgggatcgtgctcgccgtggtctgcctgtctttcaatatttataatagccacgtgagatacatccaaaatagccaacccaacctgaacaatctgacagccgtaggttgcagccttgcactggccgccgtgttcccactgggactcgatggttatcatattggcaggaatcaatttccctttgtctgccaggctcgcttgtggctattgggccttggctttagccttggctacggcagtatgttcactaagatatggtgggtccacaccgtttttaccaagaaggaagaaaaaaaagagtggcgtaagactctggagccctggaaactgtatgctactgtcggtttactggtcggcatggatgtactgacattggccatctggcaaatcgtggaccccctacacagaaccattgagacttttgccaaggaagaacctaaggaggacatcgacgtcagtatcctacctcagctggaacattgctcttcaaggaaaatgaatacctggcttggcattttctatggttacaaaggccttttattactgctgggtatttttctggcctatgagacaaaaagcgtgtccaccgaaaaaattaacgatcacagagcagtggggatggctatttacaatgtggcagttttgtgtctgatcaccgctcccgtaacaatgattctgagctctcaacaggatgccgcattcgcttttgcatccctcgccatcgtcttctcatcttacatcaccctggtggtcctcttcgtccccaaaatgcgcaggctcatcaccagaggcgagtggcaaagtgaagcccaggacaccatgaagactggcagtagtaccaacaacaacgaagaggaaaaatcccgcttgcttgaaaaggaaaacagagaactcgagaagatcattgcggagaaggaggagagggtgagcgaacttcgccatcaactgcagagtagacaacagctgaggtcccggaggcacccacctactccaccggagccctcaggaggcctcccccgggggcccccagagccccctgaccgtttaagctgtgatggatcgcgagtccacctgctttacaaatag

SEQ ID NO: 210030 - DNA, 2535 bp, Artificial Sequence
  derived and/or modified sequence
atgggccctggagccccttttgcacgggtagggtggccattgcctctgctcgttgtgatggctgctggcgtggccccagtgtgggcatcccactctccccacttacctaggccgcatagccgggtgcctccccatccctctagtgagcggagggctgtgtatattggagcgttatttcccatgtccggtggttggcccggaggacaagcatgccagccggctgtggagatggccctggaggatgtgaacagcagaagagacatcctgccggattacgagctcaagctgatccaccacgactccaaatgtgatcccgggcaggctactaaatacctatatgagctcctgtataacgatccgatcaagatcatcctgatgcctggctgttcctcggtcagcaccctggttgctgaagctgcacgtatgtggaatctcattgtgctgagctacggcagttctagccccgctctgtcaaaccgccagagatttcccacattctttaggacacaccctagtgccacactccacaacccaaccagggtaaagctctttgagaagtggggctggaagaaaattgccaccatacagcagacaactgaggtgtttacatctacactcgacgacttggaagaacgggtcaaagaagcaggcatagagattacattcagacagtcattcttttcagatccggctgtgcccgtgaagaacttgaaaagacaagacgccagaatcatcgttggactgttttacgagacagaggctaggaaggtgttctgtgaggtgtacaaagaaaggctgtttggcaagaaatacgtgtggtttctaataggatggtacgcggataattggtttaagatctatgaccctagtataaattgtacggtggacgaaatgacagaggctgtcgaaggacacataacaaccgagatagttatgctgaatcctgccaacaccaggagcataagcaacatgactagccaagagtttgtagagaaattgactaagcggctgaaacgccatccagaagagacaggtggctttcaggaggcgccactggcatatgatgccatatgggcacttgctctggccttgaacaagacatccggcggcggggggaggtcaggagtacgacttgaggattttaactataacaaccagactataacagaccagatttacagggctatgaatagcagctctttcgagggtgtcagcgggcatgtcgtgttcgatgcttccgggagccgcatggcttggacactgatcgagcaattgcaggggggctcatataagaaaataggctattacgactctaccaaagacgatctcagttggagtaaaactgataaatggatcggcggcagcccccccgctgatcaaaccctggtcattaagacctttaggtttctttcccaaaaactgtttatctctgtatccgtgcttagcagcttgggcattgtgttggcagtcgtctgcctctcgttcaatatctataatagccacgtacgatacatccagaattcacaacctaatctgaacaatctcaccgcggtcgggtgctctcttgccttggccgccgtgtttcctctgggcctggatggctatcacatcggtagaaaccaattcccattcgtctgtcaggcgaggttatggctgctcggactgggcttttccttggggtacggcagtatgtttaccaagatctggtgggtgcatactgtttttacaaaaaaggaggaaaagaaggagtggcgtaagacccttgagccctggaagctttacgctacagtggggctcctggtggggatggacgtactgactcttgccatttggcaaatcgtggaccccctccatagaactatcgagacatttgctaaagaggagccaaaggaggacatcgacgtaagcattctgccgcagcttgaacactgctcatcgcgcaaaatgaacacttggctgggtatcttttatggatacaaaggcctcctgctgctattgggcatcttcctggcttatgagaccaagtccgtttccacggagaagattaacgaccaccgtgccgtgggaatggccatctataacgtagccgtgctgtgcttgatcacggcaccggtaaccatgattttgtccagccagcaggacgccgcgttcgctttcgcgtctcttgccatcgtattttcctcatatattacattagtagtgctgttcgttcctaagatgagacgcttgattacaaggggcgagtggcagtccgaggcccaagatactatgaagactgggagtagcaccaacaacaatgaagaagaaaagagccgactcttggagaaagagaaccgggagctggagaaaattatcgcagagaaggaggaacgggttagcgagctcaggcatcagttgcagagtagacaacagctgcgcagccgccgtcacccccctaccccccccgaaccttctggagggctgcctagaggccccccagagccccctgatcgactctcttgcgatgggtcaagggtccacctgctgtacaagtag

SEQ ID NO: 210031 - DNA, 2535 bp, Artificial Sequence
  derived and/or modified sequence
atgggccccggagccccgtttgcgagagtcggatggcccttgccgctgctggtcgtaatggcggctggagtcgcgccagtatgggcctcacattccccacatttgcctagaccccactcccgagtccctcctcaccctagttcagagagacgagcagtatatatcggggccttatttcctatgtctggtgggtggcctggcggccaggcctgtcagcctgcggtcgagatggctttagaggacgtgaacagtagacgagacatactgccggattacgagctcaagctgatacatcatgattcaaaatgtgacccggggcaggctactaagtatctgtatgaattactctataatgaccctatcaagatcattctgatgcccggatgtagcagtgtgagtaccctggtcgccgaagcagcacgcatgtggaatctgatcgtgctcagttatggcagctcttctcccgcactatctaaccgccaaagattccccacattttttcgcactcatccatccgcaacgctccataatccgaccagagtgaagctcttcgagaagtgggggtggaaaaaaatcgccacaattcagcagaccacggaggtgttcacctccacactggacgatcttgaggaaagggtgaaggaagccggtatcgagatcacctttcgccagagcttcttttcagaccccgcggtgccagtgaaaaatttgaagcggcaagacgccaggataatagtgggacttttttatgagacagaagctcggaaggtgttctgcgaggtctacaaggaacggctttttggcaaaaaatacgtttggttcctcataggctggtacgccgataactggttcaagatctacgatccctcaatcaattgcacagtagatgagatgaccgaggctgtggagggccatatcactacagaaattgtcatgctgaatccggcaaacactcgctctatcagcaacatgacaagtcaggaattcgtcgagaagctgacaaagaggctcaaacgacatcccgaagagaccggaggtttccaggaggcccccctggcttacgacgccatttgggcactggccctagcgctgaacaagacctctggcggcggtggtcggagtggcgtcagacttgaagacttcaattacaacaatcagacaattaccgatcagatctatagggccatgaacagcagttcattcgagggcgtttcaggtcacgtagtcttcgatgcctccgggtccaggatggcctggacattgatcgaacaattgcaaggaggaagctacaagaagatcgggtactatgacagcaccaaggacgacttgagctggagcaagacagacaagtggatcggcggcagtcctcctgccgaccagactctggttattaagacattcagattcctctcacagaaactgttcatttctgtatccgtcctgtcatctttgggaattgttctggccgtggtttgtctcagctttaatatatataattcacacgtgcggtacatccagaacagccagcctaatctcaataacctcacagctgtcgggtgttccttagccctggcagccgttttcccactagggttagatggatatcacattggacgtaaccagttccccttcgtctgtcaggctaggctttggctgctgggactggggttttccctggggtatgggtccatgtttaccaagatttggtgggtgcacacagtgtttacaaagaaagaagaaaagaaggagtggcggaaaacccttgaaccttggaaactttatgctacagtaggtctgctggtcggaatggatgtcctcacactcgctatttggcagatcgtggaccccttacaccgaacgatcgagacttttgccaaagaggagcctaaagaggatatcgatgtgtccattctgccacagctagaacattgttcatcccgcaagatgaacacctggctcggtatattctacggctataagggcctactcctgttacttggaatatttctggcttacgaaacaaaaagcgtgtcgacagaaaaaataaacgatcatcgggcagtggggatggcaatctacaacgtggcagtactgtgccttatcacagcaccggtaacaatgatcctgagcagccaacaggacgccgctttcgcttttgcaagtcttgcgattgtcttctcctcttatataactctggtcgtgttattcgtccctaagatgaggaggcttattacgcggggagagtggcagagtgaagcgcaggacaccatgaaaacagggtcatccaccaataacaatgaggaggagaaaagcagactcctggaaaaagagaatcgcgagctcgagaagatcatcgccgagaaggaagaacgagtctcagaactcagacaccagttgcaatctcggcaacaactgcgcagcagaaggcatcctcccactccgcctgagccttctggcggattaccacgaggtccccccgagcctcctgatcggctgtcatgcgatgggagtcgcgtacacctcctgtataaatag

SEQ ID NO: 210032 - DNA, 4104 bp, Artificial Sequence
  derived and/or modified sequence
acatctccctcctgctcctcctcctcccctccgtcggtcagtcagtccgcgaggagagtccgcggtggcggcgacggtggcgagagccgcgggggccgtaggaagccaaccttccctgcttctccggggccctcgccccctcctccccacaaaatcagggatggaggcgcctccccggcaccctcttagcagccctccccaggaaaagtgtcccccctgagctcctaacgctccccaacagctacccctgccccccacgccatggggcccggggccccttttgcccgggtggggtggccactgccgcttctggttgtgatggcggcaggggtggctccggtgtgggcctcccactccccccatctcccgcggcctcactcgcgggtccccccgcacccctcctcagaacggcgcgcagtgtacatcggggcactgtttcccatgagcgggggctggccagggggccaggcctgccagcccgcggtggagatggcgctggaggacgtgaatagccgcagggacatcctgccggactatgagctcaagctcatccaccacgacagcaagtgtgatccaggccaagccaccaagtacctatatgagctgctctacaacgaccctatcaagatcatccttatgcctggctgcagctctgtctccacgctggtggctgaggctgctaggatgtggaacctcattgtgctttcctatggctccagctcaccagccctgtcaaaccggcagcgtttccccactttcttccgaacgcacccatcagccacactccacaaccctacccgcgtgaaactctttgaaaagtggggctggaagaagattgctaccatccagcagaccactgaggtcttcacttcgactctggacgacctggaggaacgagtgaaggaggctggaattgagattactttccgccagagtttcttctcagatccagctgtgcccgtcaaaaacctgaagcgccaggatgcccgaatcatcgtgggacttttctatgagactgaagcccggaaagttttttgtgaggtgtacaaggagcgtctctttgggaagaagtacgtctggttcctcattgggtggtatgctgacaattggttcaagatctacgacccttctatcaactgcacagtggatgagatgactgaggcggtggagggccacatcacaactgagattgtcatgctgaatcctgccaatacccgcagcatttccaacatgacatcccaggaatttgtggagaaactaaccaagcgactgaaaagacaccctgaggagacaggaggcttccaggaggcaccgctggcctatgatgccatctgggccttggcactggccctgaacaagacatctggaggaggcggccgttctggtgtgcgcctggaggacttcaactacaacaaccagaccattaccgaccaaatctaccgggcaatgaactcttcgtcctttgagggtgtctctggccatgtggtgtttgatgccagcggctctcggatggcatggacgcttatcgagcagcttcagggtggcagctacaagaagattggctactatgacagcaccaaggatgatctttcctggtccaaaacagataaatggattggagggtcccccccagctgaccagaccctggtcatcaagacattccgcttcctgtcacagaaactctttatctccgtctcagttctctccagcctgggcattgtcctagctgttgtctgtctgtcctttaacatctacaactcacatgtccgttatatccagaactcacagcccaacctgaacaacctgactgctgtgggctgctcactggctttagctgctgtcttccccctggggctcgatggttaccacattgggaggaaccagtttcctttcgtctgccaggcccgcctctggctcctgggcctgggctttagtctgggctacggttccatgttcaccaagatttggtgggtccacacggtcttcacaaagaaggaagaaaagaaggagtggaggaagactctggaaccctggaagctgtatgccacagtgggcctgctggtgggcatggatgtcctcactctcgccatctggcagatcgtggaccctctgcaccggaccattgagacatttgccaaggaggaacctaaggaagatattgacgtctctattctgccccagctggagcattgcagctccaggaagatgaatacatggcttggcattttctatggttacaaggggctgctgctgctgctgggaatcttccttgcttatgagaccaagagtgtgtccactgagaagatcaatgatcaccgggctgtgggcatggctatctacaatgtggcagtcctgtgcctcatcactgctcctgtcaccatgattctgtccagccagcaggatgcagcctttgcctttgcctctcttgccatagttttctcctcctatatcactcttgttgtgctctttgtgcccaagatgcgcaggctgatcacccgaggggaatggcagtcggaggcgcaggacaccatgaagacagggtcatcgaccaacaacaacgaggaggagaagtcccggctgttggagaaggagaaccgtgaactggaaaagatcattgctgagaaagaggagcgtgtctctgaactgcgccatcaactccagtctcggcagcagctccgctcccggcgccacccaccgacacccccagaaccctctgggggcctgcccaggggaccccctgagccccccgaccggcttagctgtgatgggagtcgagtgcatttgctttataagtgagggtagggtgagggaggacaggccagtagggggagggaaagggagaggggaagggcaggggactcaggaagcagggggtccccatccccagctgggaagaacatgctatccaatctcatctcttgtaaatacatgtccccctgtgagttctgggctgatttgggtctctcatacctctgggaaacagacctttttctctcttactgcttcatgtaattttgtatcacctcttcacaatttagttcgtacctggcttgaagctgctcactgctcacacgctgcctcctcagcagcctcactgcatctttctcttcccatgcaacaccctcttctagttaccacggcaacccctgcagctcctctgcctttgtgctctgttcctgtccagcaggggtctcccaacaagtgctctttccaccccaaaggggcctctccttttctccactgtcataatctctttccatcttacttgcccttctatactttctcacatgtggctccccctgaattttgcttcctttgggagctcattcttttcgccaaggctcacatgctccttgcctctgctctgtgcactcacgctcagcacacatgcatcctcccctctcctgcgtgtgcccactgaacatgctcatgtgtacacacgcttttcccgtatgctttcttcatgttcagtcacatgtgctctcgggtgccctgcattcacagctacgtgtgcccctctcatggtcatgggtctgcccttgagcgtgtttgggtaggcatgtgcaatttgtctagcatgctgagtcatgtctttcctatttgcacacgtccatgtttatccatgtactttccctgtgtaccctccatgtaccttgtgtactttcttcccttaaatcatggtattcttctgacagagccatatgtaccctaccctgcacattgttatgcacttttccccaattcatgtttggtggggccatccacaccctctccttgtcacagaatctccatttctgctcagattccccccatctccattgcattcatgtactaccctcagtctacactcacaatcatcttctcccaagactgctcccttttgttttgtgtttttttgaggggaattaaggaaaaataagtgggggcaggtttggagagctgcttccagtggatagttgatgagaatcctgaccaaaggaaggcacccttgactgttgggatagacagatggacctatggggtgggaggtggtgtccctttcacactgtggtgtctcttggggaaggatctccccgaatctcaataaaccagtgaacagtgtga

SEQ ID NO: 210033 - DNA, 2535 bp, Artificial Sequence
  derived and/or modified sequence
atgggccccggcgcccccttcgcccgggtgggctggcccctgcccctactcgttgtgatggcagcaggagtcgctcctgtgtgggcgtcccattctccgcaccttccacggcctcacagtagggtgcccccacatccctctagcgaaagacgcgccgtgtacataggggcactgttccccatgagtggagggtggcccggtggacaagcttgtcagcccgcagtcgaaatggcgctggaagatgttaactcacgcagagacatcctccctgattacgagcttaaactgattcatcacgattctaaatgcgaccctggccaggcaaccaaatacttgtacgagcttctgtacaacgatcccattaagattattcttatgccgggttgcagttccgtgagcaccctcgtggccgaggcagcccgcatgtggaacctcatagtgttgagctatggttctagttctccggccctgtccaatcggcaacgcttccccacattcttccgcacacacccctctgcaacactgcataatcctactcgcgttaaattgttcgaaaagtggggctggaaaaaaatagccacaatccagcagacaacagaggtgttcaccagtacgctggacgacctggaggagagggtgaaagaagccggaatagagattacattcagacagtcattcttctcggatcccgccgtcccagtcaagaatctgaagcgccaggacgcccgtatcattgtcgggcttttttatgagacagaagctcgcaaggtattttgtgaagtgtataaggagagactttttggcaaaaagtatgtgtggtttctgatcgggtggtatgccgacaattggttcaaaatatacgacccaagtattaactgcaccgttgatgaaatgacggaagccgttgagggccatattacgactgagattgttatgctcaatcccgcaaatactagaagcattagcaacatgacaagtcaggaattcgtcgagaaactgacaaagcgcctgaaacgccacccggaggaaacaggggggtttcaggaggccccactagcttacgatgctatttgggccctggctttagctctcaataaaacttcagggggcggtggaagatccggagtccgcctggaagacttcaattacaataatcagactatcacagatcagatatatagggcaatgaacagcagcagcttcgaaggagtgagtggacacgttgtcttcgacgcgtctggcagcaggatggcatggactctaattgagcaactccagggaggatcatataagaagattggttactatgactcgaccaaggatgacctatcttggtccaagacagacaagtggatcggcggcagcccgccggccgaccagacccttgtgattaagaccttccggtttctcagccagaaattgttcatatccgtgtccgttcttagtagtttggggattgtcctggccgtagtgtgtctgtcttttaacatctacaacagccacgtgcggtacatccagaatagccagccaaatttgaataacttaactgctgtaggctgctctctggccctcgccgccgtgtttccgctgggcttagacggctaccacatcggtagaaaccagttcccatttgtgtgtcaggctcgtctgtggctgttgggtctggggttctctctggggtacggctccatgtttaccaagatttggtgggtgcatactgtctttacgaaaaaggaggaaaagaaagagtggcgcaaaactctggagccctggaagctctatgctacagtgggcctactggtgggaatggacgtgctgaccttggcaatatggcagatcgtagatcctcttcacaggacaatcgaaacgtttgcaaaggaggagcctaaggaggatatcgacgttagtattctgcctcaactggagcattgctccagccgcaagatgaacacctggctcggaatcttctatggctataagggactactgctgcttctgggcatctttttagcctacgagaccaaatcagtgagtaccgagaagatcaacgatcatagggcagtaggtatggcaatctacaacgttgcggtgctctgtctgattactgctcctgtgaccatgatcctgtctagccagcaggatgctgcgtttgcctttgccagtttggccattgtgtttagctcctatatcacgctagtcgtcctgtttgtgccgaaaatgaggcgactgataacccgaggcgagtggcagtctgaagctcaggacaccatgaaaaccgggtctagcactaacaacaacgaggaagagaaatcaagacttctggaaaaagaaaatagggagctggaaaaaatcatagctgagaaggaggagcgcgtaagcgagttgaggcaccaactgcaaagtcggcagcagctgcggtcgaggcgacacccccctacgcctcctgaacccagcggtgggctgcctcgagggccaccggaacccccggatcggctgtcatgtgacggctcgagggtccacctcctgtacaagtag

SEQ ID NO: 210034 - DNA, 2535 bp, Artificial Sequence
  derived and/or modified sequence
atgggccccggcgcccccttcgcccgggtgggctggcccctgccccttctggttgtgatggcggccggcgtggctccggtgtgggcatctcacagcccccacctgccgagaccccattctagggtgcctccccacccctctagcgagagaagagcggtttacatcggagcattgttccctatgtctgggggatggccggggggacaggcatgccagccagccgtagagatggctctggaagacgtgaattcccgaagggatattcttccggattacgaattgaaacttattcatcacgactctaagtgcgaccccgggcaggcgactaaatatctctacgaactgttgtacaatgacccgatcaaaatcattctgatgcccggatgcagttccgtcagcactctcgttgccgaggccgcccgaatgtggaatttgatcgtgctctcttatggctcatcttctccagcactcagcaacagacagcggttcccaacattctttcgcactcatccctctgccaccttgcataatcctacaagggttaagttattcgagaaatgggggtggaagaagattgctacgatccagcagactacagaagtgttcacgtcaacactggatgacctcgaggaacgcgtgaaagaggcagggatcgaaattacgtttcggcaaagtttcttcagcgatccagcagtgccagtaaaaaaccttaagcggcaggatgcaaggataatagtaggactgttttacgagaccgaggctcgcaaggtattctgtgaagtctataaagagagattgttcggaaagaagtacgtgtggttccttattggatggtacgcagacaactggttcaagatatatgacccatccatcaattgtactgtcgacgagatgacagaggccgtcgagggccatatcactacggagattgtcatgctgaatcctgccaatacgcgcagcatcagtaatatgactagccaagagttcgtggagaaattgacaaagaggctcaaaagacacccagaagagaccggaggatttcaggaggccccactggcatacgacgccatctgggcactggcgctggctctgaataaaacctctggaggagggggccggagcggtgtgagactcgaagacttcaattataacaaccagacaatcactgaccagatatatagggcgatgaactcctcatcgttcgagggcgtgtcggggcatgtagtgttcgatgccagtggcagccggatggcgtggactttgatcgaacagcttcagggggggtcctacaagaagataggctactacgactccacaaaagatgatctgtcatggagtaaaactgataaatggattggaggttctcctcccgctgaccagacgctggtgataaagacattcaggtttctctctcagaaactcttcatctccgtttcagtgctcagctctctcggcatagtgttggctgtcgtgtgtttgtcttttaatatttataactcccatgtccgctatattcagaactcccagccaaacctgaataaccttactgccgtcgggtgcagcctggcccttgctgctgtttttcccttggggctcgacggatatcacatcgggaggaaccagtttccatttgtttgccaggcacgcctctggttactgggcctgggctttagtctcgggtacggctctatgttcacaaaaatttggtgggtccatactgtgttcacaaagaaggaagaaaagaaagagtggcgaaaaacattggagccatggaaactttatgccacagtaggtctgttggttgggatggacgtgctgaccctggctatctggcagatagtcgatcctctgcaccgtacaatcgaaacctttgccaaggaggagcccaaggaagatatcgacgttagcatcctgccgcagctcgaacattgttcttcacgaaaaatgaatacttggctggggatcttttacgggtacaaaggactactcctgttattgggcatcttcctggcatatgaaacaaaatcagtgagcaccgaaaagataaatgaccatcgcgccgtgggcatggcaatctataacgtggctgtcctatgtctcattacggctccggtaacaatgatcctgtcatcacaacaggatgccgccttcgcatttgcgtccttagccatagtgtttagctcctacattacactggtggtcttattcgttcccaagatgaggagattgatcacacgaggagaatggcagtctgaggcacaggatacgatgaagaccgggagctctactaataataatgaggaagagaaatcaaggctgttagagaaggagaacagagaactggagaaaatcattgctgaaaaggaggaaagagtctccgaactccggcatcagctacaatccaggcaacagttacggagccggcggcacccccccacccctcctgagccttcagggggactgcctaggggacctcctgagcctcccgacaggctgtcctgcgatggaagccgcgtgcatctgctgtataaatag

SEQ ID NO: 210035 - DNA, 2535 bp, Artificial Sequence
  derived and/or modified sequence
atgggccccggcgcccccttcgcccgggtgggctggcccctgcccctgctggtggtgatggctgccggtgtcgcgcccgtgtgggcaagccatagccctcacctgccgagacctcactcacgggtccctccacatccctcatctgaaagacgggccgtctatatcggcgccttgttccctatgtcagggggctggccggggggtcaggcttgccagcccgccgtcgaaatggctcttgaggatgtgaattctagacgggatattctgcccgattatgagttaaaactgatccaccacgactcgaagtgtgatccaggccaagccacaaagtacctatacgaactcctctacaacgacccgattaagattatcctaatgcctgggtgcagttctgtgagcaccttggtagcagaagctgctcgtatgtggaatttaatcgtgttgagttacggaagctcttcacctgccctgtctaacaggcaacggttccccaccttctttaggacgcacccctcagccacactgcataacccaacaagggtgaaacttttcgaaaaatgggggtggaagaaaatcgcgactatccagcagactacagaagtcttcacctccactttggacgatttggaagagagagtgaaggaggcaggtattgagattacatttagacagagcttttttagtgatccagccgtgccggtgaagaatctgaaacggcaggatgctcggatcatcgtgggcttgttttacgagaccgaggcacgcaaagtgttttgcgaggtatacaaagagcggttgttcggcaagaaatatgtgtggttcctaatcgggtggtatgccgacaactggtttaaaatttatgatccgagcatcaattgcactgttgacgagatgacagaggccgtggagggccacattactaccgagattgtgatgctcaatcctgctaatacccgctctatcagcaacatgacatcacaagaattcgttgagaagttaaccaaaagacttaagcgacacccggaggaaactgggggctttcaggaggccccgctggcttacgacgccatctgggccctggcactcgctctgaacaagacaagcggaggtggtggaaggtcaggggtgcgcttagaagacttcaattataataatcagacaattaccgaccaaatctatcgggcaatgaacagcagctctttcgagggagtatccggccatgtggtattcgatgcgtccggttcacggatggcctggaccctgatcgaacagctacaggggggaagctacaaaaagatcggctactacgatagtacaaaggacgacctgtcctggtctaaaactgacaaatggatcggcggtagccctccggcagatcagaccctggttattaagacatttcgattcctgtcccaaaaactgttcatttccgtctcagtcctgtcgtcgttaggtatcgtgctggctgtcgtgtgcttgtccttcaacatctacaacagtcatgtgcgctacatacaaaacagccagccaaacctgaacaatttgaccgctgtggggtgctccctggccctcgccgcagtgttccctctcggcttggatgggtatcacatcggccggaaccaatttccttttgtatgtcaggctagattatggctgctgggtttggggttcagcctgggctatggctcaatgttcacaaaaatatggtgggtgcatactgtgtttacaaagaaagaggaaaaaaaggaatggaggaagacactcgagccctggaagttgtacgcaaccgtgggcctgctggtgggcatggatgttctgacgctagcaatatggcagatcgtagatcctcttcacaggactatcgaaacattcgccaaagaagaaccaaaggaggacattgatgtctctatccttccacagctcgaacactgtagttctagaaagatgaatacatggctcgggatcttctatggttataagggcctgttgctcctgctcggtatatttctggcctacgagaccaaatctgtgagtacagagaagatcaacgatcatagggcagtgggtatggcgatctacaacgtggcagttctgtgcctcatcaccgcccctgtgactatgatactgagctcccaacaggacgctgccttcgcctttgcttcactggctatagtgttctcctcttatatcacactagttgttctgttcgtacccaaaatgcgaaggctgatcacgcgcggggaatggcagtccgaagcccaagataccatgaaaactggttcaagtaccaacaataatgaagaggagaaatctaggttactagaaaaggagaaccgggagctcgaaaagatcatcgccgagaaagaggaaagggtgtccgaactgaggcatcagctgcagagtagacaacaactgcgctctaggaggcaccctcctacccccccagagcctagcgggggacttccccgaggtccgcctgaacctcccgatcgcctgtcctgcgatgggtctcgagtgcatctgctttataaatag

SEQ ID NO: 210036 - DNA, 2535 bp, Artificial Sequence
  derived and/or modified sequence
atgggccccggcgcccccttcgcccgggtgggctggcccctgcccctcctggttgtgatggccgcgggtgttgcccccgtttgggcgtcccactctccccacttaccccgccctcactccagggttccccctcaccccagttccgagcggagagcagtctatatcggcgctctgtttccaatgtctggtggatggcccggcggccaggcttgtcaaccggccgtcgagatggccttggaagacgtgaattctcggagggatatcctgcctgattacgaattaaagttgattcatcacgattcaaaatgtgacccaggtcaagccaccaaatacctttacgaattactgtacaacgaccccataaaaattattctcatgccagggtgttcctctgtgtctactctggtggcggaggctgcaagaatgtggaacttgattgtgcttagctacggctctagcagtccagccctcagtaacaggcagcggtttcctaccttcttcaggactcatcctagtgccactctccacaaccctacaagggtgaaactcttcgaaaagtgggggtggaagaagatcgcaactatccagcaaacaaccgaagtgtttacgagcacactggatgatctcgaagagcgggtaaaggaggcaggtatcgagattaccttccggcagtcttttttctcggatccagctgtgccggtgaaaaacttgaaacgccaggacgcccgcatcatcgtaggactcttctatgaaacagaggcacgaaaggttttctgcgaggtgtacaaagagagattattcggcaaaaaatacgtttggttcctcatcgggtggtacgcagacaactggttcaagatctatgatcctagcataaactgtacagtcgacgaaatgaccgaggcagtagagggtcacatcaccactgaaattgttatgctcaatccagcgaatacacgatctatctctaatatgacttcgcaggaatttgtggagaaactgaccaagcgcctgaagcgacaccccgaggaaactgggggattccaggaagccccccttgcctatgacgccatctgggcactggcacttgcactgaacaagacatcaggtggaggcggcagatccggcgtgcgattggaggatttcaactacaataaccaaaccatcacagatcagatctatcgagctatgaattcttcttcttttgagggggtgtcagggcacgtggttttcgacgcgagtggtagcaggatggcatggacactgatcgaacagcttcagggcggaagctataagaaaattggttattacgacagtactaaagacgacctgtcctggtctaagaccgacaagtggatcggagggagccctcctgcagaccagactttggttatcaagacatttcggttcctgagtcagaagctttttataagcgtgagtgtgttgagctccttaggcatagtgctggctgtagtgtgcttgtcattcaacatctacaacagccacgtccgctatatacaaaactcccagccgaatctgaacaatctgaccgcagtcggatgcagtttggctctggctgccgtattccctcttggactcgacggataccacattggtcgaaatcagttccctttcgtgtgtcaagcccggctatggctgctagggctcgggtttagccttggctatggaagcatgtttactaagatatggtgggtgcacaccgttttcactaaaaaggaggagaagaaggagtggcgcaaaaccctggagccctggaaactctatgccactgtaggcctgctggtggggatggatgtcttaaccttggccatttggcagatagtggatccactgcatagaaccatagagacgtttgccaaggaggagcccaaagaggatatcgatgtctcaatcctccctcaactggagcattgttcttcccggaagatgaatacctggctgggcattttttatggatataaagggctgttgctcctcttgggtattttccttgcctatgagacaaaatctgtgtcaactgagaaaattaatgaccatcgggcagtgggaatggcaatatacaatgtggctgtgctgtgtctgatcactgcacccgtgactatgatcctctctagccagcaggacgctgccttcgcattcgcctccttggcaatcgtgtttagttcttacattaccctggtggtcctgttcgttccgaaaatgcgcagattgatcacacgcggagagtggcaatctgaggctcaggacacaatgaagaccggcagctctaccaacaacaatgaagaggagaaatcgagacttcttgagaaagagaatagggagctggagaagattatcgccgagaaagaggagagagtaagcgagctgcgtcatcaattgcagtccagacagcagttgcggtctaggagacaccccccgacaccccccgagccgtctggagggctgccccgtggtccgcctgaaccacctgaccgcttatcttgcgatggatcacgagtacacctgctgtataaatag

SEQ ID NO: 210037 - DNA, 2535 bp, Artificial Sequence
  derived and/or modified sequence
atgggccccggcgcccccttcgcccgggtgggctggcccctgcccctcttagttgtaatggccgctggcgtggcacccgtctgggcctcacacagccctcatctaccgagaccccactccagggtccctccacacccctcatctgaaagacgcgccgtttatattggtgcattattccccatgtccggcggctggcccggcgggcaggcctgccaaccagctgtggagatggcccttgaagatgtgaattccaggcgcgacatactgcctgactacgaactgaagttgatacaccatgactcaaagtgcgatccgggtcaagctacgaaatacctctacgagcttctgtacaacgaccctattaagatcatacttatgcccggatgtagttctgtatctaccctggtggcggaagccgcacggatgtggaacttaatagtccttagttacggctcaagctctccagctctcagcaacaggcaaaggttccccacatttttcaggacccatccttcagccaccttgcacaaccctaccagagtgaagctgttcgaaaaatggggttggaaaaagatcgccaccattcagcagaccaccgaagtattcacatcaacattagacgatctggaggagcgcgtaaaagaagccggtatagaaatcacctttcggcagtcattcttctcagatcccgcagtcccagtcaaaaacctcaagcgccaagatgcccgtattatcgtgggactgttctacgaaactgaagcccggaaggtcttttgcgaggtgtacaaggaaagactatttggtaaaaaatatgtgtggttcctaatagggtggtacgctgacaactggtttaagatctacgacccctctatcaactgtacggtggacgagatgactgaggctgtggagggccacattaccactgagattgtcatgcttaatccagccaacacgcggtccatcagtaacatgaccagtcaggaatttgtggagaagctgacaaaaagattgaagagacatcctgaggaaactggcgggtttcaagaggcgccactggcctacgatgcaatctgggcattggcactggccctcaataaaacttcaggtggtggcggacggtccggtgtgcgtctggaagatttcaattacaataatcagaccatcaccgatcaaatctacagagcgatgaacagctctagtttcgaaggagtctccggacatgtagtgtttgacgcttccggctctcgcatggcctggactctcattgagcaactgcagggcggctcgtataagaagattgggtattacgactctaccaaagatgatctgtcttggtctaaaacagataaatggataggcgggagtcctccagccgatcagaccttggtcattaaaaccttccgttttctctctcagaagctgttcatctccgtatcagtactctcttcgctggggatcgtcctggctgtggtgtgtctcagctttaacatctacaattctcacgtcaggtatattcaaaactcacagcccaatttgaataatctgacagccgtcggatgttccttggccctggctgccgtattccctctggggttggacggctatcatatcggcaggaaccagttcccctttgtctgccaagccaggctctggttgctgggtctgggattttctttgggttatggctcaatgttcaccaagatttggtgggtacatacagtctttactaagaaagaggaaaaaaaggaatggcgcaagacgctcgagccatggaagctctacgctacagtgggcctcttggtcgggatggacgttctgacattggctatttggcagattgtggatcctttgcatcgaacgattgagacctttgcaaaagaagagccaaaagaagacatcgacgtctcaatcttgcctcagctggaacactgcagcagccgcaagatgaatacctggctgggtatattttacggttacaaaggcctcctgctcctgttgggtattttcctggcctatgaaaccaagagtgtaagcacagaaaagatcaacgatcacagggcagtgggtatggccatttataatgtggctgttctgtgtcttatcacagcccccgtgacaatgattctgtccagccagcaagacgctgccttcgctttcgctagcttggccattgtgttttcttcctacattactctggtcgttctgttcgttcccaaaatgcgcagactgattactcgaggggagtggcagagcgaagcccaggacaccatgaaaaccgggtctagcaccaacaataatgaggaggaaaaatcccgccttctggaaaaagagaatagggagcttgaaaaaataattgcagaaaaagaagagcgcgtgagtgaattaagacaccaacttcaaagcagacagcagcttagatcccgtcggcatcctcccactccacctgaaccatccggcggactccccagaggcccacctgaacccccagataggttgagttgtgatggaagcagagtgcacctgctctacaaatag

SEQ ID NO: 210038 - DNA, 2535 bp, Artificial Sequence
  derived and/or modified sequence
atgggccccggcgcccccttcgcccgggtgggctggcccctgcccctgcttgtcgtcatggccgcaggcgtggctccggtgtgggcaagccattcccctcatcttcctcgaccccattctagggtgccgccgcacccaagctcggaacgacgtgccgtttacatcggggccttgtttccaatgagcgggggctggcccggaggccaggcatgtcagcctgccgtagaaatggcgctggaagacgtgaacagcagaagagacattctgccagattatgaacttaagttgatccaccatgatagtaaatgcgacccggggcaggcgacaaaatatctctatgagttactgtataatgatccaattaagataattcttatgcccggttgttcatccgtttcaacacttgtcgccgaagctgctcgcatgtggaatctcatcgtgttgtcctacgggagcagctctcccgcgctcagcaacagacaaagattcccaacatttttcagaacacatccttcagctacccttcacaaccccacccgagtaaagctgtttgagaagtgggggtggaagaagatcgccaccatccagcagacaaccgaggtattcacatccacattggacgaccttgaggagcgggtcaaagaggcgggcatcgaaattacgtttcgacagagctttttctctgacccagctgttcccgtcaaaaatctcaagaggcaggacgcaaggattatagtggggcttttctatgaaactgaggcccggaaagtattttgcgaggtctataaggagcggctcttcggtaaaaaatacgtttggttccttatcgggtggtatgcagacaactggttcaagatttatgacccaagtatcaactgtactgttgacgagatgaccgaggcagtggagggccacattaccacggagatagtcatgctgaatcctgcaaataccaggtctatctcaaacatgacaagtcaagaatttgtggagaaacttactaagcgattaaagaggcatccagaggagactggaggctttcaagaggcccccctagcctacgatgccatatgggctttggccctggccctaaataagacatctgggggcggggggaggtccggagtccggctagaggatttcaattacaacaaccagactatcacagatcagatctaccgggcaatgaattctagttctttcgaaggagttagcgggcatgtcgtcttcgacgcaagcggcagcaggatggcctggactctcatcgaacagctccagggcgggagctacaagaagatcgggtattacgactctaccaaggacgaccttagttggagcaagactgacaagtggattggcggaagcccacccgctgaccaaactctggtgattaaaactttcaggttcctgagtcaaaagctgttcatctccgtctctgtgctgagttcgctagggatcgtgctcgcggtggtgtgcctgtcttttaacatttataatagccacgttcgatacattcagaacagccagccaaatctaaataatctgacggcagtgggttgctccctcgccctggccgcagtttttcccctaggtctggacggctaccatatcggccggaaccaatttcccttcgtctgccaggcacgcctctggttgttaggtttgggtttttctctcggctacggatcaatgttcaccaagatctggtgggtacataccgtttttacaaaaaaagaagaaaaaaaggaatggcggaagactctagagccatggaagttgtatgctactgttggcttgctcgtaggcatggacgtgctgacactagcaatttggcagatcgtcgatccactgcaccgcacaatcgaaactttcgcgaaggaagaacctaaagaggatatcgacgtcagcatcctgccacaactggagcactgcagctcacggaagatgaacacatggttagggatcttctatggctataaaggactcctgctcctgctgggtatattcctggcctacgaaacaaaatccgtgagcaccgaaaaaatcaacgaccaccgggctgtcgggatggccatctataacgtggctgtgctgtgtctgattactgcccctgtcaccatgattctgtcctcacagcaggacgctgcgtttgcatttgccagcctggctatcgtgttttcgagctacattaccttagtggttctattcgtgcctaaaatgaggcgcctgataacaagaggcgaatggcagtcagaagcacaggacactatgaaaactggaagttctactaacaataatgaggaagaaaagtctaggctactcgagaaggagaaccgcgaactggaaaaaataatcgccgaaaaggaagagagagttagcgaacttagacatcagctgcagtccaggcaacagttgagaagtaggcggcatccgcccacgcctccagaaccaagcgggggcctgccccgggggccaccagagccaccagatcgccttagctgcgacggatctcgcgtccacctgctctataaatag

SEQ ID NO: 210039 - DNA, 4070 bp, Artificial Sequence
  derived and/or modified sequence
agtcagtccgcgaggagagtccgcggtggcggcgacggtggcgagagccgcgggggccgtaggaagccaaccttccctgcttctccggggccctcgccccctcctccccacaaaatcagggatggaggcgcctccccggcaccctcttagcagccctccccaggaaaagtgtcccccctgagctcctaacgctccccaacagctacccctgccccccacgccatggggcccggggccccttttgcccgggtggggtggccactgccgcttctggttgtgatggcggcaggggtggctccggtgtgggcctcccactccccccatctcccgcggcctcactcgcgggtccccccgcacccctcctcagaacggcgcgcagtgtacatcggggcactgtttcccatgagcgggggctggccagggggccaggcctgccagcccgcggtggagatggcgctggaggacgtgaatagccgcagggacatcctgccggactatgagctcaagctcatccaccacgacagcaagtgtgatccaggccaagccaccaagtacctatatgagctgctctacaacgaccctatcaagatcatccttatgcctggctgcagctctgtctccacgctggtggctgaggctgctaggatgtggaacctcattgtgctttcctatggctccagctcaccagccctgtcaaaccggcagcgtttccccactttcttccgaacgcacccatcagccacactccacaaccctacccgcgtgaaactctttgaaaagtggggctggaagaagattgctaccatccagcagaccactgaggtcttcacttcgactctggacgacctggaggaacgagtgaaggaggctggaattgagattactttccgccagagtttcttctcagatccagctgtgcccgtcaaaaacctgaagcgccaggatgcccgaatcatcgtgggacttttctatgagactgaagcccggaaagttttttgtgaggtgtacaaggagcgtctctttgggaagaagtacgtctggttcctcattgggtggtatgctgacaattggttcaagatctacgacccttctatcaactgcacagtggatgagatgactgaggcggtggagggccacatcacaactgagattgtcatgctgaatcctgccaatacccgcagcatttccaacatgacatcccaggaatttgtggagaaactaaccaagcgactgaaaagacaccctgaggagacaggaggcttccaggaggcaccgctggcctatgatgccatctgggccttggcactggccctgaacaagacatctggaggaggcggccgttctggtgtgcgcctggaggacttcaactacaacaaccagaccattaccgaccaaatctaccgggcaatgaactcttcgtcctttgagggtgtctctggccatgtggtgtttgatgccagcggctctcggatggcatggacgcttatcgagcagcttcagggtggcagctacaagaagattggctactatgacagcaccaaggatgatctttcctggtccaaaacagataaatggattggagggtcccccccagctgaccagaccctggtcatcaagacattccgcttcctgtcacagaaactctttatctccgtctcagttctctccagcctgggcattgtcctagctgttgtctgtctgtcctttaacatctacaactcacatgtccgttatatccagaactcacagcccaacctgaacaacctgactgctgtgggctgctcactggctttagctgctgtcttccccctggggctcgatggttaccacattgggaggaaccagtttcctttcgtctgccaggcccgcctctggctcctgggcctgggctttagtctgggctacggttccatgttcaccaagatttggtgggtccacacggtcttcacaaagaaggaagaaaagaaggagtggaggaagactctggaaccctggaagctgtatgccacagtgggcctgctggtgggcatggatgtcctcactctcgccatctggcagatcgtggaccctctgcaccggaccattgagacatttgccaaggaggaacctaaggaagatattgacgtctctattctgccccagctggagcattgcagctccaggaagatgaatacatggcttggcattttctatggttacaaggggctgctgctgctgctgggaatcttccttgcttatgagaccaagagtgtgtccactgagaagatcaatgatcaccgggctgtgggcatggctatctacaatgtggcagtcctgtgcctcatcactgctcctgtcaccatgattctgtccagccagcaggatgcagcctttgcctttgcctctcttgccatagttttctcctcctatatcactcttgttgtgctctttgtgcccaagatgcgcaggctgatcacccgaggggaatggcagtcggaggcgcaggacaccatgaagacagggtcatcgaccaacaacaacgaggaggagaagtcccggctgttggagaaggagaaccgtgaactggaaaagatcattgctgagaaagaggagcgtgtctctgaactgcgccatcaactccagtctcggcagcagctccgctcccggcgccacccaccgacacccccagaaccctctgggggcctgcccaggggaccccctgagccccccgaccggcttagctgtgatgggagtcgagtgcatttgctttataagtgagggtagggtgagggaggacaggccagtagggggagggaaagggagaggggaagggcaggggactcaggaagcagggggtccccatccccagctgggaagaacatgctatccaatctcatctcttgtaaatacatgtccccctgtgagttctgggctgatttgggtctctcatacctctgggaaacagacctttttctctcttactgcttcatgtaattttgtatcacctcttcacaatttagttcgtacctggcttgaagctgctcactgctcacacgctgcctcctcagcagcctcactgcatctttctcttcccatgcaacaccctcttctagttaccacggcaacccctgcagctcctctgcctttgtgctctgttcctgtccagcaggggtctcccaacaagtgctctttccaccccaaaggggcctctccttttctccactgtcataatctctttccatcttacttgcccttctatactttctcacatgtggctccccctgaattttgcttcctttgggagctcattcttttcgccaaggctcacatgctccttgcctctgctctgtgcactcacgctcagcacacatgcatcctcccctctcctgcgtgtgcccactgaacatgctcatgtgtacacacgcttttcccgtatgctttcttcatgttcagtcacatgtgctctcgggtgccctgcattcacagctacgtgtgcccctctcatggtcatgggtctgcccttgagcgtgtttgggtaggcatgtgcaatttgtctagcatgctgagtcatgtctttcctatttgcacacgtccatgtttatccatgtactttccctgtgtaccctccatgtaccttgtgtactttcttcccttaaatcatggtattcttctgacagagccatatgtaccctaccctgcacattgttatgcacttttccccaattcatgtttggtggggccatccacaccctctccttgtcacagaatctccatttctgctcagattccccccatctccattgcattcatgtactaccctcagtctacactcacaatcatcttctcccaagactgctcccttttgttttgtgtttttttgaggggaattaaggaaaaataagtgggggcaggtttggagagctgcttccagtggatagttgatgagaatcctgaccaaaggaaggcacccttgactgttgggatagacagatggacctatggggtgggaggtggtgtccctttcacactgtggtgtctcttggggaaggatctccccgaatctcaataaaccagtgaacagtgtgactcgg

SEQ ID NO: 210040 - DNA, 3523 bp, Artificial Sequence
  derived and/or modified sequence
ctcctcctcctcccctccgtcggtcagtcagtccgcgaggagagtccgcggtggcggcgacggtggcgagagccgcgggggccgtaggaagccaaccttccctgcttctccggggccctcgccccctcctccccacaaaatcagggatggaggcgcctccccggcaccctcttagcagccctccccaggaaaagtgtcccccctgagctcctaacgctccccaacagctacccctgccccccacgccatggggcccggggccccttttgcccgggtggggtggccactgccgcttctggttgtgatggcggcaggggtggctccggtgtgggcctcccactccccccatctcccgcggcctcactcgcgggtccccccgcacccctcctcagaacggcgcgcagtgtacatcggggcactgtttcccatgagcgggggctggccagggggccaggcctgccagcccgcggtggagatggcgctggaggacgtgaatagccgcagggacatcctgccggactatgagctcaagctcatccaccacgacagcaagtgtgatccaggccaagccaccaagtacctatatgagctgctctacaacgaccctatcaagatcatccttatgcctggctgcagctctgtctccacgctggtggctgaggctgctaggatgtggaacctcattgtgctttcctatggctccagctcaccagccctgtcaaaccggcagcgtttccccactttcttccgaacgcacccatcagccacactccacaaccctacccgcgtgaaactctttgaaaagtggggctggaagaagattgctaccatccagcagaccactgaggtcttcacttcgactctggacgacctggaggaacgagtgaaggaggctggaattgagattactttccgccagagtttcttctcagatccagctgtgcccgtcaaaaacctgaagcgccaggatgcccgaatcatcgtgggacttttctatgagactgaagcccggaaagttttttgtgaggtgtacaaggagcgtctctttgggaagaagtacgtctggttcctcattgggtggtatgctgacaattggttcaagatctacgacccttctatcaactgcacagtggatgagatgactgaggcggtggagggccacatcacaactgagattgtcatgctgaatcctgccaatacccgcagcatttccaacatgacatcccaggaatttgtggagaaactaaccaagcgactgaaaagacaccctgaggagacaggaggcttccaggaggcaccgctggcctatgatgccatctgggccttggcactggccctgaacaagacatctggaggaggcggccgttctggtgtgcgcctggaggacttcaactacaacaaccagaccattaccgaccaaatctaccgggcaatgaactcttcgtcctttgagggtgtctctggccatgtggtgtttgatgccagcggctctcggatggcatggacgcttatcgagcagcttcagggtggcagctacaagaagattggctactatgacagcaccaaggatgatctttcctggtccaaaacagataaatggattggagggtcccccccagctgaccagaccctggtcatcaagacattccgcttcctgtcacagaaactctttatctccgtctcagttctctccagcctgggcattgtcctagctgttgtctgtctgtcctttaacatctacaactcacatgtccgttatatccagaactcacagcccaacctgaacaacctgactgctgtgggctgctcactggctttagctgctgtcttccccctggggctcgatggttaccacattgggaggaaccagtttcctttcgtctgccaggcccgcctctggctcctgggcctgggctttagtctgggctacggttccatgttcaccaagatttggtgggtccacacggtcttcacaaagaaggaagaaaagaaggagtggaggaagactctggaaccctggaagctgtatgccacagtgggcctgctggtgggcatggatgtcctcactctcgccatctggcagatcgtggaccctctgcaccggaccattgagacatttgccaaggaggaacctaaggaagatattgacgtctctattctgccccagctggagcattgcagctccaggaagatgaatacatggcttggcattttctatggttacaaggggctgctgctgctgctgggaatcttccttgcttatgagaccaagagtgtgtccactgagaagatcaatgatcaccgggctgtgggcatggctatctacaatgtggcagtcctgtgcctcatcactgctcctgtcaccatgattctgtccagccagcaggatgcagcctttgcctttgcctctcttgccatagttttctcctcctatatcactcttgttgtgctctttgtgcccaagatgcgcaggctgatcacccgaggggaatggcagtcggaggcgcaggacaccatgaagacagggtcatcgaccaacaacaacgaggaggagaagtcccggctgttggagaaggagaaccgtgaactggaaaagatcattgctgagaaagaggagcgtgtctctgaactgcgccatcaactccagtctcggcagcagctccgctcccggcgccacccaccgacacccccagaaccctctgggggcctgcccaggggaccccctgagccccccgaccggcttagctgtgatgggagtcgagtgcatttgctttataagtgagggtgcatgtccgttccgaggaatgggatttaatgacctttgatgccaacccatatgacagcgtgaaaaaaatcaaagaacatgtccggtctaagaccaaggttcctgtgcaggaccaggttcttttgctgggctccaagatcttaaagccacggagaagcctctcatcttatggcattgacaaagagaagaccatccaccttaccctgaaagtggtgaagcccagtgatgaggagctgcccttgtttcttgtggagtcaggtgatgaggcaaagaggcacctcctccaggtgcgaaggtccagctcagtggcacaagtgaaagcaatgatcgagactaagacgggtataatccctgagacccagattgtgacttgcaatggaaagagactggaagatgggaagatgatggcagattacggcatcagaaagggcaacttactcttcctggcatcttattgtattggagggtgaccaccctggggatggggtgttggcaggggtcaaaaagcttatttcttttaatctcttactcaacgaacacatcttctgatgatttcccaaaattaatgagaatgagatgagtagagtaagatttgggtgggatgggtaggatgaagtatattgcccaactctatgtttctttgattctaacacaattaattaagtgacatgatttttactaatgtattactgagactagtaaataaatttttaaggcaaaatagagcattcaaagcca

SEQ ID NO: 210041 - DNA, 4070 bp, Artificial Sequence
  derived and/or modified sequence
agtcagtccgcgaggagagtccgcggtggcggcgacggtggcgagagccgcgggggccgtaggaagccaaccttccctgcttctccggggccctcgccccctcctccccacaaaatcagggatggaggcgcctccccggcaccctcttagcagccctccccaggaaaagtgtcccccctgagctcctaacgctccccaacagctacccctgccccccacgccatggggcccggggccccttttgcccgggtggggtggccactgccgcttctggttgtgatggcggcaggggtggctccggtgtgggcctcccactccccccatctcccgcggcctcactcgcgggtccccccgcacccctcctcagaacggcgcgcagtgtacatcggggcactgtttcccatgagcgggggctggccagggggccaggcctgccagcccgcggtggagatggcgctggaggacgtgaatagccgcagggacatcctgccggactatgagctcaagctcatccaccacgacagcaagtgtgatccaggccaagccaccaagtacctatatgagctgctctacaacgaccctatcaagatcatccttatgcctggctgcagctctgtctccacgctggtggctgaggctgctaggatgtggaacctcattgtgctttcctatggctccagctcaccagccctgtcaaaccggcagcgtttccccactttcttccgaacgcacccatcagccacactccacaaccctacccgcgtgaaactctttgaaaagtggggctggaagaagattgctaccatccagcagaccactgaggtcttcacttcgactctggacgacctggaggaacgagtgaaggaggctggaattgagattactttccgccagagtttcttctcagatccagctgtgcccgtcaaaaacctgaagcgccaggatgcccgaatcatcgtgggacttttctatgagactgaagcccggaaagttttttgtgaggtgtacaaggagcgtctctttgggaagaagtacgtctggttcctcattgggtggtatgctgacaattggttcaagatctacgacccttctatcaactgcacagtggatgagatgactgaggcggtggagggccacatcacaactgagattgtcatgctgaatcctgccaatacccgcagcatttccaacatgacatcccaggaatttgtggagaaactaaccaagcgactgaaaagacaccctgaggagacaggaggcttccaggaggcaccgctggcctatgatgccatctgggccttggcactggccctgaacaagacatctggaggaggcggccgttctggtgtgcgcctggaggacttcaactacaacaaccagaccattaccgaccaaatctaccgggcaatgaactcttcgtcctttgagggtgtctctggccatgtggtgtttgatgccagcggctctcggatggcatggacgcttatcgagcagcttcagggtggcagctacaagaagattggctactatgacagcaccaaggatgatctttcctggtccaaaacagataaatggattggagggtcccccccagctgaccagaccctggtcatcaagacattccgcttcctgtcacagaaactctttatctccgtctcagttctctccagcctgggcattgtcctagctgttgtctgtctgtcctttaacatctacaactcacatgtccgttatatccagaactcacagcccaacctgaacaacctgactgctgtgggctgctcactggctttagctgctgtcttccccctggggctcgatggttaccacattgggaggaaccagtttcctttcgtctgccaggcccgcctctggctcctgggcctgggctttagtctgggctacggttccatgttcaccaagatttggtgggtccacacggtcttcacaaagaaggaagaaaagaaggagtggaggaagactctggaaccctggaagctgtatgccacagtgggcctgctggtgggcatggatgtcctcactctcgccatctggcagatcgtggaccctctgcaccggaccattgagacatttgccaaggaggaacctaaggaagatattgacgtctctattctgccccagctggagcattgcagctccaggaagatgaatacatggcttggcattttctatggttacaaggggctgctgctgctgctgggaatcttccttgcttatgagaccaagagtgtgtccactgagaagatcaatgatcaccgggctgtgggcatggctatctacaatgtggcagtcctgtgcctcatcactgctcctgtcaccatgattctgtccagccagcaggatgcagcctttgcctttgcctctcttgccatagttttctcctcctatatcactcttgttgtgctctttgtgcccaagatgcgcaggctgatcacccgaggggaatggcagtcggaggcgcaggacaccatgaagacagggtcatcgaccaacaacaacgaggaggagaagtcccggctgttggagaaggagaaccgtgaactggaaaagatcattgctgagaaagaggagcgtgtctctgaactgcgccatcaactccagtctcggcagcagctccgctcccggcgccacccaccgacacccccagaaccctctgggggcctgcccaggggaccccctgagccccccgaccggcttagctgtgatgggagtcgagtgcatttgctttataagtgagggtagggtgagggaggacaggccagtagggggagggaaagggagaggggaagggcaggggactcaggaagcagggggtccccatccccagctgggaagaacatgctatccaatctcatctcttgtaaatacatgtccccctgtgagttctgggctgatttgggtctctcatacctctgggaaacagacctttttctctcttactgcttcatgtaattttgtatcacctcttcacaatttagttcgtacctggcttgaagctgctcactgctcacacactgcctcctcagcagcctcactgcatctttctcttcccatgcaacaccctcttctagttaccacggcaacccctgcagctcctctgcctttgtgctctgttcctgtccagcaggggtctcccaacaagtgctctttccaccccaaaggggcctctccttttctccactgtcataatctctttccatcttacttgcccttctatactttctcacatgtggctccccctgaattttgcttcctttgggagctcattcttttcgccaaggctcacatgctccttgcctctgctctgtgcactcacgctcagcacacatgcatcctcccctctcctgcgtgtgcccactgaacatgctcatgtgtacacacgcttttcccgtatgctttcttcatgttcagtcacatgtgctctcgggtgccctgcattcacagctacgtgtgcccctctcatggtcatgggtctgcccttgagcgtgtttgggtaggcatgtgcaatttgtctagcatgctgagtcatgtctttcctatttgcacacgtccatgtttatccatgtactttccctgtgtaccctccatgtaccttgtgtactttcttcccttaaatcatggtattcttctgacagagccatatgtaccctaccctgcacattgttatgcacttttccccaattcatgtttggtggggccatccacaccctctccttgtcacagaatctccatttctgctcagattccccccatctccattgcattcatgtactaccctcagtctacactcacaatcatcttctcccaagactgctcccttttgttttgtgtttttttgaggggaattaaggaaaaataagtgggggcaggtttggagagctgcttccagtggatagttgatgagaatcctgaccaaaggaaggcacccttgactgttgggatagacagatggacctatggggtgggaggtggtgtccctttcacactgtggtgtctcttggggaaggatctccccgaatctcaataaaccagtgaacagtgtgactcgg

SEQ ID NO: 210042 - DNA, 3523 bp, Artificial Sequence
  derived and/or modified sequence
ctcctcctcctcccctccgtcggtcagtcagtccgcgaggagagtccgcggtggcggcgacggtggcgagagccgcgggggccgtaggaagccaaccttccctgcttctccggggccctcgccccctcctccccacaaaatcagggatggaggcgcctccccggcaccctcttagcagccctccccaggaaaagtgtcccccctgagctcctaacgctccccaacagctacccctgccccccacgccatggggcccggggccccttttgcccgggtggggtggccactgccgcttctggttgtgatggcggcaggggtggctccggtgtgggcctcccactccccccatctcccgcggcctcactcgcgggtccccccgcacccctcctcagaacggcgcgcagtgtacatcggggcactgtttcccatgagcgggggctggccagggggccaggcctgccagcccgcggtggagatggcgctggaggacgtgaatagccgcagggacatcctgccggactatgagctcaagctcatccaccacgacagcaagtgtgatccaggccaagccaccaagtacctatatgagctgctctacaacgaccctatcaagatcatccttatgcctggctgcagctctgtctccacgctggtggctgaggctgctaggatgtggaacctcattgtgctttcctatggctccagctcaccagccctgtcaaaccggcagcgtttccccactttcttccgaacgcacccatcagccacactccacaaccctacccgcgtgaaactctttgaaaagtggggctggaagaagattgctaccatccagcagaccactgaggtcttcacttcgactctggacgacctggaggaacgagtgaaggaggctggaattgagattactttccgccagagtttcttctcagatccagctgtgcccgtcaaaaacctgaagcgccaggatgcccgaatcatcgtgggacttttctatgagactgaagcccggaaagttttttgtgaggtgtacaaggagcgtctctttgggaagaagtacgtctggttcctcattgggtggtatgctgacaattggttcaagatctacgacccttctatcaactgcacagtggatgagatgactgaggcggtggagggccacatcacaactgagattgtcatgctgaatcctgccaatacccgcagcatttccaacatgacatcccaggaatttgtggagaaactaaccaagcgactgaaaagacaccctgaggagacaggaggcttccaggaggcaccgctggcctatgatgccatctgggccttggcactggccctgaacaagacatctggaggaggcggccgttctggtgtgcgcctggaggacttcaactacaacaaccagaccattaccgaccaaatctaccgggcaatgaactcttcgtcctttgagggtgtctctggccatgtggtgtttgatgccagcggctctcggatggcatggacgcttatcgagcagcttcagggtggcagctacaagaagattggctactatgacagcaccaaggatgatctttcctggtccaaaacagataaatggattggagggtcccccccagctgaccagaccctggtcatcaagacattccgcttcctgtcacagaaactctttatctccgtctcagttctctccagcctgggcattgtcctagctgttgtctgtctgtcctttaacatctacaactcacatgtccgttatatccagaactcacagcccaacctgaacaacctgactgctgtgggctgctcactggctttagctgctgtcttccccctggggctcgatggttaccacattgggaggaaccagtttcctttcgtctgccaggcccgcctctggctcctgggcctgggctttagtctgggctacggttccatgttcaccaagatttggtgggtccacacggtcttcacaaagaaggaagaaaagaaggagtggaggaagactctggaaccctggaagctgtatgccacagtgggcctgctggtgggcatggatgtcctcactctcgccatctggcagatcgtggaccctctgcaccggaccattgagacatttgccaaggaggaacctaaggaagatattgacgtctctattctgccccagctggagcattgcagctccaggaagatgaatacatggcttggcattttctatggttacaaggggctgctgctgctgctgggaatcttccttgcttatgagaccaagagtgtgtccactgagaagatcaatgatcaccgggctgtgggcatggctatctacaatgtggcagtcctgtgcctcatcactgctcctgtcaccatgattctgtccagccagcaggatgcagcctttgcctttgcctctcttgccatagttttctcctcctatatcactcttgttgtgctctttgtgcccaagatgcgcaggctgatcacccgaggggaatggcagtcggaggcgcaggacaccatgaagacagggtcatcgaccaacaacaacgaggaggagaagtcccggctgttggagaaggagaaccgtgaactggaaaagatcattgctgagaaagaggagcgtgtctctgaactgcgccatcaactccagtctcggcagcagctccgctcccggcgccacccaccgacacccccagaaccctctgggggcctgcccaggggaccccctgagccccccgaccggcttagctgtgatgggagtcgagtgcatttgctttataagtgagggtgcatgtccgttccgaggaatgggatttaatgacctttgatgccaacccatatgacagcgtgaaaaaaatcaaagaacatgtccggtctaagaccaaggttcctgtgcaggaccaggttcttttgctgggctccaagatcttaaagccacggagaagcctctcatcttatggcactgacaaagagaagaccatccaccttaccctgaaagtggtgaagcccagtgatgaggagctgcccttgtttcttgtggagtcaggtgatgaggcaaagaggcacctcctccaggtgcgaaggtccagctcagtggcacaagtgaaagcaatgatcgagactaagacgggtataatccctgagacccagattgtgacttgcaatggaaagagactggaagatgggaagatgatggcagattacggcatcagaaagggcaacttactcttcctggcatcttattgtattggagggtgaccaccctggggatggggtgttggcaggggtcaaaaagcttatttcttttaatctcttactcaacgaacacatcttctgatgatttcccaaaattaatgagaatgagatgagtagagtaagatttgggtgggatgggtaggatgaagtatattgcccaactctatgtttctttgattctaacacaattaattaagtgacatgatttttactaatgtattactgagactagtaaataaatttttaaggcaaaatagagcattcaaagcca

SEQ ID NO: 210043 - DNA, 2535 bp, Artificial Sequence
  derived and/or modified sequence
atgggccccggcgcccccttcgcccgggtgggctggcccctgcccctcttggtagtcatggcggctggggtggctcccgtgtgggcctcccattccccccacctgccgcggccccactcccgggtgcctccacatccctccagcgagcggcgtgccgtctacataggcgcgttgtttccgatgagcggcggctggcccggaggtcaggcatgccagcccgcggtggagatggccctggaggacgtgaatagtcgacgtgacatcctgcctgattatgagctcaagctgattcatcatgatagcaaatgtgacccaggtcaagccaccaaatacctgtatgaacttctatacaatgaccccataaagattatcctcatgcctggatgttcctcggtgtctaccctcgtcgcggaggctgccaggatgtggaatctgatcgtgctctcatatggttcatctagtccagccttgtccaacagacagagatttcccaccttcttccgcactcacccttcagccacgctccataacccaaccagggtgaaattgtttgagaaatgggggtggaagaagattgcaacaatccagcagaccaccgaagtgttcacttccactttggatgatctcgaggagagggtgaaggaagccggtattgaaataacttttcggcagagcttcttcagtgatcctgctgtaccagtgaagaacctaaagaggcaggatgccagaatcatcgtgggactgttttacgaaactgaagctcgcaaggtattctgcgaggtgtacaaggaaaggctatttggaaagaaatacgtgtggtttttgatcggctggtacgcagataattggttcaaaatctatgacccttcaattaactgtaccgtggatgaaatgactgaggctgtggagggccacattacaacagaaatagtgatgcttaatcccgcaaacactcgcagtattagcaacatgactagccaggaattcgtggaaaaactgacaaagagactcaaaaggcatcccgaggagaccggaggcttccaggaggccccattggcatatgacgccatctgggccctcgcattagctctgaacaagacctccgggggcggcggaaggtcgggtgttcgtctcgaggactttaattataataatcaaacaattacggatcaaatatacagggccatgaattcctcatcatttgagggggtgagtgggcatgtcgtgttcgacgcatcgggctcccgtatggcatggacgcttatagaacagttgcagggtggttcttacaagaagattggctattacgacagtaccaaggatgatctgtcttggtcaaagactgataagtggatcggggggtctccccccgctgaccagaccctagtgattaagacatttagatttctcagccaaaagctgttcatctcagtgtcggtgctttcttcactgggaattgtcctcgccgtggtctgtctgagctttaacatctacaattctcacgtccgatacatccagaactcccagcccaatcttaataacctgacagccgtcggatgttccctcgctctggcagcagtgtttcctttaggcctcgacggctatcatatcggacgcaatcaatttccttttgtgtgccaagcgcgtctctggctactgggtctggggttttctctcgggtacggcagcatgttcaccaagatttggtgggtgcacacggtctttacaaagaaggaggaaaagaaggagtggaggaaaacattggagccatggaaactgtacgctaccgtgggcctgctggtcggcatggatgttctgaccctggccatttggcagattgttgatcccctgcaccgcaccatcgagaccttcgctaaagaagagcccaaagaggacatagacgtgagtatccttccgcagctcgaacactgcagttcccggaaaatgaacacgtggctaggaattttctacggttacaagggcctgctgctgctactgggtattttcctggcatacgaaaccaagtctgtctcaactgagaagataaacgaccatagggccgtcggcatggcgatttataatgtggctgttctgtgtctcattacggcacctgttaccatgatcctctcttcccaacaggatgccgctttcgcctttgcctccctggccattgtgttctcctcttatattaccctggtggtactgtttgtacccaagatgcgccggctgataacaaggggggagtggcagagtgaggcccaagatactatgaagaccggctcttcgaccaacaataacgaagaggagaagtctcgactcctggaaaaagaaaatagagagctggaaaagattatagccgagaaggaggaacgggtctcagagcttagacaccaacttcaatctaggcaacagttgaggtctcggagacatccacccactccaccagagccgtctggaggcctgcccagaggacccccagaaccccccgacagactcagctgtgatggatcacgggtacatttactgtacaaatag

SEQ ID NO: 210044 - DNA, 2535 bp, Artificial Sequence
  derived and/or modified sequence
atgggccccggcgcccccttcgcccgggtgggctggcccctgcccctgctcgtcgtgatggcggccggcgtggcaccggtgtgggcctctcacagtcctcatctcccacgaccccattcccgggtgccaccacacccttcatctgagaggcgagcagtttacatcggggccctcttccccatgtcaggtggttggcctggcggtcaagcctgtcaacccgccgtcgagatggcattggaggatgtgaacagccggcgcgacatcctgccggactatgagttgaagttgatacaccacgatagtaagtgcgaccctggtcaagccacaaaatatctgtatgagctgctgtacaacgatcctatcaaaattattttgatgcccggttgcagctccgtatcgactctggtggccgaggcagctaggatgtggaacctgattgtactgtcctatgggtcgtcatcccctgccctctcaaataggcagaggtttcccactttttttagaacgcacccgtcggcaaccctgcacaaccctacacgggtgaagctgtttgaaaagtggggatggaagaaaatcgcgactattcagcaaacaacagaagtctttacatccacactcgatgacttagaggaacgtgtgaaggaggccggtatcgaaattacgtttagacaatccttcttttctgatcctgctgttccagtgaagaatctcaagcgtcaggacgcccgcattatcgtaggacttttctacgagaccgaggcaagaaaagtcttttgcgaagtttacaaggagagactgttcgggaagaaatatgtttggttcctgatcggctggtatgccgataattggttcaaaatatacgatccaagtataaattgtactgttgatgagatgactgaggctgtagaggggcatatcaccacggagattgtgatgctgaatccggccaatactaggtccataagcaacatgaccagtcaggagttcgtggagaagctgacgaagaggctgaagcgtcaccccgaagaaaccggtggttttcaggaggctccattggcttatgacgcaatctgggcgctggcgcttgccctaaataagaccagtggaggcggcggccggagcggagtccgattagaggacttcaactacaataatcagaccattacggatcagatctaccgggctatgaactccagctcttttgagggcgtgagtggacacgttgtcttcgatgcatcggggagtcgcatggcgtggacgctcattgaacagctccagggcggttcctataaaaaaattgggtactacgactccacaaaagatgacctctcatggagcaagaccgataaatggattggcggctccccccccgccgatcaaacgttggttatcaagacttttcgcttcctctcgcagaagctctttatctcagtctctgttctatcttccctgggcatcgtactggcagtggtgtgcttaagcttcaacatttataattcgcatgtgaggtacatccagaattcacagccgaatctgaataacctcaccgccgttggctgttcattagccttggccgctgtgtttccgctagggttagacggctaccacatcgggcgcaaccagtttccattcgtgtgccaggctcgcctgtggctgctgggtctgggattctctttggggtacggcagcatgttcaccaaaatctggtgggtgcatacagtcttcacaaaaaaagaagagaaaaaggagtggcggaaaactttggaaccgtggaaactttacgccacagtgggcctcctggtggggatggatgtcctcaccttggctatctggcagatagtggacccactgcaccgaacgatagaaacatttgcaaaggaggagcctaaagaggatattgacgtatctattctgccacagctggagcactgtagctcacgaaagatgaacacttggttaggcatcttctacggatacaaaggactacttctgttacttgggatttttctagcatacgagactaagagcgtgtccactgagaaaatcaatgaccaccgagccgttggcatggccatatataatgtggctgtcctgtgcctgattacagcacccgtgacgatgattctctctagtcagcaagacgctgcgttcgctttcgcatccctggcgatagtgttcagctcatacataactctggtggtgctgttcgtcccgaagatgcgtaggctgatcacccgcggggaatggcagagtgaggctcaggatacaatgaagacaggctcttctaccaataacaatgaggaagagaagtctcgcctgctcgagaaggagaatcgggagcttgagaagatcattgctgaaaaagaggagagggtgtccgagctgcgacaccaactgcagtccaggcagcagctgaggtcaaggagacatccacccacacctccagagcccagtggcggattgccaagaggccctcccgagccacccgaccgcctgtcctgtgacgggtcaagggttcatctgttgtataaatag

SEQ ID NO: 210045 - DNA, 2535 bp, Artificial Sequence
  derived and/or modified sequence
atgggccccggcgcccccttcgcccgggtgggctggcccctgcccctcttggtggtaatggcggcgggcgtagctccagtgtgggcctctcactctccccacttgccccgcccgcattcacgcgtcccgccacatcctagttcagaaaggcgggctgtgtacatcggagccctatttcctatgtcaggaggttggccagggggccaggcatgtcaacctgccgtagaaatggcccttgaagatgtgaacagtagacgcgacatcctgcctgattacgagctgaaactgatccaccacgacagtaaatgcgaccccgggcaggcgactaagtacctgtacgagctcctgtacaatgacccaattaagattatcctcatgcccggctgttcttcagtgagcaccctggttgccgaggcagcaagaatgtggaatctgatcgtgctgtcctacggcagttcctcccctgcacttagcaacaggcagaggttcccaacattttttcgaactcatccctccgccaccctgcacaatcctacccgcgtgaagttgttcgaaaagtgggggtggaaaaagatagccaccatccagcaaactaccgaggtcttcacttcgacactggacgacttagaggagcgtgttaaagaagccgggattgagataactttccgccagtcctttttctctgacccagcagttccagtgaagaacctcaaaaggcaagatgctcggattattgtcggcctcttctacgaaaccgaggcccgcaaggtgttttgtgaggtgtataaggaaagactgttcggtaagaagtatgtctggtttttgatcgggtggtatgcagataattggttcaagatatatgatccaagtataaactgtaccgtggacgagatgactgaagccgtagagggccacattacgaccgagattgtcatgctcaaccctgccaacacaaggtcaattagtaatatgacatcccaggagttcgtcgagaagctcactaagaggctgaagaggcaccctgaagagaccggagggtttcaggaagcccccctcgcctatgacgctatctgggctcttgccttagccttaaacaagactagtgggggcggcggacgtagtggggttcgcctggaagattttaattacaataatcagactatcacggatcagatttacagggccatgaattcaagctcctttgaaggtgttagcggccacgttgtcttcgatgccagcggttccaggatggcttggaccctgatcgaacagctccagggcggaagctacaagaagataggatattacgactcaaccaaagacgatctgagctggagcaaaaccgacaagtggatcggcggcagtccacctgcagaccagaccctggtgatcaagactttcagatttctctctcagaagttgttcatctctgtgagtgtactcagctcccttggcatagtgctggctgttgtttgcctgtccttcaatatctacaattcgcacgtccggtacatccaaaattcccagcccaacttgaacaacctgactgcggtgggctgttcactggcacttgctgctgtgttcccgctcgggctcgacggctatcatattggtcggaaccagtttcccttcgtttgccaggcgcggctgtggctccttggcttaggattctccctgggctacggcagcatgttcaccaaaatttggtgggtgcatactgtgttcaccaagaaggaagaaaaaaaagaatggagaaaaacactggaaccctggaagctctacgctacagtggggctgttagtgggcatggacgtcctgacgctcgccatatggcagatcgttgatccattgcataggactattgaaacatttgctaaagaggagccgaaggaggatattgatgtgtcgatcctcccacagctggaacattgctcctccaggaaaatgaacacatggctgggaatcttctatgggtacaagggtttgttgctgctgctcggaatcttcctagcctatgagactaagagtgtctccaccgagaaaatcaatgatcaccgagcagtgggcatggcaatttacaacgtagctgtgctatgtttgatcacagcgcccgtgaccatgattttaagtagccaacaggatgccgcctttgctttcgccagtttggctatcgtgttctcatcttacatcacgctggttgtcctgtttgtgccgaaaatgcgaaggttgatcacaaggggagagtggcaaagcgaagctcaagacaccatgaagacaggttcaagcactaataataacgaggaggagaagagccggttgctggagaaggagaatagggaactagagaagattattgcggagaaagaggaacgcgtgtccgagcttcggcatcagctgcagtctagacagcaacttaggtctagaaggcaccctcctacacctcccgagccaagtgggggattgccacgggggcccccagagcccccggatcgactgtcatgcgacggctctcgcgttcacctcctgtataagtag

SEQ ID NO: 210046 - DNA, 2535 bp, Artificial Sequence
  derived and/or modified sequence
atgggccccggcgcccccttcgcccgggtgggctggcccctgcccctacttgttgtgatggccgctggcgtggcccccgtgtgggcgtctcactctccccatctccctcgtccgcactcgcgcgtgcccccgcacccctcttcagagagacgtgctgtctatatcggggccctgttccccatgagtgggggctggccaggcggccaggcgtgtcagccagcggtggagatggcccttgaggacgtcaacagccggcgagatattctaccagactatgagctcaaacttattcaccatgatagtaaatgcgatcctggacaagcaaccaaatacttgtacgaactgctctataacgatcctatcaagatcatcctcatgcctggttgcagttcagttagcaccctcgtggctgaggctgccaggatgtggaatttaatagtgctctcatatggtagcagttcaccagcgctcagtaatcgccaacggtttcctaccttctttcgcactcacccttcagcaaccctccacaatccgacgcgtgtgaagctctttgaaaagtggggatggaagaaaatcgccaccatacaacagacaacagaggtatttacgtctactctagacgatctggaggaacgcgtgaaagaggctgggatcgagattaccttccgacagagctttttctcagatccagccgtgcccgtgaagaatttaaaaaggcaagatgctcgcatcatcgtgggactattctatgagacggaggccaggaaagtcttctgcgaagtatacaaagagcggctttttgggaaaaagtacgtctggttcttaatcggctggtacgctgataattggtttaagatttacgacccctcaatcaactgcaccgtggatgagatgaccgaggctgtggaaggccacatcactacagaaattgtgatgctaaatccggccaacacacggagtatctcaaatatgacaagccaagagttcgttgagaaacttactaaacggttaaaaaggcatccagaggaaacaggaggctttcaggaagctccactggcgtatgacgccatctgggcacttgctctggccttgaataagactagcggaggcggcggcagaagtggggtgaggctggaggatttcaactacaataatcaaactattacagaccaaatttatcgggcaatgaatagcagtagctttgagggcgtaagtggacacgttgtgtttgacgctagcggttcacggatggcttggaccctgattgagcagctccaggggggctcctataaaaagataggctactatgattctaccaaagatgacctgtcttggtctaagacagataagtggattgggggctccccccctgccgaccagacccttgtgattaaaacctttcggtttctgtcacagaagctgttcattagtgtgagtgtcctgtccagtctcggcattgtcctcgccgtggtctgtctgtccttcaatatttataattctcacgtgcggtacatccagaattcccagcccaacctcaataatttgaccgcagtgggttgtagtttagctctggcggctgtcttccccctcggacttgatggatatcacattggaagaaaccagttcccattcgtgtgtcaagcacgcctctggctgctcggcctgggctttagcctcggttatggctccatgttcaccaagatctggtgggttcataccgtgtttaccaaaaaagaggaaaaaaaagaatggagaaagactctggagccctggaagttgtatgccaccgtcggattgctcgttgggatggatgtactgacgttggcaatatggcaaattgtcgacccgttgcaccggactatcgagaccttcgccaaagaagagcccaaagaggacatcgatgtcagcattctcccacagctggagcattgttcctccaggaaaatgaacacatggctgggtattttctacgggtataaagggctgctgttattgttggggatctttttggcatacgagaccaaatctgtgagcacggaaaagattaatgaccatagggcagtcggaatggctatttacaatgtggctgtcctgtgcttgatcaccgccccagtgaccatgatcctttcttcacagcaggatgccgcctttgcctttgcgtccctggcaattgtgttcagctcgtatataacgctggtcgttctctttgtacctaagatgaggcgtctcatcacccgcggagaatggcagtcagaagcacaagacacgatgaaaactggttccagcacaaacaacaacgaggaagagaaaagtagacttctcgagaaggagaatcgtgaactggagaagatcatagccgaaaaggaagagagagtgtccgaactgagacaccagctacagagccggcagcagctccgttcccgccggcatccccctactcctcccgagccgagtggaggactcccgagaggaccccctgagccgcccgatagactatcttgcgacgggagccgcgtgcacctcttatacaagtag

SEQ ID NO: 210047 - DNA, 2535 bp, Artificial Sequence
  derived and/or modified sequence
atgggccccggcgcccccttcgcccgggtgggctggcccctgcccctcctcgttgtaatggccgcgggcgtcgcaccagtctgggcctcccattcaccacatcttcccaggccccattcaagagtgcctccacaccctagctcagagcggcgtgcagtatacataggtgcgcttttccccatgagcggcggctggcctggtggacaggcatgccagcctgctgtggaaatggcgctggaggatgtgaattctcggagagacatccttccggactacgagctgaagctgatccaccacgactctaaatgtgacccaggacaggctactaaatacctttacgaacttctgtacaacgatcctatcaaaatcattctcatgcctggttgctctagcgtgagtacactcgtggcagaggccgcacggatgtggaatctgattgtcctgtcttatggtagtagctcacctgccctgagcaacagacagaggttccccacattttttcggacacaccctagcgcaacgttacataaccctacccgcgtaaagctgtttgaaaaatggggatggaagaagattgctacgatacagcagacaaccgaggtgttcacctccactctggacgatctggaggagcgggtcaaagaggctggaattgagataaccttcagacagtccttctttagtgatccagccgtgcccgttaaaaatctgaaaagacaggatgctcgtattattgttggactgttctatgaaactgaagctaggaaagtcttctgtgaggtctataaggaaaggctattcggaaaaaagtacgtttggtttctgattggctggtatgctgacaactggttcaaaatctatgatccctctatcaattgtactgtcgacgaaatgaccgaggcagttgagggccatattacaacagagattgttatgctgaatccagcgaatactagaagcataagcaacatgactagccaggagtttgtcgaaaagctaacaaagagactgaagcggcaccccgaagagacaggcggctttcaagaagcccctctagcctacgatgcaatttgggcccttgcccttgcactcaataagacatcaggcggaggtggcagatctggtgtacgtctggaggacttcaattacaataaccagactatcaccgaccaaatttacagggctatgaattcatcttcattcgagggggtgagcggtcacgtggtgttcgacgctagtggcagtcggatggcctggacactaattgaacaattgcagggtgggtcttacaagaagataggttactacgatagtaccaaggatgacctcagctggagcaagacagacaagtggattggcggaagccccccggccgaccagacgctggtgataaagacttttcggttcctcagtcagaaactgttcatctccgttagcgtcctgtcgagtctgggtatagtactggccgtggtttgccttagcttcaacatctacaatagccacgtaagatacattcagaacagccaacccaatctgaacaacctgacagccgtggggtgctcactcgcgctggctgcagtgtttccactgggcctggacggataccacatcggtaggaaccagttcccttttgtgtgccaggcccggctgtggcttctgggcctgggattctctctggggtacggaagcatgttcactaaaatttggtgggtccataccgtgtttacgaaaaaagaagaaaaaaaggagtggcgtaagactctcgagccttggaagctttatgctactgtgggcctgctggtgggcatggatgttctcaccctcgcaatatggcagatagttgacccgctccataggacaatcgagacctttgctaaggaagagccaaaggaggatattgatgtgtcaatcctgccacaactggagcattgttcttctcgcaagatgaatacatggctgggcattttttacggctacaaaggcctgctgttgttgctgggcatttttctggcatatgaaaccaaaagtgtgagcactgaaaaaattaatgaccacagggcggtggggatggctatctacaatgtggcagttctgtgcttaatcaccgccccagttaccatgatcctctcctcacagcaggacgcagcttttgcctttgctagtctggccatcgtctttagttcctatattactttagttgtgctgttcgtgcccaagatgagacggctgattactcgcggtgagtggcagtcagaggctcaggacactatgaagactggatctagcactaacaacaacgaagaggagaaaagcagactgttagaaaaagagaatcgagaactggaaaagattattgccgagaaggaggagagggtgagtgagctccgacaccaactacagagcagacaacaattacggagccgcaggcatcctccaactccccctgaaccctctggtggactacctcgggggccgcccgagcccccagaccgcctgtcctgcgacggctctcgagtacacctgttgtataaatag

SEQ ID NO: 210048 - DNA, 2535 bp, Artificial Sequence
  derived and/or modified sequence
atgggccccggcgcccccttcgcccgggtgggctggcccctgcccctgctagtggtgatggcggcgggggtggcccccgtatgggcttcccactctcctcacctgcctcgcccacactccagagttccgccccatccttcatctgagagacgcgctgtctacattggagccctgttccccatgagcgggggttggcctggggggcaagcctgccaaccggctgttgagatggcactggaagacgttaactcacgccgcgacattctcccagactatgagctcaaactcatacaccatgactctaagtgtgatcctggccaggctactaagtacctgtatgagctgctttataatgatcccattaaaataattctcatgccaggatgtagttccgtttctacgttggtagctgaggccgcacgaatgtggaacttaatcgttctcagttatggttcaagcagcccagccctcagcaaccgccagagatttcctacctttttcaggacacacccgagtgccacccttcataaccccacccgggtgaaactatttgaaaagtggggttggaaaaagatcgccactatccagcagaccacagaggtgtttacctccacactcgacgacctggaggaacgcgtcaaggaagcgggcatagaaataaccttccgccagagttttttctcagaccccgcggtgcctgttaagaacctgaagcgccaggacgcgcggatcattgtggggctgttctatgagaccgaagctcgaaaagtgttctgcgaggtgtacaaggagcggctgtttggcaaaaagtatgtgtggtttctaatagggtggtatgctgataactggtttaagatatatgatccttcaatcaactgtacagtcgatgagatgaccgaggcagtggagggacacatcactaccgaaatcgtcatgctgaatccggccaacacccgcagcatttctaacatgacatcacaggaattcgttgagaagctgactaaacggttgaagcgccaccccgaagaaaccgggggcttccaggaagctccactcgcttatgacgctatctgggcactagcgctggcgttaaacaaaacctctggtggcggtggcaggagcggcgtacgacttgaggattttaattacaataatcaaacgattaccgaccaaatttacagggctatgaattcttcttcctttgaaggagtaagtggtcacgtagtcttcgacgcctccggatcacggatggcttggacgttgatcgagcagttgcaagggggcagctacaaaaagatcggctactacgactccactaaagatgacctgtcatggtccaagaccgataaatggattggtggctcccctcctgccgaccagacactggtgatcaagacatttcgattcctctcccagaaactgtttatatctgtgagcgttctgagctcacttgggattgtcctcgcagtcgtttgtttgtcattcaacatctataatagtcacgtgaggtatattcagaacagccagcctaacttgaacaacctgactgcagtcggatgtagcctggctcttgcagcggttttcccccttggactagatggttatcatattggccgcaatcagttccctttcgtgtgtcaagccaggttgtggctccttggtttaggctttagcctcggttatgggtcaatgtttaccaaaatatggtgggtgcatactgtcttcaccaagaaggaagaaaagaaggaatggagaaaaacccttgagccttggaaactgtacgcaactgtggggttgcttgtgggcatggatgtgcttacccttgcaatatggcaaattgtcgatcctcttcacagaactattgagacctttgctaaggaagagcccaaagaggacatcgacgtcagtatccttccgcagctggagcattgttcctccaggaagatgaacacatggctcggcatcttctatggatataaagggttactgctcctcttgggtatttttctggcctatgagacgaagtcagtctccacggagaaaattaatgatcaccgggcagtcggcatggctatctataatgtggccgtcttgtgcctcataaccgcaccagtcactatgattctgagctcgcagcaggatgctgcttttgcctttgctagtctcgccattgtgttctcttcatacatcacgctggttgttctgttcgtgccaaagatgcggcgcctgatcacaagaggcgagtggcaatccgaggctcaagacactatgaaaacaggctcttccacaaataacaacgaagaagaaaaatctaggctgttggagaaggagaatagagagctcgaaaagattatcgctgagaaggaggagagggtctccgagctgcgtcatcaactgcagtcccggcagcaactacggtcaaggcgacacccccctacccccccagagccttccggcgggctgccacgggggcctcctgagcctccggatcgtttatcgtgcgatggatcacgggttcacctgctctacaaatag

SEQ ID NO: 210049 - RNA, 2535 nt, Artificial Sequence
  derived and/or modified sequence
augggcccuggcgcucccuuugccagagucggcuggccucuuccgcucuugguaguuauggccgcuggcguugcuccagucugggcaucccauagcccacacuugccaaggccccauagcagggucccuccgcacccuucuuccgagagacgugcagucuauauaggggcccuguucccaauguccggaggcuggcccggcggacaggcuugucaacccgccguugagauggcccuagaagacgugaacagcaggagagacauucugccagauuacgagcugaaauugauucaccaugauagcaagugcgacccuggccaagcuacgaaguaccuguacgaacuccucuauaacgacccgaucaaaaucauccucaugccuggcuguuccagugucuccacucugguggcugaggcugccagaauguggaaucuaaucguucugagcuacggcuccuccuccccagcccugaguaaucgccaacguuuucccacuuucuucagaacacaucccuccgcaacucugcauaacccuacucgggugaagcuauuugagaaaugggguuggaagaagaucgcaaccauacagcaaacaacugaagucuuuacaagcaccuuggacgaccuggaagagcgcgugaaggaggccggcauagagaucacauucaggcagagcuucuucucugacccagcaguccccgugaaaaaccugaagcgccaggacgcacgaaucauugucggcuuguucuaugagaccgaagcacgcaaaguguucugcgaaguuuauaaagagagacuguucggcaagaaguacguuugguuccugauuggcugguacgccgacaacugguuuaagauuuaugaccccucaauuaauugcacaguagacgagaugaccgaggccguagagggacacauaacuacagagauuguaauguugaauccggcaaauacaagaaguauaaguaauaugaccucacaagaauuugucgaaaaacuuacaaaaagacugaaaagacacccagaggaaaccgggggcuuucaggaggcaccacucgcuuacgacgccaucugggcccucgcucucgccuugaauaagaccaguggcggcggcggacguucaggugugaggcuugaggauuuuaauuauaacaaccaaacgauuacagaccaaaucuaucgggcaaugaauagcucauccuuugaagguguuagcgggcacguggucuucgacgcuagugggucucgcauggccuggacacucauagaacaguuacagggugggagcuacaaaaagaucggauacuacgauucgacuaaagacgaccuaucguggucaaaaaccgacaaauggauuggugggucccccccagcagaccagacccugguuaucaagaccuuuagguuccucagucagaagcucuucaucucagucagcguuuuguccagucucggaaucguccuggccgugguuuguuugagcuuuaauaucuauaacagccauguccgauauauucagaacucucaaccuaaccuaaauaaccuuacagcugucggguguagccuggcacuggcugcgguguucccacugggacucgauggcuaccauaucggacgcaaucaguucccuuucguuugccaagcucgccucugguuacucggauugggcuucucccuggguuaugguuccauguucaccaaaauuugguggguacacaccguauucacgaaaaaagaggagaagaaagaauggaggaaaacauuagaacccuggaaacuuuacgcuacgguaggacugcucgugggaauggaugugcucacacuggcgaucuggcagaucguggacccccugcaccggaccaucgagacuuucgccaaagaagaaccuaaggaggacaucgauguaucaauccucccucaguuagagcacuguucuucucgcaaaaugaacaccugguuaggcaucuuuuacggauacaaaggucuccugcugcuucugggcaucuucuuggcuuacgagacuaagagcguuucaacugagaagaucaaugaccaucgugccgucgggauggcuaucuacaacgucgcaguccuuugcuuaauuaccgcucccguuacuaugaucuugaguagccagcaagaugcugcuuucgccuucgccucucuggcuauuguuuucucuuccuauauaacccuugucguacuguuuguccccaagaugcgacgccucauuaccagaggagaauggcaauccgaagcucaggauaccaugaaaacagguucaucuacuaacaacaacgaagaggaaaagucucgccugcucgagaaggagaaccgcgaauuggagaagaucaucgcagagaaagaggaacgggucagugagcugaggcaccagcugcaaucucggcaacagcugcgcucgcgcaggcauccaccaacccccccagaaccaucugguggcuugcccaggggcccccccgagcccccagaucgccucucgugcgacggcagccguguucacuugcuguauaaguag

SEQ ID NO: 210050 - RNA, 2535 nt, Artificial Sequence
  derived and/or modified sequence
augggcccgggagccccuuuugcucgcgucgguuggccacugccauuacugguggugauggcagcaggaguagcgccagucugggccucucacucaccacaccuaccgagaccucacucaagagugcccccucacccgucuuccgagaggagggccgucuauaucggcgcccuauucccuaugagcgggggguggccugguggucaggccugccagccggcgguagagauggcccucgaagauguuaauucacgacgugauauccuucccgauuacgagcuuaaguuaauacaccacgauaguaaaugcgaucccggccaagcaacuaaguaucuguaugagcuguuauacaaugaccccauuaagaucauucugaugcccgggugcagcuccguguccacgcuuguggccgaagccgcuagaauguggaaccucaucguucugagcuacgguagcagcucccccgcccugucuaacaggcagagauuuccgaccuucuucagaacccacccuucugcuacguugcacaauccuaccagagucaaacuguucgagaaguggggguggaagaaaauugcuacuauccaacagacgaccgaaguguuuacuaguacacucgacgaccuggaggaacgcguuaaggaagccggaauugagauaacuuucagacagucuuucuuuagcgacccugccgugcccgucaagaaucuuaaaagacaggaugcucguauuaucgugggccuguuuuacgagacggaggcacgcaaagucuuuugugaaguguauaaggagaggcucuuuggcaaaaaauaugucugguuucuuauuggcugguaugcugauaauugguuuaaaauuuacgaccccucaauuaacugcaccguagaugaaaugacugaagcaguggaagggcacauaaccaccgagaucgugaugcugaaucccgcaaacacacggucgauuagcaauaugacuagccaggaauucguggaaaagcugaccaagcgcuugaagcgucacccugaagaaacaggcggguuccaagaggcccccuuagcauacgacgccaucugggcccuggcccuggcucuuaacaagaccuccggaggagggggacgcucaggggugcgguuagaggacuuuaacuauaacaaucagacaauaaccgaucaaaucuaucgagcaaugaacuccucuuccuucgagggagucuccggccaugucguguuugaugccaguggaucgcgcauggcauggacuuuaauagagcagcuacagggcggaaguuauaagaaaaucggcuauuacgauucaaccaaggacgaccuuagcuggucuaaaacagauaaauggaucggcggcagcccaccagcggaccagacucuuguaauaaagacuuuucgguucuuaagucagaagcuuuuuauuucugugucagugcugagcucucucggaaucguucucgcuguugucugccuuucauucaauauuuacaacucacacguccgguacauucagaacucucagccuaaucuuaacaacuugacagcagugggaugcucccuggccuuggccgcuguguuuccucuggggcuugacggauaucacaucggcagaaaucaguuuccuuuugugugccaagccagacucuggcuccucggacuuggguuuucccugggauauggaucuauguuuacaaagauuugguggguucauacaguguucacaaagaaggaggaaaagaaggaauggcgaaaaacccuagaaccauggaaguuauaugccaccgugggacugcuagugggcauggacgugcucacacuggcgauuuggcaaauuguggacccauuacacagaacuauugagacauucgcaaaggaagagcccaaggaggauauugacgugaguauccuuccccagcuugagcauuguagcagcagaaagaugaacacuugguugggcaucuucuacggguacaaaggacugcugcuccugcuuggcaucuuccuggcuuaugaaacuaaaucaguuagcaccgagaagaucaaugaucauagagcagugggcauggccauuuauaacgucgccguucuuugucugauaacggcaccugugaccaugauauuaagcagccaacaagacgccgccuucgcuuucgcaucauuagccauagucuucaguucuuauaucacauugguggugcucuuugugccuaaaaugagacggcuuaucacaaggggcgaguggcaguccgaggcgcaggauacaaugaagacuggcucuucgacuaauaacaacgaggaagagaagucccggcugcuugagaaagaaaacagagaacuggagaaaauuauugcagaaaaggaggaaagagugagcgaauuacggcaucaguuacaaucucggcagcagcuucgcagucgcaggcacccuccuaccccuccugagccuuccggcggacugccgcgcgguccuccugagccuccagaccguuuaaguugugacgggucacgcguacaccuguuguauaaauag

SEQ ID NO: 210051 - RNA, 2535 nt, Artificial Sequence
  derived and/or modified sequence
auggguccaggcgcaccuuuugcaagagugggauggccacugccacuccucguugucauggcagcuggcguugcacccguaugggcuucacauucuccucaccugccuaggccacauagucgaguuccuccccacccuucuucagagcgaagagcuguuuauaucggugcacucuuuccgaugaguggcggcuggccuggggggcaggccugccagcccgccgucgagauggcuuuagaggacguuaauucaagaagagauauucugcccgacuacgagcugaaacuuauccaucacgauaguaagugcgauccgggccaggcgacaaaguaccucuaugaacugcucuacaaugacccuauuaagauuauucugaugccugggugcaguagugugucuacucugguggcugaggcagcacgcauguggaaccuuauaguucucagcuauggaaguuccucccccgcccucagcaaucggcagagauuucccacauucuuuaggacacaccccagcgcuacacuccauaauccuacacggguuaagcuauuugaaaaguggggcuggaaaaaaauagcgacaauccaacagaccacugagguauucacauccacucuagaugaccuugaagagcgaguaaaagaggccggcauugaaauuacguuuaggcagucuuuuuuuucugaucccgcggugccggugaaaaaccugaaaaggcaggaugcccgaauuaucgugggacucuuuuaugaaaccgaagcccggaaaguguucugcgagguuuacaaggagagacuguucggaaaaaaauacguaugguuccuuaucggaugguaugccgacaauugguuuaagauauacgacccgucgaucaauugcacuguggacgagaugacugaagcaguggagggccacauuaccacggagaucguuaugcucaauccugcgaacacgcgaucaaucucaaacaugacaucccaagaauucguggaaaaguugaccaagagacuuaagcgccaucccgaggagaccggugguuuccaagaagcaccucuggccuaugacgcuaucugggcucucgcccuggcucucaacaagacgucugggggaggaggucgcaguggcgugcgccucgaagauuuuaauuauaacaaccagacaauuacagaccagaucuaccgagcuaugaauuccucuuccuucgaaggcgugaguggccacgugguguuugaugcgucaggaagucguauggcauggacccugaucgaacagcuccagggggggagcuacaagaagaucggauacuaugacucaacuaaggacgaccugagcuggucaaagacagauaaguggauuggagggagcccaccugccgaccagacucugguuaucaagacauuuagguuucucagccagaaacucuucaucuccgucucagugcuuucuucucuuggcaucgugcucgccguggugugccucuccuucaauauuuacaacucccauguucgauacauucaaaacagccagccaaaucugaauaaccuuaccgcggugggguguucucuggccuuagccgccguguuuccacugggccuugacggauaccauauuggcagaaaccaguuucccuuuguuugccaggcucgucuauggcuacugggucucggcuucucccuggguuauggcucaauguuuaccaaaauuugguggguacauacaguuuuuacaaaaaaggaagaaaagaaggaguggagaaaaacacuggagccuuggaaacuguacgccacagugggccuguuggugggcauggacgugcucacucucgccaucuggcaaauuguggauccucuucauaggacaauagaaaccuucgcgaaggaggagcccaaggaggacaucgauguaagcauucucccacagcuggagcauuguucaagucgcaaaaugaauacguggcuggggauauucuacggcuacaagggccuguuauugcuccuggguauuuuccucgcauacgaaacaaaguccguauccaccgaaaaaaucaaugaucaucgagcgguggguauggcuauuuacaacguggcuguucucugucugaucacagcuccugucaccaugauccugagcucccagcaggaugccgcguuugccuucgcuaguuuggcaauagucuucucaucauauauuacccugguagugcuguucgugccuaaaaugcgccggcugaucacgcgcggugaauggcagagcgaagcacaagacacuaugaagacagguucuuccacaaacaacaaugaggaggaaaaaagcaggcuguuagagaaagagaacagagaguuggagaaaauuaucgcagagaaagaagaaagaguaagcgaguugagacaccagcuccaaucuaggcagcaguugcggucccggaggcauccgccaacacccccugagccuagugguggucucccccgugggccaccugagcccccagacagacucagcugcgacggaaguagaguccauuugcuguauaaauag

SEQ ID NO: 210052 - RNA, 2535 nt, Artificial Sequence
  derived and/or modified sequence
augggaccaggggccccauucgcccgcguggguuggccccucccccuacucgucgucauggcggcuggaguggcuccaguaugggccagccacaguccccaccucccaaggccucauaguagaguacccccccacccauccuccgaacgccgggccgucuacaucggcgcucuguucccuaugucgggaggauggccagggggacaagcgugucaacccgccguagagauggcccucgaggaugucaauucuaggagagauauucuaccugacuaugaacucaaacugauccaucacgacagcaaaugugauccgggacaggcuacuaaauaucucuaugagcuccuuuauaaugacccgaucaaaauuauucugaugccuggaugcuccuccguguccacgcuuguagcagaagccgcuagaauguggaaccucauagugcucagcuauggcucaaguagccccgcacugagcaaucgacaaagguuccccaccuucuucagaacucauccaucagcaacacugcauaaccccaccagggugaaacuuuucgagaaguggggcuggaaaaaaauugcgaccauccagcagacuaccgagguuuuuacgucgacucuugaugaccuggaagagagggucaaagaagcggguauugaaaucaccuuuagacaaucuuucuuuagugaccccgccguuccggucaagaaccucaagcgacaggaugcccgaauaauuguaggccuguucuacgagacagaggcaaggaagguuuuuugcgaaguuuauaaagaaagacuguuuggaaaaaaguacguaugguucuugauuggaugguacgcagauaauugguucaaaaucuaugaccccuccaucaauugcaccguugacgaaaugacugaggccguugagggacacaucacaacagagaucguuaugcuaaacccugcuaacacucgcagcauuucaaauaugaccucccaagaauucguggagaaacugacaaaaagacucaagcgucauccugaagaaacagggggguuccaggaagcaccacuggccuacgaugccaucugggcucucgcacuggcacuuaauaaaaccucaggcgggggaggaaggucuggcguacgccuggaagauuuuaacuacaauaaucaaacgauuacagaccaaauuuaucgcgcaaugaauagcuccaguuucgagggcgugucaggccacguuguauucgaugcuucuggcagcaggauggcauggacacugaucgaacagcuucaggguggaucuuauaaaaagaucggauauuacgacaguaccaaggacgaccuguccuggagcaaaacagacaaauggaucggcggauccccgccugcagaucaaacccuugucaucaagacauuuagguuucuaucacaaaagcuguucaucuccgugucugucuugucgagccugggaauaguacuagcaguaguuugucugucuuuuaauaucuauaacucucaugugcguuauauccaaaacucacaaccuaaccugaacaacuuaaccgcggucgggugcucuuuggcucuugcugcaguguucccccucgggcuggacgguuaucauaucgggagaaaucaguucccuuuugugugccaagcccguuuaugguuguuaggcuugggcuucucucuagguuauggaucaauguuuaccaagaucuggugggugcacacuguguuuacaaaaaaggaggagaaaaaggaguggagaaaaaccuuggagccauggaagcuuuacgccaccguggguuugcucguuggaauggauguguugaccuuggccaucuggcagaucgucgacccccugcacagaaccauugaaacguucgcuaaagaggagccgaaggaggauauugacgugagcauacugccacagcuugaacauugcagcuccagaaagaugaacacauggcucggcaucuucuacggauauaaaggucuccugcuccuacugggcauauuucuggcuuaugaaaccaaaucuguauccacagagaagauaaaugaccauagggccgugggcauggcuauuuauaacguggcggugcugugccuuaucaccgcccccguuaccaugauccugagcucccagcaggacgccgcguucgccuucgccucacucgccauugucuucuccuccuauaucacccucgugguccuguucguccccaagaugaggagacuaauuaccagaggagaguggcagagcgaagcccaagauaccaugaaaacuggcaguucuaccaacaacaaugaagaagaaaaauccaggcuacuggagaaggaaaauagggaacuggaaaagauaaucgcggagaaagaagagcggguuagugagcugcgucaucagcugcaaagucggcagcaguuaaggucacggcgacauccgccuaccccaccugaaccuucugggggucugccaagaggcccacccgaaccaccagauagacuuuccugcgauggauccagagugcaccuacuuuauaaguag

SEQ ID NO: 210053 - RNA, 2535 nt, Artificial Sequence
  derived and/or modified sequence
auggggccuggugcccccuuugcccgcgugggcuggccacuuccccugcuugucguaauggccgccggcguagcucccgucugggccagucacucuccucaccugcccaggccgcacagucguguuccaccccaucccuccagugaacgucgcgcaguauacauaggagcuuuauuuccgaugagcggcggguggcccggaggacaggcaugucagccagcuguugaaauggcacuugaggacgucaauagcagaagagauauccuacccgacuacgagcugaaacugauccaccaugacaguaagugugaucccgggcaggcaacgaaguaucuguaugagcuuuuguauaacgaccccauaaaaauaauacucaugccgggcuguuccuccguaagcacacuaguggcggaggcagcuaggauguggaaucuuaucguccugaguuaugguucuucuagcccugcgcucucaaaccgccagagauuuccuacauuuuuucggacucacccaagcgcuacauugcacaauccuacgcguguuaaacucuuugagaaauggggcuggaaaaagaucgcaacgauccagcagaccaccgagguguuuaccucaacgcuggacgaccuggaggagcgugucaaggaagcaggcaucgagauuaccuuucgccagagcuuuuucagcgauccagcaguuccggugaaaaaccugaagcggcaggaugcccgaauuauagugggacucuuuuacgagacugaggcgcggaagguauuuugcgagguuuauaaggagcgucuguucggaaagaaguaugugugguuccugaucgguugguaugcugauaacugguuuaagauauaugaccccaguaucaacuguacgguggaugaaaugaccgaagcggucgaagggcauauaaccacugagauugucaugcucaacccugcaaacacucgcaguauuaguaauaugaccagccaggaauucguggagaaacugacuaaaagacugaaaagacacccagaagagacuggcggcuuucaagaagcaccccuggcuuacgacgccaucugggcccuggcccuggcacugaacaaaacaagcggcggaggcgguaggagcggggucagacuggaggauuucaacuauaauaaucaaacaaucaccgaucaaaucuaucgggcuaugaauaguaguucuuucgagggcguuagcgggcacgucguauuugacgcuagugggucuagaauggcauggacacuuaucgagcaguuacaggggggauccuauaagaaaaucggauacuaugauagcacaaaggaugacuuguccuggucaaagaccgacaaguggaucggcggcucacccccugcugaucagacccuggucaucaaaacuuucagguuuuugagucaaaaacucuuuaucuccguuagugugcuaucgagccugggcaucguacuggcagucgucugccugaguuuuaacaucuacaauucacaugugagauacauccaaaacucgcagccgaaucugaacaaccucacagcugucggcuguucucuugccuuggccgcuguauuuccucuggguuuggauggcuaccacaucggacgcaaccaguuuccauuugucugccaggcccguuuguggcugcuggggcugggcuucucauuagguuacggaucuauguuuacaaaaauuugguggguucauacuguguucacaaagaaggaggagaagaaagaguggagaaaaacacuggaacccuggaaguuauaugcgaccgugggauuacugguagggauggacgugcugacacuggcuauuuggcaaauuguugacccacugcauagaacaaucgagacauucgcaaaagaggagcccaaagaagauauagacgucagcauacuuccacagcuggagcacugcaguucucgcaagaugaauacauggcugggcaucuucuacgguuacaaaggccuucuguugcugcucgguauuuuccuggcguaugaaaccaaauccguuucuacagaaaagaucaaugaucauagggccgugggcauggcgaucuauaauguggcuguguugugucugauuacugcgcccgucaccaugaucuugucgagucaacaggaugccgccuuugcuuuugcgucucuugcaauuguguuuucuaguuauaucacuuuagucgugcuguucgugcccaaaaugcgccggcuaauaacccggggugaauggcagagcgaagcccaggacacuaugaaaacaggcucuaguacaaacaacaaugaggaggagaaaagcagacugcucgaaaaggaaaaccgcgaacuggagaaaauuaucgccgagaaggaggaaaggguuucggagcuccggcaucaguugcagagccggcagcaguugagaagccggcgccaucccccaacuccacccgagccgagcggaggacugccccgcgggccaccggagccaccugaucgccugucaugugacggaagccgcguccaccuccuguacaaguag

SEQ ID NO: 210054 - RNA, 2535 nt, Artificial Sequence
  derived and/or modified sequence
auggggccuggggcaccuuucgcacguguggguuggccauugccacugcucguggucauggccgcaggagucgccccaguuugggcaucccauuccccucaccuuccccgcccacauucucgcguccccccacacccauccagugagcgccgcgccgucuacauuggcgccuuguuccccaugagcggcggcuggccuggcggccaggcgugccagccagcaguugagauggcuuuggaagacgugaauagccggagagacauucugccugauuaugaacucaagcuaauccaucacgacaguaagugugacccugggcaggcaaccaaauaccuuuacgaauuguuauauaaugauccaauuaagauuauccugaugccaggaugcagcucugucaguacguuaguagcugaagccgccagaauguggaaucugauaguacuuucauacggaucaagcagucccgcacugucaaacaggcagcgguucccuacauucuuuagaacucaccccucugcuacccuccacaacccuacucgugugaaacuauucgagaaguggggauggaagaaaauugcuacaauacagcagaccacagaggucuuuaccagcacccucgacgaccuggaagagcguguuaaggaggccggaaucgagauaacuuuccgccaguccuuuuuuagcgaucccgcgguaccuguuaagaaucucaagcgccaggacgcgaggaucauugucggccucuuuuacgaaacugaagcccgcaaagucuuuugugagguuuacaaggaaagacuguucggaaagaaguacguuugguuuuuaauuggcugguaugcagauaauugguucaagauuuaugacccaagcauaaauugcacgguggacgaaaugacagaagccguggaaggccauaucacuacagagaucguuaugcugaauccugccaacacucggagcauaaguaacaugacaucacaagaguucguggagaagcuuacaaagagacugaaacgccacccugaagaaaccggcggcuuucaagaggcuccccucgcuuaugaugcaauuugggcacucgcgcuugcacuuaacaaaacauccggugggggcgguagaaguggggugaggcuggaagacuucaacuacaacaaucagacuaucaccgaccagaucuaucgggccaugaacagcucgucauucgaggggguuucaggccacgucgucuucgacgccuccgggucccggauggccuggacacucauugagcaacugcagggagguagcuacaagaaaauuggauacuacgauuccacuaaggaugauuuguccuggucgaaaacggacaaguggauuggcggcagcccgcccgcggaccaaacacuggucauuaagacuuuucgauuccucucacagaaacuguucaucucuguguccguucuguccucucucggcaucgugcuggcaguggucugucuaucauucaauauuuacaacucccauguccgcuacauacagaacucccagccuaacuuaaauaacuugacugccgugggguguucgcuagcccucgcagccguuuucccccugggauuggauggauaccauauuggaagaaaucaauuccccuuuguuugccaggcccgguuaugguuguugggccugggguuuucacugggcuauggguccauguucaccaagauauggugggugcauacuguguucaccaagaaagaagaaaagaaagaauggcgcaaaacacucgagccauggaagcuuuaugccacugucggccugcuggugggaauggauguguuaacucuggcaauuuggcagaucguggacccucugcaccggacuauugaaaccuuugccaaagaggagccgaaggaagacaucgacgucucaauacucccccaguuggaacauugcuccagcaggaaaaugaauaccuggcuaggaauuuuuuauggguauaaagguuuacugcuguugcugggaauuuuccuggcauacgagaccaaguccgucucaacugagaaaaucaacgaucauagagccguggggauggccauauauaacguagcggugcugugucucauaaccgcuccugugacuaugauacugucgucccaacaggaugcugccuuugcguucgcaagccuagcaauuguuuucaguucuuacaucacacucguuguccuguucgugcccaagaugcggcgacuuauuacccguggggaguggcaguccgaagcucaagacacgaugaagaccggcucuagcaccaauaacaaugaagaggaaaagagucggcugcuugaaaaggaaaaccgggaauuggagaagaucaucgccgagaaggaagaacggguuuccgagcuccggcaccaguugcaaucacgucaacagcuucgcucuagacggcacccaccaacuccacccgaacccuccggggggcucccuagagggcccccugaaccucccgaucggcuaucaugugauggaucucggguccaucuacuguacaaauag

SEQ ID NO: 210055 - RNA, 2535 nt, Artificial Sequence
  derived and/or modified sequence
augggacccggagcuccuuucgccagggugggauggccgcuuccucuuuuaguugugauggcugccggaguagcucccgucugggcaucacauucgccccauuugccccgaccccacagcagaguuccuccccauccgucuucugaacgccgagcaguguacaucggggccuuguuuccaauguccgggggcuggcccgggggacaagcgugccagccugcuguagagauggcgcucgaggacgucaacucccgccgagauauucugccagacuaugagcugaaacuaauucaucacgauaguaagugcgacccaggucaagcgacaaaguaccuguacgagcugcuuuauaacgacccaauuaaaauaauucugaugcccggcugcaguuccguaucuacgcuugucgcugaggcggcucgcauguggaacuuaauuguucuaucauacggcucaucauccccagcacugucaaaucggcagcgcuuucccaccuuuuucaggacacacccuuccgcuacacugcacaaucccacacgcgugaagcuguuugaaaaguggggauggaaaaagauugcaaccauucagcagacaacugaaguuuucacaaguacguuagaugaccucgaggaaagggugaaggaggcgggcauugaaauuaccuuccggcaaucuuucuucucugacccggcuguuccugugaagaaccuuaaacgccaggacgcacgaauaauuguaggucuuuuuuacgagacggaggcacgaaaaguguuuugcgaaguguauaaagagcgauuguucggaaagaaauaugucugguuccugaucgggugguaugccgauaacugguucaagaucuacgauccauccauaaauugcaccguugaugaaaugacugaggcaguugaaggccacaucaccaccgagauugugaugcugaaucccgcuaauacccgcagcauuaguaacaugacaucccaggaauuuguggaaaagcugaccaagagacugaagaggcaucccgaggaaaccggcgguuuccaggaggcaccucuggccuacgaugcuauuugggcccuugcccucgccuugaacaagacaucuggggggggagguagaaguggggugcggcuggaagauuucaacuacaauaaucagaccauaacagaucagaucuacagggccaugaauuccucuucguuugagggaguaaguggacacguaguauucgaugccucugggagccguauggccuggacgcuaaucgaacaacugcagggcggaucuuauaagaagauuggcuacuacgauagcacaaaagacgaccugucuuggagcaaaaccgacaaguggaucgggggcagcccacccgccgaucagacccuuguaauuaaaacuuuucguuuucugagucagaaacuguuuauaaguguuagcguccucagcagccucggaauaguguuagcugugguaugccugagcuucaacaucuacaauagucaugugagauauauccagaacagccagccaaaccucaacaaucucaccgcugucggcugcucccuggcacucgcggcuguguucccucuuggucuggauggcuaccauauuggaaggaaucaguuucccuuugugugucaagcccgccuguggcugcugggacugggguuuucccugggguacgguuccauguuuacuaaaaucuggugggugcacacaguguucaccaaaaaggaggaaaagaaggaauggcgcaagacgcuugaaccuuggaaguuguaugcaacaguuggacuguugguagggauggacgugcugacguuggccaucuggcagauuguggauccacuccaccgcacgaucgagacuuucgccaaagaggagccuaaggaggacaucgaugugucuauucugccccagcuugagcacugcucuuccaggaagaugaacacauggcucggcauauucuauggcuacaagggauuguuacuccugcugggcaucuucuuagcuuaugagacaaaaucuguuagcacggaaaaaaucaacgaccacagagccgugggcauggcaaucuacaaugucgccgucuuaugucugaucacugcucccguuaccaugauccuuagcagccagcaggacgccgcuuuugccuuugccagccuugcuaucgucuuuucgucauacauuacauuaguuguuuuguucguaccaaaaaugagacgacugaucacccgcggcgaguggcagagugaggcgcaggauacaaugaaaacggguucaucuaccaauaauaacgaggaggagaagucuaggcucuuggagaaagaaaaccgggagcuggaaaagauuauagccgaaaaggaagagcgggucucggaacugcgacaccagcuucaaucacggcagcagcugaggucacgcagacacccaccgaccccuccagaaccuuccggcggucuaccuagaggaccaccagaaccaccggaucgacucucgugugacggcucuaggguacaucugcuuuauaaguag

SEQ ID NO: 210056 - RNA, 2535 nt, Artificial Sequence
  derived and/or modified sequence
augggacccggggcgcccuuugccagggucggauggccauugccccuccucgugguuauggccgcagguguugcucccguuugggcaucucacaguccacaucugccaagaccucacucccgaguuccuccccauccaucuagcgaacgcagggccguauauauuggcgcucuguuuccgaugaguggcggauggccugggggccaggccugccagccugccguagagauggcuuuggaagacgucaauucucgaagagacauuuugccggauuacgagcugaaacuuauccaccacgacuccaaaugcgacccaggacaggcaaccaaauaccuguacgagcugcuguauaaugacccuaucaagauaauccugaugcccggcugcaguuccguuaguacucuuguggcggaggcugcucggauguggaaucucaucguccucaguuacgguaguuccagccccgcgcucagcaaucgacagagguucccgaccuuuuuucgcacucacccuucugcuacacuucacaacccaacgcgagugaagcuguuugagaaguggggauggaagaagaucgcaacuauccagcaaaccacugaaguguuuacuagcacgcuggacgacuuggaagaacgagugaaagaagccggaauugaaaucacuuuuagacagucauuuuuuucagacccugcgguuccggucaagaauuuaaaaagacaggacgcccgaauuauugugggccuuuuuuacgaaacagaggcacggaagguuuuuugcgaaguuuacaaagagcgucuguucggaaagaaauacguaugguuccugauugggugguaugccgauaauugguucaagauauacgacccuucaaucaacuguaccgucgacgagaugacagaagccguugagggacauauuacaacagagaucgugaugcugaauccagccaauacgagaagcauuucaaacaugaccucccaggaauucguggagaaguugacuaagcgccugaagaggcauccugaagagaccgguggauuucaggaagcuccucuggccuacgacgcaauuugggcuuuggcgcuugcacugaacaagacuagcggcgggggaggucgauccgggguucggcuugaagacuucaauuacaacaaccagaccaucaccgaucagaucuaccgcgcgaugaauuccucuucuuucgagggcgugucgggacacguuguuuucgacgcuucaggaucaagaauggcuuggacccugaucgagcagcuccagggcggauccuauaaaaaaauuggcuauuaugauaguacgaaggacgaucucucuuggagcaaaacugacaaauggauaggaggcucgcccccagccgaccaaacucugguuaucaagaccuuucgguucuugucccagaaguuauuuauuucagugagcgugcucagcuccuuaggaauuguuuuagcuguagugugccuuucuuuuaacauuuauaauucccauguacguuauauacagaacucacaacccaacuugaauaaucugacagccguagguuguagccuugcccuggccgccguguuuccacuaggacucgauggauaccauaucggccgcaaucaguuucccuucgugugucaggcccggcuaugguugcuaggacuaggguuuucuuugggauacggauccauguuuacaaagauuugguggguccacacgguuuucaccaaaaaagaggaaaagaaagaguggcggaagacucuugagcccuggaaacuguaugcuaccguuggacugcucgucgggauggacguguugacccuggccauuuggcaaaucguugacccucuacacagaacaaucgagacguuugcgaaggaagagccaaaagaggacauugacguguccauccugccacagcuggagcauuguaguagucguaaaaugaauacauggcuuggcauuuuuuaugguuacaagggccuccuccugcuccugggcauauuccuugcuuacgagacuaagaguguguccaccgagaaaaucaaugaucaccgagcggugggcauggccaucuauaauguugccgugcugugucuuauaacagcccccguuacuaugauucuaaguucacagcaggacgcggcauuugcuuuugcuucucuggcuauuguguuuuccucuuacaucacacuaguuguucucuucgugcccaagaugaggcgucuuauaacucggggcgaguggcaaagcgaggcccaggacaccaugaagacuggauccuccacaaacaacaaugaagaggagaagucacgcuuacuggaaaaggagaaccgcgaacucgagaagaucauagccgaaaaggaggagcggguuagugagcuaaggcaucaguuacaaagcaggcaacaguugcguagucgcagacauccgcccacccccccggagccuucaggugggcuucccagaggccccccugagccaccugaccgacugucuugugaugggucucgaguacaucuccucuacaaauag

SEQ ID NO: 210057 - RNA, 2535 nt, Artificial Sequence
  derived and/or modified sequence
augggcccaggagccccguucgcaagaguugguuggccucugccauuacugguugugauggcagcuggcguggcaccggucugggcaagucacagcccccaccuccccagaccucacagccguguccccccacacccaagcucugaacggagggcaguguacaucggagcucuguuucccaugagcggaggauggccgggcggccaagccugucagccugcagucgaaauggcucuagaagaugucaacuccagaagggauauucugccagauuacgaguugaaacuaauucaccacgacagcaagugcgaccccgggcaagcaacaaaguaccucuaugaacuccuauauaaugauccuaucaaaaucauccuuaugcccggauguuccucggucagcacgcuaguggcugaggcugcuaggauguggaaucuaauaguucuuuccuacgguagcuccaguccagccuugaguaauagacagcgcuucccgaccuucuuccgcacucacccguccgcaacacugcacaauccaacuagggugaaauuguuugagaagugggguuggaaaaagaucgcgaccauccaacagacaaccgaagucuucacaucaaccuuagaugaccuugaagagcgaguuaaggaggcugguauugaaaucaccuuccgccaauccuucuucuccgacccugccgugccagucaaaaaucugaagcgacaggacgcuaggauuauaguuggcuuauuuuacgaaacugaagcaagaaagguuuuuugcgaaguuuacaaagagcgccuguucgggaaaaaguacguuugguuucugaucggcugguaugcggauaauugguuuaagaucuacgacccaaguauaaauuguacaguagaugaaaugacagaggccguggagggccauaucaccaccgaaaucguuaugcuuaauccagccaauaccagaaguaucucuaacaugacuagucaggaguuuguggaaaagcugacaaaaagacugaaaagacacccagaagaaaccggugguuuccaggaggcuccacuugcuuaugaugccaucugggcccuagcgcucgcauuaaacaagacuucaggugguggcgggcgcucuggaguuaggcuagaagacuuuaauuauaauaaccagacuauuacagaccaaaucuaccgugcaaugaacucaucaucuuuugaaggggugucaggacacgucguguucgacgccucaggcucgcgcauggccuggacacuuaucgagcagcuucaaggaggaaguuacaaaaaaauaggcuauuacgauucaaccaaagacgaccuaucgugguccaagacagauaaguggaucgggggcagcccgcccgcugaccaaacccuuguaauaaagacauuucgcuuuuugucucagaaacuguuuaucagcguguccguccucagcucccuuggcauuguguuggcaguggugugccugucuuuuaauaucuauaacucucacgugagguauauccaaaauagucaaccaaaucucaauaaucucacagcaguugguuguuccuuagcguuggcugcuguguucccccuaggauuagacggguaccauaucggaaggaaucaguucccauuuguuugccaggcucgguuauggcugcucggacuuggcuuuucacucggcuacggcucuauguucaccaagaucugguggguucacacaguguuuaccaagaaagaggaaaagaaagaguggagaaaaacucucgaaccauggaaauuguaugccacggugggccugcuggucgguauggaugugcuuacccuggcuaucuggcagauuguggacccccuccacagaaccaucgagacuuucgcgaaggaagaaccuaaagaagacaucgacgugucaaucuuaccucagcuagaacacugcagcagucggaagaugaacacuugguuggggauuuuuuauggguacaagggccugcuccuacugcugggaaucuuccuggccuaugagaccaaguccguuuccacugaaaaaaucaaugaccacagggccgucggcauggcuaucuacaaugucgcagucuugugccugaucacggccccugugaccaugauccugucuucgcagcaggacgcagccuuugcuuucgcgagccuggcgauuguguucuccagcuacauaacucucgugguacuuuucgucccuaagaugaggagguuaauuaccagaggcgaguggcaaagcgaagcacaggacaccaugaagacuggcaguagcacaaauaacaaugaagaggaaaagucucgcuuauuagaaaaggaaaaucgagagcucgaaaagaucaucgccgaaaaggaggaacgggugucagagcugcgccaccagcugcaaucucgacaacagcugagaucaagaagacauccuccgacaccucccgagcccagcggcgggcugccuagggggccaccagagccuccagauagacuuuccugcgauggcuccagagugcaucugcuguacaaguag

SEQ ID NO: 210058 - RNA, 2535 nt, Artificial Sequence
  derived and/or modified sequence
augggcccuggugcaccguuugcucggguuggauggccacucccucugcugguuguuauggcagcuggaguggcaccagugugggccagccacucuccccaucuaccuaggccacauucacgggucccuccucacccaagcagcgaaagacgcgcaguuuacauaggagcccucuuuccaaugucuggcggcuggcccgguggucaggccugucagccugcaguugagauggcucucgaagacgugaacagcaggagagauauacugccugacuacgagcugaaacucauucaucaugacaguaagugcgauccugggcaggcgaccaaguaccuguacgaacuucuguacaaugauccuaucaaaauaauacuuaugccugggugcuccuccgucaguacccucgucgcugaggcagcacgaauguggaauuugauugugcugucauauggaucaucgagcccugcacuuaguaauagacagagauuccccacuuucuucaggacccacccuucugcaacucugcauaaccccaccagaguuaaacuguucgaaaaaugggguuggaagaagauugccacaauccaacaaacaacggaagucuuuacaagcacauuggaugauuuggaggagcggguuaaggaggcagggaucgagaucacauuccgccagaguuucuuuucagauccugcagucccuguaaagaacuugaaaagacaagacgccagaauaauugucggacuguucuaugagaccgaggcgcguaaggucuuuugugaggucuacaaggagagauuauucgguaagaaauauguuugguuucuuauuggcugguacgccgauaauugguuuaaaaucuacgauccaagcauuaacugcacuguugacgaaaugacggaggcugucgaggggcauaucaccacagagaucguuaugcucaauccagcgaacacaaggaguauuuccaacaugacaagucaagaauucguugaaaaguugacaaaacgccucaaacggcauccugaggaaacgggcggguuucaggaggccccucuggccuaugacgcgauaugggcucuagcauuagcacugaauaagacgagcggagguggugggcgcuccggcgugcgucuggaggacuucaacuauaacaaccaaacuauuacugaccagauuuacagagccaugaauuccaguucauuugagggaguguccggacaugucgucuuugacgcuuccggaucacgaauggcuuggacccugauugagcaacuccagggggggagcuacaagaagaucgguuacuacgauagcaccaaggacgaucugucaugguccaaaacagauaaauggaucgggggaucaccaccggcugaccagacacucgugauaaaaacuuuccgguuucucucucaaaagcuguucaucuccgucuccgucuuaucaagccucgggauuguccucgccgugguuugcuuauccuuuaacaucuacaauucccacgugcgcuacauucaaaacucucagccgaaccugaauaaccugaccgcaguugggugcuccuuagcucucgccgcgguguucccacugggccuagacggcuaccacauugggcgcaaucaguucccguucguaugccaagcccgccuguggcuccugggacucggguucucacucggcuacggcucuauguuuacuaaaaucugguggguccauacggucuuuacuaagaaggaagagaagaaagaauggcgcaaaacucuugaacccuggaaacuuuacgcaacugucggucuccuagucggcauggacgucuugaccuuagccauuuggcaaaucguugauccucuccaucgcacaauugaaacauucgccaaagaggaaccuaaggaagauauugacgucuccauucucccacagcuggagcauugcucaagccguaagaugaauacauggcuuggcauuuuuuauggauauaaaggccuguuacugcuacuggggauuuuccucgcuuacgaaacaaaguccgucucaaccgagaaaaucaacgaccauagagcggucggcauggcuaucuacaauguagcagugcucugccugaucacggccccggugacuaugauccugagcagccaacaggaugcggccuuugccuuugccucccucgccaucguuuuuagcuccuauaucacgcucguuguccucuucgugcccaaaaugaggcgccucauaacacgcggcgaguggcaaagugaggcccaggacacaaugaaaacgggaucaucaaccaauaacaaugaagaggagaaaagccgccugcuugagaaggaaaacagggaauuagagaaaauuauugccgagaaggaggagcguguuagcgagcugagacaccaauugcagagccgucagcaguugcggagcagaagacaucccccaaccccacccgagccauccgggggacugccccggggacccccagagccuccagaucgucuuuccugcgauggaaguagagugcaucuguuauacaaauag

SEQ ID NO: 210059 - RNA, 2535 nt, Artificial Sequence
  derived and/or modified sequence
auggggcccggggccccguuugcccgaguuggcuggccacucccccuguuaguugugauggccgccgggguggccccgguuugggccucucacaguccucaccuuccccguccacauucacguguaccuccccacccuagcucagaacggagagccguguacauuggcgcccuguuccccaugucagguggcuggccugggggacaggcuugccaacccgccguugaaauggcauuggaagacgucaauaguagacgcgauauucugccagauuaugagcugaaacucauucaucaugauaguaagugcgauccuggacaggcaacaaaguaucuguacgaauuacucuauaacgacccaauuaagauaauccugaugccuggguguucuucaguguccacucucguggcugaggccgccagaauguggaaucucaucguucugagcuaugguuccaguucuccugcucuguccaacaggcagcgauucccuaccuuuuucaggacgcaccccagcgcaacguugcauaaucccacacgcgugaaacuguuugagaaauggggauggaagaagaucgccaccauucaacaaacuacugaaguguucacuaguacacuggacgaccuggaggagagagugaaagaagccggcauagagaucacuuuccggcagucuuuuuuuuccgaucccgcgguacccgucaaaaaucuuaagcggcaggaugcgagaauuauugugggccucuuuuacgagaccgaagcccgcaaaguuuucugcgagguguauaaagaacgccuguucgguaagaaguaugucugguuucugauugggugguaugcagauaacugguuuaagauauaugaccccucaaucaacuguacgguugacgagaugacagaggcaguggagggccacauaacaaccgagauagucaugcugaauccugccaacacccguucaaucagcaacaugacuucacaagaguucguggaaaaacucaccaaacgucugaagaggcaccccgaagagacgggugguuuccaggaagcgccucuggcauaugacgcaauuugggcacucgcucucgcacugaauaagaccaguggaggugggggccgauccggggucaggcuggaggacuucaacuauaacaaccagacuauaacagaucagauauaccgggcaaugaauuccaguuccuucgaaggcguuucugggcacgugguguuugacgcaucaggcucaaggauggccuggacucucauagagcagcuccagggagguuccuacaaaaagaucgguuacuacgacucaaccaaggacgaccuguccuggaguaaaacggacaaguggaucggagguuccccuccagcagaccaaacuuuaguuaucaaaacuuuucgauucuuaucccagaagcuguucaucucaguuagugucuugagcucacugggcauugucuuggcagucguuugccucucuuuuaauauuuauaacagccauguucgcuacauccaaaauucacaaccaaaucuuaauaaucuaacugcagucggcugcucccuggcucucgcugcuguguuuccacugggacuggaugguuaccacauuggacggaaucaguucccauucgugugucaggcucgccuaugguuacuggggcucggcuuuagccugggcuacgggucuauguucacaaaaaucugguggguucauacaguuuucacuaaaaaggaggagaaaaaagaauggcguaaaacacuagaacccuggaaacucuacgcuacggucggccuacucguggguauggacguccugacccuggcaaucuggcagauuguggacccacugcauaggacaauagagacuuucgcuaaagaagaaccuaaggaagauauugacguuucaauccucccccagcuugaacauuguuccucacgaaaaaugaacacauggcuugggauuuucuacggguauaagggccuacugcugcuguuagggauuuuccuugccuacgagacuaagagcguaaguaccgaaaaaaucaaugaccauagagcaguuggcauggccauauacaacguggcugugcucugcuugaucacggcuccagugacuaugauccugucaagucagcaagacgcagcuuuugcauucgcaucacuagcuauuguguucucaaguuacauuacucuggugguccuguucgugccuaaaaugcgccgccugaucacccgcggcgaauggcaaucagaggcccaggauacaaugaaaacuggaucaucaacaaacaacaaugaggaggaaaaaucuagacuacucgagaaggagaaucgggaguuggagaaaaucaucgccgagaaagaggaacgaguuagcgaacugagacaccaacugcagaguagacagcaguuaaggaguaggaggcauccacccaccccgcccgaaccuagcggaggccucccacguggaccacccgagcccccugauaggcugagcugugaugguagucgagugcaccuccucuauaaguag

SEQ ID NO: 210060 - RNA, 2535 nt, Artificial Sequence
  derived and/or modified sequence
augggaccaggggccccuuucgcuagggucgguuggccacugccucugcuaguugugauggcugcaggggucgcuccgguaugggcuucccacucuccucaccucccccggccucauucucgaguaccaccccaucccucuucagaacggcgcgcaguauauaucggggccuuauucccaaugucaggcggcuggccaggcgggcaggccugccagccugcugucgagauggcuuuagaagaugugaacaguagacgcgacauccugccugacuaugagcuuaaacugauccaucaugauuccaagugcgauccaggacaggcgacuaaguaccuuuaugaacuguuguacaacgaucccaucaaaaucauuuugaugccgggcugcucauccguuucuacacuugucgcugaagcugccaggauguggaacuugauuguucugagcuauggcucuagcucucccgcucuuuccaauagacaacgcuuucccaccuucuuuaggacucaccccucugcuacucugcauaauccuaccagaguuaaacuguuugagaaguggggauggaagaagauugccacaauccagcagaccaccgagguauuuacauccacgcuugaugacuuggaggaaaggguaaaggaagcuggaaucgagaucaccuuccggcagagcuuuuuuagcgacccugccgugcccguuaaaaaccucaaacgacaggacgcccguaucauagugggccuuuuuuacgaaaccgaagcacggaagguguucugcgagguguauaaagagaggcuuuucggcaagaaauaugugugguuccugauuggcugguacgccgacaauugguucaaaauauacgaucccucaauuaauuguaccgucgacgagaugacagaggcugucgaaggccacaucacaacugaaauuguuauguuaaacccugccaauacucggucaauuagcaauaugacgagccaggaguuugucgagaaacuaacuaagcggcuuaagcgucacccugaggagaccggggguuuccaggaagcaccucucgccuacgaugccaucugggcuuuggcccuugcucugaauaagaccucuggaggggguggacgcucugggguaaggcuugaagacuucaauuauaacaaucaaaccauuaccgaccagauuuaucgcgccaugaacuccucgucuuucgaggguguuagcggacauguuguauuugacgcaucuggguccagaauggccuggacuuuaaucgaacaguugcaggguggaagcuauaaaaagauagguuacuacgauuccacuaaggaugaccucucuuggaguaaaacugauaaguggaucggcggcucaccucccgcugaucagacgcuggucauuaaaacauuccgauuuuugucccagaaguuauucaucagcguaagcgucuuaaguucucuagguauaguccucgcugucgugugccucuccuucaauauauacaauucccauguccgguacauccagaacucccagccuaaucugaacaacuugaccgcagugggcuguucccuggcccuggcugcuguauucccacuuggacuagauggauaccauauuggcagaaaucaauucccauuugucugccaagcacgacuuugguuacugggacugggcuucucauuggguuaugggagcauguucacgaagauaugguggguucacacgguguucaccaagaaggaggaaaagaaagaauggagaaagacuuuagagcccuggaagcuuuacgccaccgugggacugcugguggggauggauguuuugacgcuugcaauuuggcagaucgucgauccccugcauaggacaauugaaacuuucgcuaaagaagaacccaaagaagacauugauguguccauucuuccccagcucgagcacugcucuuccagaaagaugaauacauggcuggggauuuucuacggcuacaaaggccuccuguugcugcugggaaucuuccuggcauacgagaccaagagcgugagcacugaaaagaucaacgaccaccgggcaguugguauggcuaucuacaauguagcaguucuguguuugaucaccgccccugugaccaugauccugucaucccaacaggacgcugccuucgcuuucgcgagccuugcaauuguuuuuaguaguuauaucaccuuaguggugcucuuuguuccaaagaugcggcggcuuaucacucguggcgaguggcaguccgaagcccaggacacaaugaagacuggaaguuccacaaauaacaaugaggaggagaagucucgacucuuagagaaggagaauagggaacucgagaaaauaauugccgagaaggaagagagagugagcgaacucagacaccaacuacagucucgucagcaacuucgcucgcgcaggcauccaccuacgccccccgagcccaguggaggucuaccucggggucccccugaacccccagaucggcuaaguugugauggaucacgaguucaccuccucuacaaguag

SEQ ID NO: 210061 - RNA, 2535 nt, Artificial Sequence
  derived and/or modified sequence
augggcccaggggccccuuuugcccggguggguuggccacugccucuucuaguugugauggccgcuggcgucgcacccguuugggcuagccacucaccccaccugccuagaccucacucacgcguaccgccacacccaaguuccgaacgaagggcuguguacauuggggcacuguucccaaugucuggaggauggccgggaggacaggccugucagccugcuguugaaauggcccuggaggaugucaacagucgacgggauauacugccugacuaugagcucaaacuuauacaucaugacagcaagugcgauccggggcaggcuaccaaauacuuguacgagcuacuuuacaacgauccaaucaaaauuauccuuaugccaggcugcaguagugucucgacccuuguagcggaggcugcacguauguggaaccuuauugugcuuaguuauggaucuagcagcccugcucuaaguaauagacagcgauucccaacauucuuucgaacucacccaucugccacacuccacaauccuacaagagugaaacucuuugagaaauggggguggaaaaaaauugcgacaauucaacagaccacagagguuuucaccucaacgcuagacgauuuggaggaacguguaaaggaagccgggauugagaucacauuccgccagaguuucuuuagcgaccccgccgugcccguuaaaaaucugaagcgucaggaugcuaggauuaucguugguuuauucuaugaaaccgaggcaaggaagguguucugcgaaguguacaaagaaaggcuuuuuggaaaaaaauaugugugguuucugauugguugguaugcagauaacugguucaagaucuaugauccauccauaaauuguaccguagacgaaaugacugaggcaguggagggacacaucaccacagaaauugugauguuaaauccagcuaacacccguuccauuucuaauaugaccucacaggaauucguugaaaaacuuacaaagcggcugaagagacaucccgaagagacaggagguuuccaagaggcuccccuggcuuaugacgccaucugggcacuggcacuggcacucaauaagacgucgggaggggguggccguagugggguaaggcuagaggacuuuaauuauaauaaccagaccauuacugaccaaaucuaccgcgccaugaauaguagcucuuucgaaggcguguccggccacgucguguucgacgcuuccggcaguagaauggcuuggacacugaucgagcaguugcagggaggcaguuacaagaaaaucggcuacuacgauucuaccaaggacgaccuaucauggagcaagacagauaaguggauuggugguuccccgcccgcggaccaaacucuugucaucaaaacuuuuagauuccugucucagaaacuuuuuauuuccgugucaguucucaguagccucgggauaguacuggccguagucugucugaguuucaacauuuauaacucccacguacgguauauccagaacucacaaccaaaccugaauaaccugaccgccguaggcugcagccuggcacuggccgcuguuuuuccacuuggguuggauggcuaucacauuggcagaaaucaauuuccauucguuugccaagcucggcuauggcugcuggggcuaggguucucucucggcuaugggucuauguuuacaaaaauuuggugggugcauacuguguuuacaaagaaagaagagaagaaggaguggagaaagacacuagagcccuggaaacucuacgccaccguaggacuacuggugggaauggacguauugacauuagcaaucuggcaaauugucgauccucugcacagaacuauugaaacuuuugccaaggaggaaccuaaagaggacaucgacgugagcauccugccacagcucgaacacuguaguucuagaaagaugaacacaugguuagggauauuuuauggcuauaagggacuccuauugcuguuggguauauuccuggcuuacgagacaaaguccgugucaaccgagaaaauuaacgaucauagggcugucgggauggcaaucuacaacguggcgguucucugucucaucacugcucccgucaccaugauucugucaucccagcaggaugccgcuuuugccuucgcaagucuggccaucguauucuccuccuacauuacccugguaguccuguuuguaccaaagaugagaaggcucaucacccgaggcgaguggcagagcgaggcgcaggauaccaugaaaacagggucaucuacgaacaacaaugaagaagaaaaaaguaggcuauuggaaaaagagaacagagaguuagaaaaaauaauugcugaaaaagaagaacgcgugucagaacucagacaccaauuacaaucucgucagcagcuucgaucccgccgccacccaccaacgcccccugagccuuccggaggacuuccacggggcccaccugagccucccgacagacuuuccugugauggcagccgcguacaucuacuguacaaguag

SEQ ID NO: 210062 - RNA, 2535 nt, Artificial Sequence
  derived and/or modified sequence
augggaccaggcgcuccauucgcacgcgugggguggccgcugccauugcugguuguuauggccgccggcgucgcuccugugugggcuucacauucuccccaccuccccaggccacacucuagggugccuccccacccuucaagcgaaagacgagccgucuacauuggugcccucuucccaauguccggaggauggccuggaggccaagcuugccagccugcaguugaaauggcccuggaagacgugaauagccgucgagauauucucccugacuacgaauuaaaauugauacaccaugauagcaaaugcgaucccggucaggcuacuaaauaccuguacgaacugcucuacaaugacccaaucaaaauuauucugaugcccggaugcuccagcgucucuacacuuguggccgaggccgcccguauguggaaucuaauuguguuguccuacggcucaucuucuccggcccucagcaauaggcagcgauuuccaaccuuuuuucgcacgcaccccucugcuacccugcacaaccccacccgagugaaacuguuugagaaguggggauggaagaaaauugcuaccauccagcaaaccaccgaagucuucacaaguacgcucgaugaccuggaagagaggguuaaagaagcagggauugaaaucacauucagacagucauucuuuagcgaucccgcugugccgguuaaaaaccugaaaaggcaagaugcccggauuauugucggauuguucuaugaaacugaagccagaaaaguauucugugaggucuacaaggagagguuguucgggaagaaguacguaugguuccugaucggaugguacgcagauaacugguuuaagauauaugauccuucaauuaauuguacgguggacgagaugaccgaagcaguggagggccauauuacaacugaaaucgugaugcuaaauccggcuaauacuagaucuauuuccaacaugacaucucaggaguuuguggaaaaacuuacaaaaagacugaaaagacacccugaagaaacgggcggguuucaagaagcgccacuggcuuaugaugcaaucugggcacuugcucuggcacuaaacaagacauccggaggggggggacggucaggaguacgucuggaagauuucaacuauaauaaucaaacaaucaccgaucagaucuaucgggcuaugaauucaaguucguucgaagggguuucaggccacgucgucuuugacgccuccgggucgcggauggcuuggaccuuaauagagcagcuccaaggaggaagcuacaaaaaaaucgguuauuacgacaguaccaaggacgaccuuucauggucuaaaacagauaaauggaucggcggauccccuccagcugaucagacucucguuaucaaaacauucagauuucuuucucagaaacuguucauauccguaagcguucugucuucccuggggauuguacuggccgucgucugucucaguuucaacauuuacaauagccacgucagauacauucagaauucccagccaaaccugaacaauuugaccgccguuggcuguucacucgcucuggccgcuguguuuccccucggccuggaugguuaccacaucggucgcaaccaguuucccuucgugugccaggcuagacuguggcucuugggccuggguuucuccuugggcuauggcuccauguucacaaagauuugguggguacauacuguuuuuacuaagaaagaagagaaaaaggaauggcgaaagacccuagaaccguggaagcuguacgcaaccguaggucuucuagucgguauggauguacucacccuggccaucuggcagaucguugacccacuacaucgcaccauagagacguuugcuaaagaggaaccaaaggaggacauugacguuuccaucuugccucaguuagagcacuguucuaguagaaagaugaauacauggcugggcaucuuuuaugguuacaagggccugcugcuguugcuuggaauauuucuagcauacgaaacuaaaucagugaguaccgaaaaaauuaaugaccacagggcugugggcauggccaucuacaacguggccgucuuauguuuaauaacagcacccgugaccaugauucugucaucccagcaggacgccgcauucgcauuugccagccucgcuauuguguuuucgucguacaucacacuuguuguucuguucguuccgaagaugagacgucuaauuacaagaggcgaauggcaaagcgaagcacaggacacgaugaagaccggaucuucaacaaacaacaacgaggaagagaaaagcaggcuucuggagaaggaaaaccgcgaacuugaaaagauuauagccgaaaaagaagagcgggucucugaacuuaggcaucagcuccagagcagacaacaacuucgaagcagacgccacccaccuacacccccggagcccagugguggccugccccgggguccaccugaacccccugacagacucucaugcgacggcucacgaguacacuugcuuuauaaguag

SEQ ID NO: 210063 - RNA, 2535 nt, Artificial Sequence
  derived and/or modified sequence
augggcccaggagcaccguuugcaagagugggcuggccuuugccccugcuugugguuauggcagcaggaguggcaccaguaugggccucucacaguccgcaccucccuaggccacauucccgaguccccccccacccuuccuccgagcgccgggcaguguauauuggggcccuguuuccuaugucaggaggauggccagguggucaggcuugccaacccgcaguagagauggcgcuggaagaugucaacuccaggcgagauauccucccagauuacgaacuuaagcucauccaucaugacaguaagugcgauccuggccaagcuacuaaguaccuuuaugaacuccuuuacaacgauccaaucaaaauuaucuugaugcccgguugcucuuccguaucaacauugguggcagaggcagccagaauguggaaccugauaguccucuccuauggaaguucuucgccugcauugagcaaucgccagagguucccaacuuucuuucgaacccaccccagugcuacccugcauaacccuacacgggugaaacuguuugagaaaugggguuggaagaagauugcuaccauucaacagaccaccgaagucuucacauccacgcucgacgauuuggaagagagaguuaaagaggccgguauugagauaacguucagacagucuuuuuucucugauccugcugugccugugaaaaaccuaaaacgccaggacgccaggauuaucgugggacuguucuaugagaccgaagcccggaaaguguuuugugaggucuauaaggagagauuguuuggcaaaaaguacgucugguuucucauugggugguaugcagauaauugguuuaaaaucuacgacccguccauuaacuguaccguugacgagaugacugaggcagucgaaggccacaucaccaccgagauagucaugcucaauccagcaaacacaaggucuaucagcaauaugacaagccaggaauucgucgaaaagcugacaaagaggcugaagcgucaccccgaagaaacaggaggguuucaggaggccccucuggccuaugacgcuauaugggcacuugcucuagcuuugaauaaaaccagugggggaggcgguagaucugggguuagacuugaggacuucaauuacaauaaccagacaauaaccgaucaaauauauagagccaugaauagcucuuccuuugaaggcgugucuggacacguggucuuugaugcaagcgggagcaggauggccuggacucuuaucgagcagcugcagggaggauccuacaagaaaauuggcuauuaugacucuacaaaagaugauuugaguuggagcaaaacggauaaguggaucggggguuccccaccggcggaucagaccuuggugaucaaaacuuuuagauuccuuucacaaaaacucuuuauuagugucucuguguuaucaagccugggcauuguacuggcuguugugugccuaucauuuaacauuuacaauucccacguccgguauauccagaacagucaaccuaaucugaacaaucugacagccgugggauguucacuugcucucgcugccguguuuccucuuggucuagauggcuaucauaucggaaggaaccaguuuccauuugucugucaagcccgacuguggcugcuaggacugggauuuagucucgguuacggaucuauguucacgaagaucuggugggugcauacaguguucacuaagaaagaagaaaagaaggaauggagaaagacacucgaacccuggaaauuguacgcaaccgucggcuuacucguggggauggacgugcugacauuggcaauauggcagauuguggauccuuuacacagaacaauugaaacauucgcuaaagaggaaccuaaagaggacauugacgucuccauucucccacaguuggaacauuguucaagccguaagaugaacacuuggcucggaauuuuuuauggguacaagggccuccugcuucuauuggguauuuuccuugcauacgaaacaaaaucaguuagcaccgaaaaaauuaacgaccaccgggcugucggaauggcuauuuacaacguugcugugcuuugccugauaacugcccccguuacaaugaucuuaaguucucaacaggaugcagcguuugccuuugcuucgcuugccauuguauuuaguucauauaucacccugguuguccuauuugugccuaagaugcguagauugauuacucgcggagaauggcaaucagaggcucaggacacuaugaaaacuggcagcucuacaaauaacaacgaagaagagaaguccaggcuccucgaaaaggagaaccgugagcuggaaaagauaauugccgaaaaagaagagcgcguuuccgagcuccggcaccaauugcaauccagacaacagcuaagaagcaggcgacacccaccaacaccaccagaacccagcggcggccuuccacggggaccuccagagccaccugaccgccuguccugcgacggaucaaggguccaccuguuauacaaguag

SEQ ID NO: 210064 - RNA, 2535 nt, Artificial Sequence
  derived and/or modified sequence
augggacccggugccccauuugcccgcguuggguggccucucccacugcuggucguuauggccgcugguguggccccggugugggcgucacacucaccccacuugccccguccucacucucguguaccaccccacccgagcuccgaaaggcgagccguauauauaggcgcccuuuuccccaugucugguggguggcccggaggccaggccugucagcccgccgucgagauggcacuggaagacguuaauucccgcagagacauacucccugauuaugaacugaaacugauucaucacgacuccaaaugcgacccuggccaggcaaccaaguaccuguacgaacugcuguacaaugacccaaucaaaauuauucugaugccaggcuguucauccguuucuacauuagucgccgaagccgcgagaauguggaauuuaaucguccuaaguuaugggaguucuaguccggcacugucuaaccgucaaagauuuccuacuuuuuuccggacccauccgucggcaacccuccacaauccuacacgcguaaagcuauucgagaaauggggauggaagaaaauugcaaccauacagcagacaaccgagguauucacuucuacuuuagaugaucucgaggaacgugugaaagaagcuggaauugagauuacauuccgccaauccuucuuuucugaccccgccguaccggucaaaaaucuuaagcgucaggacgcgcguaucauuguggggcuguucuacgagacagaggcaaggaagguguuuugugaaguguacaaggagcgauuauuugggaaaaaguacguuugguuucugaucgggugguacgcggauaauugguuuaaaaucuacgauccaucgauaaacugcacuguggacgaaaugacugaggccguggagggacauaucaccacagagauagugauguugaauccagccaacacucgaucgaucucaaacaugacaagccaagaauuugucgaaaaacucaccaaaagauugaaacggcauccagaggaaacaggcgguuuucaagaggcaccacuggcauacgacgcaauuugggcucuggcucuggcgcucaacaagacuuccggaggagguggccggagcggagucaggcuagaagauuuuaacuauaauaaccagacuaucacagaucagaucuaccgugcaaugaacaguaguagcuucgaagggguuucagggcacguuguuuuugacgccagcgguagcaggauggcuuggacuuuaauagaacagcuccaagggggcucauacaagaagaucggauauuaugauucuacaaaggacgaccucaguugguccaagacagacaaguggaucggcggcagcccucccgccgaccagacccuggucauuaagacguucagguucuuaucucagaaauuauucaucucuguauccguccuguccagucucggcauuguauuagcggugguuugccucaguuucaacauuuacaauucccaugugcgguacauucagaauucacagccaaaucucaauaaccugaccgcggucggaugcucucuugcccuagcugccguguuuccccuaggucuggacggguaucacaucgggcggaaucaauucccauucgugugucaagcuagacuuuggcuccuuggacuugguuucucucugggauacgggucaauguuuacuaaaaucuggugggugcacaccguuuuuacaaaaaaggaggagaaaaaagaguggaggaaaacauuagagccauggaaauuauacgccacagucggucuucuggucgggauggaugugcuuacucucgcuaucuggcagaucguagauccuuuacauagaacuauagagaccuuugccaaagaagagccuaaagaagauaucgacguuaguaucuuaccucagcuugaacacugcucaucuaggaagaugaacaccugguuggggaucuuuuacggcuacaagggacuguuacugcugcugggcauuuuccuugcuuaugaaacaaaguccguauccaccgagaaaauuaaugaucaccgggccgucggaauggcuauuuacaauguugccgugcuguguuugauaacagcccccguaacaaugauucuaagcucacagcaggacgcugccuuugcuuuugcaagucuggcaaucguauuuagcucauacauuacgcuggucguacucuucgucccuaagaugcgucgucugauaacaaggggugaauggcaaucugaggcccaggacacaaugaaaacaggaagcucuaccaacaacaacgaagaagagaaaagccgguugcuugaaaaagagaaucgagaacuagagaaaaucauugccgagaaggaagaaagaguaucagagcuacgucaucagcuucagucaagacaacagcugagaucucgaagacacccucccacuccaccagagccuuccggaggccugccccguggcccgcccgagcccccggacagacuguccugugacgguagccguguacauuuacuguauaaguag

SEQ ID NO: 210065 - RNA, 2535 nt, Artificial Sequence
  derived and/or modified sequence
auggggccuggugcccccuuugcccgcgugggcuggccacuuccccugcuugucguaauggccgccggcguagcucccgucugggccagucacucuccucaccugcccaggccgcacagucguguuccaccccaucccuccagugaacgucgcgcaguauacauaggagcuuuauuuccgaugagcggcggguggcccggaggacaggcaugucagccagcuguugaaauggcacuugaggacgucaauagcagaagagauauccuacccgacuacgagcugaaacugauccaccaugacucaaaaugugauccaggacaggccaccaaguaccucuaugagcugcuguacaaugacccaaucaaaauaauccuuaugccaggcugcuccucaguaucaacccucguggcggaggccgccagaauguggaaccugauuguccugucuuacggcucuucuucuccugccuuaucuaacagacaacgcuuccccaccuucuuccgaacacaccccuccgccacccuucauaauccaacuagagugaaacuuuuugagaaauggggcuggaaaaagauugccaccauccagcagacaacugaaguauuuacuuccacacuggaugaucuggaagagcgugugaaggaagccgggaucgaaauaacauucagacaguccuucuuuucagaucccgccgugcccgugaagaauuugaaacgccaagaugccaggaucauugugggccuguucuaugagaccgaggccaggaagguguucugugaaguguauaaagagagacucuuuggaaagaaguauguuugguuucuaauuggaugguaugcugauaauugguucaaaauuuaugauccauccauuaacuguacuguggaugaaaugacugaagcgguggaaggacauauuacuacagaaauuguuauguuaaauccggcuaauacccguuccauuucuaacaugacuagccaggaauucguggagaaacucaccaagagauugaagcgccaccccgaggaaaccggagguuuccaggaagcuccuuuggccuacgaugccauuugggcccucgcccuugcacuaaacaagacaucgggcggcggugggaggucuggaguacgauuagaagauuucaacuacaauaaccaaacaauuacugaucagaucuauagagccaugaauuccuccucauuugaaggaguaucugggcacguagucuucgacgcaagcggcaguagaauggcuuggacuuuaauagaacagcuucagggugguucuuacaagaaaauuggauauuacgauucaaccaaagacgaccugucuuggagcaaaacggacaaauggaucggaggcagccccccagccgaccaaacacuggugauuaagaccuucagguuucuaucccaaaaacuguucauuagcguuucuguccuuuccucccugggcauuguccucgcaguggugugucugucauuuaacaucuauaacagucacguucgcuacauacagaauucgcagcccaaucucaauaaucucaccgcagucggcugcagccuggcucuggcagcuguuuucccauuaggccuggacgguuaccauaucggacgcaaucaguucccuuuuguaugucaagcccgccuguggcuguuaggacucggcuuuucacugggcuacgguuccauguuuaccaagaucuggugggugcacacgguguuuacaaaaaaggaggaaaaaaaagaguggcgaaaaaccuuggaaccauggaagcuguaugcuacagucgguuugcugguuggcauggacgugcugacuuuggcuaucuggcaaauugucgacccacugcauaggacaaucgaaacguucgcaaaagaggaaccaaaagaagauaucgauguuagcauuuuaccgcagcucgaacacugcuccucccggaaaaugaacacauggcuuggaauuuuuuauggcuauaaaggucuucugcuccugcugggcaucuuucuugccuacgaaacaaaaagcguaucuaccgagaaaaucaacgaccaucgugccguaggcauggccaucuacaacguugcugugcugugucucaucaccgcaccugucacaaugauucugucuagccagcaggacgcugccuucgcuuuugccucguuagcaaucguuuucagcagcuauaucacucugguuguauuguuuguuccaaaaaugcgccggcuuaucacgcggggagaauggcaguccgaggcucaggauaccaugaaaacuggcucuaguacaaacaacaaugaagaagagaaaucuagauuauuggagaaggaaaaucgcgaguuggagaagauuaucgcugaaaaagaagaacgaguguccgaacugcgccaucaacuccaaucaaggcagcaguuaagaucucgacggcacccaccuaccccaccagagccuucuggcggucuuccuagaggucccccugaacccccagauaggcuaucuugcgauggcuccagaguacaccuuuuguauaaguag

SEQ ID NO: 210066 - RNA, 2535 nt, Artificial Sequence
  derived and/or modified sequence
augggaccuggcgcaccuuuugcucgaguuggcuggccacuaccucuguuaguagugauggcugccggcguggcgccugucugggcaagucauucuccucaccucccuagaccucauagccgcgugccuccacauccuaguuccgaacgaagggccguuuauaucggagcacuauucccuaugucuggaggauggccuggagggcaggcgugccagcccgccgucgagauggcuuuagaagacguuaauucacgccgggacauucuccccgacuaugaacugaagcuaauccaccacgauucuaagugugacccaggccaggcuaccaaauacuuguacgagcuuuuauacaacgaccccaucaaaauaauccuuaugccagguugcuccuccgucaguacacucguggcugaagcagccaggauguggaaccuuauaguacucaguuauggcuccagcucccccgcacuguccaacagacaacgguucccgacuuuuuuucgcacccauccuucagccacacuacacaacccuacgcgcgucaagcuguuugagaaguggggcuggaagaaaaucgcaacgauucagcaaacgaccgagguguucacauccacucuggacgaucucgaagaacgaguuaaggaggcuggcaucgaaaucacauucaggcagucguuuuuuagcgacccagcuguucccguaaagaacuuaaagagacaagacgcuagaauaaucguuggccuauuuuaugagaccgaggcaagaaagguauuuugcgaaguguauaaggaacgacucuucggaaaaaaauacguaugguuucuaaucggcugguacgcugacaauugguucaaaauuuaugaucccucuaucaauuguacaguggacgaaaugacagaggccguagaaggucacaucaccaccgagaucguaaugcuaaauccugccaauaccagaagcauuuccaauaugacuucucaagaauucguugagaaauugacuaaaaggcuaaaaagacacccagaagagacuggggguuuucaagaggcuccucuagcuuacgacgcuauaugggcucuagccuuagcucugaacaagacaagugggggaggaggacgcaguggcgucaggcucgaagauuuuaauuauaacaaucaaacuaucacggaucagaucuauagagcaaugaauagcagcagcuucgaaggagugucgggccacgugguguuugaugccuccggcucucgaauggcuuggacacuaauagagcagcugcagggggggaguuacaaaaagauaggcuauuaugacagcaccaaggacgaccugagcuggucuaaaacagauaaguggauuggggguuccccuccagccgaucagacauuggugauaaaaaccuucagauuccuuucacagaaacucuuuauuagcguaagcguacugucgucacuggguauaguguuagccguuguuugcuugucuuucaacauauauaauagccacgucagauauauucaaaacucacagccuaaucucaauaacuugacggcaguuggguguucccuggcccuugcagcuguguucccucuaggccuggacgguuaccauaucggcagaaaccaguuuccauucgugugucaggcacgacugugguugcuaggccuuggguuuucccugggauacgguucuauguucacaaaaauuuggugggugcacacaguguuuacaaagaaagaggaaaagaaggaguggcguaaaaccuuagaaccauggaaacuguacgcuacugucggauuauuagugggaauggacgugcugaccuuggccaucuggcagauuguggacccgcuucaucgcacaauugagacguucgcaaaagaagagccuaaagaagacauugacguauccauccuaccacaguuggagcacuguagcucgcgcaaaaugaacacguggcuuggaaucuuuuacgguuacaaggguuugcuucugcuacuggguaucuuuuuggcuuacgagacuaagagcgugucgacagaaaaaaucaaugaucacagggcagugggaauggcuauuuauaacgucgccguguugugucugaucacagcccccgugacuaugauauuaagcucgcaacaggacgcugccuucgcauuugcuucuuuggccaucgucuucagcucguauauuacauuggucgugcuguuugugccuaaaaugaggaggcugaucacuaggggagaauggcaaagugaagcccaggacacuaugaaaaccgggucgucuaccaacaacaaugaagaggaaaaaagccgacuccuugagaaagagaaccgcgaguuagaaaaaauuauugcagaaaaagaagaaagaguaagcgaguuacgacaucaacuccagagcagacaacagcuacgcagucggcgacacccaccuacucccccugagccuucuggugggcucccacgcggaccacccgaacccccagacagacucucuugcgacggcuccagggugcaccugcuuuacaaguag

SEQ ID NO: 210067 - RNA, 2535 nt, Artificial Sequence
  derived and/or modified sequence
augggacccggagcuccuuucgccagggugggauggccgcuuccucuuuuaguugugauggcugccggaguagcucccgucugggcaucacauucgccccauuugccccgaccccacagcagaguuccuccccauccgucuucugaacgccgagcaguguacaucggggccuuguuuccaauguccgggggcuggcccgggggacaagcgugccagccugcuguagagauggcgcucgaggacgucaacucccgccgagauauucugccagacuaugagcugaaacuaauucaucacgauaguaagugcgacccaggccaggccacgaaauaucuguaugaacuguuguauaacgacccuauuaaaauuauucugaugcccggaugcucuagcgucucuaccuugguugcagaggccgccagaauguggaaucugauugugcucaguuacgguucuaguuccccggcucuauccaacagacaacguuucccgacauuuuuuagaacacauccgucugccacccugcauaacccaacacgugucaagcucuucgagaaauggggguggaagaagauagccaccauccaacagaccaccgaaguguuuacuaguacacucgacgaucuggaagaaagaguuaaagaagcggguaucgagauaaccuuccgucaauccuucuuuucagauccugcugugcccgugaaaaaucugaaacgccaggacgcccgaauuaucgugggccuguucuacgagacagaagccagaaaaguguuuugcgaaguauacaaggagcggcucuucgggaaaaaauauguaugguuuuuaaucgggugguacgccgacaacugguuuaaaauauaugacccuucuauuaacuguacuguggaugaaaugaccgaggcuguugaaggacauaucacuacagagauugugaugcugaacccagcuaauaccaggagcauaucaaacaugacuucacaggaauucguagagaaacuuaccaaacgguugaaaagacacccggaagaaacugguggcuuccaggaagcaccccucgcguacgaugcaaucugggcuuuggcccuagcucuuaacaagacuagcggagggggcggcagaucaggaguucggcuggaagauuuuaauuauaacaaucaaaccaucacugaccagauuuacagggccaugaauagcuccagcuucgaaggcguguccggccacgugguauucgacgccucaggaaguaggauggccuggaccuugauugagcagcuacagggagggucuuacaaaaaaauugguuacuacgacagcacuaaggacgaucuaucauggagcaaaacugacaaauggaucgguggaagcccgcccgccgaccagacucuggugaucaaaacuuuucgguuuuugucucagaaauuauucaucuccguuuccguguugaguaguuuaggaauaguauuggcuguugucugucucagcuucaacaucuauaacagucacgucagauauauccaaaacucacagccuaaccuaaacaaccugacugcaguggggugcagccuggcacuagcagcuguguuccccuugggccuugacggauaccauaucggaagaaaccaguuccccuuuguaugccaggcccgucucuggcugcugggauuaggauuuucccugggcuacggcucaauguuuacuaaaauuugguggguccacacugucuuuacuaaaaaagaggaaaagaaggaauggcggaagacccuggaaccauggaaacuguaugcaacaguagggcuuuugguggguauggacguguugaccuuggcaauuuggcagaucguugauccccuucaccguacuauugaaacuuuugccaaagaagagccaaaagaagauauugacgugagcauucugccacagcuggaacauuguaguucucgcaaaaugaacacauggcuggguauuuucuacgguuacaaaggacucuugcuuuuacuagggaucuuucuggcauacgaaaccaaaagugugaguacagaaaaaauaaacgaucaucgcgcuguaggcauggcuauauacaacguggcaguucugugucuaauuacugcccccgucaccaugauucuuucuagccaacaggaugccgccuucgcuuuugccucacuggcaaucguguuuucauccuauaucacacuugucgugcuguucguacccaaaaugcgcaggcugaucacccggggugaauggcagucagaggcccaggauacuaugaagaccgggagcucaaccaacaauaacgaggaagaaaaaucacggcugcuggaaaaagagaauagagaacuggaaaagaucaucgccgagaaagaagagaggguuucagaauuaaggcaccaacuccagucacggcagcaacuaagguccagacgccaccccccaacuccuccagagccgagcggaggcuugcccagagguccuccggaaccuccugauagacuguccugcgacggaucucgcgugcacuugcucuauaaguag

SEQ ID NO: 210068 - RNA, 2535 nt, Artificial Sequence
  derived and/or modified sequence
augggccccggcgcaccauucgcucgagugggcuggccucuuccccuccuuguggucauggcagcuggggucgcucccguaugggcaucucacucuccgcaccuuccuaggccucacucuagagugccaccccaccccucgucugaacgcagggcuguauacauaggcgcccucuucccuaugaguggaggauggcccggcggacaagcuugccaaccagcgguugagauggcucucgaagacgugaauucacggcgugacauucuaccugauuacgaacucaagcucauccaccacgacagcaaaugugacccagggcaggcuacgaaauauuuauacgaguuauuauacaacgacccuaucaagauaauuuugaugccuggcuguuccucuguguccacguuaguggccgaagcagcuagaauguggaaccuuaucgugcuuuccuacggcuccucaucaccggcccuuaguaaccgccagagauuuccuacuuuuuucagaacgcacccaucagcuacccuacauaaucccacgcgggugaaguuauuugaaaaauggggauggaaaaagaucgccacaauacaacagaccaccgagguuuuuacuuccacguuagacgaucuugaagagagagucaaggaagccggcauugagauuacauucaggcaaagcuuuuuuagcgaccccgcaguucccguuaagaaucuaaagagacaggacgccagaaucauagugggucuguucuacgaaaccgaggcacguaagguguuuugcgaaguguacaaggagcgguuguucggaaaaaaauaugugugguuucugauaggaugguacgcagauaacugguuuaagauuuaugaccccuccaucaacugcacagucgaugaaaugaccgaggcagucgagggacacaucaccacggaaauugugauguugaacccugcaaauacccggucuaucagcaacaugacuucacaggaauucguugagaagcugacuaagcgauuaaagagacacccagaagaaacagguggguuccaggaggcuccacuggcauaugaugcgauuugggcccucgcauuagcccugaacaaaacuucuggaggcggaggcagaagcggggugcgccuggaggacuuuaacuacaacaaucaaacaaucacagaucagaucuaucgcgccaugaauucuagcucauuugaaggcgucucugggcauguuguguuugaugccucugguagcaggauggcuuggaccuuaauagaacaacugcagggugguagcuacaagaagauuggcuacuaugauucaacaaaagaugaucuauccuggaguaagacggauaaauggauuggaggcucuccaccugccgaucaaacacuaguuauuaaaacauuccgauuucugagccaaaagcucuucaucuccguuucagugcucagcuccuuaggcaucguguuagcggugguuugccugaguuuuaauaucuacaauucacaugugagauacauucaaaauucucaacccaaucuuaauaaccugacugcuguugguugcucucucgcauuagccgcuguguuuccacucgggcuagauggauaccauauagguaggaaccaguucccguucgugugucaggcucgcuuauggcuacuuggacucggauucuccuugggguauggauccauguucacaaagaucugguggguucauacuguguuuaccaaaaaagaagaaaagaaagaauggcgaaagacacuggagcccuggaagcuguaugccaccgugggccuccuaguagggauggauguccucacucuugcaaucuggcaaauaguggacccccugcaccggaccauugagaccuuugcaaaagaagaaccaaaagaagauauugacguguccauucugccccaauuggaacacuguagcagcagaaagaugaacaccuggcugggaauauuuuauggauauaagggguugcugcuguuacugggaauauuuuuagcauacgagaccaagagcgucaguacagaaaagauuaacgaccauagggcugugggaauggcaaucuauaacguggccgucuuaugccugauaacagcucccgugaccaugauucucuccucacagcaggacgcagccuuugccuucgcuucccuggccauugucuuuuccucauacaucacacuugucguguuguucguccccaagaugcggaggcuuauuacccguggcgaauggcagagugaggcccaggauaccaugaagacaggaucuaguacuaacaacaacgaagaagaaaaaagcagacuuuuggaaaaagagaaccgcgaauuggagaaaaucauugcagagaaagaggaacgcguauccgagcuucgccaucaguugcagagccgccagcagcugcguucucgcaggcacccucccaccccucccgaaccauccggcggacuccccaggggcccuccagaaccuccagauaggcucucuugcgacggaucuagaguacaccuccuguauaaguag

SEQ ID NO: 210069 - RNA, 2535 nt, Artificial Sequence
  derived and/or modified sequence
augggacccggugcccccuucgcccgcguuggguggccccugccucugcuggucgugauggcugcaggagucgcucccgugugggccucccauucuccucaucugccccgcccucacagccgagucccaccucauccgucaagcgagagacgggcgguuuauauuggugcccuguuccccaugucgggcggauggcccgguggucaggcuugucaacccgcagucgagauggcccuagaagacguuaacuccaggcgcgauauccuucccgauuacgaacugaagcugauacaccaugacagcaaaugcgacccuggucaagcaacaaaauaucuuuacgagcuacuguacaacgauccuaucaaaauuauccugaugccgggcugcagcuccgugaguacucuagucgccgaagccgcaagaauguggaaucugaucguccuuaguuauggcagcaguucucccgcuuuaucuaauagacagcguuuccccaccuuuuuccggacacacccaucugcaacuuugcauaaucccacacgcgugaagcucuucgagaaguggggcuggaaaaaaaucgcaaccauucaacagacuacggagguauucacuucaacacucgacgaccucgaggaacgagucaaggaggcugggaucgaaaucaccuuuaggcaaucauucuucagugacccagcaguuccuguaaaaaaccugaagagacaagacgcgcggauuauuguaggccuguuuuaugagaccgaggccagaaagguauucugugaaguguacaaagagagacuguucggaaaaaaguacgugugguuccugaucggaugguaugcagacaacugguuuaagaucuaugaucccucaaucaauuguacaguagaugaaaugaccgaagccgucgagggccauauaacgaccgaaauagucaugcuaaacccugcaaauaccagaagcauuucaaauaugacgagucaagaauuugucgagaaguuaacaaagcgacugaagagacaucccgaggagacugguggcuuccaagaagcgcccuuagccuaugacgcaaucugggcacuugcccuagccuugaauaagacuucuggugggggagguagaagcggggugcgccuggaagauuucaacuauaauaaccagacaaucacagaccagauauacagagcaaugaacucuagcuccuuugagggugucaguggucaugugguguucgacgcuucgggaucuaggauggccuggacucuaauagaacaacugcagggggguucuuauaagaagauugguuacuaugauucaacuaaggacgaucucucuuggucgaagacagauaaauggaucggaggcucaccacccgcugaccagacucuugugauuaagaccuuuagauucuugucgcaaaaacuguucaucucagucagcguguugucuuccuugggcaucgugcucgccgucgugugcuuaagcuuuaauauuuauaacucccacgugagguauauccaaaauagucaaccaaaucucaauaaucucacagcaguugguuguuccuuagcguuggcugcuguguucccccuaggauuagacggguaccauaucggaaggaaucaguucccauuuguuugccaggcucgguuauggcugcucggacuuggcuuuucacucggcuacggcucuauguucaccaagaucugguggguucacacaguguuuaccaagaaagaggaaaagaaagaguggagaaaaacucucgaaccauggaaauuguaugccacggugggccugcuggugggaauggauguccugacacuggcuauuuggcagauuguggacccccugcacagaacaaucgagacauuugcaaaggaggaaccuaaagaggauaucgacgucagcauucugccucagcuugaacacugcuccucacguaagaugaauaccuggcugggaaucuucuacgguuacaaaggacuacugcuccuucugggaaucuuucuagcuuacgaaaccaagagugugaguacugagaaaauuaacgaccauagggcuguuggcauggcaaucuacaauguggcggugcuuuguuugauuacggcuccuguuaccaugauccucuccagccagcaggacgcagccuuugccuuugccucccucgccauuguuuuuucuuccuacaucacuuuaguugugcuguucguacccaagaugcgccgacuuaucacaaggggagaauggcaaagcgaagcccaggacacaaugaagacuggcucauccaccaauaauaacgaagaagaaaagaguagacuguuagagaaggaaaauagagaguuagagaagauuauagcagaaaaagaagagcgcguuuccgaauugcgacaccagcuucagucgcgccaacaacuaagaucaaggagacacccaccaaccccgccagagcccucagguggacuccccaggggcccucccgaaccccccgacagacuuuccugcgaugguagccgagugcauuugcuauauaaauag

SEQ ID NO: 210070 - RNA, 2535 nt, Artificial Sequence
  derived and/or modified sequence
augggaccuggagccccguucgcccguguuggcuggccucuaccucugcuggucguaauggcugcaggcguugccccugucugggccagccacagcccucaucucccaagaccucacuccagagugccaccucacccuuccuccgaaaggcgugccgucuacaucggugcucuguuccccaugucaggcggcuggcccggcggucaggcuugccaaccagccgucgagauggcucuggaggacgugaauucaagacgcgauauucugccagauuacgaacucaagcugauucaucacgacaguaaaugcgaucccggucaagcgacgaaauauuuguaugaacugcuuuacaaugaucccauuaagaucauucugaugccggguuguucuucaguaucaacucugguugcagaagccgcgcggauguggaacuuaauuguccucucuuacgguucauccuccccugcucugaguaaucgacaacgguuuccuacuuucuuuagaacgcacccuucagccacucuccacaacccuacuagaguaaagcuguuugagaaguggggauggaagaagaucgcaacaauucagcagacaacagagguuuucacuucaacauuagacgaccuggaggagagagucaaagaggcgggaauugaaauuaccuuuagacagucauucuuuagcgaccccgcugucccugugaagaaccugaaaaggcaagacgcuagaaucaucgucggcuuguuuuacgaaaccgaagcuagaaagguauuuugugaagucuacaaggagcgguuguuuggaaaaaaguacguuugguuucugauuggaugguacgcugacaauugguuuaagaucuacgacccauccaucaauuguacgguagacgagaugacagaggcaguagagggucauauaaccacagaaauugugauguugaauccggcaaacacuagaaguaucucuaacaugacuagucaggaguucgucgaaaaacucaccaaaaggcuuaagcggcaccccgaggaaaccggaggcuuccaggaagccccuuuggcauacgaugcaauuugggcccuggcacucgcucucaacaagacuuccgguggcgguggucgguccggcgucagacucgaggauuuuaacuacaauaaccagacaauaacagaucagauuuaccgggcuaugaacagcuccagcuuugagggaguaucagggcacgucguuuuugacgcgucagguagccgcauggcuuggacccugaucgaacaguuacaaggaggcucuuauaagaaaaucgguuacuaugauagcaccaaagaugacuugucaugguccaagacagacaaguggauaggaggcucaccaccugcugaccagacucucgugaucaaaacauuuagauucuuaucccaaaaauuguuuauaucugugucggucuuguccucccugggcauugugcuugccguggugugucuuagcuuuaauaucuacaacagccacguacguuauauccaaaauucccagcccaaccucaauaaucuaaccgcaguagguugcagucuggcacucgccgcagucuuuccccugggucuggacggcuaucauauuggaagaaaucaguuccccuuugugugucaagcccgucuguggcuuuugggccuugguuuuucucuggguuacgguuccauguucacaaagauauggugggugcauacgguguuuacuaaaaaggaagagaagaaagaauggcguaagacccuggagccuuggaagcucuacgcaacagucggucuguuggucggcauggacgugcuuacucucgcuauauggcaaauaguugacccucugcacaggaccaucgaaaccuuugcaaaagaagagcccaaagaagauaucgauguguccauccuuccucaguuggaacacugcaguucucgcaaaaugaacacuuggcucggcaucuuuuaugguuacaagggucuauuacugcuuuuaggaauuuuccuggcuuaugaaacuaaaucaguuagcacagaaaaaauuaacgaccauagagcagucggcauggcaauuuacaaugucgcaguucuuugucugauuacggcucccgucacuaugauucugucgucucagcaggaugcagcguucgcuuucgccagccuggcuaucguguuuaguuccuacaucacguuggucguuuuguucgugccuaagaugagacguuugauuacccggggcgaguggcaaucagaagcacaagacacaaugaaaaccggaaguuccacgaacaacaaugaagaagagaagagucgacugcuggaaaaagaaaauagagaguuggaaaagaucaucgcugaaaaggaggaaaggguguccgagcugcggcaucaguuacaaagccgccaacagcuaagaucuagacgccauccaccuaccccuccugaaccuagcggcggauuacccagaggaccaccagagcccccugauagacugucuugcgaugggaguagagugcauuuacuguacaaauag

SEQ ID NO: 210071 - RNA, 2535 nt, Artificial Sequence
  derived and/or modified sequence
augggacccggcgccccauucgcacgcguuggauggccccucccacuucugguggucauggcugcuggaguggcucccguuugggccucucacuccccccaccuaccucgcccacauucuaggguccccccccauccuucgagcgaaagaagggcugucuacauaggcgcucuguucccaaugucuggcggcuggccuggcgggcaggcuugccaaccugcagucgaaauggcucucgaggaugucaacucccggcgcgauauccucccagauuaugaacuuaaacugauacaucaugauucuaagugugaccccggccaagccacuaaguaucuuuaugaacuacuuuacaaugacccuaucaagaucauccugaugcccggauguaguuccgucagcacacuugucgccgaagcugcacgcauguggaaccuuauaguacucagcuacgguuccucuuccccugcccucuccaaucgacaacgguuuccaacuuucuuucgaacucaccccuccgccacccugcacaacccaaccagagucaaguuguucgaaaagugggguuggaagaaaauagccaccauucagcaaacuaccgaaguauucacaagcaccuuagaugaucuggaggaacgggugaaggaggccggaauagagaucacauucagacaaagcuuuuuuagcgacccggccgugcccgugaaaaaccugaaaagacaagacgccagaauuauaguuggacuuuucuaugagacugaggcucgcaaagucuucugugaaguguauaaagagagacucuucggcaaaaaguacgugugguuccugauaggcugguaugccgauaacugguucaaaaucuacgaucccuccaucaacugcaccgucgacgaaaugaccgaggcugucgagggacacauuaccacugagauagugaugcugaaccccgccaacacucgaagcauuaguaauaugacaucacaggaguuuguggaaaaacuaacuaaacgacuaaagagacaccccgaagagacaggcggcuuucaagaagccccccuggcauaugacgcuaucugggcucuggcauuggccuugaacaagaccuccgggggcgguggccggagcggcgugcggcuagaagacuuuaacuacaacaaucaaaccaucaccgaccagauuuacagagcaaugaacucaucaagcuucgagggagugagcggucauguuguuuuugacgcuagugguucccggauggccuggaccuugauugaacagcuccagggcggaucauacaaaaagaucggguauuacgauuccacuaaagacgaccucaguugguccaagacggacaaauggaucggaggauccccacccgcggaucagacacuuguuauaaaaaccuucagauuucucucccaaaagcucuucaucagcgugagugugcugucaucccucggcauuguccucgccgucguuugccugucuuuuaauauuuauaacucccauguucgcuacauccaaaauucacaaccaaaucuuaauaaucuaacugcagucggcugcucccuggcucucgcugcuguguuuccacugggacuggaugguuaccacauuggacggaaucaguucccauucgugugucaggcucgccuaugguuacuggggcucggcuuuagccugggcuacgggucuauguucacaaaaaucugguggguucauacaguuuucacuaaaaaggaggagaaaaaagaauggcguaaaacacuagaacccuggaaacucuacgcuacggucggccuacucgugggcauggacguucugacacuggcuauauggcagauugucgacccccuccaccgcacaauugaaacauuugccaaagaggaaccaaaagaggauauagacgucuccauucuuccccaguuagaacacugcucuaguagaaaaaugaauacauggcuagguauuuucuacggauacaagggacuuuuacugcucuuagguauuuuccuggccuaugaaacuaaaucuguuucaacggagaagauaaaugaucaucgcgcagugggcauggcgaucuacaacguggcugucuugugccugauaacagcccccguuacaaugauccucagcagccaacaagacgccgcauucgcauucgcuucccuggccauuguuuucucuuccuauauuacacucgugguguuguuuguccccaagaugcggcgcuuaauuacccgcggcgaguggcagagugaggcucaggacaccaugaagacaggcucgaguacuaacaacaacgaggaagagaagucgcgauuacucgaaaaagaaaacagagaacuggagaaaauuauugccgaaaaggaggaaagaguuuccgaacugagacaccaguugcagagcagacagcaguugagaaguagacggcaccccccaacuccuccagaaccuaguggagggcugccuagaggcccacccgaaccacccgauagauugucuugcgauggaagucgugugcaucuuuuguacaaguag

SEQ ID NO: 210072 - RNA, 2535 nt, Artificial Sequence
  derived and/or modified sequence
auggggcccggcgcuccuuuugcccgagugggauggccacuuccccuauuagucgugauggcugcuggagucgcccccgugugggccucccacucaccgcacuuaccucgcccccacucccgaguucccccacacccuuccucggagaggcgcgcaguuuacaucggcgcuuuguuccccauguccggggguuggcccgggggccaagccugccaaccggcugucgaaauggcauuggaagacgucaauucucgucgugacauccugccugacuaugaacuaaaacucauccaccacgacuccaaaugugacccaggacaagccaccaaguaucucuaugaauuacuguacaaugaucccauuaaaauaauacuaaugccaggaugcagcucugucucgacucuuguggcugaagccgcuagaauguggaaucuaaucguccugucuuauggauccagcagcccagcccuauccaaccgacaaagauucccuacauuuuucagaacacaucccuccgcaacacugcacaauccuacccgcguuaagcuuuucgagaaguggggauggaaaaagaucgccaccauccagcaaacuaccgagguguucacuaguacccuggacgaucuggaggagagggugaaggaagccgggaucgaaauuacuuuuagacagucauucuucagcgaccccgcuguacccguuaagaaucucaagaggcaggacgcucgaauuauaguaggucuuuucuaugaaacugaagcgaggaaaguuuuuugcgaggucuauaaagaacgucucuucggaaagaaauaugucugguuccugauagguugguaugccgauaauugguucaagaucuacgaccccucuauaaauuguaccgucgaugagaugaccgaagccguggaggggcacauuacgaccgaaauugucaugcucaauccagccaacacacguuccauuaguaacaugacuagccaggaguucgucgaaaaacuuacuaagagacugaagcggcacccugaagagaccggcggguuccaagaagcuccccucgcuuacgaugcuaucugggccuuagcucuagccuugaauaagacuagcgguggcggugguaggaguggagugcgccuugaggauuuuaauuauaacaaccagacaaucacagaucagaucuaucgcgccaugaauagcucgucauucgaaggcguuuccggccacgugguguuugacgccaguggcucacgaauggcauggacacugauugagcagcuucagggcggcaguuacaaaaagaucgguuacuacgacuccacuaaggacgauuuaucuuggucaaagaccgacaaguggaucggaggaagccccccagcagaucagacccuugugauuaaaaccuuuagauucuugagccaaaaguuauuuauauccguguccguacuuucaucucucggcauuguccucgcuguggugugucuguccuuuaauaucuacaauucccacgugcgcuacauucagaauucccaaccuaacuuaaacaaucugacugcgguggguuguagccuggcgcuggccgcaguguuuccccuugggcucgacggcuaccacauaggcaggaaccaguuucccuuuguaugccaagcgcgucucuggcuucuuggccuaggauuuucauugggguauggaucaauguucacaaaaaucuggugggugcacaccguguucacuaagaaagaagaaaaaaaggaguggagaaagacacuggaacccuggaaacucuacgcuacaguaggguuauuggugggcauggauguguugacccuggcaauauggcagaucguagacccccugcaccgaacaauugagacauucgccaaggaagaacccaaagaagauaucgacgugucaauacugccccaacuugaacacuguucuagcaggaaaaugaauacuuggcuaggaauuuuuuauggauacaaaggguuauuauuguugcugggcauuuuucuggccuaugagacaaaaagcgugaguaccgagaagauuaaugaucaccgcgcaguggggauggccauuuacaacguagcuguccuguguuugaucaccgcuccaguaacuaugauccuuucuagccagcaagacgccgcuuucgccuucgcaucccuggcuaucguguucucuaguuacaucacucugguuguacuguuuguacccaaaaugcggcgacuuauaacucgaggagaguggcagagugaggcccaagacaccaugaagacagggagcaguaccaacaacaacgaagaagagaaaagucgccuguuagagaaagagaaucgagagcuggaaaagauuauugcagagaaggaagaacgagugucagaacucaggcaucaguuacagucuagacaacaacuacgaucccgaagacauccuccaacuccacccgaaccaagugggggacugccucgaggcccuccagagcccccagauagacucuccugcgaugguucccgcgugcaucuccuauacaaguag

SEQ ID NO: 210073 - protein, 899 aa, Artificial Sequence
  derived and/or modified sequence
MLLLLLLAPLFLRPPGAGGVQTPNATSEGCQIIHPPWEGGIRYRGLTRDQVKAINFLPVDYEIEYVCRGEREVVGPKVRKCLANGSWTDMDTPSRCVNRTPHSERRAVYIGALFPMSGGWPGGQACQPAVEMALEDVNSRRDILPDYELKLIHHDSKCDPGQATKYLYELLYNDPIKIILMPGCSSVSTLVAEAARMWNLIVLSYGSSSPALSNRQRFPTFFRTHPSATLHNPTRVKLFEKWGWKKIATIQQTTEVFTSTLDDLEERVKEAGIEITFRQSFFSDPAVPVKNLKRQDARIIVGLFYETEARKVFCEVYKERLFGKKYVWFLIGWYADNWFKIYDPSINCTVDEMTEAVEGHITTEIVMLNPANTRSISNMTSQEFVEKLTKRLKRHPEETGGFQEAPLAYDAIWALALALNKTSGGGGRSGVRLEDFNYNNQTITDQIYRAMNSSSFEGVSGHVVFDASGSRMAWTLIEQLQGGSYKKIGYYDSTKDDLSWSKTDKWIGGSPPADQTLVIKTFRFLSQKLFISVSVLSSLGIVLAVVCLSFNIYNSHVRYIQNSQPNLNNLTAVGCSLALAAVFPLGLDGYHIGRNQFPFVCQARLWLLGLGFSLGYGSMFTKIWWVHTVFTKKEEKKEWRKTLEPWKLYATVGLLVGMDVLTLAIWQIVDPLHRTIETFAKEEPKEDIDVSILPQLEHCSSRKMNTWLGIFYGYKGLLLLLGIFLAYETKSVSTEKINDHRAVGMAIYNVAVLCLITAPVTMILSSQQDAAFAFASLAIVFSSYITLVVLFVPKMRRLITRGEWQSEAQDTMKTGSSTNNNEEEKSRLLEKENRELEKIIAEKEERVSELRHQLQSRQQLRSRRHPPTPPEPSGGLPRGPPEPPDRLSCDGSRVHLLYK

SEQ ID NO: 210074 - protein, 899 aa, Artificial Sequence
  derived and/or modified sequence
MLLLLLLAPLFLRPPGAGGAQTPNATSEGCQIIHPPWEGGIRYRGLTRDQVKAINFLPVDYEIEYVCRGEREVVGPKVRKCLANGSWTDMDTPSRCVNRTPHSERRAVYIGALFPMSGGWPGGQACQPAVEMALEDVNSRRDILPDYELKLIHHDSKCDPGQATKYLYELLYNDPIKIILMPGCSSVSTLVAEAARMWNLIVLSYGSSSPALSNRQRFPTFFRTHPSATLHNPTRVKLFEKWGWKKIATIQQTTEVFTSTLDDLEERVKEAGIEITFRQSFFSDPAVPVKNLKRQDARIIVGLFYETEARKVFCEVYKERLFGKKYVWFLIGWYADNWFKIYDPSINCTVDEMTEAVEGHITTEIVMLNPANTRSISNMTSQEFVEKLTKRLKRHPEETGGFQEAPLAYDAIWALALALNKTSGGGGRSGVRLEDFNYNNQTITDQIYRAMNSSSFEGVSGHVVFDASGSRMAWTLIEQLQGGSYKKIGYYDSTKDDLSWSKTDKWIGGSPPADQTLVIKTFRFLSQKLFISVSVLSSLGIVLAVVCLSFNIYNSHVRYIQNSQPNLNNLTAVGCSLALAAVFPLGLDGYHIGRNQFPFVCQARLWLLGLGFSLGYGSMFTKIWWVHTVFTKKEEKKEWRKTLEPWKLYATVGLLVGMDVLTLAIWQIVDPLHRTIETFAKEEPKEDIDVSILPQLEHCSSRKMNTWLGIFYGYKGLLLLLGIFLAYETKSVSTEKINDHRAVGMAIYNVAVLCLITAPVTMILSSQQDAAFAFASLAIVFSSYITLVVLFVPKMRRLITRGEWQSEAQDTMKTGSSTNNNEEEKSRLLEKENRELEKIIAEKEERVSELRHQLQSRQQLRSRRHPPTPPEPSGGLPRGPPEPPDRLSCDGSRVHLLYK

SEQ ID NO: 210075 - protein, 188 aa, Artificial Sequence
  derived and/or modified sequence
MIEESGNKRKTMAEKRQLFIEMRAQNFDVIRLSTYRTACKLRFVQKRCNLHLVDIWNMIEAFRDNGLNTLDHTTEISVSRLETVISSIYYQLNKRLPSTHQISVEQSISLLLNFMIAAYDSEGRGKLTVFSVKAMLATMCGGKMLDKLRYVFSQMSDSNGLMIFSKFDQFLKEVLKLPTAVFEGPSFG

SEQ ID NO: 210076 - protein, 627 aa, Artificial Sequence
  derived and/or modified sequence
MIEESGNKRKTMAEKRQLFIEMRAQNFDVIRLSTYRTACKLRFVQKRCNLHLVDIWNMIEAFRDNGLNTLDHTTEISVSRLETVISSIYYQLNKRLPSTHQISVEQSISLLLNFMIAAYDSEGRGKLTVFSVKAMLATMCGGKMLDKLRYVFSQMSDSNGLMIFSKFDQFLKEVLKLPTAVFEGPSFGYTEHSVRTCFPQQRKIMLNMFLDTMMADPPPQCLVWLPLMHRLAHVENVFHPVECSYCRCESMMGFRYRCQQCHNYQLCQNCFWRGHAGGPHSNQHQMKEHSSWKSPAKKLSHAISKSLGCVPTREPPHPVFPEQPEKPLDLAHIVPPRPLTNMNDTMVSHMSSGVPTPTKRLQYSQDIPSHLADEHALIASYVARLQHCARVLDSPSRLDEEHRLIARYAARLAAEAGNVTRPPTDLSFNFDANKQQRQLIAELENKNREILQEIQRLRLEHEQASQPTPEKAQQNPTLLAELRLLRQRKDELEQRMSALQESRRELMVQLEELMKLLKEEEQKQAAQATGSPHTSPTHGGGRPMPMPVRSTSAGSTPTHCPQDSLSGVGGDVQEAFAQGTRRNLRNDLLVAADSITNTMSSLVKELHSAEEGAEEEEEKMQNGKDRG

SEQ ID NO: 210077 - DNA, 1884 bp, Artificial Sequence
  derived and/or modified sequence
atgatagaagagtccggaaacaagcgtaaaaccatggcggaaaagcgtcagctctttatcgagatgagggcccagaactttgacgttatacgcctgagcacttaccggactgcttgtaaattgagatttgtccagaagcgctgtaacctgcacctcgtcgacatctggaacatgattgaggcattccgtgacaatggccttaacactctggatcataccacagagatttccgtcagcaggctggaaacggtcattagttccatttattatcagctgaataagcgcctcccttctacccaccaaatctccgtggagcagtccatcagccttctcctgaactttatgattgccgcctatgactccgagggccgtgggaaattaactgtgttctctgttaaggccatgctggccactatgtgcggcggtaaaatgttagacaagctcagatatgttttctcacagatgagtgactccaatggactgatgattttctcaaagttcgaccagtttctgaaagaggttttgaagctccctacagctgtgtttgaaggtccctccttcgggtatacggagcattctgtaagaacatgtttcccgcagcagaggaagatcatgctgaatatgtttctggacacgatgatggccgaccccccgccacagtgcctcgtctggttgccgctgatgcacaggctggcacatgtagagaacgttttccaccccgttgagtgctcttactgccggtgtgagagtatgatggggttcaggtatagatgccaacaatgtcacaattaccagctgtgtcaaaactgtttctggcgaggacacgccgggggaccacacagcaatcagcaccagatgaaggagcatagttcttggaaatcccctgcaaaaaagctgtcccatgcaatctctaagagtctcggctgtgtgccaactcgggaaccccctcaccctgtgtttccagagcagcccgagaaaccactggacttagcccatattgtaccacctcgaccattaactaatatgaatgacactatggtcagccacatgtccagtggagtccctacacccactaaaaggctgcaatacagccaagatatcccttcgcatctcgcggacgaacatgcgctgatagcctcttacgtggcccgcctgcaacattgtgcacgcgtgctggacagcccctcccgcctggatgaggagcaccgccttatcgccagatatgcggcgaggctcgcggccgaagccggtaatgtgacgcgaccgcctaccgatctctcgtttaacttcgacgcgaataagcagcagcgacagctcattgccgagctcgagaataaaaatcgcgagatcctgcaagaaattcaaaggctgcgccttgaacacgaacaggctagccagcctacacccgagaaggcccagcaaaatcctaccctcctggccgagttgagactgctgaggcagcggaaagacgagctggagcaacggatgtccgcactccaggagagtcgcagggagcttatggtgcagctggaggagttaatgaagttgttaaaagaggaggaacaaaaacaggctgcacaggccactggtagccctcacacctcgcctacacacggaggtggccggccaatgcctatgccggtcaggtctacaagtgcggggagcaccccaacacactgccctcaggactctttgtccggggttggcggagatgtccaggaggccttcgctcaagggacacgccggaatcttagaaacgacttattagtcgctgcggactctattacaaatacgatgagcagtttggttaaagaactccacagcgccgaagaaggcgccgaggaggaggaagagaagatgcagaacggcaaagaccgcgggtag

SEQ ID NO: 210078 - DNA, 1884 bp, Artificial Sequence
  derived and/or modified sequence
atgattgaggagagcggcaacaagaggaagaccatggccgagaagaggcagctgttcatcgagatgagggcccagaactttgatgtgatccggctgagcacctacagaacagcctgcaagctgcgctttgtgcagaagcgctgcaacctgcacctggtggacatctggaacatgattgaggccttccgggacaatggcctgaacaccctggaccacaccacagagatctctgtgtcccggctggagaccgtcatcagcagcatctactaccagctgaacaagaggctgcccagcacccaccagatctctgtggagcagagcatcagcctgctgctgaacttcatgattgctgcctatgattctgagggccggggcaagctgaccgtcttctctgtgaaggccatgctggccaccatgtgtggcggcaagatgctggacaagctgcgctacgtgttcagccagatgtctgacagcaatggcctgatgatcttcagcaagtttgaccagttcctgaaggaggtgctgaagctgcccacagctgtgtttgagggccccagctttggctacacagagcacagcgtgaggacctgcttcccccagcagaggaagatcatgctgaacatgttcctggacaccatgatggctgaccccccaccccagtgcctggtgtggctgcccctgatgcaccggctggcccacgtggagaatgtgttccaccctgtggagtgcagctactgccgctgtgagagcatgatgggcttccgctaccgctgccagcagtgccacaactaccagctgtgccagaactgcttctggaggggccacgccggcggcccccacagcaaccagcaccagatgaaggagcacagctcctggaagagccctgccaagaagctgagccacgccatcagcaagagcctgggctgtgtgcccacccgggagcccccccaccctgtgtttcctgagcagcctgagaagcccctggacctggcccacatcgtgcccccccggcccctgaccaacatgaatgacaccatggtgagccacatgagcagcggcgtgcccacccccaccaagaggctgcagtacagccaggacatccccagccacctggctgatgaacatgccctgattgccagctatgtggcccggctgcagcactgtgcccgggtgctggacagccccagccggctggatgaggagcaccggctgattgcccgctatgctgcccggctggccgctgaggccggaaatgtgacccggcccccaacagacctgtccttcaactttgatgccaacaagcagcagaggcagctgattgctgagctggagaacaagaaccgggagatcctgcaggagatccagaggctgcggctggagcacgagcaggccagccagcccaccccagagaaggcccagcagaaccccaccctgctggccgagctgcggctgctgcggcagaggaaggatgagctggagcagaggatgtctgccctgcaggagagcagaagagagctgatggtgcagctggaggagctgatgaagctgctgaaggaggaggagcagaagcaggccgcccaggccaccggcagcccccacaccagccccacccacggcggcggccggcccatgcccatgcctgtgcgcagcaccagcgctggcagcacccccacccactgcccccaggacagcctgagcggcgtgggcggagatgtgcaggaggcctttgcccagggcaccaggaggaacctgagaaatgacctgctggtggccgctgacagcatcaccaacaccatgagcagcctggtgaaggagctgcacagcgctgaggagggcgctgaggaggaggaggagaagatgcagaatggcaaggaccggggctag

SEQ ID NO: 210079 - DNA, 1884 bp, Artificial Sequence
  derived and/or modified sequence
atgatcgaggagagcggcaacaagcggaagaccatggccgagaagcgccagctcttcattgaaatgcgcgctcagaactttgatgtcattcgcctttccacttacagaacagcctgtaaactgaggttcgtgcagaagaggtgcaatctccatctggtggacatctggaacatgatcgaggcgtttcgcgataacggactcaatacacttgaccatactacggaaatatctgtcagccgtctggaaactgtgataagttctatctattatcagctcaataaaagactaccgagcacccaccaaatttcggtcgaacaatcaatctccctgttgttgaacttcatgatcgccgcctacgacagtgagggtcgtggcaagctgacggtgttcagcgtgaaggctatgcttgccaccatgtgtggaggcaagatgctggataagctccggtacgtattctcacaaatgtctgacagcaatgggctaatgattttctcaaagtttgatcagttcctgaaggaggttctgaagctgcctactgcggtttttgaagggccaagctttggatataccgagcatagcgttcgtacctgttttcctcagcagagaaagattatgctaaatatgtttctcgatacaatgatggccgaccctcccccccagtgtttagtgtggcttcctctgatgcaccggctcgcacatgtggagaatgtgttccatcctgtcgagtgcagctattgtcgctgcgagagcatgatgggcttccgatataggtgccagcagtgtcacaactatcagctctgtcaaaattgtttctggaggggacatgcaggagggccacatagcaaccagcatcagatgaaggagcactcttcatggaagtctccagctaagaagctctcccatgcaattagcaagtctctggggtgcgttcccactcgagagcctccccaccccgttttccccgaacagccggaaaagcccctcgatctagcccacattgtccccccccgacctttgaccaacatgaatgacacaatggtttcccacatgtcatctggagtccccaccccgacaaagaggttgcagtacagtcaggacatcccaagtcatcttgccgacgagcacgctctgattgccagctacgtcgcccgcctacagcactgcgcgagggtcctcgattcccccagtcggcttgacgaggaacaccgactgattgcacgctatgccgcgcggctcgctgcggaggccggtaacgttactcgcccgccaacagaccttagctttaattttgatgcgaataagcagcagcgtcagcttatagcagagctggaaaataaaaatcgtgaaattctgcaggagatccagcgcctgcggctggagcacgaacaagccagtcagccaacacctgagaaagcccaacagaacccaacccttctggcggaattgcggctgctgaggcagaggaaggacgaactggagcagagaatgagcgccctccaggaatcccgacgcgagttaatggtacagcttgaagaactcatgaagctgctgaaggaggaggagcaaaagcaggcggctcaggccaccggctccccccatacctcgcccacccacggcggaggacgccccatgcccatgcccgtcagatccacttcggccgggagtactccgacccattgtccacaggactctctgtccggagttggcggagatgttcaggaagccttcgcccaggggacccgccgaaatctccgaaacgacttgctggtagccgccgacagcataacaaacaccatgtcttctcttgttaaggagttgcacagcgcagaggagggcgcagaagaggaagaggaaaagatgcagaatggtaaggataggggttag

SEQ ID NO: 210080 - DNA, 1884 bp, Artificial Sequence
  derived and/or modified sequence
atgatcgaagagtccgggaacaagcgcaaaactatggccgagaagaggcaactgtttattgaaatgagagcgcagaactttgacgtaatcagattatcaacatacaggacagcctgcaaactgaggtttgtccagaaacgatgtaacctccacctggttgacatttggaacatgatcgaagcatttcgggacaacggcctgaataccttagaccataccacagagattagcgtttcaaggctggagaccgtgatttcaagcatatattaccaactcaataagcggctgccctcaactcatcagatttcagttgagcagtcgattagccttctccttaatttcatgatcgcagcctatgacagtgagggacgaggaaaacttactgttttttcagtcaaagcgatgttagccactatgtgtggaggaaagatgcttgacaagttgaggtatgtgtttagccagatgtcagactccaatggtctgatgatttttagcaagttcgaccagtttctcaaagaagtcctgaagttaccaactgctgtgtttgaaggcccaagcttcggatacacagagcattcagtgagaacctgcttcccccagcaacgtaagatcatgctgaacatgttcctcgatactatgatggcagaccctccaccccagtgtcttgtttggctcccgctgatgcacagactagcacatgtggagaatgtgtttcatcctgtggagtgctcttactgccgatgcgagtcaatgatgggcttcaggtatcgctgccagcagtgtcacaactatcaattgtgtcagaattgcttttggagggggcacgccggtggccctcattccaatcagcatcaaatgaaggagcactctagttggaaatctcctgcaaagaaacttagccacgcaatcagtaaaagcctgggatgtgtaccgacacgcgagccgccacaccccgtcttccccgagcagcctgaaaagccgttagatctcgcacatatagtgcctcccaggcccttgacaaatatgaatgacacaatggtttcacatatgagctccggggtaccaactcccactaaacgcctccagtattcacaggatattccatctcatctcgctgatgaacacgccctcattgctagctatgtggctcggcttcagcactgtgctcgagttctcgactctccaagccgcctggatgaggaacaccgtctgattgcaaggtacgcagcgaggctggccgctgaagcagggaacgttacgcggccaccgacagacttgtcgtttaatttcgatgcgaacaaacaacaaaggcaactaatcgccgagcttgaaaataagaaccgggagatcctccaggaaatccagcgactaaggctcgaacacgaacaggcatcccaacccacccccgagaaagcacagcaaaaccccactttactggccgagttgagactgctgcgacagaggaaagatgaactcgagcagaggatgtcagccctgcaggaaagtaggcgtgagctgatggttcagttagaagagctaatgaagttgttgaaagaagaggaacaaaagcaggcggctcaggctacagggagccctcacactagccccacccatggaggcggaagacccatgcccatgcccgtccgctcaaccagtgcaggcagcaccccaacccattgtccccaagacagcctctcaggggttggaggcgacgtgcaggaagccttcgcacagggtacgaggcgaaaccttaggaatgaccttcttgttgccgctgacagcataactaatactatgtccagcctggtgaaggagctgcactccgctgaggagggcgctgaggaggaagaggagaaaatgcagaatggcaaagatagaggatag

SEQ ID NO: 210081 - DNA, 1884 bp, Artificial Sequence
  derived and/or modified sequence
atgatcgaggagagcggcaacaagagaaagaccatggccgagaagagacagctgttcatcgagatgagagcccagaacttcgacgtgatcagactgagcacctacagaaccgcctgcaagctgagattcgtgcagaagagatgcaacctgcacctggtggacatctggaacatgatcgaggccttcagagacaacggcctgaacaccctggaccacaccaccgagatcagcgtgagcagactggagaccgtgatcagcagcatctactaccagctgaacaagagactgcccagcacccaccagatcagcgtggagcagagcatcagcctgctgctgaacttcatgatcgccgcctacgacagcgagggcagaggcaagctgaccgtgttcagcgtgaaggccatgctggccaccatgtgcggcggcaagatgctggacaagctgagatacgtgttcagccagatgagcgacagcaacggcctgatgatcttcagcaagttcgaccagttcctgaaggaggtgctgaagctgcccaccgccgtgttcgagggccccagcttcggctacaccgagcacagcgtgagaacctgcttcccccagcagagaaagatcatgctgaacatgttcctggacaccatgatggccgacccccccccccagtgcctggtgtggctgcccctgatgcacagactggcccacgtggagaacgtgttccaccccgtggagtgcagctactgcagatgcgagagcatgatgggcttcagatacagatgccagcagtgccacaactaccagctgtgccagaactgcttctggagaggccacgccggcggcccccacagcaaccagcaccagatgaaggagcacagcagctggaagagccccgccaagaagctgagccacgccatcagcaagagcctgggctgcgtgcccaccagagagcccccccaccccgtgttccccgagcagcccgagaagcccctggacctggcccacatcgtgccccccagacccctgaccaacatgaacgacaccatggtgagccacatgagcagcggcgtgcccacccccaccaagagactgcagtacagccaggacatccccagccacctggccgacgagcacgccctgatcgccagctacgtggccagactgcagcactgcgccagagtgctggacagccccagcagactggacgaggagcacagactgatcgccagatacgccgccagactggccgccgaggccggcaacgtgaccagaccccccaccgacctgagcttcaacttcgacgccaacaagcagcagagacagctgatcgccgagctggagaacaagaacagagagatcctgcaggagatccagagactgagactggagcacgagcaggccagccagcccacccccgagaaggcccagcagaaccccaccctgctggccgagctgagactgctgagacagagaaaggacgagctggagcagagaatgagcgccctgcaggagagcagaagagagctgatggtgcagctggaggagctgatgaagctgctgaaggaggaggagcagaagcaggccgcccaggccaccggcagcccccacaccagccccacccacggcggcggcagacccatgcccatgcccgtgagaagcaccagcgccggcagcacccccacccactgcccccaggacagcctgagcggcgtgggcggcgacgtgcaggaggccttcgcccagggcaccagaagaaacctgagaaacgacctgctggtggccgccgacagcatcaccaacaccatgagcagcctggtgaaggagctgcacagcgccgaggagggcgccgaggaggaggaggagaagatgcagaacggcaaggacagaggctag

SEQ ID NO: 210082 - DNA, 2474 bp, Artificial Sequence
  derived and/or modified sequence
gggcgcgcgcccgcccatccgccctccgccctccgccctcgcgccctcgcgccgggggcgggcgctgcgcgtgccgggcggagaagcggcgcgagccgggcgctgcgaacgttcgccgcgggggtggctccggggcctgagtaggcgctgccgctgcctcagccgagggggctgggccggagcgtgcggaggagtgaggccgcaggagaccttcccgacgacccctgctccggcggggaagtgagcaaggatgattgaggaaagtgggaacaagcggaagaccatggcagagaagaggcagctgttcatagaaatgcgtgctcagaattttgatgtcatacgactatcaacttacagaacagcctgcaaattacgatttgtacaaaaacgatgcaaccttcatcttgttgatatctggaacatgattgaagccttccgagacaatggccttaatacactggaccataccaccgagatcagtgtgtcccgcctcgaaactgtcatctcctccatctactatcagttgaacaagcgccttccttctactcaccaaattagtgtggaacaatctatcagcctcctcctcaactttatgattgctgcatatgacagtgagggccgaggcaagttgacggtattttcagttaaagctatgttagcaaccatgtgtggtggaaaaatgctggacaaattgagatatgttttctcccagatgtcagattccaatggcttaatgatatttagcaagtttgaccagtttctgaaggaagttctgaagctcccaacagctgtctttgaagggccatcttttggttacacagagcactcagtccgcacctgttttccacagcagagaaagataatgctaaatatgtttttagacacaatgatggctgaccctcctccccagtgccttgtctggctacctctcatgcacaggcttgcccatgttgagaatgtcttccatcccgtggagtgctcctactgccgatgtgagagtatgatgggtttccggtaccgatgccagcagtgccacaactatcagctctgccagaattgcttttggcgtggccatgccggcggccctcacagcaaccagcaccagatgaaggagcattcctcttggaaatctcctgcaaagaagctgagccatgcaattagtaaatctttggggtgtgtacccacgagagaacccccgcatcctgtttttcctgagcaaccagagaaaccacttgaccttgcacatatagttcctcctcgccctctgactaatatgaatgacaccatggttagccacatgtcctctggagtgcccactcccaccaagaggttacagtatagccaggatatacccagtcacttggccgatgagcatgcgctgatagcctcctatgtggcccgtctgcagcactgtgcacgtgttctggacagtcctagccgactggatgaggaacaccgtcttatagctcgctatgctgcccggctggctgcagaagcaggaaacgtgactcgtcctcccactgacttgagctttaactttgatgccaacaaacaacaaagacagcttattgcagaactggaaaacaaaaacagagagatcctgcaggagattcagcgtctccgcctggaacacgagcaggcctcccagcccacccctgagaaggcacagcagaaccccacgctgctggcagagctgcggctgctgaggcaaaggaaggatgaactggagcagaggatgtcggccctgcaggagagcaggcgggagctgatggtccagctggaagagctgatgaagttgctgaaggaggaagagcaaaagcaggcagctcaggccacagggtcaccacatacatcgcccacccatggaggcggccggccaatgcccatgccagtgcgctccacgtctgccggctccacccccacccactgtccgcaggactcgctgagcggagtcgggggagacgtgcaggaggccttcgcacaaggtacgaggagaaacctccgcaatgacctgctggtggcagctgactccatcaccaacaccatgtcatccctggtgaaggagctccattcagcagaggaaggtgcagaggaagaagaagagaagatgcagaatgggaaagacagaggttagcagaggagccggacacagaggaagctcaggcacagaggacgaggagcaagctggcgccgacatggcgaaggcaaggtcttcccccagaggcacattcctctccatctttccaccgcacacctggaccaggcttgcaggctgccagacgtcactccacccgccagggagaggggagccagagccggtgggaagcggggaggggctgcgtggcacagctagtgggcctccccctgcacagccctgcatgtactagcaccttcatcactcccctcagggcatggtctcatctccgcatcaggaattcacctggaggttgaaaagagaaaagaaaaagcaccaa

SEQ ID NO: 210083 - DNA, 1495 bp, Artificial Sequence
  derived and/or modified sequence
acccctgctccggcggggaagtgagcaaggatgattgaggaaagtgggaacaagcggaagaccatggcagagaagaggcagctgttcatagaaatgcgtgctcagaattttgatgtcatacgactatcaacttacagaacagcctgcaaattacgatttgtacaaaaacgatgcaaccttcatcttgttgatatctggaacatgattgaagccttccgagacaatggccttaatacactggaccataccaccgagatcagtgtgtcccgcctcgaaactgtcatctcctccatctactatcagttgaacaagcgccttccttctactcaccaaattagtgtggaacaatctatcagcctcctcctcaactttatgattgctgcatatgacagatgttttctcccagatgtcagattccaatggcttaatgatatttagcaagtttgaccagtttctgaaggaagttctgaagctcccaacagctgtctttgaagggccatcttttggttacacagagcactcagtccgcacctgttttccacagcagagaaagataatgctaaatatgtttttagacacaatgatggctgaccctcctccccagtgccttgtctggctacctctcatgcacaggcttgcccatgttgagaatgtcttccatcccgtggagtgctcctactgccgatgtgagagtatgatgggtttccggtaccgatgccagcagtgccacaactatcagctctgccagaattgcttttggcgtggccatgccggcggccctcacagcaaccagcaccagatgaaggagcattcctcttggaaatctcctgcaaagaagctgagccatgcaattagtaaatctttggggtgtgtacccacgagagaacccccgcatcctgtttttcctgagcaaccagagaaaccacttgaccttgcacatatagttcctcctcgccctctgactaatatgaatgacaccatggttagccacatgtcctctggagtgcccactcccaccaagaggttacagtatagccaggatatacccagtcacttggccgatgagcatgcgctgatagcctcctatgtggcccgtctgcagcactgtgcacgtgttctggacagtcctagccgactggatgaggaacaccgtcttatagctcgctatgctgcccggctggctgcagaagcaggaaacgtgactcgtcctcccactgacttgagctttaactttgatgccaacaaacaacaaagacagcttattgcagaactggaaaacaaaaacagagagatcctgcaggagattcagcgtctccgcctggaacacgagcaggcctcccagcccacccctgagaaggcacagcagaaccccacgctgctggcagagctgcggctgctgaggcaaaggaaggatgaactggagcagaggatgtcggccctgcaggagagcaggcgggagctgatggtccagctggaagagctgatgaagttgctg

SEQ ID NO: 210084 - protein, 585 aa, Artificial Sequence
  derived and/or modified sequence
MAEAATGFLEQLKSCIVWSWTYLWTVWFFIVLFLVYILRVPLKINDNLSTVSMFLNTLTPKFYVALTGTSSLISGLILIFEWWYFRKYGTSFIEQVSVSHLRPLLGGVDNNSSNNSNSSNGDSDSNRQSVSECKVWRNPLNLFRGAEYNRYTWVTGREPLTYYDMNLSAQDHQTFFTCDSDHLRPADAIMQKAWRERNPQARISAAHEALEINEIRSRVEVPLIASSTIWEIKLLPKCATAYILLAEEEATTIAEAEKLFKQALKAGDGCYRRSQQLQHHGSQYEAQHRRDTNVLVYIKRRLAMCARRLGRTREAVKMMRDLMKEFPLLSMFNIHENLLEALLELQAYADVQAVLAKYDDISLPKSATICYTAALLKARAVSDKFSPEAASRRGLSTAEMNAVEAIHRAVEFNPHVPKYLLEMKSLILPPEHILKRGDSEAIAYAFFHLAHWKRVEGALNLLHCTWEGTFRMIPYPLEKGHLFYPYPICTETADRELLPSFHEVSVYPKKELPFFILFTAGLCSFTAMLALLTHQFPELMGVFAKAMIDIFCSAEFRDWNCKSIFMRVEDELEIPPAPQSQHFQN

SEQ ID NO: 210085 - protein, 534 aa, Artificial Sequence
  derived and/or modified sequence
MFGTESSLSMFLNTLTPKFYVALTGTSSLISGLILIFEWWYFRKYGTSFIEQVSVSHLRPLLGGVDNNSSNNSNSSNGDSDSNRQSVSECKVWRNPLNLFRGAEYNRYTWVTGREPLTYYDMNLSAQDHQTFFTCDSDHLRPADAIMQKAWRERNPQARISAAHEALEINEIRSRVEVPLIASSTIWEIKLLPKCATAYILLAEEEATTIAEAEKLFKQALKAGDGCYRRSQQLQHHGSQYEAQHRRDTNVLVYIKRRLAMCARRLGRTREAVKMMRDLMKEFPLLSMFNIHENLLEALLELQAYADVQAVLAKYDDISLPKSATICYTAALLKARAVSDKFSPEAASRRGLSTAEMNAVEAIHRAVEFNPHVPKYLLEMKSLILPPEHILKRGDSEAIAYAFFHLAHWKRVEGALNLLHCTWEGTFRMIPYPLEKGHLFYPYPICTETADRELLPSFHEVSVYPKKELPFFILFTAGLCSFTAMLALLTHQFPELMGVFAKAFLSTLFAPLNFVMEKVESILPSSLWHQLTRI

SEQ ID NO: 210086 - protein, 62 aa, Artificial Sequence
  derived and/or modified sequence
MSMFLNTLTPKFYVALTGTSSLISGLILIFEWWYFRKYGTSFIEQVSVSHLRPLLGGVDNNS

SEQ ID NO: 210087 - protein, 87 aa, Artificial Sequence
  derived and/or modified sequence
MSMFLNTLTPKFYVALTGTSSLISGLILIFEWWYFRKYGTSFIEQVSVSHLRPLLGGVDNNSSNNSNSSNGDSDSNRQSVSECKVWR

SEQ ID NO: 210088 - DNA, 1758 bp, Artificial Sequence
  derived and/or modified sequence
atggccgaggccgccaccggcttcctggagcagctgaagagctgcatcgtgtggagctggacctacctgtggaccgtgtggttcttcatcgtgctgttcctggtgtacatcctgagagtgcccctgaagatcaacgacaacctgagcaccgtgagcatgttcctgaacaccctgacccccaagttctacgtggccctgaccggcaccagcagcctgatcagcggcctgatcctgatcttcgagtggtggtacttcagaaagtacggcaccagcttcatcgagcaggtgagcgtgagccacctgagacccctgctgggcggcgtggacaacaacagcagcaacaacagcaacagcagcaacggcgacagcgacagcaacagacagagcgtgagcgagtgcaaggtgtggagaaaccccctgaacctgttcagaggcgccgagtacaacagatacacctgggtgaccggcagagagcccctgacctactacgacatgaacctgagcgcccaggaccaccagaccttcttcacctgcgacagcgaccacctgagacccgccgacgccatcatgcagaaggcctggagagagagaaacccccaggccagaatcagcgccgcccacgaggccctggagatcaacgagatcagaagcagagtggaggtgcccctgatcgccagcagcaccatctgggagatcaagctgctgcccaagtgcgccaccgcctacatcctgctggccgaggaggaggccaccaccatcgccgaggccgagaagctgttcaagcaggccctgaaggccggcgacggctgctacagaagaagccagcagctgcagcaccacggcagccagtacgaggcccagcacagaagagacaccaacgtgctggtgtacatcaagagaagactggccatgtgcgccagaagactgggcagaaccagagaggccgtgaagatgatgagagacctgatgaaggagttccccctgctgagcatgttcaacatccacgagaacctgctggaggccctgctggagctgcaggcctacgccgacgtgcaggccgtgctggccaagtacgacgacatcagcctgcccaagagcgccaccatctgctacaccgccgccctgctgaaggccagagccgtgagcgacaagttcagccccgaggccgccagcagaagaggcctgagcaccgccgagatgaacgccgtggaggccatccacagagccgtggagttcaacccccacgtgcccaagtacctgctggagatgaagagcctgatcctgccccccgagcacatcctgaagagaggcgacagcgaggccatcgcctacgccttcttccacctggcccactggaagagagtggagggcgccctgaacctgctgcactgcacctgggagggcaccttcagaatgatcccctaccccctggagaagggccacctgttctacccctaccccatctgcaccgagaccgccgacagagagctgctgcccagcttccacgaggtgagcgtgtaccccaagaaggagctgcccttcttcatcctgttcaccgccggcctgtgcagcttcaccgccatgctggccctgctgacccaccagttccccgagctgatgggcgtgttcgccaaggccatgatcgacatcttctgcagcgccgagttcagagactggaactgcaagagcatcttcatgagagtggaggacgagctggagatcccccccgccccccagagccagcacttccagaactag

SEQ ID NO: 210089 - DNA, 1758 bp, Artificial Sequence
  derived and/or modified sequence
atggccgaggccgccacagggtttctagagcagctgaaaagctgtatcgtctggtcctggacgtatttgtggacagtgtggttctttattgtgctgttcttggtttatatcctacgggtgcctctcaaaattaacgataatttgtctactgtaagtatgttcctgaacaccctgacacccaagttctatgtggctctcaccgggactagctccctcatttccggccttatcctaatcttcgagtggtggtattttcgcaaatacggaaccagcttcatcgagcaagtctccgtgtcgcatctgagacctttattaggcggagtggataataactctagcaataattccaactcttcaaatggtgattctgattctaacaggcagtcggtgtccgaatgcaaagtttggaggaatccccttaatctctttagaggtgcagaatataatcggtacacttgggttactggacgggagccactgacatattatgacatgaatctttccgctcaggaccatcaaacatttttcacctgcgattcggatcaccttagaccggccgacgctatcatgcaaaaagcatggcgcgaaagaaatcctcaagccagaatctcagcagcccacgaagccctggagatcaacgagattaggtcacgcgttgaagtgccactaatcgcttctagtaccatctgggagatcaaactgctccccaagtgtgcaacagcttacatactgttagccgaagaggaggccacgaccatcgccgaggcggaaaagctgtttaaacaggctctgaaagcgggtgacggctgttatagaaggtcccaacagctacagcaccatgggtctcagtacgaggcccaacacaggagggataccaacgtgttggtgtacattaagagaagactggctatgtgcgcccgcaggttaggccgtacccgcgaggctgtgaagatgatgcgtgatttaatgaaggaatttccgctcctgagcatgtttaacatccacgaaaacctgcttgaggctctccttgagctgcaagcatatgccgatgtgcaggcagtactcgctaaatacgacgacatctctctccctaaatcagcaacaatctgttataccgcggcattattgaaggcgagggccgtctctgataaattctctccggaagctgcttcaagaaggggcctgtccacagcggagatgaacgccgtggaagccatccatcgggctgttgagttcaatccccacgtgcctaagtacctgctagagatgaaatcactgatcctcccacctgagcacatcctaaaacgtggcgactccgaggccatcgcttatgccttctttcaccttgctcattggaagagagtggagggggcccttaatctgctccattgcacatgggagggaaccttccgaatgattccatacccactggagaaaggacatttgttttacccctatcccatctgcaccgaaacggccgacagagagctcctaccatctttccacgaggtgtctgtctaccctaagaaggagttaccattctttatactgttcactgccggtctctgttcattcacagctatgctggccctactcacacaccaattccctgaacttatgggcgtattcgccaaggctatgatcgacattttctgctccgccgagtttagagactggaactgcaaaagcatcttcatgagagtggaagacgagttggaaattccgcctgcacctcagagtcaacatttccagaattag

SEQ ID NO: 210090 - DNA, 1758 bp, Artificial Sequence
  derived and/or modified sequence
atggccgaggccgccaccggcttcctggagcagctgaagagctgcatcgtgtggagctggacctacctgtggacagtgtggttcttcatcgtgctcttcctggtgtacatcctgcgggtgcccctgaagatcaatgacaacctgagcacagtgtccatgttcctgaacaccctgacccccaagttctacgtggccctgaccggcaccagcagcctcatcagcggcctcatcctgatctttgagtggtggtacttcagaaaatatggcaccagcttcatcgagcaggtgtctgtgagccacctgcggcccctgctgggcggcgtggacaacaacagcagcaacaacagcaacagcagcaatggagacagcgacagcaaccggcagagcgtgtctgagtgcaaggtgtggaggaaccccctgaacctcttcagaggagctgagtacaaccgctacacctgggtgacaggccgggagcccctgacctactatgacatgaacctgagcgcccaggaccaccagaccttcttcacctgtgacagcgaccacctgcggccagcagatgccatcatgcagaaggcctggagggagaggaacccccaggcccgcatctctgctgcccacgaggccctggagatcaatgagatccgcagccgggtggaggtgcccctcatcgccagcagcaccatctgggagatcaagctgctgcccaagtgtgccacagcctacatcctgctggccgaggaggaggccaccaccatcgccgaggccgagaagctgttcaagcaggccctgaaggctggagatggctgctaccgccgcagccagcagctgcagcaccacggcagccagtatgaggcccagcacagaagagacaccaacgtgctggtgtacatcaagaggcggctggccatgtgtgcccggcggctgggccgcacccgggaggccgtgaagatgatgagggacctgatgaaggagttccccctgctgtccatgttcaacatccacgagaacctgctggaggccctgctggagctgcaggcctatgcagatgtgcaggccgtgctggccaagtatgatgacatcagcctgcccaagagcgccaccatctgctacacagctgccctgctgaaggcccgggctgtgtctgacaagttcagccctgaggccgccagccggcggggcctgagcacagctgagatgaatgctgtggaggccatccacagagctgtggagttcaacccccacgtgcccaagtacctgctggagatgaagagcctcatcctgcccccagagcacatcctgaagagaggagacagcgaggccatcgcctatgccttcttccacctggcccactggaagagggtggagggcgccctgaacctgctgcactgcacctgggagggcaccttcaggatgatcccctaccccctggagaagggccacctgttctacccctaccccatctgcacagaaacagctgaccgggagctgctgcccagcttccacgaggtgtctgtgtaccccaagaaggagctgcccttcttcatcctcttcaccgctggcctgtgcagcttcaccgccatgctggccctgctgacccaccagtttcctgagctgatgggcgtgtttgccaaggccatgattgacatcttctgcagcgctgagttccgggactggaactgcaagagcatcttcatgagggtggaggatgagctggagatccccccagccccccagagccagcacttccagaactag

SEQ ID NO: 210091 - DNA, 1758 bp, Artificial Sequence
  derived and/or modified sequence
atggccgaggccgccaccggcttcctggagcagctgaagagctgcatcgtctggtcttggacatatctgtggaccgtgtggtttttcattgtgctctttctggtatatattcttcgggtccctctgaagataaacgacaatttgagcactgttagcatgttcttgaatacactgactccaaagttctacgttgccttgactggaacctcttcactcattagcggactgatcttaattttcgagtggtggtactttagaaagtacggcacctcctttattgaacaagtatccgtctcccatctgcggcccctgctgggcggcgtcgataacaattctagcaataactcaaattcatcaaacggagactccgacagcaaccgacagtctgtttctgagtgtaaggtgtggcgaaatcctctcaatctgtttcgcggcgctgagtataatagatatacctgggtgacgggaagagagccactcacctactacgacatgaatctcagcgcacaggaccatcaaaccttctttacctgcgattcagaccacctgaggcccgcggatgcaatcatgcaaaaagcttggcgggagcgtaacccacaggctcggatatccgccgctcatgaggctctcgaaatcaatgagatccgtagccgcgtcgaagttcccctgatcgccagcagcacgatttgggagattaagcttttgcccaaatgcgctacagcctatattctgctagccgaagaagaggcaactactatagcagaagctgaaaaactttttaagcaagcactgaaagcaggagacggttgttatagaagaagccaacaactccagcatcatggctcccagtacgaagctcaacatcggcgagatacgaatgtactcgtgtatattaagcggcgcctggctatgtgcgctaggaggctaggaagaacaagagaggctgtgaagatgatgagagacttgatgaaggaatttcctctcctctctatgttcaacatacacgaaaatttacttgaggctcttctcgagttacaggcctatgcggacgttcaagctgttctggccaagtacgatgatatctcactaccgaagtccgcgactatttgttacacagctgccctgctcaaggcacgcgcggtgtccgataaattttcccccgaggctgcaagtcgcagaggtctgtccacagcggaaatgaatgccgtcgaagcaattcatcgcgccgtggaattcaacccccacgtgccaaaatacctgctcgaaatgaaaagtttgatcctgcctccggagcatattctgaaacggggagacagcgaggccatcgcctacgcgtttttccatctggcacactggaagagagtggagggggcgctgaacttgctccattgtacctgggagggcactttcagaatgatcccctaccctctggaaaagggccacctcttttatccctaccctatctgtactgaaacagcagacagagagctgctgccatcctttcatgaggttagtgtataccccaaaaaggaactgcccttcttcattctgttcaccgcaggcctgtgttccttcaccgctatgctagccctccttacccatcagttccctgagctgatgggagtattcgcaaaggcgatgatcgatatcttctgttctgctgaattccgcgactggaattgcaagtcgatttttatgagagttgaggacgagcttgagattccaccagctccgcagtcacagcatttccagaattag

SEQ ID NO: 210092 - DNA, 1758 bp, Artificial Sequence
  derived and/or modified sequence
atggctgaagcagctaccgggtttctggaacagcttaagtcttgtatcgtgtggagctggacttacctttggactgtttggttttttatagttctcttccttgtgtacattttgcgggtgcctctgaagatcaacgataatctttcaaccgtgagtatgttcctgaacaccctcacgcctaagttttatgtggctctgacgggaacgtcctcgcttattagtggattgatcttgattttcgaatggtggtacttccgaaaatatgggacgtcatttattgagcaggtctctgtttcccacctgcgtcctctgttaggaggggtggacaacaattcttcaaacaacagcaacagcagcaacggcgactccgatagtaaccgacagagcgttagcgaatgcaaggtctggcgaaaccccctgaacctgttccgtggcgcagagtacaacaggtacacttgggtgacaggtcgagaaccacttacctattatgatatgaacctcagcgcccaggatcaccagactttcttcacatgtgatagcgatcatttaagaccagcggatgctatcatgcagaaggcatggagagagaggaatccacaggccaggatctccgctgcccatgaggccctcgagattaacgaaattcgctctagggtagaggtgcccctcattgccagctctaccatttgggaaatcaaacttctcccaaagtgtgcaaccgcgtacattctactcgcggaggaggaggccaccacaattgccgaagcagagaaactgtttaagcaggccctgaaagcaggagacggatgctatcgtcgatctcagcagttacagcaccacggaagccagtatgaggctcaacaccgtcgggacaccaatgtgctagtgtatataaagcggcgtttagccatgtgcgcccgaagattgggtcgtactagagaagctgtgaaaatgatgagggacctcatgaaggagttccccttactttcaatgtttaatattcacgagaatctcttagaagccctgctggaactgcaggcttatgccgatgttcaggccgtgctcgccaagtatgatgacatcagcctgcccaagagcgccacaatctgttataccgctgctctgctgaaggcacgagctgtctccgacaaattctctcctgaggcggcttcacggagaggactgtccacagctgaaatgaacgctgttgaggctatccatcgcgcagtcgaatttaacccccacgtccccaaatacctgctggaaatgaaatccttgatccttccccctgagcatatcctgaagcgcggtgactccgaggctatcgcttacgcctttttccatcttgcccattggaagagggtggagggggcacttaacttacttcattgtacttgggagggaacattcagaatgataccttatcccttggaaaagggacatctgttctacccgtacccaatctgcaccgagacagctgacagagaacttttgccctcgtttcatgaggtgtcagtctatccaaaaaaggagctgccctttttcattctgtttacagctggtctgtgttcctttaccgcgatgttggcgttgctgacccaccagtttcctgagttaatgggcgtctttgcaaaggctatgattgatatcttttgcagcgccgagttcagggactggaactgtaaatctatcttcatgcgcgtcgaagacgaacttgaaatcccccctgcccctcagagtcaacacttccagaactag

SEQ ID NO: 210093 - DNA, 2899 bp, Artificial Sequence
  derived and/or modified sequence
gggacctttagagagttagcaataaggctggagaaggaaaagccggcgcgcccgcggcccgcgcgatttcccgccgagcccgcgtccccggcggcgggcgggctccgggggcgcccgggccgcggcggcggcggcggcgcgagctgcgcctccgggccggtgaatcatcccggcagacaccaagagccgcggcagcagagaggagcgctgaaacatggctgaagcggccacgggctttctggagcagctcaagtcctgcatagtttggtcttggacgtatctgtggaccgtgtggttcttcatcgtgctattcctggtctacatcctgcgggtgcctttgaaaatcaacgacaacttgagcacagtgagcatgtttttgaacacattaacaccgaagttctacgtggccctaacaggcacttcctcactaatatcagggcttattttgatatttgaatggtggtattttcgcaaatacggaacttcattcattgaacaagtctcagtaagccacttgcgcccccttctgggaggggttgacaacaactcttccaacaattctaattccagtaacggggactcagattccaataggcaaagtgtctcagaatgcaaagtatggcgaaatccactaaatttatttaggggtgctgaatacaatcggtatacttgggtgacaggacgagagcctcttacttactatgacatgaatctctctgcccaagaccaccagacattctttacttgtgactcggaccatctgcgtcccgcagatgcaataatgcagaaagcctggagagagagaaacccccaagctaggatttctgcagctcatgaagccttggagataaatgaaattaggtccagagttgaagttcccctaattgcttcctctaccatctgggagataaaattgttaccaaagtgtgcaactgcttatattctcttggctgaagaggaagcaacaaccattgctgaagcagaaaaattatttaagcaggccctgaaggctggagatggctgttaccgacgctctcagcagctacaacatcatggatcccagtatgaagcccaacatagacgagacaccaatgtcttggtgtacatcaaaagaaggctagcaatgtgtgccagaagactcgggaggaccagggaagcagtgaaaatgatgagagatttaatgaaggagttcccccttctgagtatgttcaatatccatgaaaaccttttagaagcccttctggaactacaagcatatgctgatgttcaggcagtcttagcaaagtatgatgatataagcttaccaaagtcagcaacaatatgctacacagctgctttgctcaaagcaagagctgtctctgacaaattctctcctgaggctgcatctcggcgggggctgagcacagcagagatgaatgcagtagaggccattcatagagctgtggaattcaatcctcatgtgccaaaatacctactagaaatgaaaagcttaatcctacccccagaacatatcctgaagagaggagacagtgaagcaatagcatatgcattctttcatcttgcacactggaagagagtggaaggggctttgaatcttttgcattgtacgtgggaaggcacttttcggatgatcccttatcccttggaaaaggggcacctattttatccttacccaatctgtacagaaacagcagaccgagagctgcttccatctttccatgaagtctcagtttacccaaagaaggagcttcccttctttattctctttactgctggattatgttccttcacagccatgctggccctcctgacacatcagttcccggaacttatgggggtcttcgcaaaagctatgattgacattttctgctcggcagagttcagggactggaattgcaagagtattttcatgcgtgttgaagatgaactggaaatccctccggcacctcaatctcaacatttccaaaactgaactcatcacccctcttcccccaccaccaaaactgctcctcctcctgtattcctgacctccgccatccaccccgttgctcaagccggaaactcggcagcccttccaaactcttccctctctcactccccacatcccatcgtctcggccttcacaatctgtcagttctaacctcctaagcaactaggccttcagtaaatgtgattcacctcttctttccctccttttcccaaagcatccctcttagtctaggtccttgttgtttcttgcctgaactcctgccatagtcttaactggtctccttgcttcctgtcttatcctccaccgtctttcttttatactgacacaagaatggtctttctgaattgcacatgtgagcatgtcacttccctgcttaaatttctccagtggattcccagggacttcaggatcaagtcctagttgttcagcatggcatccaagactctttatgatctggcccttgcttacctctcagccttagctctcccaactcttgcacagtcactgctcttcagccatagtggatcactcaccattcccagatgtaccaggctctcgcacacctctgcacctttgcacgtgctgtttgctgtgcgtggaatgcccttcactgtcaccaccctgctcatccactctactaatgcctcttcattcttttatactcagctttctttaaagttcttctaagctgagttaggtgtctgtcctttatgatcccgcagtattccatgaatacgtatattctcacatttattgtactgtattataattgttgaaaacttgtctgtcccatttagaatgtgagctccttgagagcagaacggtgtcttcattatctctgtatccccaaggctttgcacagtgccttgctcatagtaggttttcaataaatgattattaaataaataa

SEQ ID NO: 210094 - protein, 512 aa, Artificial Sequence
  derived and/or modified sequence
MWRVRKRGYFGIWSFPLIIAAVCAQSVNDPSNMSLVKETVDRLLKGYDIRLRPDFGGPPVAVGMNIDIASIDMVSEVNMDYTLTMYFQQAWRDKRLSYNVIPLNLTLDNRVADQLWVPDTYFLNDKKSFVHGVTVKNRMIRLHPDGTVLYGLRITTTAACMMDLRRYPLDEQNCTLEIESYGYTTDDIEFYWRGDDNAVTGVTKIELPQFSIVDYKLITKKVVFSTGSYPRLSLSFKLKRNIGYFILQTYMPSILITILSWVSFWINYDASAARVALGITTVLTMTTINTHLRETLPKIPYVKAIDMYLMGCFVFVFMALLEYALVNYIFFGRGPQRQKKAAEKAASANNEKMRLDVNKIFYKDIKQNGTQYRSLWDPTGNLSPTRRTTNYDFSLYTMDPHENILLSTLEIKNEMATSEAVMGLGDPRSTMLAYDASSIQYRKAGLPRHSFGRNALERHVAQKKSRLRRRASQLKITIPDLTDVNAIDRWSRIFFPVVFSFFNIVYWLYYVN

SEQ ID NO: 210095 - DNA, 7385 bp, Artificial Sequence
  derived and/or modified sequence
gcgcggggaagggaagaagaggacgaggtggcgcggagaccgcgggagaacacagtgcctccggaggaaatctgctcggtccccggcagccgccgcttcccctttgatgttttggtacgccgtgcgcatgcgcctcacattagaattactgcactgggcagactaagttggatctcctctcttcagtgaaaccctcaattccatcaaaaactaaagggatgtggagagtgcggaaaaggggctactttgggatttggtccttccccttaataatcgccgctgtctgtgcgcagagtgtcaatgaccctagtaatatgtcgctggttaaagagacggtggatagactcctgaaaggctatgacattcgtctgagaccagattttggaggtccccccgtggctgtggggatgaacattgacattgccagcatcgatatggtttctgaagtcaatatggattataccttgacaatgtactttcaacaagcctggagagataagaggctgtcctataatgtaatacctttaaacttgactctggacaacagagtggcagaccagctctgggtgcctgatacctatttcctgaacgataagaagtcatttgtgcacggagtgactgttaagaaccgcatgattcgcctgcatcctgatggcaccgtcctttatggactcagaatcacaaccacagctgcctgcatgatggacctaaggaggtacccactggatgaacaaaactgcaccttggaaattgagagctatggatacacaactgatgacattgagttttactggcgtggcgatgataatgcagtaacaggagtaacgaaaattgaacttccacagttctctattgtagattacaaacttatcaccaagaaggttgttttttccacaggttcctatcccaggttatccctcagctttaagcttaagagaaacattggctactttatcctgcaaacatacatgccttccatcctgattaccatcctctcctgggtctccttctggattaattacgatgcttcagctgcaagggtggcattaggaatcacaactgtcctcacaatgaccacaatcaacacccacctccgggaaactctccctaaaatcccctatgtgaaggccattgacatgtacctgatggggtgctttgtcttcgttttcatggcccttctggaatatgccctagtcaactacatcttctttgggagggggccccaacgccaaaagaaagcagctgagaaggctgccagtgccaacaatgagaagatgcgcctggatgtcaacaagattttttataaagatattaaacaaaatgggacccaatatcgatccttgtgggaccctactggaaacctctccccaactagacggactaccaattacgatttctctctgtatacgatggacccccatgagaacatcttactgagcactctcgagataaaaaatgaaatggccacatctgaggctgtgatgggacttggagaccccagaagcacaatgctagcctatgatgcctccagcatccagtatcggaaagctgggttgcccaggcatagttttggccgaaatgctctggaacgacatgtggcgcaaaagaaaagtcgcctgaggagacgcgcctcccaactgaaaatcaccatccctgacttgactgatgtgaatgccatagatcggtggtcccgcatattcttcccagtggttttttccttcttcaacatcgtctattggctttattatgtgaactaaaacatggcctcccactggaagcaaggactagattcctcctcaaaccagttgtacagcctgatgtaggacttggaaaacacatcaatccaggacaaaagtgacgctaaaataccttagttgctggcctatcctgtggtccatttcataccatttgggttgcttctgctaagtaatgaatacactaaggtccttgtggttttccagttaaaacgcaagtgatttttacacatggtggctagacagcctgagtgctccatgttgtctgtttagtatgcagcctactcagaggggaataatttggaagatattcttagaaggctcaacagcattgtcagtcatttggtcataaccagatactcctcatcttcctttttaaggtcggcatgctgttgagatggcattgtccttatgaaacattatctgtaatgccatgcaaacacattacttgaagatgatctatgattttcttactgagatgataatggtgtcatgggaagattattcccactggtttctaaaagattctcttgtgatttgagcaggctaggggaatcaagacagagactcaggaaaccgatttggccagtccctttgcttgagcacggagaatcaactatgatgtctttcattttggcatttagagatgaggagacttctggacaatatcatgcatggtggccaagaaaatttttgctaaacggctatttcctaggtggttaaagtaagagttaacaacacagagcagagtagaaaatcagaaacgacggttgtaacaaaaagcaagcaagcaagaaagcatgacccttatcagctccacacagcatctggtctatacatactgtgtctagtggcagagggtgagtaagagagattgtttttccaacatcactagcttttgacagcatacctaaagaggtttttatagtttaatcgaagataaccatgaaatacaaaaattagagaaatgagaattgtcttagatattcaggttagattcagagtcattcaaatatacaaatacagagcacaaactagcaaacagattgtttttctcagacgaagtcagctgtccctgcaatttttgtccctataattttatttcttaatttaatagagtatttcaagagaaggatttgttcatcactttaaaggattcatggtcctctccagctttttttttgcttccaaaattctgattatattcttaggagactggcaaagtaaggctttggagagattgagtgaactatattttcttatatgcaatgaaattcaccattgtatttttcaaagcaaataatacttcaaggagtatgaacacacagagagttaatttgtgcattcattggtttggggcttgattttcttaagagtgctttcattgtatatgttgcaatctgcctaatcaaggaaaatatgaaaactagtggaaaataataacaaagccacattaacatgataaatgttatgagcctcagttgatattgcagaaaaatatataactgttaatcaggcaggcatgatgtattttttttctatttttaagttatgccattgtgcttctttctacactaattggacataagcattcatatgttggacaagaggagaataagctaatatgtcttccttctatcaatataaggctcatattttgcttttcttatagaaaatagtgaattgctaaattttccttaaagttgaatttgattgaactttttcttggaggatgactttgctatttctattttgaaaacaaagaaagctcttctttttagagtaatatccctaattgtgcatagcagccagtatccacctgtgaataatgtatgttttcttgattccttgtttccttcatgatttagcagcttggaatatgatggagtactattgcccttgcattccagctgtccaagaacaacaacaaacctttatccttcagctttctgaatttgccccaaaatggaatggtattttgtttttcaccagtgtaggaaaccttggccattatattttgattacataatcttgagcacctctgagtatcatctttgggcagaatctgaccaagattcttctcacaggctcagagtagagattcctcatgtttctccaggacacactttctcctaggcaatcattttggggcatcacactaagtaaagtgcctgccccttgtcaacagggggtaaagtttgactaaaaaacatcaggaaggaacatattgataactcaggggcacaactccaaaatgccattctgaaaaggctcttctagagtcaactcagagcccaagtgtagaagtgggctcttatgtgcaatcactgtacaagccataaaaatctttgatattgccatttatgattacaacaaaattttagatgtccaagaaagtcaacagaacaatccagatcaaagtgtagagaagcatctttgcagcttgagcctcaaaagcataaaaccaggaattcatttctgctctcagtgatacaagaaacaaggcaaaggaaaaaagatgggaccttagaagcaatgccctagagtaaaaagcatacattggcactcagtaaccacagagatagaaacaactgactcagcctctccagaaataacagtagatgtagaatttgttcttaaatatatgtttcgttgaaatgaaatgcagtcatcaaatgcgaggaggggtgctagacctgataagtctaggaagaccagtcagcttgatagccagttgttaaactaaaggaccacaaaggtgtgtttagtagttctgatatgggattactatcagtttatacatatgtatagattttcttttaattataaacagccagatagccagcaattaaggtgttttttcatctttgtgaaattcatggacaaattctgactctaaaatgcacagtctacatgaaatctttgatctcaatctgtatatatatatattgtacatgaccgctagtaggtatgaaatgcatttcagagttgaaaactcatgcaacataatcatgtgtttgcataaggaatgttaaaattctttctactacaatttattaacaggggaaaagattcaagcagtgccatctagaccttttctcttctcatttcttcaaaagcagtgctaagtaaaataataataataaaaatggtttatgaaccaaaagactttacattctagcattaggaacacacacaaaaaaatctgtcagcttacaaaagcacaacacataaagaaagagcagtggaatgcgtaatggggaaatgaatcatgtttaaagcaagacttgcattaaattggcaactaagataatttccattttctataggtaaccgtgttccagtttaatgattaccttcatactcaacaagaaaaatggcaaagcaacatcatcaaaataggtcttacaacatatctacatgtatatatgtgtatatatagattcatataaacatacatacatatatatgcattcatatgttggaaaacaaaaggaataagctaatatgttttatttccttcattaaaccagtatatgagtatttttaatttggcaaacaaaaatcaacatactgaaataagtaatacagggtactgagcatttctctatcagcaaatcaatgcctacagtttttatgaaccattgcacagttcaactcgacaatagtactgtaccccagaacatcagaagttaagtagttgtcacattgcttgtctaattgctctctttttcaaggaaacaaataacattgtccattggtgagtcaaaaacaaacatgtcttaagaaaatgaaaaatgataaaaattcctccaaagaggaagaaaaaaaaaaaactaaaccccaccatgttggttagggcaaaatactaagtattcacaactgtagcaatcatgccatttggctaaatgtacagagtacatgtaatgtgagcaaccataactttcactgaacgtgtgtaaatattaaaacagatttcttaaatatttttaacttctaatttgtattttatggtaaggcaatgtgctaattccgtttatggcttaagttgatgtgttataatatgtaaataattaaacatgctgtaaatgaatagtcaatagatacaaataattgtttagtttttttcttaatttttatttattttttactaagtactattactgcagtgcccccagcagagtaatttaaacacccttttgcataaatggtttgggaatcccagacagaagggtttcaatttgctatcacacacacagtcacacacagtcacacacacacacacacacacactcaaacacacataatcttttgctcacccactctgtctctctgcccgtctatgggaaacactctactatttatgtagtcaatataacaaacaagagatagcctttgaaatggcaattgggaaaagcaaaaatgatcattgataacttaatagacttttttatatgtcagagttcaagaaaccaaagtttgcaacttaaatctcagttttcaaacagtaaaagtttgtatagatggcactacagaaaaataaaaatggttattcctaccagctccagaaatgtgttacacaatatacactagaagactttttttttaataatagtattttgtccttaggtagtattgttcctttcaaccaaagactccagaattattgaaaaacaaaaaaggaaaaaaaaaatgagataatgggggaaaaaaaggacgctgcttcacaccaaaggtttaaaaaaatattttccaaatgcactaggaacattgtaaaaaccagaaaggagtgaacagaatgctaatgaagatactgccctaaagaaatctgtacaaaaaaaaaaaaaaaaagcagcactcttaaaaagctactaggtttttggaaattgaagtaaaatatttctgtagatatattcaaaattctgacatcaaattttaatttgcttaaagaagttttatttgtgatgaagatcaatatgattcaaatgatgaaaaacaaaactgtatgtcctttgagttcccaaaccaaatgtcactgccgtgtcacatcctctaatctgatgcccatgtgtgtgtccttgcgccatttgaagcaagttgacagttccatcagtttgtttttgtttttgtttttggttcaataatttgagttcaaccatcgtcattttaaacataattaatcccaacaaagttgcctatagtttaatttaaacctcacagcatttttaatttattttgcatgggtgtttaaatagttctgttacgaatattgtccctgcacagttctaaattgtccttttataaaaaaaaaaagtgatattctagtttcttcacaatgtagtgattatcagccttactaattaccttgtagcctttcttaatatgcacataatgcacattttccgatggctagaaaaatgcaaaacacagtggatatcattgcatctattttcatgtctttctaaaaacaggactattaaaatctctgggatacatgagatagtaaaaaatgaggattataaatgaatagcacataagaattattttcttgaatttaaacttattgcagccagtttcagcatgtaaatatataataatgttggctagtgtgtaattcttgaactaagaaat

SEQ ID NO: 210096 - DNA, 7191 bp, Artificial Sequence
  derived and/or modified sequence
atgtggagagtgcggaaaaggggctactttgggatttggtccttccccttaataatcgccgctgtctgtgcgcagagtgtcaatgaccctagtaatatgtcgctggttaaagagacggtggatagactcctgaaaggctatgacattcgtctgagaccagattttggaggtccccccgtggctgtggggatgaacattgacattgccagcatcgatatggtttctgaagtcaatatggattataccttgacaatgtactttcaacaagcctggagagataagaggctgtcctataatgtaatacctttaaacttgactctggacaacagagtggcagaccagctctgggtgcctgatacctatttcctgaacgataagaagtcatttgtgcacggagtgactgttaagaaccgcatgattcgcctgcatcctgatggcaccgtcctttatggactcagaatcacaaccacagctgcctgcatgatggacctaaggaggtacccactggatgaacaaaactgcaccttggaaattgagagctatggatacacaactgatgacattgagttttactggcgtggcgatgataatgcagtaacaggagtaacgaaaattgaacttccacagttctctattgtagattacaaacttatcaccaagaaggttgttttttccacaggttcctatcccaggttatccctcagctttaagcttaagagaaacattggctactttatcctgcaaacatacatgccttccatcctgattaccatcctctcctgggtctccttctggattaattacgatgcttcagctgcaagggtggcattaggaatcacaactgtcctcacaatgaccacaatcaacacccacctccgggaaactctccctaaaatcccctatgtgaaggccattgacatgtacctgatggggtgctttgtcttcgttttcatggcccttctggaatatgccctagtcaactacatcttctttgggagggggccccaacgccaaaagaaagcagctgagaaggctgccagtgccaacaatgagaagatgcgcctggatgtcaacaagattttttataaagatattaaacaaaatgggacccaatatcgatccttgtgggaccctactggaaacctctccccaactagacggactaccaattacgatttctctctgtatacgatggacccccatgagaacatcttactgagcactctcgagataaaaaatgaaatggccacatctgaggctgtgatgggacttggagaccccagaagcacaatgctagcctatgatgcctccagcatccagtatcggaaagctgggttgcccaggcatagttttggccgaaatgctctggaacgacatgtggcgcaaaagaaaagtcgcctgaggagacgcgcctcccaactgaaaatcaccatccctgacttgactgatgtgaatgccatagatcggtggtcccgcatattcttcccagtggttttttccttcttcaacatcgtctattggctttattatgtgaactaaaacatggcctcccactggaagcaaggactagattcctcctcaaaccagttgtacagcctgatgtaggacttggaaaacacatcaatccaggacaaaagtgacgctaaaataccttagttgctggcctatcctgtggtccatttcataccatttgggttgcttctgctaagtaatgaatacactaaggtccttgtggttttccagttaaaacgcaagtgatttttacacatggtggctagacagcctgagtgctccatgttgtctgtttagtatgcagcctactcagaggggaataatttggaagatattcttagaaggctcaacagcattgtcagtcatttggtcataaccagatactcctcatcttcctttttaaggtcggcatgctgttgagatggcattgtccttatgaaacattatctgtaatgccatgcaaacacattacttgaagatgatctatgattttcttactgagatgataatggtgtcatgggaagattattcccactggtttctaaaagattctcttgtgatttgagcaggctaggggaatcaagacagagactcaggaaaccgatttggccagtccctttgcttgagcacggagaatcaactatgatgtctttcattttggcatttagagatgaggagacttctggacaatatcatgcatggtggccaagaaaatttttgctaaacggctatttcctaggtggttaaagtaagagttaacaacacagagcagagtagaaaatcagaaacgacggttgtaacaaaaagcaagcaagcaagaaagcatgacccttatcagctccacacagcatctggtctatacatactgtgtctagtggcagagggtgagtaagagagattgtttttccaacatcactagcttttgacagcatacctaaagaggtttttatagtttaatcgaagataaccatgaaatacaaaaattagagaaatgagaattgtcttagatattcaggttagattcagagtcattcaaatatacaaatacagagcacaaactagcaaacagattgtttttctcagacgaagtcagctgtccctgcaatttttgtccctataattttatttcttaatttaatagagtatttcaagagaaggatttgttcatcactttaaaggattcatggtcctctccagctttttttttgcttccaaaattctgattatattcttaggagactggcaaagtaaggctttggagagattgagtgaactatattttcttatatgcaatgaaattcaccattgtatttttcaaagcaaataatacttcaaggagtatgaacacacagagagttaatttgtgcattcattggtttggggcttgattttcttaagagtgctttcattgtatatgttgcaatctgcctaatcaaggaaaatatgaaaactagtggaaaataataacaaagccacattaacatgataaatgttatgagcctcagttgatattgcagaaaaatatataactgttaatcaggcaggcatgatgtattttttttctatttttaagttatgccattgtgcttctttctacactaattggacataagcattcatatgttggacaagaggagaataagctaatatgtcttccttctatcaatataaggctcatattttgcttttcttatagaaaatagtgaattgctaaattttccttaaagttgaatttgattgaactttttcttggaggatgactttgctatttctattttgaaaacaaagaaagctcttctttttagagtaatatccctaattgtgcatagcagccagtatccacctgtgaataatgtatgttttcttgattccttgtttccttcatgatttagcagcttggaatatgatggagtactattgcccttgcattccagctgtccaagaacaacaacaaacctttatccttcagctttctgaatttgccccaaaatggaatggtattttgtttttcaccagtgtaggaaaccttggccattatattttgattacataatcttgagcacctctgagtatcatctttgggcagaatctgaccaagattcttctcacaggctcagagtagagattcctcatgtttctccaggacacactttctcctaggcaatcattttggggcatcacactaagtaaagtgcctgccccttgtcaacagggggtaaagtttgactaaaaaacatcaggaaggaacatattgataactcaggggcacaactccaaaatgccattctgaaaaggctcttctagagtcaactcagagcccaagtgtagaagtgggctcttatgtgcaatcactgtacaagccataaaaatctttgatattgccatttatgattacaacaaaattttagatgtccaagaaagtcaacagaacaatccagatcaaagtgtagagaagcatctttgcagcttgagcctcaaaagcataaaaccaggaattcatttctgctctcagtgatacaagaaacaaggcaaaggaaaaaagatgggaccttagaagcaatgccctagagtaaaaagcatacattggcactcagtaaccacagagatagaaacaactgactcagcctctccagaaataacagtagatgtagaatttgttcttaaatatatgtttcgttgaaatgaaatgcagtcatcaaatgcgaggaggggtgctagacctgataagtctaggaagaccagtcagcttgatagccagttgttaaactaaaggaccacaaaggtgtgtttagtagttctgatatgggattactatcagtttatacatatgtatagattttcttttaattataaacagccagatagccagcaattaaggtgttttttcatctttgtgaaattcatggacaaattctgactctaaaatgcacagtctacatgaaatctttgatctcaatctgtatatatatatattgtacatgaccgctagtaggtatgaaatgcatttcagagttgaaaactcatgcaacataatcatgtgtttgcataaggaatgttaaaattctttctactacaatttattaacaggggaaaagattcaagcagtgccatctagaccttttctcttctcatttcttcaaaagcagtgctaagtaaaataataataataaaaatggtttatgaaccaaaagactttacattctagcattaggaacacacacaaaaaaatctgtcagcttacaaaagcacaacacataaagaaagagcagtggaatgcgtaatggggaaatgaatcatgtttaaagcaagacttgcattaaattggcaactaagataatttccattttctataggtaaccgtgttccagtttaatgattaccttcatactcaacaagaaaaatggcaaagcaacatcatcaaaataggtcttacaacatatctacatgtatatatgtgtatatatagattcatataaacatacatacatatatatgcattcatatgttggaaaacaaaaggaataagctaatatgttttatttccttcattaaaccagtatatgagtatttttaatttggcaaacaaaaatcaacatactgaaataagtaatacagggtactgagcatttctctatcagcaaatcaatgcctacagtttttatgaaccattgcacagttcaactcgacaatagtactgtaccccagaacatcagaagttaagtagttgtcacattgcttgtctaattgctctctttttcaaggaaacaaataacattgtccattggtgagtcaaaaacaaacatgtcttaagaaaatgaaaaatgataaaaattcctccaaagaggaagaaaaaaaaaaaactaaaccccaccatgttggttagggcaaaatactaagtattcacaactgtagcaatcatgccatttggctaaatgtacagagtacatgtaatgtgagcaaccataactttcactgaacgtgtgtaaatattaaaacagatttcttaaatatttttaacttctaatttgtattttatggtaaggcaatgtgctaattccgtttatggcttaagttgatgtgttataatatgtaaataattaaacatgctgtaaatgaatagtcaatagatacaaataattgtttagtttttttcttaatttttatttattttttactaagtactattactgcagtgcccccagcagagtaatttaaacacccttttgcataaatggtttgggaatcccagacagaagggtttcaatttgctatcacacacacagtcacacacagtcacacacacacacacacacacactcaaacacacataatcttttgctcacccactctgtctctctgcccgtctatgggaaacactctactatttatgtagtcaatataacaaacaagagatagcctttgaaatggcaattgggaaaagcaaaaatgatcattgataacttaatagacttttttatatgtcagagttcaagaaaccaaagtttgcaacttaaatctcagttttcaaacagtaaaagtttgtatagatggcactacagaaaaataaaaatggttattcctaccagctccagaaatgtgttacacaatatacactagaagactttttttttaataatagtattttgtccttaggtagtattgttcctttcaaccaaagactccagaattattgaaaaacaaaaaaggaaaaaaaaaatgagataatgggggaaaaaaaggacgctgcttcacaccaaaggtttaaaaaaatattttccaaatgcactaggaacattgtaaaaaccagaaaggagtgaacagaatgctaatgaagatactgccctaaagaaatctgtacaaaaaaaaaaaaaaaaagcagcactcttaaaaagctactaggtttttggaaattgaagtaaaatatttctgtagatatattcaaaattctgacatcaaattttaatttgcttaaagaagttttatttgtgatgaagatcaatatgattcaaatgatgaaaaacaaaactgtatgtcctttgagttcccaaaccaaatgtcactgccgtgtcacatcctctaatctgatgcccatgtgtgtgtccttgcgccatttgaagcaagttgacagttccatcagtttgtttttgtttttgtttttggttcaataatttgagttcaaccatcgtcattttaaacataattaatcccaacaaagttgcctatagtttaatttaaacctcacagcatttttaatttattttgcatgggtgtttaaatagttctgttacgaatattgtccctgcacagttctaaattgtccttttataaaaaaaaaaagtgatattctagtttcttcacaatgtagtgattatcagccttactaattaccttgtagcctttcttaatatgcacataatgcacattttccgatggctagaaaaatgcaaaacacagtggatatcattgcatctattttcatgtctttctaaaaacaggactattaaaatctctgggatacatgagatagtaaaaaatgaggattataaatgaatagcacataagaattattttcttgaatttaaacttattgcagccagtttcagcatgtaaatatataataatgttggctagtgtgtaattcttgaactaagaaatataaataaaaataaaaagattgtg

SEQ ID NO: 210097 - DNA, 1539 bp, Artificial Sequence
  derived and/or modified sequence
atgtggagagtgaggaagcgcgggtacttcgggatatggagctttcctctgataatcgctgcagtgtgcgcccagagcgtcaacgatccctccaacatgagtttggtgaaagagacggtggacaggctgctgaaggggtacgacattcggctgcggcctgattttggcggtccacctgtggccgtggggatgaacattgacatcgccagtatcgatatggtgtcagaagtaaacatggattatacactgaccatgtactttcagcaggcttggagagataagagactgtcctacaatgtcattcccctgaacttgacactggacaatcgcgtcgcagaccaactgtgggtgccagacacttacttccttaacgataaaaaaagctttgtccatggcgtgactgtcaagaacaggatgatccggctccaccccgacggaaccgtactctacggactgcggattacgaccactgccgcctgcatgatggacctgcgccgttacccactcgatgaacagaattgtacactcgaaatcgagagttatggctataccactgatgatatcgaattttattggaggggtgacgataacgccgtgacgggggttacgaagatcgagttaccacagttttccatcgtcgattataaactgatcaccaagaaggtagtttttagcacgggcagctacccaaggctgtcgctgtctttcaagctgaaacgaaatataggctactttatattgcagacatacatgccctcaattctcattaccatcctctcctgggtcagcttctggataaactacgacgcctcggctgctcgagtcgccctcggcatcaccacagtgctcactatgactacaattaatacgcatctcagggaaacgctgcctaaaatcccctatgttaaagcaattgatatgtacctgatgggatgcttcgttttcgtttttatggccctgcttgagtacgctttggtgaactatatcttctttggacgtggaccacaacgccaaaaaaaagctgccgagaaggcagcttcagcaaacaacgagaagatgagacttgatgtcaataagattttttacaaagatatcaaacagaatgggacacagtatcggtctttgtgggaccccacagggaatctgtcccccacgagaagaacgaccaattacgatttcagtctgtacaccatggaccctcatgaaaacatccttctgtctacactagagataaaaaatgagatggcaacttcagaggctgtgatgggtcttggagatcctagaagcactatgttggcctatgatgcttcttctattcaatatagaaaggccgggttgcctcgacacagtttcgggcgcaatgcgctcgaacggcatgtcgctcagaaaaaatccaggctgagacgccgggcctcccagctcaaaatcacaatccctgatctaacggatgtgaacgccattgacagatggagccggatttttttccccgtggttttctcattttttaacatcgtctactggctatactatgtaaactag

SEQ ID NO: 210098 - DNA, 1539 bp, Artificial Sequence
  derived and/or modified sequence
atgtggagagtgcgcaagcgtggatactttggcatatggagcttccccctgatcattgctgcagtatgcgcccagtctgtgaacgatcctagtaacatgagcctcgtgaaggaaacggttgaccgtctgctgaaaggttacgacatccggctgcggcctgacttcggaggaccaccagtagctgtggggatgaatatcgatatagcaagtattgacatggtaagtgaagtgaacatggactatactctcacgatgtactttcagcaagcttggagagataagagactttcctataatgttatacccttaaatcttactctggataaccgggtcgcagatcagctatgggtccccgacacctatttcctgaacgataagaagtcctttgttcacggggtaacagtcaaaaatcggatgattagactgcatccagatggaaccgtgctttatggtcttaggatcaccaccacggcagcatgcatgatggatctgaggaggtatccgctcgatgagcagaactgcaccctggaaattgagagttacggatacacaaccgatgatatagaattctattggcgaggcgatgacaacgcagtgacaggagtcacaaaaattgagctcccacagttttctatcgttgattacaaacttataaccaagaaggtcgtattttctaccggctcatatccacggctcagcctgagctttaagctgaagcggaatatcggttatttcatcctgcaaacttacatgccgtcaatccttataacgatcctgtcctgggtgtctttttggatcaattatgacgcttcggccgccagggttgctttggggattaccaccgtgctcacaatgaccacaattaacacccaccttcgagaaacactgccaaagatcccctatgttaaggctatcgacatgtacctaatgggatgcttcgtgtttgtttttatggccctgcttgagtacgcgttggtcaattacatcttcttcggtcgcggcccccaaaggcagaagaaagccgctgaaaaagccgcttccgccaataacgaaaaaatgagactcgacgttaacaagatcttttataaagacatcaagcagaatggaacccagtacagatccctgtgggacccaaccggcaacctcagccctactcggcgaaccactaactacgattttagcttatacaccatggacccacacgaaaacatactattgtctacgctggagataaagaatgagatggccacatctgaagcagtgatgggcctgggagacccacgatctaccatgctggcttatgacgcctctagcatccagtatagaaaggcggggctgccgcgccactctttcgggaggaacgccctggagcggcacgtggctcagaaaaaatctaggctccgccggagggccagtcagctgaaaattacaataccagatttgaccgacgtcaatgctatcgacagatggtctcgtatattctttcctgtcgtattcagcttcttcaacatcgtgtattggttgtattatgtgaactag

SEQ ID NO: 210099 - DNA, 1539 bp, Artificial Sequence
  derived and/or modified sequence
atgtggagggtgaggaagaggggctacttcggcatctggagcttccccctcatcatcgctgctgtgtgtgcccagagcgtgaatgaccccagcaacatgagcctggtgaaggagaccgtggaccggctgctgaagggctatgacatccggctgcggccagactttggaggcccccctgtggccgtgggcatgaacatcgacatcgccagcattgacatggtgtctgaggtgaacatggactacaccctgaccatgtacttccagcaggcctggagggacaagaggctgagctacaacgtcatccccctgaacctgaccctggacaacagagtggccgaccagctgtgggtgcctgacacctacttcctgaatgacaagaagagctttgtgcatggagtgacagtgaagaacaggatgatccggctgcacccagatggcaccgtgctgtatggcctgcgcatcaccaccacagctgcctgcatgatggacctgcggcgctaccccctggatgagcagaactgcaccctggagattgagagctatggctacaccacagatgacatcgagttctactggagaggagatgacaatgctgtgactggagtgaccaagattgagctgccccagttcagcatcgtggactacaagctgatcaccaagaaggtggtgttcagcacaggcagctacccccggctgagcctgtccttcaagctgaagaggaacatcggctacttcatcctgcagacctacatgcccagcatcctgatcaccatcctgtcctgggtgtccttctggatcaactatgatgccagcgctgcccgggtggccctgggcatcaccaccgtgctgaccatgaccaccatcaacacccacctgcgggagaccctgcccaagatcccctacgtgaaggccatcgacatgtacctgatgggctgctttgtgtttgtgttcatggccctgctggagtatgccctggtgaactacatcttcttcggccggggcccccagaggcagaagaaggctgctgagaaggccgccagcgccaacaatgagaagatgaggctggatgtgaacaagatcttctacaaggacatcaagcagaatggcacccagtaccgcagcctgtgggaccccactggaaacctgagccccaccaggaggaccaccaactatgacttcagcctgtacaccatggacccccatgagaacatcctgctgagcaccctggagatcaagaatgagatggccaccagcgaggccgtgatgggcctgggggaccccaggagcaccatgctggcctatgatgccagcagcatccagtacaggaaggccggcctgcccaggcacagctttggaagaaatgccctggagagacatgtggcccagaagaagagccggctgcggcggcgggccagccagctgaagatcaccatcccagacctgacagatgtgaatgccatcgaccgctggagccgcatcttcttccctgtggtgttctccttcttcaacatcgtgtactggctgtactacgtgaactag

SEQ ID NO: 210100 - DNA, 1539 bp, Artificial Sequence
  derived and/or modified sequence
atgtggcgggtgcggaagcggggctacttcggcatctggagcttccccctgatcatcgccgccgtctgcgcacagagcgtgaatgacccttctaacatgagcctggtaaaagaaacggtggataggcttctcaaaggctatgacattagactccgcccagacttcggtgggccacccgttgctgttggaatgaatatagacatcgcatctatcgacatggtaagcgaggtaaatatggattacacactaacaatgtattttcagcaggcatggcgggacaagcggctctcctataatgttatccctctgaatctaacccttgacaatcgggtggccgaccaactgtgggttccagatacatattttctaaatgacaaaaaatcttttgtgcacggggtcaccgtgaaaaacaggatgattaggctgcacccagatgggaccgtactgtacgggttgaggatcacaactaccgccgcctgcatgatggatctgcgccggtatcccctggacgagcaaaattgcaccctggagattgaaagctacggatataccaccgatgacatcgaattctattggaggggggacgacaatgctgtgactggggtgacaaaaattgaacttccccagttcagcatagtggactacaagctgatcacgaaaaaagtggtattcagtacaggctcttatcctcggctcagcctgtctttcaagttgaagcgcaacatcgggtacttcattctgcagacctatatgccctccatcctcatcaccatcctctcttgggtcagcttctggattaattatgatgcgagtgctgccagagtcgccctggggataaccacagtgctcacaatgaccactattaacacacatttacgtgagactctacctaagatcccgtacgtaaaggcaatcgatatgtacttgatgggatgcttcgtgttcgttttcatggcattgctagagtatgccttggtgaactacatattcttcggtaggggtccacaacgtcagaagaaggcagccgagaaagcagcctccgccaataacgaaaagatgcgattggacgtcaataagattttctacaaggacatcaagcagaatgggacacagtatcgttctctttgggaccccaccggaaacctgtcacctacgaggagaacgacaaactatgacttttctttgtacactatggatccacacgagaacatcttgctgtccaccttggaaattaaaaacgagatggctacctctgaggctgtgatgggcttaggcgatccaagatctaccatgttggcttacgatgcttcctccattcagtacagaaaggcaggtctgccccgccattcctttggacggaacgctttggagaggcacgtggctcaaaagaagagccgtttgcggcgcagggcctcacagctaaagatcacaattccggacctgaccgacgtgaacgctatcgacagatggtctaggattttcttccctgtggtgttctccttcttcaatattgtgtactggctgtattacgtcaactag

SEQ ID NO: 210101 - DNA, 1539 bp, Artificial Sequence
  derived and/or modified sequence
atgtggcgggtgcggaagcggggctacttcggcatctggagcttccccttgatcattgctgccgtgtgtgcccagtctgtcaatgatccaagcaatatgagccttgtcaaggagactgtggacaggctcctgaaagggtatgacatcagattgcggcccgatttcggtggacccccggtggccgtaggtatgaatattgacatcgccagcatcgatatggtttccgaggttaacatggattacaccttgaccatgtactttcagcaagcttggagagataagcggctgagctacaacgtgattccactgaatctgacactggataaccgcgtagcagatcagctgtgggtgcccgatacttacttcctgaatgacaaaaaaagtttcgtgcatggagttaccgtgaaaaaccgaatgatcaggttgcaccctgatgggacagtcctgtacggtctaagaattactaccacggccgcgtgcatgatggacttgcggcggtacccccttgatgaacagaattgcaccctcgaaatcgaaagctacggctacacgaccgatgacattgagttctactggcgaggagatgataacgcggttacaggtgtaaccaaaattgagctgccccagttctcgatcgtggattataagctgattactaagaaggtcgtgttttctacgggatcctatccacgattgagcttatcctttaaactcaagcgaaatatagggtatttcattttgcagacatacatgccatcaattctgatcaccatactctcatgggtgtccttctggattaattatgacgccagcgccgcccgtgtcgccctcgggattacaacagtgttgactatgacgaccataaacactcacctccgtgaaactttaccaaaaatcccgtatgtgaaagcgatcgatatgtacctcatgggttgttttgtgtttgtgttcatggctttactagaatacgcactagtcaactacatcttcttcggtcgcgggccacagcggcagaaaaaggccgccgagaaggctgccagtgctaataatgagaagatgaggttggacgtgaacaaaatcttttataaggacatcaagcaaaatgggactcaatatcggagtctctgggacccaaccggcaacttgtcccctacacgcagaactacgaactacgacttttctctgtataccatggacccgcatgaaaacattttactgtcaacattagagattaaaaacgagatggcgacctctgaggccgttatggggctgggtgacccacggtcaaccatgttggcgtacgacgcatcaagcattcagtataggaaggctggtttacctaggcatagttttggtcgtaatgcgctcgagcgtcatgtagcccagaagaaaagccgcctcaggaggcgggcatcccagctgaaaatcacaattcccgacctgacagacgtgaacgcaatcgataggtggagccgtattttctttcctgttgtcttctctttcttcaacatcgtgtattggctgtattatgtcaattag

SEQ ID NO: 210102 - DNA, 1539 bp, Artificial Sequence
  derived and/or modified sequence
atgtggcgggtgaggaaacgtggatattttgggatctggtcttttccattgattattgccgcagtgtgtgctcaatcggtgaatgatccctccaacatgtctctagtgaaagagacagtggaccgcctgttgaaagggtatgacataaggctgagaccagattttggcggacctccagtagcggtgggcatgaatattgatattgcatccatcgatatggtgtcagaagtcaacatggattatactctgaccatgtacttccagcaagcttggcgtgacaagcgccttagttacaatgtcatcccactcaatctcacactggataatcgagttgccgatcaactgtgggtgccggacacctactttcttaacgataagaagtcctttgtacatggggtaactgtgaagaatcgcatgatccggctacaccctgacggaaccgtgctctacgggctgagaatcaccaccaccgcggcttgcatgatggacctacgcaggtacccccttgacgagcagaactgcacacttgagattgagtcatacggttatactaccgatgatatcgagttttattggcgcggtgacgataacgccgtgacgggagttactaaaatcgaactacctcagttcagcatcgttgattacaagctgattacaaagaaggttgtgttctctacaggctcttaccctaggctcagtctatctttcaaattgaagcggaatatcggatatttcatcctgcagacatatatgccgtctatcttgatcactatcctgagttgggtgagcttttggattaactatgatgcttccgcagccagggtagccttaggtatcactactgtactaaccatgaccaccataaatactcacttgcgcgagactcttccgaagataccatacgtgaaagcaatcgacatgtatcttatgggatgcttcgtctttgtgttcatggcactcctggaatacgccctcgtgaactatatcttttttgggaggggaccacaaaggcaaaaaaaggccgcagagaaggccgctagcgccaataatgagaaaatgcgactcgacgtgaataaaattttctacaaggacataaagcagaatgggacccagtatcgcagcttatgggacccaaccggaaatctgtcccccactcgacgtaccactaactatgacttcagtctttacacaatggacccgcacgagaacatccttctgtctactcttgaaataaagaatgagatggcgacctctgaagctgtcatgggactgggagaccctcgcagcacgatgcttgcgtacgacgcatctagcatccagtaccggaaggcaggcctaccacgccactctttcggccgaaacgccctcgagcgccacgtggctcagaaaaagagcagactccgcaggcgcgcttcacagctcaaaattactattccagatctcaccgacgtcaatgctatcgatcgatggagccggattttcttccccgtggtgttctccttcttcaatatcgtgtattggctgtactacgtgaactag

SEQ ID NO: 210103 - DNA, 1539 bp, Artificial Sequence
  derived and/or modified sequence
atgtggcgagttcgaaaacggggttatttcggcatctggtccttcccactcattattgcagctgtgtgcgcacaaagcgtcaacgacccaagcaacatgagcctggtgaaggaaactgtcgaccggctgctgaagggctatgatatcagacttaggcccgatttcgggggaccacctgttgccgtcggaatgaatatcgatatagcctccattgatatggtcagcgaggttaacatggattataccctgaccatgtattttcagcaggcttggagagacaaacgtttaagctacaatgtgatcccactcaaccttaccctggacaatagagttgccgaccagctctgggtacccgacacttatttcctgaacgacaaaaaaagctttgtgcacggcgtgacggtgaagaacaggatgattagactgcacccagatggtaccgtgctgtacggcctgcggattaccacgaccgccgcttgtatgatggatctccgccgatacccacttgacgagcagaactgcacactggaaatcgaatcgtatggctataccacggacgatattgaattctattggaggggagatgataacgcagtgaccggtgtgactaaaattgagcttccccagttttcaatcgtcgattacaaactgatcacaaaaaaggttgtgttttctaccggctcttatcctaggttgagtctgtcctttaagttgaagaggaacattggctatttcattctccagacttacatgccatcgattcttattaccattctaagttgggtgagcttttggatcaactatgatgcctcggccgcaagggttgctcttggaattacaactgttctgaccatgactacgataaacacccacttgcgcgaaacacttccaaaaattccatacgtaaaggcaattgatatgtatctgatggggtgctttgtttttgtcttcatggccttattggaatatgcactcgtgaattacattttcttcggtcgcggtccgcagcgtcagaagaaggctgccgagaaggctgcctccgctaataatgagaagatgagactggacgtcaacaagatcttctacaaggacataaaacagaatggcacccagtatcgttcgctctgggacccgaccggcaatctctcgccaactaggaggaccacgaattacgatttctctctgtataccatggatccacatgagaatatattgctgtctaccttggagatcaaaaatgagatggctactagtgaggcagtgatgggccttggggaccctcgatccacaatgttagcatatgacgcttccagcattcaataccggaaggccggtctgcccaggcactcttttggcaggaatgctctcgagaggcacgtggcccagaaaaagagcagattaagacgacgggcttcacagctaaagatcaccatccctgatctcacggatgttaacgctatcgacaggtggtcaaggatcttcttccctgttgtgttctctttctttaatatcgtttactggctgtactacgtcaattag

SEQ ID NO: 210104 - DNA, 1539 bp, Artificial Sequence
  derived and/or modified sequence
atgtggagagtgagaaagagaggctacttcggcatctggagcttccccctgatcatcgccgccgtgtgcgcccagagcgtgaacgaccccagcaacatgagcctggtgaaggagaccgtggacagactgctgaagggctacgacatcagactgagacccgacttcggcggcccccccgtggccgtgggcatgaacatcgacatcgccagcatcgacatggtgagcgaggtgaacatggactacaccctgaccatgtacttccagcaggcctggagagacaagagactgagctacaacgtgatccccctgaacctgaccctggacaacagagtggccgaccagctgtgggtgcccgacacctacttcctgaacgacaagaagagcttcgtgcacggcgtgaccgtgaagaacagaatgatcagactgcaccccgacggcaccgtgctgtacggcctgagaatcaccaccaccgccgcctgcatgatggacctgagaagataccccctggacgagcagaactgcaccctggagatcgagagctacggctacaccaccgacgacatcgagttctactggagaggcgacgacaacgccgtgaccggcgtgaccaagatcgagctgccccagttcagcatcgtggactacaagctgatcaccaagaaggtggtgttcagcaccggcagctaccccagactgagcctgagcttcaagctgaagagaaacatcggctacttcatcctgcagacctacatgcccagcatcctgatcaccatcctgagctgggtgagcttctggatcaactacgacgccagcgccgccagagtggccctgggcatcaccaccgtgctgaccatgaccaccatcaacacccacctgagagagaccctgcccaagatcccctacgtgaaggccatcgacatgtacctgatgggctgcttcgtgttcgtgttcatggccctgctggagtacgccctggtgaactacatcttcttcggcagaggcccccagagacagaagaaggccgccgagaaggccgccagcgccaacaacgagaagatgagactggacgtgaacaagatcttctacaaggacatcaagcagaacggcacccagtacagaagcctgtgggaccccaccggcaacctgagccccaccagaagaaccaccaactacgacttcagcctgtacaccatggacccccacgagaacatcctgctgagcaccctggagatcaagaacgagatggccaccagcgaggccgtgatgggcctgggcgaccccagaagcaccatgctggcctacgacgccagcagcatccagtacagaaaggccggcctgcccagacacagcttcggcagaaacgccctggagagacacgtggcccagaagaagagcagactgagaagaagagccagccagctgaagatcaccatccccgacctgaccgacgtgaacgccatcgacagatggagcagaatcttcttccccgtggtgttcagcttcttcaacatcgtgtactggctgtactacgtgaactag

SEQ ID NO: 210105 - protein, 473 aa, Artificial Sequence
  derived and/or modified sequence
MCSGLLELLLPIWLSWTLGTRGSEPRSVNDPGNMSFVKETVDKLLKGYDIRLRPDFGGPPVCVGMNIDIASIDMVSEVNMDYTLTMYFQQYWRDKRLAYSGIPLNLTLDNRVADQLWVPDTYFLNDKKSFVHGVTVKNRMIRLHPDGTVLYGLRITTTAACMMDLRRYPLDEQNCTLEIESYGYTTDDIEFYWRGGDKAVTGVERIELPQFSIVEHRLVSRNVVFATGAYPRLSLSFRLKRNIGYFILQTYMPSILITILSWVSFWINYDASAARVALGITTVLTMTTINTHLRETLPKIPYVKAIDMYLMGCFVFVFLALLEYAFVNYIFFGRGPQRQKKLAEKTAKAKNDRSKSESNRVDAHGNILLTSLEVHNEMNEVSGGIGDTRNSAISFDNSGIQYRKQSMPREGHGRFLGDRSLPHKKTHLRRRSSQLKIKIPDLTDVNAIDRWSRIVFPFTFSLFNLVYWLYYVN

SEQ ID NO: 210106 - DNA, 1422 bp, Artificial Sequence
  derived and/or modified sequence
atgtgctctggactgctggagctgctgttgccgatatggctgtcttggacactgggcacaagggggtctgagccaagaagcgttaatgatcctggtaacatgtcattcgtgaaggagacagtagacaagctgctgaaaggatacgacattcgcctcagacctgattttggtggcccccctgtatgcgttgggatgaacattgatatcgcgtctattgacatggtctctgaggtaaatatggactacaccctgactatgtatttccagcagtattggagggataagagactcgcctactccggcatcccattaaatctgacgttggacaatcgcgttgccgaccagctgtgggtgcccgatacatatttcctgaacgacaaaaagagctttgtgcatggcgtgacggtcaagaatcgcatgataaggctgcaccccgatggtacagtcttgtatggacttaggatcaccacaacagctgcctgcatgatggatctgcgtagataccccctggatgagcaaaattgcacactcgaaattgaaagctacgggtataccactgatgacatcgaattttattggcgcggaggggataaggcagtgacgggcgttgagcgaatcgagcttccacagttttcaattgtggaacaccgtctggtctccagaaatgtagtgtttgccacgggagcttaccctaggctgtcattgtctttccggctgaagaggaacattggatattttatattgcagacatacatgccctctatactaatcaccattctttcttgggtttcattctggataaattatgacgcgtccgccgcgcgtgtggctttggggatcactacagtgttgacgatgacaactatcaacacccacctgagggagaccctgccaaagatcccctacgtgaaggccattgacatgtacctgatgggctgttttgtgttcgtcttcttggcccttctcgagtatgcatttgtaaattacattttcttcggcaggggtcctcagcgccagaagaagcttgctgaaaagacggcaaaggcaaaaaacgatcggtctaaatcagagtcgaacagagtggacgctcatggcaacattttacttacgtctcttgaggtgcacaacgaaatgaatgaagtgagtggcggcataggcgacaccagaaattcagctatttcttttgataatagtggcattcaatatcggaaacagtctatgccccgggagggacacggacggttcctgggagacaggtctctgccccacaaaaaaacacacctgaggagaagatcaagccagttaaaaatcaaaattcctgacctcaccgacgtcaatgctatagacagatggtctcgcatcgtgttcccttttaccttctcccttttcaacctggtctactggctttattacgtcaattag

SEQ ID NO: 210107 - DNA, 3107 bp, Artificial Sequence
  derived and/or modified sequence
tttggctgctcggagagtaggggggagagcggatcccagcaggttaggccggaggaacagcgccatgtgctccgggctcctggagctcctgctgcccatctggctctcctggaccctggggacccgaggctctgagccccgcagtgtgaacgatcccgggaacatgtcctttgtgaaggagacggtggacaagctgttgaaaggctacgacattcgcctaagacccgacttcgggggtcccccggtctgcgtggggatgaacatcgacatcgccagcatcgacatggtttccgaagtcaacatggattataccttaaccatgtattttcaacaatattggagagataaaaggctcgcctattctgggatccctctcaacctcacgcttgacaatcgagtggctgaccagctatgggtgcccgacacatatttcttaaatgacaaaaagtcatttgtgcatggagtgacagtgaaaaaccgcatgatccgtcttcaccctgatgggacagtgctgtatgggctcagaatcaccacgacagcagcatgcatgatggacctcaggagataccccctggacgagcagaactgcactctggaaattgaaagctatggctacaccacggatgacattgagttttactggcgaggcggggacaaggctgttaccggagtggaaaggattgagctcccgcagttctccatcgtggagcaccgtctggtctcgaggaatgttgtcttcgccacaggtgcctatcctcgactgtcactgagctttcggttgaagaggaacattggatacttcattcttcagacttatatgccctctatactgataacgattctgtcgtgggtgtccttctggatcaattatgatgcatctgctgctagagttgccctcgggatcacaactgtgctgacaatgacaaccatcaacacccaccttcgggagaccttgcccaaaatcccctatgtcaaagccattgacatgtaccttatgggctgcttcgtctttgtgttcctggcccttctggagtatgcctttgtcaactacattttctttggaagaggccctcaaaggcagaagaagcttgcagaaaagacagccaaggcaaagaatgaccgttcaaagagcgaaagcaaccgggtggatgctcatggaaatattctgttgacatcgctggaagttcacaatgaaatgaatgaggtctcaggcggcattggcgataccaggaattcagcaatatcctttgacaactcaggaatccagtacaggaaacagagcatgcctcgagaagggcatgggcgattcctgggggacagaagcctcccgcacaagaagacccatctacggaggaggtcttcacagctcaaaattaaaatacctgatctaaccgatgtgaatgccatagacagatggtccaggatcgtgtttccattcactttttctcttttcaacttagtttactggctgtactatgttaactgagtgactgtacttgatttttcaaagacttcatttaacactgagtgaaatattactctgcctgtcaagtttttatacctgtacacacacagacacacaagcagacacacacatatatacatacgcaattgtatatatatgtgaactttctcagcatatatataaaatacacgtgtatatgaggatgtatgtgtatatgtttatacacacaggagtcagtgcccatgtgtatggaagacaaatacacatacatatatacattttgcagctatggacaatttaccacaggatgcatattaaagaaagtcatagtttttttcttttttaattgaaagggacaagtatcatctaaatattatgccttgagaatgagggcgtgaaacacaatatcatccccaaatgtgtcttgtattatcataagttagatgttttagtttaaaaatcagaaagacattcttagttaatctttgaaaactcatacagtggtattgctagtttaaaatgagtcacttacttcatatcctctcgttcagtttagtaagcaaaggcttcttggcttctctggtgatggggtttgttttcatcgggcatacgttttctgcaatggtttagtggctggggtgagccactggcagtgtgcttacctgttgtctgaaacatagatagatcccacgttgatgtctgaacgaccgtcttttgaaaactcatcgggagtgaatggcatctcgttgtaagtactctaatatacagtgtgtagtttgtttctgttgttcacttggagtggatccagcttcactgtcatgtgcgaacacagtgacacgtttggccagtgacatttcaatcactgaaaatgtgctctacatctcgtatggatttctaggcctgatatccaacagaaagcatagacgtctcaggttattcgttactctaaggtaaaaccatctaggatgattttcccccttgcagttatgttatcattcttataacattgtatgttaatagaaaatatatttgcataatatgcatatatatgtatatttaccaagattttgtttcttacgcttgctatcatggcagcatgcgatgtcatattttcctttatgtgatgtaactactttctgttatctagaaattaagattgaagctaaaacacttctactgttcaatttcagaaactaagaatcatcctcatgcctttatttctgtatctgacatatttcataagcacatccaactactcctagactgactaggattctgcaggaacatgacccgtacacaccacgcgtcacccaacgacccatgaccgttctctgaggcaaaggagggcaacctgacagcaaacacagtcactgttggttccttctgatccacagcctcatcagtatttggactttttaaagctcgtagaaacaagacaaggtgcaccggtttcatagacgcaaccttaacttactatttagatgagatctttctaaagaaaaaaaaaagagatgatatattttttgtaaacaatatttctatcacaggcatccataaactgaaatgactacagttgtgcaaacaggtgtcacagtgaagttgagcatttggagaaaaaaataaaaagcaaaatttgcaggaa

SEQ ID NO: 210108 - DNA, 1422 bp, Artificial Sequence
  derived and/or modified sequence
atgtgcagcggcctgctggagctgctgctgcccatctggctgtcctggaccctgggcacccggggcagcgagcccaggtctgtgaatgaccccggcaacatgagctttgtgaaggagaccgtggacaagctgctgaagggctatgacatccggctgcggccagactttggaggcccccctgtgtgtgtgggcatgaacattgatattgccagcattgacatggtgtctgaggtgaacatggactacaccctgaccatgtacttccagcagtactggagggacaagaggctggcctacagcggcatccccctgaacctgaccctggacaacagagtggccgaccagctgtgggtgcctgacacctacttcctgaatgacaagaagagctttgtgcacggcgtgacagtgaagaacaggatgatccggctgcacccagatggcaccgtgctgtatggcctgcgcatcaccaccacagctgcctgcatgatggacctgcggcgctaccccctggatgagcagaactgcaccctggagattgagagctatggctacaccacagatgacatcgagttctactggaggggcggggacaaggctgtgactggagtggagcgcatcgagctgccccagttcagcatcgtggagcaccggctggtgtccagaaatgtggtgtttgccactggagcctacccccggctgagcctgtccttccggctgaagagaaatattggctacttcatcctgcagacctacatgcccagcatcctgatcaccatcctgtcctgggtgtccttctggatcaactatgatgccagcgctgcccgggtggccctgggcatcaccaccgtgctgaccatgaccaccatcaacacccacctgcgggagaccctgcccaagatcccctacgtgaaggccatcgacatgtacctgatgggctgctttgtgtttgtgttcctggccctgctggagtatgcctttgtgaactacatcttcttcggccggggcccccagaggcagaagaagctggccgagaagacagccaaggccaagaatgacaggagcaagtctgagagcaacagagtggatgcccacggcaacatcctgctgaccagcctggaggtgcacaatgagatgaatgaggtgtctgggggcattggagacaccagaaattctgccatcagctttgacaacagcggcatccagtacaggaagcagagcatgccccgggagggccacggccgcttcctgggggacaggagcctgccccacaagaagacccacctgcggcggcgcagcagccagctgaagatcaagatcccagacctgacagatgtgaatgccatcgaccgctggagccgcatcgtgttccccttcaccttcagcctcttcaacctggtgtactggctgtactacgtgaactag

SEQ ID NO: 210109 - DNA, 1422 bp, Artificial Sequence
  derived and/or modified sequence
atgtgcagcggcctgctggagctgctgctgcccatctggctgagctggactttgggcaccagaggcagcgaaccccggtccgtgaacgatccaggaaacatgtcattcgtcaaagagacagtggataagctgctgaagggctacgatatcagactgcgccccgatttcggaggcccccccgtctgcgttggcatgaatatcgatatcgcgagcattgatatggtgagcgaggtgaatatggattatacactcacgatgtacttccagcaatattggcgggacaagaggctcgcgtacagcggaatacctctgaatctcaccttggataacagggtcgctgaccagctgtgggtccctgatacctactttttgaacgataaaaaaagcttcgttcatggggtgactgttaaaaaccggatgatccgcctgcaccctgacgggacggttctttacggtcttcgtataactactacagcagcatgcatgatggacttgcggcgttaccctcttgatgaacagaactgtactctggagatcgagagctacgggtacaccaccgacgatattgaattctattggagaggcggggacaaggcggtgacaggtgtggagcggatcgaattgccccagttcagtatagtggagcacagactggtgtcacgtaacgttgtgttcgctaccggcgcttatcctaggttgagcctctccttcaggttgaaaaggaatataggatatttcatcctacaaacttatatgccgtcaattctgattacgatcttgtcatgggtatctttctggatcaattatgatgcaagtgcggcccgcgtcgccctgggtataacgactgtcctcaccatgaccaccataaacactcacctgcgagagacactcccaaagatcccctatgtcaaggcaatcgacatgtatcttatggggtgtttcgtatttgtgttccttgccctcctggagtatgcctttgtgaattatattttctttggaagaggaccccagcggcagaagaaactggccgagaagacggccaaggccaaaaacgacaggtcgaagtccgaaagcaacagagttgatgcccatggtaatattctgctcacgagcctggaagtgcacaatgaaatgaacgaggtgagcggaggcatcggggatacacggaattcagccatttcctttgacaacagtggaatccagtaccggaagcagtccatgccgcgtgagggccatgggcgctttcttggagatagaagtttacctcataagaaaacccatttgcgcaggagatcttcacagcttaagatcaagatccctgatctgaccgacgtgaatgcaatcgaccgatggagcagaattgtgttccctttcacattctcacttttcaacctggtgtattggctatactacgtgaactag

SEQ ID NO: 210110 - DNA, 1422 bp, Artificial Sequence
  derived and/or modified sequence
atgtgcagtggtctgttggagctgttattgcccatttggttgtcttggacactggggacgcgtggcagcgaaccgaggtccgttaatgatccagggaacatgtctttcgtaaaggaaactgtggacaaattgcttaaaggctacgatattcgcctgcgccctgactttggcggaccgccagtgtgtgtggggatgaatattgatatcgcttctattgatatggtgtcagaggtgaatatggattacactctgaccatgtatttccagcagtactggagggacaagagattagcctatagtggaatccctttaaacttaacactcgataatagggtggccgaccagctgtgggtgccagatacctacttcctcaacgacaagaagagtttcgtccacggagtaaccgtaaaaaataggatgatcaggctgcaccctgacggcaccgtgctgtatggccttcggatcaccactacagcggcatgcatgatggacctacgaaggtaccctctggacgagcagaattgtacactggagatcgagagttacggctatacaacagacgatattgaattctattggagggggggagacaaagccgtcacaggtgtagagcgaatcgagttaccacagttcagtatcgtggaacatagattggtttcacgaaatgtggtatttgccaccggcgcatacccaaggcttagcttgtctttcagactaaaacggaacatcgggtactttatcctgcagacctatatgcccagtattcttatcaccatcctgtcatgggtgtcattctggatcaattacgatgcgtccgccgcacgggttgccctgggcatcacgaccgtgctgaccatgacgacaatcaacacacatctaagagaaaccctacccaaaatcccatatgtgaaggcaatcgacatgtatctgatggggtgctttgtgtttgtgtttctggctctcttggagtatgcattcgtgaattacattttttttggtcggggtccccagagacagaagaagttggccgagaagacagccaaagcaaagaatgaccgaagcaagagcgaaagtaaccgggtggatgcacacggaaatatactgttaacctctttagaggttcacaatgagatgaatgaagtgtccgggggaattggtgatactcgcaacagtgcaatctccttcgataactcaggcattcagtacagaaaacagtccatgccacgagaagggcatggcaggtttctgggcgatcgatctcttccacacaagaagactcatcttagaagacgatcgagccaattaaagattaaaattcccgacctcaccgacgtcaacgcaattgacaggtggtcacggatcgtgtttccatttactttttcactattcaaccttgtctattggctttactatgttaattag

SEQ ID NO: 210111 - DNA, 1422 bp, Artificial Sequence
  derived and/or modified sequence
atgtgcagcggcctgctggagctgctgctgcccatctggctgagctggaccctgggcaccagaggcagcgagcccagaagcgtgaacgaccccggcaacatgagcttcgtgaaggagaccgtggacaagctgctgaagggctacgacatcagactgagacccgacttcggcggcccccccgtgtgcgtgggcatgaacatcgacatcgccagcatcgacatggtgagcgaggtgaacatggactacaccctgaccatgtacttccagcagtactggagagacaagagactggcctacagcggcatccccctgaacctgaccctggacaacagagtggccgaccagctgtgggtgcccgacacctacttcctgaacgacaagaagagcttcgtgcacggcgtgaccgtgaagaacagaatgatcagactgcaccccgacggcaccgtgctgtacggcctgagaatcaccaccaccgccgcctgcatgatggacctgagaagataccccctggacgagcagaactgcaccctggagatcgagagctacggctacaccaccgacgacatcgagttctactggagaggcggcgacaaggccgtgaccggcgtggagagaatcgagctgccccagttcagcatcgtggagcacagactggtgagcagaaacgtggtgttcgccaccggcgcctaccccagactgagcctgagcttcagactgaagagaaacatcggctacttcatcctgcagacctacatgcccagcatcctgatcaccatcctgagctgggtgagcttctggatcaactacgacgccagcgccgccagagtggccctgggcatcaccaccgtgctgaccatgaccaccatcaacacccacctgagagagaccctgcccaagatcccctacgtgaaggccatcgacatgtacctgatgggctgcttcgtgttcgtgttcctggccctgctggagtacgccttcgtgaactacatcttcttcggcagaggcccccagagacagaagaagctggccgagaagaccgccaaggccaagaacgacagaagcaagagcgagagcaacagagtggacgcccacggcaacatcctgctgaccagcctggaggtgcacaacgagatgaacgaggtgagcggcggcatcggcgacaccagaaacagcgccatcagcttcgacaacagcggcatccagtacagaaagcagagcatgcccagagagggccacggcagattcctgggcgacagaagcctgccccacaagaagacccacctgagaagaagaagcagccagctgaagatcaagatccccgacctgaccgacgtgaacgccatcgacagatggagcagaatcgtgttccccttcaccttcagcctgttcaacctggtgtactggctgtactacgtgaactag

SEQ ID NO: 210112 - protein, 894 aa, Artificial Sequence
  derived and/or modified sequence
MAWRCPRMGRVPLAWCLALCGWACMAPRGTQAEESPFVGNPGNITGARGLTGTLRCQLQVQGEPPEVHWLRDGQILELADSTQTQVPLGEDEQDDWIVVSQLRITSLQLSDTGQYQCLVFLGHQTFVSQPGYVGLEGLPYFLEEPEDRTVAANTPFNLSCQAQGPPEPVDLLWLQDAVPLATAPGHGPQRSLHVPGLNKTSSFSCEAHNAKGVTTSRTATITVLPQQPRNLHLVSRQPTELEVAWTPGLSGIYPLTHCTLQAVLSNDGMGIQAGEPDPPEEPLTSQASVPPHQLRLGSLHPHTPYHIRVACTSSQGPSSWTHWLPVETPEGVPLGPPENISATRNGSQAFVHWQEPRAPLQGTLLGYRLAYQGQDTPEVLMDIGLRQEVTLELQGDGSVSNLTVCVAAYTAAGDGPWSLPVPLEAWRPGQAQPVHQLVKEPSTPAFSWPWWYVLLGAVVAAACVLILALFLVHRRKKETRYGEVFEPTVERGELVVRYRVRKSYSRRTTEATLNSLGISEELKEKLRDVMVDRHKVALGKTLGEGEFGAVMEGQLNQDDSILKVAVKTMKIAICTRSELEDFLSEAVCMKEFDHPNVMRLIGVCFQGSERESFPAPVVILPFMKHGDLHSFLLYSRLGDQPVYLPTQMLVKFMADIASGMEYLSTKRFIHRDLAARNCMLNENMSVCVADFGLSKKIYNGDYYRQGRIAKMPVKWIAIESLADRVYTSKSDVWSFGVTMWEIATRGQTPYPGVENSEIYDYLRQGNRLKQPADCLDGLYALMSRCWELNPQDRPSFTELREDLENTLKALPPAQEPDEILYVNMDEGGGYPEPPGAAGGADPPTQPDPKDSCSCLTAAEVHPAGRYVLCPSTTPSPAQPADRGSPAAPGQEDGA

SEQ ID NO: 210113 - DNA, 2685 bp, Artificial Sequence
  derived and/or modified sequence
atggcgtggcgctgccctcgtatgggtagggttccactcgcctggtgtttggcattgtgcggatgggcctgcatggccccccgcggaacccaggctgaagagagcccttttgtgggaaacccgggcaacatcacaggagctaggggtctgacaggtacattgaggtgccagctgcaggtccagggcgaaccgccggaggtgcattggttaagggatgggcagattttggaactggctgactcaacacagacacaagttcctctcggcgaggatgaacaagatgactggatcgtagtgtcccagctgaggatcacatcccttcagttgtccgatacagggcaataccagtgcctggtgtttctcggacaccagacgtttgttagccagcccggatacgttggtctcgagggcctcccgtatttcctggaagaaccagaagacagaaccgtagcggccaacacacccttcaatctgtcatgtcaggcccagggacctccagagccagtggacctgctatggctccaggatgcagttcccctggcgaccgctcctggacatggcccccagcgctccctgcacgtccctggactgaacaagacctcaagtttcagttgtgaagcccacaatgctaaaggcgtcactacctctcgtaccgccactatcaccgtcttacctcagcagccacgcaatctgcacctggtgagtaggcagccgaccgaactagaggtagcctggacacctggcctgagcggcatctacccactgacccactgtacactgcaggctgtgttgtccaacgacgggatgggcatccaggcaggtgagcccgacccacctgaggaacctctaacttcacaggcgagcgtccctccacatcagctacgcctgggatcactccacccacatacaccctatcatattagagttgcttgcaccagctcccagggccctagctcttggactcactggttgccagttgaaactcccgaaggggtgccacttggcccaccagagaatatcagcgccacacgcaatggttctcaggccttcgtccactggcaggagccgagagctccattacagggaaccctcctagggtatagactggcttaccagggtcaagacacccctgaggtactcatggacattggcctccggcaagaagtgacactcgagctccaaggggatggcagcgtgtccaacctgaccgtctgtgttgcagcatacactgccgctggcgatgggccctggtctttacctgttccactggaggcctggcggcccggtcaggcccagccagtgcaccagctcgtgaaggaaccttccacccccgctttctcctggccgtggtggtacgtgttgctaggcgccgtggttgcggcagcatgcgtgctcatcctcgctctcttcttggtccataggcgcaaaaaggaaactaggtacggggaggtgtttgaacctaccgtcgagcggggcgagctcgtcgtccgctacagagtcaggaagtcctatagcagacgaactaccgaggctactctgaacagtctaggaatttctgaagagctaaaagagaaattacgtgacgtcatggtggaccgccataaggtagctctggggaaaacactcggtgaaggcgaatttggagctgtcatggaggggcaattgaaccaagatgacagtattctcaaagtagccgtcaaaaccatgaagatcgctatttgcacgcggtcagagttggaagacttcctgagcgaagcagtgtgtatgaaagagttcgaccatccaaatgtgatgaggctgatcggggtgtgttttcagggatcggaaagagaaagcttccctgcgccagtggtaatcttgcctttcatgaaacacggcgatttgcatagcttcctgctgtacagcaggcttggggaccagccagtgtaccttccaacacagatgctggtgaagtttatggctgatatagcctcaggtatggaatacttgagcactaaaaggtttatacaccgggatttggctgccagaaactgtatgttaaatgaaaatatgagcgtgtgtgtggccgacttcggcctgagtaagaagatatacaacggcgattattatcgccagggacggattgccaaaatgcccgtgaaatggattgctattgagagtcttgctgacagagtgtatacatcaaaatccgatgtgtggagcttcggcgtgacgatgtgggaaattgctacccggggacagacaccctaccccggcgttgagaacagcgaaatttatgattacttgaggcaaggcaataggctcaagcagcccgctgactgtctcgacggcctgtatgcactgatgtctcggtgctgggaacttaatccacaagacaggcccagcttcaccgaactgcgggaagatctggagaacaccttaaaagctctgccgcccgcccaagaaccagatgaaatcctttacgttaatatggacgagggggggggctaccctgagcccccaggggcggccggcggcgccgaccccccgactcagcccgatccaaaggactcttgcagctgcctgacggcagcagaggtccaccccgcgggcagatacgtgctctgccctagcaccactcctagcccagcccagcccgctgaccggggcagcccggctgcacccggccaggaagatggcgcttag

SEQ ID NO: 210114 - DNA, 2685 bp, Artificial Sequence
  derived and/or modified sequence
atggcctggcgctgccccaggatgggccgggtgcccctggcctggtgcctggccctgtgtggctgggcctgcatggccccccggggcacccaggccgaggagagcccctttgtgggcaaccctggcaacatcactggagcccggggcctgaccggcaccctgcgctgccagctgcaggtgcagggcgagcccccagaggtgcactggctgagagatggccagatcctggagctggccgacagcacccagacccaggtgcccctgggggaggatgagcaggatgactggatcgtggtgtcccagctgcgcatcaccagcctgcagctgagtgacaccggccagtaccagtgcctggtgttcctgggccaccagacctttgtgtcccagcccggctacgtgggcctggagggcctgccctacttcctggaggagcctgaggacagaacagtggccgccaacacccccttcaacctgagctgccaggcccagggccccccagagcctgtggacctgctgtggctgcaggatgctgtgcccctggccacagcccctggccacggcccccagaggagcctgcacgtgcccggcctgaacaagaccagcagcttcagctgtgaggcccacaatgccaagggcgtgaccaccagcaggacagccaccatcaccgtgctgccccagcagcccaggaacctgcacctggtgtcccggcagcccacagagctggaggtggcctggaccccaggcctgagcggcatctaccccctgacccactgcaccctgcaggccgtgctgagcaatgatggcatgggcatccaggccggggagccagaccccccagaggagcccctgaccagccaggcctctgtgcccccccaccagctgcggctgggcagcctgcacccccacaccccctaccacatccgggtggcctgcaccagcagccagggccccagctcctggacccactggctgcctgtggagaccccagagggcgtgcccctgggccccccagagaacatcagcgccaccagaaatggcagccaggcctttgtgcactggcaggagccccgggcccccctgcagggcaccctgctgggctaccgcctggcctaccagggccaggacaccccagaggtgctgatggacatcggcctgcggcaggaggtgaccctggagctgcagggagatggctctgtgagcaacctgactgtgtgtgtggccgcctacacagctgctggagatggcccctggagcctgcctgtgcccctggaggcctggaggcctggccaggcccagcctgtgcaccagctggtgaaggagcccagcaccccagccttctcctggccctggtggtacgtgctgctgggcgctgtggtggccgccgcctgtgtgctgatcctggccctcttcctggtgcacaggaggaagaaggagaccaggtatggagaggtgtttgagcccaccgtggagcggggggagctggtggtgcgctacagagtgaggaagagctacagcaggaggaccacagaggccaccctgaacagcctgggcatcagcgaggagctgaaggagaagctgagagatgtgatggtggacagacacaaggtggccctgggcaagaccctgggggagggggagtttggagctgtgatggagggccagctgaaccaggatgacagcatcctgaaggtggccgtgaagaccatgaagatcgccatctgcaccaggtctgagctggaggacttcctgtctgaggccgtgtgcatgaaggagtttgaccaccccaacgtgatgaggctgattggagtgtgcttccagggcagcgagcgggagagcttccctgcccctgtggtgatcctgcccttcatgaagcatggagacctgcacagcttcctgctgtacagccggctgggggaccagcctgtgtacctgcccacccagatgctggtgaagttcatggctgacatcgccagcggcatggagtacctgagcaccaagcgcttcatccaccgggacctggccgccaggaactgcatgctgaatgaaaacatgtctgtgtgtgtggccgactttggcctgagcaagaagatctacaatggagactactaccggcagggccgcatcgccaagatgcctgtgaagtggatcgccatcgagagcctggccgacagagtgtacaccagcaagagtgatgtgtggagctttggagtgaccatgtgggagatcgccacccggggccagaccccctacccaggagtggagaacagcgagatctatgactacctgcggcagggcaaccggctgaagcagcctgctgactgcctggatggcctgtatgccctgatgagccgctgctgggagctgaacccccaggaccggcccagcttcacagagctgcgggaggacctggagaacaccctgaaggccctgcccccagcccaggagccagatgagatcctgtatgtgaacatggatgaaggaggcggctacccagagcccccaggagctgctggaggagctgacccccccacccagcctgaccccaaggacagctgcagctgcctgacagctgctgaggtgcaccctgctggccgctacgtgctgtgccccagcaccacccccagccctgcccagcctgctgaccggggcagccctgctgcccctggccaggaggatggagcctag

SEQ ID NO: 210115 - DNA, 2685 bp, Artificial Sequence
  derived and/or modified sequence
atggcctggcggtgcccccggatgggccgggtgcccctggcctggtgcctcgccctttgtggctgggcttgcatggcaccaaggggaacccaggcagaagaatccccttttgtcggcaatcccggcaacatcaccggtgcacgaggcttgacaggtactctgagatgccagcttcaggtacaaggagaaccacccgaggtgcactggttacgcgacggtcagattttggagctggcagattccactcagactcaggtacctttaggggaggatgaacaggacgattggatagtggtaagtcagttgcggataacctcacttcagctgagtgatacaggtcagtatcagtgtcttgtgttcttgggccatcagacgttcgtatcccagccgggctacgtgggattggaaggattgccctattttttggaagagccagaggatcgcaccgtggccgccaatacacccttcaatttgtcctgccaggcacaggggccccccgaacccgttgatcttctctggctgcaagacgccgtcccccttgcaacagcccctggacatggaccacagagatctcttcacgtgccgggactcaacaaaacatccagtttctcctgtgaggctcataacgctaaaggtgtgaccacctctcgtactgccaccatcacagttctcccccagcagccgcgtaacctgcatctggtatctcgccagcctacggagttggaagtcgcatggaccccaggcctgagcggaatttatcccctcacacactgcaccctgcaggccgtcctgagtaacgacggcatgggcatacaagccggggagcctgatcccccagaagaaccgctgacaagccaagccagcgtgccgccccaccagctgagactcggctctctgcaccctcataccccctaccatattagggtcgcttgcacctctagccaggggccaagctcatggacgcactggttgccggtcgaaacacccgaaggagtgcccctcgggccccctgagaacatttcagctacccgtaacggatctcaggcgttcgtgcattggcaggaaccccgcgcccctctgcagggtacccttctgggctaccggctggcctatcaggggcaagatacgcccgaggttctgatggatattgggttgcggcaagaggtcacgttagagctccagggcgacgggagtgtctcgaatctgactgtgtgcgtggctgcttatacggctgccggtgatggcccttggagcctccctgtccctttagaagcttggcgcccaggccaggctcagcccgtccaccaactggtaaaggagccttcgaccccggctttttcgtggccgtggtggtatgtcctgctgggcgccgtcgtggcagctgcatgcgtgctgattctggctctgtttctggtgcaccggcggaagaaagaaacaaggtacggggaggtcttcgagcccactgttgagcggggcgaactggtcgtgaggtacagggtgaggaaaagctatagtaggcgcacgactgaagccactctgaacagtcttggaatctcagaagagttaaaggagaagttgagggatgttatggtggatcgtcacaaagtggctttggggaagacgctcggggagggcgaattcggagctgttatggagggacagcttaaccaggatgatagtattctgaaggtggcagtgaagaccatgaaaattgccatctgtactcggtcggagctggaggacttccttagcgaggccgtgtgcatgaaagaatttgatcacccaaacgtaatgaggctcatcggcgtatgtttccaaggatctgagcgggaaagtttcccagcccccgtagtgatactcccattcatgaagcatggagacttacactccttcctcttgtactcccggctgggagaccagcctgtgtacctaccaactcagatgctagtcaagtttatggcggacatcgcttccgggatggagtatctaagtactaaacgcttcattcaccgtgatctagctgccaggaactgcatgttgaacgaaaatatgtcggtttgcgtcgcagattttggactctcaaaaaagatctataacggagattactaccgtcagggccgcatcgccaaaatgccggtgaaatggatcgccatagaatcgctggccgatagagtttatacctccaaatctgatgtgtggtcgttcggggtaacaatgtgggagatagcaacacgaggccaaaccccctaccctggggtggaaaattctgaaatttatgactatctccgtcagggaaataggctcaaacaacctgctgactgcctagacggcctttacgccctgatgtcaagatgctgggaattgaacccccaggatcgcccttcctttaccgagcttagagaggatctcgagaacacgcttaaagccctaccacctgcccaggagcccgatgaaattctgtacgtcaacatggatgaaggaggcggatatcccgagcctcctggtgccgccggcggcgcagacccaccaacacaaccagacccgaaggacagctgctcttgtctaactgctgcggaggtccatcccgctggaagatacgtcctatgcccatcaactacaccttcacctgcccagcctgctgatagaggctcaccagcggcacctggccaagaagatggggcatag

SEQ ID NO: 210116 - DNA, 2685 bp, Artificial Sequence
  derived and/or modified sequence
atggcctggcggtgccctcggatgggtcgcgtgccgttggcttggtgcctggccctctgcggatgggcgtgtatggcacctagaggaacacaggcagaagaatccccctttgtggggaacccgggaaatatcactggcgctcgtggtcttacggggaccctgcggtgtcaactgcaggtgcagggtgagcctcccgaggtccattggctgcgggatggccagatcctggagctcgccgacagcacgcagacacaggttccactgggcgaggacgaacaggatgattggatcgtggtgtctcaacttcgaattacttctttacagctgagcgacactggccagtaccagtgcttggtatttctcggacaccagacctttgtatcccagccgggatacgtgggcctcgagggccttccttacttccttgaagagcctgaggatcgcacagtggcagcaaacactcctttcaatctcagctgccaagcccagggccctcctgaaccagtggaccttctgtggctgcaggacgcagttcccctcgctactgcccctgggcacggccctcagcggtctttgcacgtgccaggcttgaataagacctcaagcttctcgtgtgaagctcacaatgccaagggcgtgacaaccagccgtacagccactataactgtattgccacagcagcccagaaatctgcatctggtgtctagacagcccaccgagctcgaagtggcttggaccccaggcctgtccggaatttaccccttgacacactgcacattgcaggccgtattatcaaatgacgggatgggtatccaggccggagaacccgaccccccagaagaacctttgacttcccaagcaagcgttccaccacaccaactgcgcctcggttccttgcatcctcatactccttaccacatcagagtggcttgtacttcttctcaggggccttcgagttggacccactggctgcccgttgaaactcctgagggtgtgccactgggacctcccgaaaacatctccgcaaccaggaacggctctcaggcttttgtgcactggcaggagcccagagcacccctgcagggaacattactgggctacaggctggcttatcaggggcaggacacgcctgaagtgctgatggacattggcttgagacaggaggtcaccctagagctgcaaggagatggcagtgtgtcaaaccttaccgtctgcgttgcggcatatacagccgcaggagatggcccttggagcctccctgtgcccttggaggcttggaggccgggacaggctcagcctgtgcaccagctcgtgaaagagccaagtacacccgcattcagctggccatggtggtacgttctactgggagcagtcgtcgccgcagcctgtgtactgatcttggcattgtttctggtgcacaggcgaaaaaaagaaactcggtatggcgaagtcttcgagccaaccgttgagcgcggtgagctggtcgtgcgctatcgcgttaggaaaagttattcacgcagaacgaccgaagcaacacttaactccctggggatcagcgaggagctaaaagaaaagctgcgtgatgtgatggtagatagacacaaagtcgccttggggaagaccctgggcgaaggggagtttggtgcagtgatggagggccagcttaatcaagacgacagcatcctcaaggttgcggtcaaaacaatgaagattgcgatttgtactagaagcgagttagaggattttctgtccgaggctgtttgtatgaaggaattcgaccaccccaacgttatgcggctcattggggtctgctttcagggctcagaaagggaatcgttcccagcaccagtggtaatcctaccgttcatgaagcacggcgatttacactcatttcttttgtattcacggctcggagatcagcccgtctatctgcccacccaaatgctcgttaagtttatggccgacattgcgtcaggaatggagtatctgagcacaaaacgctttattcaccgggatcttgctgcgaggaattgtatgctgaacgagaacatgtccgtctgtgtggcagacttcgggctgtccaagaaaatctataacggcgactactatcggcaggggcgaatagcaaagatgccagtgaagtggattgccattgagagccttgccgacagggtatatactagcaagagtgacgtctggtctttcggagttactatgtgggagattgcaaccagaggacagactccatatcctggagttgagaattctgaaatatatgactatctccgacaggggaacaggttgaagcagccggcagattgcctcgacggcctgtacgccctgatgtctagatgctgggagctcaatccccaggaccgcccaagtttcaccgaactgcgcgaagaccttgagaacaccctcaaagctcttcccccagcgcaagagccggatgaaatcctgtatgtgaacatggacgaaggaggcggatacccggagccccctggggcagcgggtggtgctgatccaccaacacagccggatccaaaagattcttgttcttgccttactgcagcagaagtacaccctgccggtaggtacgtactgtgcccatcaaccacgcctagccctgctcaaccggcagataggggaagcccagctgcacccggacaagaagatggggcatag

SEQ ID NO: 210117 - DNA, 4736 bp, Artificial Sequence
  derived and/or modified sequence
gggaaggaggcaggggtgctgagaaggcggctgctgggcagagccggtggcaagggcctcccctgccgctgtgccaggcaggcagtgccaaatccggggagcctggagctggggggagggccggggacagcccggccctgccccctcccccgctgggagcccaacaacttctgaggaaagtttggcacccatggcgtggcggtgccccaggatgggcagggtcccgctggcctggtgcttggcgctgtgcggctgggcgtgcatggcccccaggggcacgcaggctgaagaaagtcccttcgtgggcaacccagggaatatcacaggtgcccggggactcacgggcacccttcggtgtcagctccaggttcagggagagccccccgaggtacattggcttcgggatggacagatcctggagctcgcggacagcacccagacccaggtgcccctgggtgaggatgaacaggatgactggatagtggtcagccagctcagaatcacctccctgcagctttccgacacgggacagtaccagtgtttggtgtttctgggacatcagaccttcgtgtcccagcctggctatgttgggctggagggcttgccttacttcctggaggagcccgaagacaggactgtggccgccaacacccccttcaacctgagctgccaagctcagggacccccagagcccgtggacctactctggctccaggatgctgtccccctggccacggctccaggtcacggcccccagcgcagcctgcatgttccagggctgaacaagacatcctctttctcctgcgaagcccataacgccaagggggtcaccacatcccgcacagccaccatcacagtgctcccccagcagccccgtaacctccacctggtctcccgccaacccacggagctggaggtggcttggactccaggcctgagcggcatctaccccctgacccactgcaccctgcaggctgtgctgtcaaacgatgggatgggcatccaggcgggagaaccagaccccccagaggagcccctcacctcgcaagcatccgtgcccccccatcagcttcggctaggcagcctccatcctcacaccccttatcacatccgcgtggcatgcaccagcagccagggcccctcatcctggacccactggcttcctgtggagacgccggagggagtgcccctgggcccccctgagaacattagtgctacgcggaatgggagccaggccttcgtgcattggcaagagccccgggcgcccctgcagggtaccctgttagggtaccggctggcgtatcaaggccaggacaccccagaggtgctaatggacatagggctaaggcaagaggtgaccctggagctgcagggggacgggtctgtgtccaatctgacagtgtgtgtggcagcctacactgctgctggggatggaccctggagcctcccagtacccctggaggcctggcgcccagggcaagcacagccagtccaccagctggtgaaggaaccttcaactcctgccttctcgtggccctggtggtatgtactgctaggagcagtcgtggccgctgcctgtgtcctcatcttggctctcttccttgtccaccggcgaaagaaggagacccgttatggagaagtgtttgaaccaacagtggaaagaggtgaactggtagtcaggtaccgcgtgcgcaagtcctacagtcgtcggaccactgaagctaccttgaacagcctgggcatcagtgaagagctgaaggagaagctgcgggatgtgatggtggaccggcacaaggtggccctggggaagactctgggagagggagagtttggagctgtgatggaaggccagctcaaccaggacgactccatcctcaaggtggctgtgaagacgatgaagattgccatctgcacgaggtcagagctggaggatttcctgagtgaagcggtctgcatgaaggaatttgaccatcccaacgtcatgaggctcatcggtgtctgtttccagggttctgaacgagagagcttcccagcacctgtggtcatcttacctttcatgaaacatggagacctacacagcttcctcctctattcccggctcggggaccagccagtgtacctgcccactcagatgctagtgaagttcatggcagacatcgccagtggcatggagtatctgagtaccaagagattcatacaccgggacctggcggccaggaactgcatgctgaatgagaacatgtccgtgtgtgtggcggacttcgggctctccaagaagatctacaatggggactactaccgccagggacgtatcgccaagatgccagtcaagtggattgccattgagagtctagctgaccgtgtctacaccagcaagagcgatgtgtggtccttcggggtgacaatgtgggagattgccacaagaggccaaaccccatatccgggcgtggagaacagcgagatttatgactatctgcgccagggaaatcgcctgaagcagcctgcggactgtctggatggactgtatgccttgatgtcgcggtgctgggagctaaatccccaggaccggccaagttttacagagctgcgggaagatttggagaacacactgaaggccttgcctcctgcccaggagcctgacgaaatcctctatgtcaacatggatgagggtggaggttatcctgaaccccctggagctgcaggaggagctgaccccccaacccagccagaccctaaggattcctgtagctgcctcactgcggctgaggtccatcctgctggacgctatgtcctctgcccttccacaacccctagccccgctcagcctgctgataggggctccccagcagccccagggcaggaggatggtgcctgagacaaccctccacctggtactccctctcaggatccaagctaagcactgccactggggaaaactccaccttcccactttcccaccccacgccttatccccacttgcagccctgtcttcctacctatcccacctccatcccagacaggtccctccccttctctgtgcagtagcatcaccttgaaagcagtagcatcaccatctgtaaaaggaaggggttggattgcaatatctgaagccctcccaggtgttaacattccaagactctagagtccaaggtttaaagagtctagattcaaaggttctaggtttcaaagatgctgtgagtctttggttctaaggacctgaaattccaaagtctctaattctattaaagtgctaaggttctaaggcctactttttttttttttttttttttttttttttttgcgatagagtctcactgtgtcacccaggctggagtgcagtggtgcaatctcgcctcactgcaaccttcacctaccgagttcaagtgattttcctgccttggcctcccaagtagctgggattacaggtgtgtgccaccacacccggctaatttttatatttttagtagagacagggtttcaccatgttggccaggctggtctaaaactcctgacctcaagtgatctgcccacctcagcctcccaaagtgctgagattacaggcatgagccactgcactcaaccttaagacctactgttctaaagctctgacattatgtggttttagattttctggttctaacatttttgataaagcctcaaggttttaggttctaaagttctaagattctgattttaggagctaaggctctatgagtctagatgtttattcttctagagttcagagtccttaaaatgtaagattatagattctaaagattctatagttctagacatggaggttctaaggcctaggattctaaaatgtgatgttctaaggctctgagagtctagattctctggctgtaaggctctagatcataaggcttcaaaatgttatcttctcaagttctaagattctaatgatgatcaattatagtttctgaggctttatgataatagattctcttgtataagatcctagatcctaagggtcgaaagctctagaatctgcaattcaaaagttccaagagtctaaagatggagtttctaaggtccggtgttctaagatgtgatattctaagacttactctaagatcttagattctctgtgtctaagattctagatcagatgctccaagattctagatgattaaataagattctaacggtctgttctgtttcaaggcactctagattccattggtccaagattccggatcctaagcatctaagttataagactctcacactcagttgtgactaactagacaccaaagttctaataatttctaatgttggacacctttaggttctttgctgcattctgcctctctaggaccatggttaagagtccaagaatccacatttctaaaatcttatagttctaggcactgtagttctaagactcaaatgttctaagtttctaagattctaaaggtccacaggtctagactattaggtgcaatttcaaggttctaaccctatactgtagtattctttggggtgcccctctccttcttagctatcattgcttcctcctccccaactgtgggggtgtgcccccttcaagcctgtgcaatgcattagggatgcctcctttcccgcaggggatggacgatctcccacctttcgggccatgttgcccccgtgagccaatccctcaccttctgagtacagagtgtggactctggtgcctccagaggggctcaggtcacataaaactttgtatatcaacg

SEQ ID NO: 210118 - DNA, 2685 bp, Artificial Sequence
  derived and/or modified sequence
atggcctggagatgccccagaatgggcagagtgcccctggcctggtgcctggccctgtgcggctgggcctgcatggcccccagaggcacccaggccgaggagagccccttcgtgggcaaccccggcaacatcaccggcgccagaggcctgaccggcaccctgagatgccagctgcaggtgcagggcgagccccccgaggtgcactggctgagagacggccagatcctggagctggccgacagcacccagacccaggtgcccctgggcgaggacgagcaggacgactggatcgtggtgagccagctgagaatcaccagcctgcagctgagcgacaccggccagtaccagtgcctggtgttcctgggccaccagaccttcgtgagccagcccggctacgtgggcctggagggcctgccctacttcctggaggagcccgaggacagaaccgtggccgccaacacccccttcaacctgagctgccaggcccagggcccccccgagcccgtggacctgctgtggctgcaggacgccgtgcccctggccaccgcccccggccacggcccccagagaagcctgcacgtgcccggcctgaacaagaccagcagcttcagctgcgaggcccacaacgccaagggcgtgaccaccagcagaaccgccaccatcaccgtgctgccccagcagcccagaaacctgcacctggtgagcagacagcccaccgagctggaggtggcctggacccccggcctgagcggcatctaccccctgacccactgcaccctgcaggccgtgctgagcaacgacggcatgggcatccaggccggcgagcccgacccccccgaggagcccctgaccagccaggccagcgtgcccccccaccagctgagactgggcagcctgcacccccacaccccctaccacatcagagtggcctgcaccagcagccagggccccagcagctggacccactggctgcccgtggagacccccgagggcgtgcccctgggcccccccgagaacatcagcgccaccagaaacggcagccaggccttcgtgcactggcaggagcccagagcccccctgcagggcaccctgctgggctacagactggcctaccagggccaggacacccccgaggtgctgatggacatcggcctgagacaggaggtgaccctggagctgcagggcgacggcagcgtgagcaacctgaccgtgtgcgtggccgcctacaccgccgccggcgacggcccctggagcctgcccgtgcccctggaggcctggagacccggccaggcccagcccgtgcaccagctggtgaaggagcccagcacccccgccttcagctggccctggtggtacgtgctgctgggcgccgtggtggccgccgcctgcgtgctgatcctggccctgttcctggtgcacagaagaaagaaggagaccagatacggcgaggtgttcgagcccaccgtggagagaggcgagctggtggtgagatacagagtgagaaagagctacagcagaagaaccaccgaggccaccctgaacagcctgggcatcagcgaggagctgaaggagaagctgagagacgtgatggtggacagacacaaggtggccctgggcaagaccctgggcgagggcgagttcggcgccgtgatggagggccagctgaaccaggacgacagcatcctgaaggtggccgtgaagaccatgaagatcgccatctgcaccagaagcgagctggaggacttcctgagcgaggccgtgtgcatgaaggagttcgaccaccccaacgtgatgagactgatcggcgtgtgcttccagggcagcgagagagagagcttccccgcccccgtggtgatcctgcccttcatgaagcacggcgacctgcacagcttcctgctgtacagcagactgggcgaccagcccgtgtacctgcccacccagatgctggtgaagttcatggccgacatcgccagcggcatggagtacctgagcaccaagagattcatccacagagacctggccgccagaaactgcatgctgaacgagaacatgagcgtgtgcgtggccgacttcggcctgagcaagaagatctacaacggcgactactacagacagggcagaatcgccaagatgcccgtgaagtggatcgccatcgagagcctggccgacagagtgtacaccagcaagagcgacgtgtggagcttcggcgtgaccatgtgggagatcgccaccagaggccagaccccctaccccggcgtggagaacagcgagatctacgactacctgagacagggcaacagactgaagcagcccgccgactgcctggacggcctgtacgccctgatgagcagatgctgggagctgaacccccaggacagacccagcttcaccgagctgagagaggacctggagaacaccctgaaggccctgccccccgcccaggagcccgacgagatcctgtacgtgaacatggacgagggcggcggctaccccgagccccccggcgccgccggcggcgccgacccccccacccagcccgaccccaaggacagctgcagctgcctgaccgccgccgaggtgcaccccgccggcagatacgtgctgtgccccagcaccacccccagccccgcccagcccgccgacagaggcagccccgccgcccccggccaggaggacggcgcctag

SEQ ID NO: 210119 - protein, 166 aa, Artificial Sequence
  derived and/or modified sequence
MASGVTVNDEVIKVFNDMKVRKSSTQEEIKKRKKAVLFCLSDDKRQIIVEEAKQILVGDIGDTVEDPYTSFVKLLPLNDCRYALYDATYETKESKKEDLVFIFWAPESAPLKSKMIYASSKDAIKKKFTGIKHEWQVNGLDDIKDRSTLGEKLGGNVVVSLEGKPL

SEQ ID NO: 210120 - DNA, 501 bp, Artificial Sequence
  derived and/or modified sequence
atggcctccggtgtaaccgttaacgatgaggtgatcaaggtgttcaatgacatgaaagtacggaaatcatccacgcaggaggaaattaagaaaaggaagaaagcagttcttttttgtctctcagacgataaacgacagatcatagtggaagaagctaagcaaattctggtcggggatattggcgacactgtggaggacccatacacaagcttcgtaaagctccttcccctcaacgactgtcgttatgccttgtacgatgccacttacgaaacaaaagaaagtaagaaagaggatcttgtgtttattttctgggccccggaatccgcccccttgaagtcaaaaatgatttatgcttcaagtaaggatgcgatcaagaagaaatttacggggatcaagcacgagtggcaggtgaatggccttgatgacattaaggacagaagtacgctcggtgagaagctgggaggaaatgttgtggtatctttggagggaaagccgctctag

SEQ ID NO: 210121 - DNA, 501 bp, Artificial Sequence
  derived and/or modified sequence
atggcttccggagtgacagtgaatgatgaagtgattaaggtgtttaacgacatgaaagttcgaaaaagctccactcaggaagagattaagaagcggaagaaggccgtcctgttttgtctgtctgatgacaaacggcagatcatagtggaggaggccaaacagatcctagtcggggatatcggggatactgttgaggacccctatacttctttcgtcaagctgctgcctctcaatgactgtaggtacgcactgtatgatgctacttacgagacgaaggagtcaaagaaggaggacttggtgtttattttttgggcccctgaaagcgcccctctcaagtctaaaatgatatacgcctctagtaaggacgcaatcaagaaaaagtttacaggcataaagcacgaatggcaggtcaacggcttagacgatatcaaggatcgaagtactctgggcgaaaagctcggtggaaatgtggtggtcagcctcgagggcaaacccctctag

SEQ ID NO: 210122 - DNA, 501 bp, Artificial Sequence
  derived and/or modified sequence
atggccagcggcgtgacagtgaatgatgaagtcatcaaggtgttcaatgacatgaaggtgaggaagagcagcacccaggaggagatcaagaagaggaagaaggctgtgctcttctgcctgagtgatgacaagaggcagatcatcgtggaggaggccaagcagatcctggtgggggacatcggggacacagtggaggacccctacaccagctttgtgaagctgctgcccctgaatgactgccgctatgccctgtatgatgccacctatgagaccaaggagagcaagaaggaggacctggtgttcatcttctgggcccctgagagcgcccccctgaagagcaagatgatctatgccagcagcaaggatgccatcaagaagaagttcaccggcatcaagcatgagtggcaggtgaatggcctggatgacatcaaggacaggagcaccctgggggagaagctgggcggcaatgtggtggtgtccctggagggcaagcccctgtag

SEQ ID NO: 210123 - DNA, 501 bp, Artificial Sequence
  derived and/or modified sequence
atggccagcggcgtgaccgtgaacgacgaggtgatcaaggtgttcaacgatatgaaggtgcgcaagagtagtacacaagaggagatcaaaaagcgtaaaaaagctgtcctgttctgcctatctgacgataaacgccagattatagtcgaggaagccaagcagatcttagttggagacatcggagacactgttgaagacccttataccagcttcgtcaagctgctcccgctcaatgattgtcggtacgcactgtacgatgctacctacgaaaccaaggaatccaaaaaagaggatctcgtgttcatcttttgggctcctgagtctgctccactgaaatccaaaatgatctacgcatcttccaaggatgcaattaagaaaaaatttacgggcattaagcacgaatggcaggtaaacggactagatgacatcaaggacagatctacgctcggcgaaaaactgggggggaacgtcgtggtgtcattggaaggaaaacctctctag

SEQ ID NO: 210124 - DNA, 501 bp, Artificial Sequence
  derived and/or modified sequence
atggccagcggcgtgaccgtgaacgacgaggtgatcaaggtgttcaatgatatgaaggtgaggaaatctagtacccaagaagagattaaaaagcgcaaaaaagccgtactcttctgtctgtcggacgacaagagacaaatcattgtggaggaagcaaaacagattctggtcggagacataggagacaccgtggaggatccgtacacaagtttcgtaaagctcctgccacttaatgattgtaggtatgctctctacgatgccacctatgagactaaggagagtaaaaaggaagacctcgtgtttatcttttgggccccagagtctgctccccttaaaagtaaaatgatctatgcaagctcaaaggacgcgatcaagaaaaagttcactgggataaagcacgagtggcaggtgaacggcctcgacgacataaaggacaggtcaactttaggggagaaactggggggaaacgtcgtggtttctctggaaggaaagcccctctag

SEQ ID NO: 210125 - DNA, 501 bp, Artificial Sequence
  derived and/or modified sequence
atggcttccggggtgacggtgaatgacgaggtgatcaaagtgttcaacgatatgaaggtacgaaaaagttccacacaggaggagatcaaaaaacgaaagaaagccgtcctcttctgcctgtctgatgataagcggcagatcatagtcgaagaagccaaacaaatcctggtaggtgacatcggcgacaccgttgaagatccttataccagcttcgtcaagttgctcccacttaatgattgccgctatgccttgtacgatgccacctacgagaccaaggagtccaaaaaggaagatctcgttttcatcttttgggccccagagtctgcgcctttgaagagtaagatgatttacgccagtagcaaggacgcaatcaagaagaagtttaccgggatcaaacacgaatggcaggtgaacggccttgatgatatcaaagacagatctaccctcggagaaaagcttgggggaaacgtggtggtttccctcgagggcaagcctctgtag

SEQ ID NO: 210126 - DNA, 501 bp, Artificial Sequence
  derived and/or modified sequence
atggctagcggtgttacggttaacgatgaggtcatcaaggtatttaatgacatgaaagtgaggaagagtagtacacaggaggagatcaagaagagaaaaaaagccgttctgttttgcctctcagatgacaaacggcaaattatcgtggaagaagcgaaacagattttggtgggggatatcggggacactgtcgaggacccgtacacctcattcgtgaaactgctgccccttaatgattgtaggtacgccctttacgatgcaacatatgagacaaaggaaagcaaaaaagaggacctcgtatttatcttttgggcacccgagtctgctcctttaaagtctaagatgatatacgcctcttccaaggatgcgatcaagaagaagttcacagggatcaagcacgaatggcaagtgaacggccttgacgatatcaaagatcggagcaccctgggcgagaagctaggtggcaacgtcgtagtcagcttggagggaaagcctttgtag

SEQ ID NO: 210127 - DNA, 3129 bp, Artificial Sequence
  derived and/or modified sequence
ggcccgccgagccccgccacctccctcgggctgcagctcccggcgtgccccgcactctccgctgcccacccgctcgcccgcccctccttctcctcccagtgccacagagccgaagcccgagctgccgccgcagccacagccgagggcactatggcttctggagttacagtgaatgatgaagtcatcaaagtttttaatgatatgaaagtaaggaaatcttctacacaagaggagatcaaaaagagaaagaaagcagttctcttctgtttaagcgatgacaaaagacaaataattgtagaggaagcaaagcagatcttggtgggtgacattggtgatactgtagaggacccctacacatcttttgtgaagttgctacctctgaatgattgccgatatgctttgtacgatgccacatacgaaacaaaagagtctaagaaagaagacctagtatttatattctgggctcctgaaagtgcacctttaaaaagcaagatgatttatgctagctctaaagatgccattaaaaagaaatttacaggtattaaacatgagtggcaagtaaatggcttggatgatattaaggaccgttcgacacttggagagaaattgggaggcaatgtagtagtttcacttgaaggaaaaccattataaaatgacagtcaagtgccatctggatcttaaggagcttccatttctccagctcagtccattggaatagtattaggttttggttttttgttgtatttccccctttccactgggcccttccaacacaatgaatgaaggaaatatcatttatttaagcagcctatcagtgattgccattagactgttgaatactgttacttttatatagaacccaaggaatgccttcctgtcatattttagccaaaacaactggttatatgcctcccttgcagcaagcactacaatgtatgtgatcgtcaatgtgaatagcttagaatactgcaaaggataagctaattgaatgccttgaaagtattatccactggtcagatggtcaacttttttcagtattatttatagttggcacttgattgcagttctgtgaggcttgagcattcatacacctcacctgccttggcaagcctattttagtgatatggcagcacggatataacactatgcattaaaagcactttttgtaataagtttaatatcctaaaaggaatgccaattaagttttgttaactgtgtcatcaacttatcctagtacctcagtgttcattcctgttacctgcatatcttcttaaaagaaatagctgttattaatgcctttttgttttccattgagtgtacactactgaataagtgtaggagttttatgtttaccatgtgagtcctgcaacactaaagatattttgaatatcagtcatgatggcaatttctgtataaaagagccttaaatggaacattgttttgagatcaaactccccaccctcacaaaaatggccacgttgcaataaaaattgtggcatattacagaacgttgccttgttttccttggaaattttgcaaaatgttatgtgaaacaacttctagggtaaaaacagctattactaatctctgcactggtcatttgagaattttttttgtacagcattcatgtgtgatattttccagatttgttggatctatttggtttaaaaagtattctatcttaaggccaactaatataaaataccattgttaaagaatggtacttttataaacattagtgtatttatttcctatgtgttaatatgaagatcagaaattattttttgcactttggcataaatacttttcaatatctgatttgttctctggataaattagcatagttatttttttattcacatttacatttctaagtagttgtatagtagaagcaggaagctcttattgcttatttggtcgtaatgaaaataatttgtaaaatgtcctttaaaagtttaatgatacttctgatgtttcggaacagtcatttcacctactatttctgaatatattttgcaaattgaattggaataggaattgataatagcagtcttaaacattagtagtgggatttggctatggtccagactgtgctccttatagagaatttgatctgctcagtgtgagcggtttgctgttagccagggctatttatggcaaacacatgcttttgtatcttgtcatagttatccacaaatggcaaaactggacttgattctactggtatgcaaaacaggcatgctagtaagcagtcagtcgtggctcagaacttaaccccatagctcagaggaatgcttttagcagaaaacaggaaagaaaatatcccttaaaaattttttttgaatgtgtggaagtaattttagtataattagattttttccatatttttgaaagatttttcagatgtgaacattaaaaatagggattaaatgtctaggcttccatttaaaattatatgaatggtttgggatctttttgcactgagcaattttatttcaggcttccagctgtccctgtgagttatcctggacatttcgatggtttttggtaaggccaaactctgataagcaaaacagagaatactgacgtatacttaaccatatgtgtaactgatacttggcaccatggaatttttcattgagttatttcctcattcttttaaaaaataagggactataaatcagttatgtagtatcttttgtttttgtagctgattccttaactttcttgtatgcctctagtaatttcagagattaaatattgctttaaactgtgatactttgatttgctagattgacaaaactgatactaatataattaagttcatctttgaaatacatctttgtgcgtagagccaaaaaaagagataaaattaataatagttcacttgttatttgagattaatttggcatttgaaatgatcattttattttacaatcatttataatgaatcaatgttccagttagctttaaaaggtatacggtgctaattagtaaaatattgaaggcaatattttactgctagcttgcaaagttatgagagtttaaaaaataaaatatatgaaaatatgtaaagctgttgagatgtgtttacttatacttcagaacattaaaagtttaaaaactggt

SEQ ID NO: 210128 - DNA, 3131 bp, Artificial Sequence
  derived and/or modified sequence
aaacatttcagggatgggacaacttgtatttgtccctttcgcttccacgtccaaacccctttaagaaggatgaatgggcaggatgagttagactccttcgctgtatcgtctactgattcttaaaatgtgacaaatctgattggacgacttacatggcttctggagttacagtgaatgatgaagtcatcaaagtttttaatgatatgaaagtaaggaaatcttctacacaagaggagatcaaaaagagaaagaaagcagttctcttctgtttaagcgatgacaaaagacaaataattgtagaggaagcaaagcagatcttggtgggtgacattggtgatactgtagaggacccctacacatcttttgtgaagttgctacctctgaatgattgccgatatgctttgtacgatgccacatacgaaacaaaagagtctaagaaagaagacctagtatttatattctgggctcctgaaagtgcacctttaaaaagcaagatgatttatgctagctctaaagatgccattaaaaagaaatttacaggtattaaacatgagtggcaagtaaatggcttggatgatattaaggaccgttcgacacttggagagaaattgggaggcaatgtagtagtttcacttgaaggaaaaccattataaaatgacagtcaagtgccatctggatcttaaggagcttccatttctccagctcagtccattggaatagtattaggttttggttttttgttgtatttccccctttccactgggcccttccaacacaatgaatgaaggaaatatcatttatttaagcagcctatcagtgattgccattagactgttgaatactgttacttttatatagaacccaaggaatgccttcctgtcatattttagccaaaacaactggttatatgcctcccttgcagcaagcactacaatgtatgtgatcgtcaatgtgaatagcttagaatactgcaaaggataagctaattgaatgccttgaaagtattatccactggtcagatggtcaacttttttcagtattatttatagttggcacttgattgcagttctgtgaggcttgagcattcatacacctcacctgccttggcaagcctattttagtgatatggcagcacggatataacactatgcattaaaagcactttttgtaataagtttaatatcctaaaaggaatgccaattaagttttgttaactgtgtcatcaacttatcctagtacctcagtgttcattcctgttacctgcatatcttcttaaaagaaatagctgttattaatgcctttttgttttccattgagtgtacactactgaataagtgtaggagttttatgtttaccatgtgagtcctgcaacactaaagatattttgaatatcagtcatgatggcaatttctgtataaaagagccttaaatggaacattgttttgagatcaaactccccaccctcacaaaaatggccacgttgcaataaaaattgtggcatattacagaacgttgccttgttttccttggaaattttgcaaaatgttatgtgaaacaacttctagggtaaaaacagctattactaatctctgcactggtcatttgagaattttttttgtacagcattcatgtgtgatattttccagatttgttggatctatttggtttaaaaagtattctatcttaaggccaactaatataaaataccattgttaaagaatggtacttttataaacattagtgtatttatttcctatgtgttaatatgaagatcagaaattattttttgcactttggcataaatacttttcaatatctgatttgttctctggataaattagcatagttatttttttattcacatttacatttctaagtagttgtatagtagaagcaggaagctcttattgcttatttggtcgtaatgaaaataatttgtaaaatgtcctttaaaagtttaatgatacttctgatgtttcggaacagtcatttcacctactatttctgaatatattttgcaaattgaattggaataggaattgataatagcagtcttaaacattagtagtgggatttggctatggtccagactgtgctccttatagagaatttgatctgctcagtgtgagcggtttgctgttagccagggctatttatggcaaacacatgcttttgtatcttgtcatagttatccacaaatggcaaaactggacttgattctactggtatgcaaaacaggcatgctagtaagcagtcagtcgtggctcagaacttaaccccatagctcagaggaatgcttttagcagaaaacaggaaagaaaatatcccttaaaaattttttttgaatgtgtggaagtaattttagtataattagattttttccatatttttgaaagatttttcagatgtgaacattaaaaatagggattaaatgtctaggcttccatttaaaattatatgaatggtttgggatctttttgcactgagcaattttatttcaggcttccagctgtccctgtgagttatcctggacatttcgatggtttttggtaaggccaaactctgataagcaaaacagagaatactgacgtatacttaaccatatgtgtaactgatacttggcaccatggaatttttcattgagttatttcctcattcttttaaaaaataagggactataaatcagttatgtagtatcttttgtttttgtagctgattccttaactttcttgtatgcctctagtaatttcagagattaaatattgctttaaactgtgatactttgatttgctagattgacaaaactgatactaatataattaagttcatctttgaaatacatctttgtgcgtagagccaaaaaaagagataaaattaataatagttcacttgttatttgagattaatttggcatttgaaatgatcattttattttacaatcatttataatgaatcaatgttccagttagctttaaaaggtatacggtgctaattagtaaaatattgaaggcaatattttactgctagcttgcaaagttatgagagtttaaaaaataaaatatatgaaaatatgtaaagctgttgagatgtgtttacttatacttcagaacattaaaagtttaaaaactggt

SEQ ID NO: 210129 - DNA, 501 bp, Artificial Sequence
  derived and/or modified sequence
atggccagcggcgtgaccgtgaacgacgaggtgatcaaggtgttcaacgacatgaaggtgagaaagagcagcacccaggaggagatcaagaagagaaagaaggccgtgctgttctgcctgagcgacgacaagagacagatcatcgtggaggaggccaagcagatcctggtgggcgacatcggcgacaccgtggaggacccctacaccagcttcgtgaagctgctgcccctgaacgactgcagatacgccctgtacgacgccacctacgagaccaaggagagcaagaaggaggacctggtgttcatcttctgggcccccgagagcgcccccctgaagagcaagatgatctacgccagcagcaaggacgccatcaagaagaagttcaccggcatcaagcacgagtggcaggtgaacggcctggacgacatcaaggacagaagcaccctgggcgagaagctgggcggcaacgtggtggtgagcctggagggcaagcccctgtag

SEQ ID NO: 210130 - protein, 536 aa, Artificial Sequence
  derived and/or modified sequence
MATPDAGLPGAEGVEPAPWAQLEAPARLLLQALQAGPEGARRGLGVLRALGSRGWEPFDWGRLLEALCREEPVVQGPDGRLELKPLLLRLPRICQRNLMSLLMAVRPSLPESGLLSVLQIAQQDLAPDPDAWLRALGELLRRDLGVGTSMEGASPLSERCQRQLQSLCRGLGLGGRRLKSPQAPDPEEEENRDSQQPGKRRKDSEEEAASPEGKRVPKRLRCWEEEEDHEKERPEHKSLESLADGGSASPIKDQPVMAVKTGEDGSNLDDAKGLAESLELPKAIQDQLPRLQQLLKTLEEGLEGLEDAPPVELQLLHECSPSQMDLLCAQLQLPQLSDLGLLRLCTWLLALSPDLSLSNATVLTRSLFLGRILSLTSSASRLLTTALTSFCAKYTYPVCSALLDPVLQAPGTGPAQTELLCCLVKMESLEPDAQVLMLGQILELPWKEETFLVLQSLLERQVEMTPEKFSVLMEKLCKKGLAATTSMAYAKLMLTVMTKYQANITETQRLGLAMALEPNTTFLRKSLKAALKHLGP

SEQ ID NO: 210131 - DNA, 1611 bp, Artificial Sequence
  derived and/or modified sequence
atggccacccccgacgccggcctgcccggcgccgagggcgtggagcccgccccctgggcccagctggaggcccccgccagactgctgctgcaggccctgcaggccggccccgagggcgccagaagaggcctgggcgtgctgagagccctgggcagcagaggctgggagcccttcgactggggcagactgctggaggccctgtgcagagaggagcccgtggtgcagggccccgacggcagactggagctgaagcccctgctgctgagactgcccagaatctgccagagaaacctgatgagcctgctgatggccgtgagacccagcctgcccgagagcggcctgctgagcgtgctgcagatcgcccagcaggacctggcccccgaccccgacgcctggctgagagccctgggcgagctgctgagaagagacctgggcgtgggcaccagcatggagggcgccagccccctgagcgagagatgccagagacagctgcagagcctgtgcagaggcctgggcctgggcggcagaagactgaagagcccccaggcccccgaccccgaggaggaggagaacagagacagccagcagcccggcaagagaagaaaggacagcgaggaggaggccgccagccccgagggcaagagagtgcccaagagactgagatgctgggaggaggaggaggaccacgagaaggagagacccgagcacaagagcctggagagcctggccgacggcggcagcgccagccccatcaaggaccagcccgtgatggccgtgaagaccggcgaggacggcagcaacctggacgacgccaagggcctggccgagagcctggagctgcccaaggccatccaggaccagctgcccagactgcagcagctgctgaagaccctggaggagggcctggagggcctggaggacgccccccccgtggagctgcagctgctgcacgagtgcagccccagccagatggacctgctgtgcgcccagctgcagctgccccagctgagcgacctgggcctgctgagactgtgcacctggctgctggccctgagccccgacctgagcctgagcaacgccaccgtgctgaccagaagcctgttcctgggcagaatcctgagcctgaccagcagcgccagcagactgctgaccaccgccctgaccagcttctgcgccaagtacacctaccccgtgtgcagcgccctgctggaccccgtgctgcaggcccccggcaccggccccgcccagaccgagctgctgtgctgcctggtgaagatggagagcctggagcccgacgcccaggtgctgatgctgggccagatcctggagctgccctggaaggaggagaccttcctggtgctgcagagcctgctggagagacaggtggagatgacccccgagaagttcagcgtgctgatggagaagctgtgcaagaagggcctggccgccaccaccagcatggcctacgccaagctgatgctgaccgtgatgaccaagtaccaggccaacatcaccgagacccagagactgggcctggccatggccctggagcccaacaccaccttcctgagaaagagcctgaaggccgccctgaagcacctgggcccctag

SEQ ID NO: 210132 - DNA, 2554 bp, Artificial Sequence
  derived and/or modified sequence
aacggctgcggcttcgggcggccgggtttctccggtctcccaacgccgaggagagcttgtaacaggcgctggagctggcccgccaccgccgcgtcagggacggcgctggagtcctccgttcccctcagcctctgagctgaggccccacaccagagtagggggcggcgcggcacccgtgccccggcatggcgacaccggacgcggggctccctggggctgagggcgtggagccggcgccctgggcgcagctggaggcccccgcccgcctcctgctgcaggcgctgcaggcggggcctgagggggcgcggcgcggcctgggggtgctccgggcgctgggcagccgcggctgggagcccttcgactggggtcgcttgctcgaggccctgtgccgggaggagccggtcgtgcaggggcctgacggccgtctggagctgaaaccactgttgctgcgattgccccggatatgccagaggaacctgatgtccctgctgatggccgttcggccatcgctgccggaaagtgggctcctctctgtgctgcagattgcccagcaggacctagcccctgacccagatgcctggctccgtgccctgggggaattgctgcgaagggatttgggggtggggacctccatggagggagcttctccactgtctgaaagatgccagagacagctccaaagtctatgtagggggctgggcctggggggcaggaggttgaaatccccccaggctccagaccctgaagaagaggagaacagggactcccagcagcctgggaaacgcagaaaggactcagaggaagaggctgccagtcctgaggggaagagggtccccaaaagattacggtgttgggaagaggaagaagatcatgagaaggagagacccgaacataagtcactggaatccctggcagatggaggaagtgcatctcctattaaggaccagcctgtcatggcagttaagactggcgaggacggttcgaatctggatgatgctaaaggtctggctgagagtttggagttgcccaaagctatccaggaccagcttcccaggctgcagcagctgctgaagaccttggaggaggggttagagggattggaggatgcccccccagttgagctacagcttcttcacgaatgtagtcccagccagatggacttgctgtgtgcccagctgcagctccctcagctctcagacctcggtctcctgcggctctgcacctggctgctggccctttcacctgatctcagcctcagcaatgctactgtgctgaccagaagcctctttcttggacggatcctctccttgacttcctcagcctcccgcctgcttacaactgccctgacctccttctgtgccaaatatacataccctgtctgcagcgccctccttgaccctgtgctccaggccccaggcacaggtcctgctcaaacagagttactgtgttgccttgtgaagatggagtccctggagccagatgcacaggttctaatgctgggacagatcttggagctgccctggaaggaggaaactttcttggtgttgcagtcactcctagagcggcaggtggagatgacccctgagaagttcagtgtcttaatggagaagctctgtaaaaaggggctggcagccaccacctccatggcctatgccaagctcatgctgacagtgatgaccaagtatcaggctaacatcactgagacccagaggctgggcctggctatggccctagaacctaacaccaccttcctgaggaagtccctgaaggccgccttgaaacatttgggcccctgaccatccaccaagggaccaccctcttggtgctccatcaccagcttcctgaagggcatttctttcttcaccaccttgtcttgagccctagcctgaggataaaggctgagcctggccatcccagattgcaactgcctccctgttacaggctgcatagggaatattggcttcccagccagcagggaggctcctgggctaagggagctcagctatattttctttttcatttcttttgtttttgagagaaggtattgctctgtcatccaggctggagtgcagtgatgcgattgatcatggctcactgtaacctctgcctcccaggctcgatcctcccatgtcagcctcccaagtagctgggactacatgcacatgacactatgcccagctaattttttattttgtagataatatgctggtcagggctggtcttgaactcctgagctcaagtgatcttcctgccttggcacccaaagtgttgagatttacaggtgtgagccaccacaccaggccagagctatatttccaaaggctgctggccccaggcacactcctcatcaattctcaggctgcagggacaaactttccgatagggctcagtaggatcaagccgacccagagtgggcatgggatgctccaggaggtctggggtaccagtgggctcagatgaagctcttgtgctcatgtatattatgaccttctgtgtttttgtttctgacttgaataatttatcaatggtgttgaataaaagcaagttcaataat

SEQ ID NO: 210133 - DNA, 1611 bp, Artificial Sequence
  derived and/or modified sequence
atggctacccccgatgccgggttaccaggcgcagagggcgtggagcccgcaccatgggctcaactggaggcccccgcgcgactgctcctgcaggcattgcaggccggacctgagggggcgagaagagggctgggcgtgctgagggccttgggtagtcgtggatgggagcccttcgactggggacgcctattggaggccctgtgccgcgaggagccagtcgtgcagggccccgatggaagactggaactgaagccacttctgctgcggttgcctcgcatctgccagagaaatctcatgagtctgctcatggctgtgaggccaagcctgcccgaaagcgggttgctgtcagtattacaaattgcacagcaagatctggcgccggatcccgacgcctggctgcgagctcttggtgaactgctccgacgcgatctgggggtgggtacttctatggagggggctagccctctgtcagagcggtgtcagcgtcagttgcaaagcctgtgcagggggttaggactcggcggtagaagactcaagtcaccccaggctccagaccccgaggaagaggagaaccgtgacagtcagcagcccggcaaacgccgaaaagactcagaggaggaagccgccagccccgagggaaagagggtccctaagagactgcgttgctgggaagaggaggaggatcacgagaaggagcgcccagagcataagagcctcgagagccttgctgacggtgggtctgcaagtcctattaaggaccagcctgttatggccgtgaaaaccggcgaagatggaagcaacctcgatgatgccaaggggctggccgaaagtctggagctgcctaaagctatccaggatcagctgccacggctgcagcagcttctgaagacgctcgaggagggattagaaggtctagaagacgcccccccagttgaactgcagttgctacatgagtgtagcccatctcagatggatctcctctgcgcacagctgcagcttcctcagctgtctgatctgggactgctcaggctctgcacctggctgttggcactcagccccgatctgtctctgagcaacgcgactgtactgacaaggagcctttttcttggccgtattctctcacttacctcttccgcctccagactgctcactactgctcttacgtcattctgcgccaagtatacgtatcctgtgtgttcggccctactcgacccagtgctccaggctccaggcacagggcctgctcagaccgaactcctctgttgtctggtgaaaatggagagtcttgagccagacgctcaggttttgatgctgggacagatcctcgagctgccatggaaggaggaaactttcctggtgttacagagtctcctggaacgtcaggtagagatgacacctgaaaagttctctgttctcatggagaagctgtgtaagaaaggactggcagcaacaacttccatggcctacgctaagttgatgcttaccgtgatgaccaagtaccaggctaatatcaccgaaacccagcggttaggtctggctatggctctggagcccaacacgaccttcctccggaagtccctgaaggctgccctgaaacacctcggcccttag

SEQ ID NO: 210134 - DNA, 1611 bp, Artificial Sequence
  derived and/or modified sequence
atggccaccccagatgctggcctgcctggagctgagggcgtggagcccgccccctgggcccagctggaggccccagcccggctgctgctgcaggccctgcaggccggccctgagggcgcccggcggggcctgggcgtgctgcgggccctgggcagccggggctgggagccctttgactggggccgcctgctggaggccctgtgccgggaggagcctgtggtgcagggcccagatggccgcctggagctgaagcccctgctgctgcggctgccccgcatctgccagaggaacctgatgagcctgctgatggctgtgcggcccagcctgcctgagagcggcctgctgtctgtgctgcagatcgcccagcaggacctggccccagaccctgatgcctggctgcgggccctgggggagctgctgcggcgggacctgggcgtgggcacctccatggagggcgccagccccctgtctgagcgctgccagaggcagctgcagagcctgtgccggggcctgggcctgggcggccggcggctgaagagcccccaggccccagaccctgaggaggaggagaacagagacagccagcagcccgggaagaggaggaaggacagcgaggaggaggccgccagccctgagggcaagagggtgcccaagaggctgcgctgctgggaggaggaggaggaccacgagaaggagaggcctgagcacaagagcctggagagcctggctgatggcggcagcgccagccccatcaaggaccagcctgtgatggctgtgaagacaggagaagatggcagcaacctggatgatgccaagggcctggccgagagcctggagctgcccaaggccatccaggaccagctgccccggctgcagcagctgctgaagaccctggaggagggcctggagggcctggaggatgcccctcctgtggagctgcagctgctgcacgagtgcagccccagccagatggacctgctgtgtgcccagctgcagctgccccagctgagtgacctgggcctgctgcggctgtgcacctggctgctggccctgagcccagacctgagcctgagcaatgccaccgtgctgaccaggagcctcttcctgggccgcatcctgagcctgaccagcagcgccagccggctgctgaccacagccctgaccagcttctgtgccaagtacacctaccctgtgtgcagcgccctgctggaccctgtgctgcaggcccctggcaccggccctgcccagacagagctgctgtgctgcctggtgaagatggagagcctggagccagatgcccaggtgctgatgctgggccagatcctggagctgccctggaaggaggagaccttcctggtgctgcagagcctgctggagcggcaggtggagatgaccccagagaagttctctgtgctgatggagaagctgtgcaagaagggcctggccgccaccacctccatggcctatgccaagctgatgctgactgtgatgaccaagtaccaggccaacatcacagagacccagaggctgggcctggccatggccctggagcccaacaccaccttcctgaggaagagcctgaaggccgccctgaagcacctgggcccctag

SEQ ID NO: 210135 - DNA, 1611 bp, Artificial Sequence
  derived and/or modified sequence
atggccacccccgacgccggcctgcccggcgccgagggcgtggagcccgctccttgggcccagctcgaagcccccgctcgcctgctactgcaggctttacaggctggccctgagggggcgcgtcgggggttaggggtacttcgcgctctgggttcccgcgggtgggaaccgttcgactggggaagactgctggaagcactatgtagggaggaaccagtcgtgcagggaccagatggcagactcgagcttaaaccacttctgttaagactgcctagaatatgtcaaaggaaccttatgagcctgctcatggcggtgcgtcccagtttacccgagtccggcttgttgagcgtgcttcagatagcgcagcaggatctcgccccggatcccgatgcctggttacgggctttgggcgagctgctgcgtcgtgatctcggggtgggaactagtatggaaggtgcctctccactatccgagaggtgccaacgacaattgcagagcctttgccgcggcctcggtttaggtgggcgccggctgaagtccccacaggcgccagaccctgaggaagaggagaaccgggactcacagcagcctggaaagcgcagaaaagactcggaggaagaggctgcctctcctgaaggtaagagggttcctaagcggctgcgttgctgggaggaggaggaagaccatgagaaggagaggcctgaacataaatcactagaatcactggcagacggtggctccgcgagtcccattaaggatcagcctgtgatggcagtcaaaaccggagaagacggctcaaatctggacgatgccaagggactcgcagagtccctggaactcccgaaagccattcaggaccagctgcccagattgcagcagctcctgaaaactcttgaggaggggctagagggactggaggacgcaccacctgtggaattacagttacttcatgaatgcagcccaagccagatggacctcctatgcgcccagttgcagctgccccaactgtccgacttgggcttactccgcctgtgtacctggctactagccctttctcctgatctcagcctgagcaatgcgaccgtactgacccggagcctgtttctcggacgcattctaagcttgacctcttcagctagccggctgctgaccaccgcactgaccagtttctgtgcaaaatacacctatcctgtttgttcagccctcctcgatcccgtgcttcaggccccgggcactggacccgcacagacagagcttctgtgttgcctggtcaaaatggaaagtctggagcccgatgcacaggtccttatgctggggcaaattcttgagcttccctggaaggaagagacttttcttgtcctgcagagtctacttgaaaggcaggtggaaatgacccccgaaaaattctccgtattaatggaaaagctctgtaagaaaggccttgcagctaccacttcaatggcctatgcaaaactgatgcttactgtgatgaccaagtatcaggcgaacataacagaaactcaaagactaggcctggccatggccctggagcccaatacgactttcctccggaaatcattaaaagcagccctcaagcacctcgggccttag

SEQ ID NO: 210136 - DNA, 1611 bp, Artificial Sequence
  derived and/or modified sequence
atggcaaccccagacgctggcctgccaggagcggaaggggtcgaacctgcaccttgggctcagctggaggctcctgccagattgttgctgcaagcactgcaggccggtcctgagggggctcgacggggactcggtgttctgagggctcttggttcccgcggttgggaaccttttgattggggacggctcctggaggcattatgtagggaagagccggtggtgcagggcccagacggacgcttggagctgaagcccctactcctgagactgcctcggatttgtcagagaaatctgatgtctctcctaatggcggttcgtccgtccctcccggagtcaggactactgagcgtgctgcagatcgctcagcaggacctagctcccgatcctgacgcttggttacgggcactgggcgagctattaagacgcgaccttggagttggaaccagcatggaaggcgcaagtccgttgtcagaaaggtgccagcgccagcttcagtcactgtgtaggggcctaggtcttgggggtcggagacttaagtcccctcaagcgcctgatccagaggaagaagagaaccgcgattctcagcagccgggaaaaagaaggaaggatagtgaggaagaggcagccagccctgagggaaagcgtgttcccaaaagactgcgctgctgggaagaggaagaagaccacgagaaggaaagacctgagcataagagcttagagtccctggccgacggcggttcagcttctcctattaaagaccaacctgtgatggcggtcaagaccggcgaggatggtagtaacctggatgatgcaaaagggttagccgagtccctggagctgccgaaggctattcaagaccagctgccccgactgcaacagctgttgaaaactctggaagaagggctcgaagggcttgaggacgctcctcctgtcgaactgcagctgttacatgagtgtagcccaagccagatggatctcctctgcgcgcaactgcagctgcctcagctgtcggacctcgggcttctgcggctttgcacctggctgctggccctctctcccgatctgagtttgagcaacgccaccgtgctgacaagatccctgtttctaggtcggattctgtcgctgaccagttctgcgagcaggctgcttacaactgcgcttactagtttttgcgctaagtatacgtaccctgtctgctctgcactcttagatcccgtcctgcaggctcccggaaccgggccagcacagactgagctgctctgctgtctggtgaaaatggaatcgctagagcctgatgcccaggtgctgatgttgggccagattttagaactcccatggaaggaagaaacgtttctcgtgctgcagtcattgttggaacgtcaggtggagatgactcctgaaaagttttcagtcctcatggagaaactctgtaaaaaaggcctggcagccactacgtccatggcatatgcaaagcttatgctgacagttatgacgaagtaccaggctaacattacggagactcagcgacttggtctcgccatggccctagagccaaacacaactttcttgcgaaaaagcctcaaagccgcacttaaacatctaggtccctag

SEQ ID NO: 210137 - protein, 845 aa, Artificial Sequence
  derived and/or modified sequence
MGSWALLWPPLLFTGLLVRPPGTMAQAQYCSVNKDIFEVEENTNVTEPLVDIHVPEGQEVTLGALSTPFAFRIQGNQLFLNVTPDYEEKSLLEAQLLCQSGGTLVTQLRVFVSVLDVNDNAPEFPFKTKEIRVEEDTKVNSTVIPETQLQAEDRDKDDILFYTLQEMTAGASDYFSLVSVNRPALRLDRPLDFYERPNMTFWLLVRDTPGENVEPSHTATATLVLNVVPADLRPPWFLPCTFSDGYVCIQAQYHGAVPTGHILPSPLVLRPGPIYAEDGDRGINQPIIYSIFRGNVNGTFIIHPDSGNLTVARSVPSPMTFLLLVKGQQADLARYSVTQVTVEAVAAAGSPPRFPQRLYRGTVARGAGAGVVVKDAAAPSQPLRIQAQDPEFSDLNSAITYRITNHSHFRMEGEVVLTTTTLAQAGAFYAEVEAHNTVTSGTATTVIEIQVSEQEPPSTDVPPSPEAGGTTGPWTSTTSEVPRPPEPSQGPSTTSSGGGTGPHPPSGTTLRPPTSSTPGGPPGAENSTSHQPATPGGDTAQTPKPGTSQPMPPGVGTSTSHQPATPSGGTAQTPEPGTSQPMPPSMGTSTSHQPATPGGGTAQTPEAGTSQPMPPGMGTSTSHQPTTPGGGTAQTPEPGTSQPMPLSKSTPSSGGGPSEDKRFSVVDMAALGGVLGALLLLALLGLAVLVHKHYGPRLKCCCGKAPEPQPQGFDNQAFLPDHKANWAPVPSPTHDPKPAEAPMPAEPAPPGPASPGGAPEPPAAARAGGSPTAVRSILTKERRPEGGYKAVWFGEDIGTEADVVVLNAPTLDVDGASDSGSGDEGEGAGRGGGPYDAPGGDDSYI

SEQ ID NO: 210138 - DNA, 2538 bp, Artificial Sequence
  derived and/or modified sequence
atggggagttgggctctactgtggcctcccttacttttcaccgggctgctggtaaggcccccaggaactatggcccaagctcagtactgtagcgtcaacaaagacatctttgaggttgaggagaatacaaacgtaactgaaccactggtggacatacacgtgcccgagggacaagaagttaccttaggtgccctgagcactccatttgcctttcgaatccaggggaatcaactatttctgaatgtgacaccagactatgaagagaagagtctgctggaagcacaattgctctgtcaaagcggaggcacattggtgactcagctacgggtctttgtttccgttctagacgtgaacgataatgctcctgaatttcccttcaaaacaaaggaaatcagggtggaggaggatactaaagtcaactctactgtgataccggaaactcaactgcaagctgaggacagggataaagacgacatcctgttctacactctccaggagatgaccgccggcgccagcgattactttagcttagtatctgtaaaccgtcctgctctgagactcgatagacctctggacttctatgaacgacctaatatgacattttggctgctagtcagggacacccccggcgaaaacgtcgaaccaagtcatacagccaccgctacgctcgttctaaacgtggtgcctgcagatctccggcccccttggttcctgccctgcacattttccgatggatatgtctgtatccaggcccagtatcatggcgccgtccctaccgggcacatcctgccctcacctctggtgcttaggcccggccctatctatgccgaggacggcgaccgaggaataaatcaacccatcatatacagcattttcagaggtaatgtaaatgggacctttatcatccaccccgatagcggcaacttgacagtcgccaggtccgtcccaagcccgatgaccttcctgctgttggtaaaaggacagcaggcggacttagctaggtattcagtgacgcaagtcactgtcgaggcagtcgccgctgctggcagccctcccagattcccccaacgtctgtacaggggtactgtcgcgagaggagccggcgcaggggtggtggttaaggacgccgccgcccccagccagcctctcaggattcaagcccaggacccagagttttccgatctgaattccgcaattacttacagaatcacaaatcactcccattttcgcatggagggggaagttgttttgaccactactacactagcacaagctggcgccttctacgcggaggtagaagcacataacacagtaacttccggcacggctacaaccgtgattgaaatccaggtgtctgagcaggagcctccctctactgacgttccccctagccctgaggcggggggtactactgggccctggacaagcaccacatctgaagtacccagaccacctgagccatcgcagggtccatctaccacttcctctgggggcgggacaggacctcacccgcctagtggtacaaccctccggccccccaccagcagcactccgggcggcccgcccggcgcggagaattcaactagtcaccagccagcaaccccgggcggagacaccgcacagacccccaaacctgggacatcacagcctatgccccctggggttgggacctcgacatctcaccagccggccaccccttctgggggcactgctcagacccctgagcccgggacaagtcagccgatgccaccatccatgggtacctccaccagccaccagcctgcaacaccaggaggcggcacggcacaaaccccagaagctggcacaagccagcctatgccccccggaatgggaacctccacgtcacaccaacctacgaccccaggtggcggcacagcacagaccccagagccaggaacctcccaacccatgccattgtcaaagtctactccatcctctgggggcggtccctccgaggacaaacggtttagcgtggtcgatatggccgccctaggaggagtgttgggggcattgctcctgctcgcattgttgggacttgccgtactggtgcacaagcattatggccccaggttgaaatgttgttgtgggaaggcaccagagcctcagccacaggggtttgacaaccaggcctttctccctgatcataaggccaattgggcccccgtgcccagccccacacacgatcccaagcccgcggaggcacctatgcctgctgagccagccccgcccggacccgctagcccaggaggtgccccggagcctcccgctgccgcccgcgcgggcggctctcccaccgccgtgcggtccattctcaccaaagagcgccgccctgaaggcggctataaggccgtgtggtttggggaggatattgggaccgaagccgatgtagtcgtactgaacgctcccaccctggacgttgacggcgccagcgatagcggttcaggtgatgagggggagggcgccggacgcggagggggaccctacgacgctcctgggggagacgactcatacatatag

SEQ ID NO: 210139 - DNA, 2538 bp, Artificial Sequence
  derived and/or modified sequence
atgggttcctgggcccttctgtggccaccactgctgtttactggacttctggtgcgtccccctggcactatggcccaggctcagtattgtagcgtgaataaggacattttcgaggtggaggagaatactaacgttaccgaaccactagtggatattcatgtgccagaaggtcaggaggtaaccctgggggcactctcaaccccctttgctttccgcatccaagggaaccagctgtttctgaatgtaacccccgactacgaggaaaagagcctgctggaagctcagctcctctgccagtccgggggtactcttgtaacccaactccgggtgttcgtaagtgtcctggatgtcaatgacaacgcccccgagttccccttcaaaacgaaagaaattagggtagaagaagataccaaagtgaacagcactgtgatacccgagacccagctgcaggccgaggaccgcgacaaagacgacatactcttttatacgctccaggaaatgactgccggagccagtgattatttctctctggttagcgtcaaccgcccagccctgcggttagaccggccattagacttttacgagagacctaacatgacattttggttattggtccgcgacaccccaggagagaatgtggaaccctcccatacagcaacagccacattggtcctgaacgtggtgcccgcggacctgcggcccccttggttcctgccatgtactttttcagacggatatgtgtgtattcaagcccagtatcatggtgcggtcccaactggtcacatcctgccgtccccactggtgctgcgtcccggaccaatctacgcagaagatggagaccgggggataaaccaaccaattatctacagcatctttcggggcaacgtcaatggtacttttattattcatcctgattccggcaacttgaccgtcgcgcgctccgtaccttccccaatgacatttctgcttctggtgaaaggacagcaggccgaccttgcccgctactctgtgacacaggtaacggtggaagcagttgccgctgccggttcacctccaaggtttccccagcgactgtacaggggaaccgtcgcgcggggtgcaggggcaggcgtggtcgtcaaagacgcggcagcaccgagtcagccgctaaggatacaggcacaagaccccgaattttcagatctgaactcggcgattacttaccggattaccaaccactcgcacttcagaatggaaggcgaggtcgtcttaacaactactaccctggcgcaggcaggagccttctatgccgaggtggaggctcataacactgtgacatctgggaccgccaccacagtgatcgagattcaggttagtgagcaggaacctccctctaccgacgtcccaccgagtcctgaagccggcggaacaacaggcccctggacaagcactacatcagaggtcccgaggccgcccgaacccagtcaaggcccgagcactactagctccggggggggaacaggaccccatcctcccagcggcactaccttacgccctcctacctctagcactcctggcggaccccccggagctgaaaattccacctctcaccagcccgcaactcccggtggcgacactgcacagactccgaagcccggcacgtcccagccgatgccccccggcgtaggaactagtactagccaccagccagctactccttccggtgggacagctcagacacctgagcccggaaccagccagccgatgcccccctctatgggtacaagcacgagccaccagcccgctacccctggggggggcacagcacagacccctgaggcaggaacttcccaacctatgccacctggcatgggcacttccacgtcccaccagccgaccacaccgggtggcggcactgcccagactccagagccaggaaccagtcagccgatgcccctgtccaaatctaccccaagcagcgggggcggaccttccgaggacaagcgattttcggtggtcgatatggccgctctgggaggcgttctgggagctctgctgctgctggctctgttgggtctcgcagttctggttcacaaacattacggtccaaggctgaaatgttgctgtggaaaggcccccgaacctcagcctcaaggatttgataatcaagctttcctccccgaccataaggcaaactgggccccagtgcctagtccaacacacgatcccaaaccagccgaagcacccatgcctgctgagcccgctccacctggaccagcctcccctggcggagcccctgagccgcctgcggctgcaagggccggcgggtcaccaaccgccgttaggagtattctcacaaaggaacggagaccagagggaggttacaaagcagtgtggttcggagaggatatcgggactgaggctgatgtcgtggttctgaacgctccaaccctcgacgtagacggagcgtccgatagtggcagcggagatgaaggggagggcgccggcagagggggaggcccctacgatgccccaggaggcgatgactcctatatctag

SEQ ID NO: 210140 - DNA, 2538 bp, Artificial Sequence
  derived and/or modified sequence
atgggctcctgggccctgctgtggccacccctgctcttcaccggcctgctggtgcggcccccaggcaccatggcccaggcccagtactgcagcgtgaacaaggacatctttgaggtggaggagaacaccaacgtgacagagcccctggtggacatccacgtgcctgagggccaggaggtgaccctgggcgccctgagcaccccatttgccttccgcatccagggcaaccagctgttcctgaatgtgaccccagactatgaggagaagagcctgctggaggcccagctgctgtgccagagcggcggcaccctggtgacccagctgcgggtgtttgtgtctgtgctggatgtgaatgacaatgcccctgagttccccttcaagaccaaggagatccgggtggaggaggacaccaaggtgaacagcaccgtcatccctgagacccagctgcaggccgaggaccgggacaaggatgacatcctcttctacaccctgcaggagatgacagctggggccagtgactacttcagcctggtgtctgtgaacagacctgccctgcggctggaccggcccctggacttctatgaaagacccaacatgaccttctggctgctggtgcgggacaccccaggagaaaatgtggagcccagccacacagccacagccaccctggtgctgaatgtggtgcctgctgacctgcggcccccctggttcctgccctgcaccttcagtgatggctacgtgtgcatccaggcccagtaccacggggctgtgcccaccggccacatcctgcccagccccctggtgctgcggcccggccccatctatgcagaagatggagaccggggcatcaaccagcccatcatctacagcatcttcagaggaaatgtgaatggcaccttcatcatccacccagacagcggcaacctgactgtggcccggtctgtgcccagccccatgaccttcctgctgctggtgaagggccagcaggccgacctggcccgctacagcgtgacccaggtgacagtggaggccgtggccgccgccggcagccccccacgcttcccccagaggctgtaccggggcaccgtggcccggggagctggagctggggtggtggtgaaggatgctgctgcccccagccagcccctgcgcatccaggcccaggaccctgagttcagtgacctgaacagcgccatcacctaccgcatcaccaaccacagccacttcaggatggagggggaggtggtgctgaccaccaccaccctggcccaggccggggccttctacgccgaggtggaggcccacaacacagtgaccagcggcacagccaccaccgtgattgagatccaggtgtctgagcaggagccccccagcacagatgtgccccccagccctgaggccggcggcaccaccggcccctggaccagcaccaccagcgaggtgccccggcccccagagcccagccagggccccagcaccaccagcagcggcggcggcaccggcccccacccccccagcggcaccaccctgcggccccccaccagcagcacccctgggggccccccaggagctgagaacagcaccagccaccagcctgccaccccaggaggagacacagcccagacccccaagccaggcaccagccagcccatgcctcctggggtgggcaccagcaccagccaccagcctgccaccccatctgggggcacagcccagaccccagagcccggcaccagccagcccatgcctccttccatgggcaccagcaccagccaccagcctgccaccccaggcggcggcacagcccagaccccagaggccggcaccagccagcccatgcctcctggcatgggcaccagcaccagccaccagcccaccacccctgggggcggcacagcccagaccccagagcccggcaccagccagcccatgcccctgagcaagagcacccccagcagcggcggcggccccagcgaggacaagcgcttctctgtggtggacatggccgccctgggcggcgtgctgggcgccctgctgctgctggccctgctgggcctggccgtgctggtgcacaagcactacggcccccggctgaagtgctgctgcggcaaggcccctgagccccagccccagggctttgacaaccaggccttcctgcctgaccacaaggccaactgggcccctgtgcccagccccacccatgaccccaagccagctgaggcccccatgcctgctgagcccgcccctcctggccctgccagccctggaggagcccctgagcccccagctgctgcccgggccggcggcagccccacagctgtgcgcagcatcctgaccaaggagcggcggcctgagggcggctacaaggctgtgtggtttggagaagatattggaacagaagcagatgtggtggtgctgaatgcccccaccctggatgtggatggagccagtgacagcggcagcggagatgaaggagagggcgccggccggggcggcggcccctatgatgcccctggaggagatgacagctacatctag

SEQ ID NO: 210141 - DNA, 2538 bp, Artificial Sequence
  derived and/or modified sequence
atgggcagctgggccctgctgtggccccccctgctgttcaccggcttactcgtgaggcctcctggaacaatggcccaggcccaatattgcagcgtcaacaaggatatcttcgaggtagaagaaaatactaacgtgacagaaccactggtcgatatacatgtcccagagggacaggaagtgactttaggcgccttgagcaccccattcgctttccggatccagggcaatcaattgttcctgaacgtgactcctgattacgaagaaaaaagcctcctcgaggctcaacttctgtgccagtccggaggtaccctggtgacccagctccgggtgtttgtgagtgtactcgacgtcaatgataacgctcccgagtttccttttaagactaaggagatcagagtggaggaagacaccaaagtgaattccaccgtgatcccagaaactcaactccaggcagaagatagggacaaggacgacattctcttctacacacttcaagaaatgaccgctggcgcctccgattatttctcactagtgagtgtgaatcgccctgctctgagactcgatagaccacttgatttttacgagagaccaaacatgacattttggttgctggttagagatacacccggtgagaatgttgaaccatcccatacagctaccgctacgctggttctgaatgtggtgcccgcagatcttcgcccaccgtggtttctgccgtgcacatttagtgatggatacgtttgtattcaagcccagtatcatggagccgtcccaaccggtcacattctaccaagccctttagtcctgcgaccaggtccgatctacgccgaggacggagatagagggatcaaccagcctatcatttactccatctttcgcggcaatgttaatggcaccttcatcatccaccccgactctgggaacctcaccgtggccaggtcagtccccagccccatgactttcctcctactggttaaagggcagcaggctgacctcgcacgttatagcgtcacacaggtgactgtagaggccgtggctgcggcaggaagtccaccgcggtttccacagcggctttatcggggaacagtggcccgcggcgcgggcgcaggggtcgtggtaaaggacgcagctgctccatcccagccgctgaggattcaggcccaggaccctgagttctcggacctcaattcagccattacatacagaatcacgaaccacagtcactttcgtatggagggagaagttgtgctaaccaccacaacattggcacaggcgggtgccttctacgctgaggtcgaagcacacaacaccgtgacctctggcacagcaactacagttatagagatccaggtctcggaacaggagcctccaagcacagacgtgcccccatctcccgaggcagggggcacaacagggccatggacatccaccacgtcagaggtcccgcgcccccccgagccctcgcagggaccttcaactacctcttccggaggcggtactggacctcaccccccttctggcactactctcagacctcctacctcctccacgccagggggccctccaggtgcagagaatagcacgtctcaccaacccgcaacacccggaggagacaccgctcagacgccgaagccgggtactagtcagcctatgcctcccggggtcggtaccagcactagccatcagccagccaccccaagtgggggcacggcccagaccccagaaccaggaacctctcagccgatgcccccgtctatgggaacttccacttcccaccaacccgccaccccaggagggggcaccgcccagacaccggaagcagggacctcgcagcccatgccgccggggatggggacctctacaagtcaccagcctacaacgcccggagggggcaccgctcaaacgccggaacctggtacctcacagcccatgccgctctctaagtccacacccagctctggcgggggccctagcgaagataagcgcttcagtgtcgtggacatggcagcgttaggtggcgtgctcggagcacttcttctactagcactgctgggcctggccgtgctcgtgcacaagcactatggcccccggctcaaatgctgctgtggaaaggccccagagccacagccacaaggcttcgacaaccaggcatttctgcctgatcataaagcaaattgggctcctgtgccgtcccccactcatgaccccaaacccgctgaggctccaatgcccgccgagcccgcgcctccaggtcctgcatcacctggaggtgcaccagagcctccagctgcggcacgtgcgggagggagccccacagcggtaagatcaatcttaacaaaggagcgaagaccggagggagggtacaaagcagtttggttcggagaggatatcggaacagaggctgatgtggtcgttttaaacgccccaacactggacgttgatggcgcttccgactctggcagcggcgatgagggcgagggcgcgggacgaggaggcggcccctatgacgcacctggaggggatgactcctacatctag

SEQ ID NO: 210142 - DNA, 2538 bp, Artificial Sequence
  derived and/or modified sequence
atgggcagctgggccctgctgtggccccccctgctgttcaccggcttgttggttcgcccccctggaacaatggctcaggcacagtactgttctgtcaataaggacattttcgaggtggaagaaaacacaaatgtgaccgagcctctggtcgacatccatgtcccagagggtcaggaagtgaccctgggagccctatccacacccttcgcctttcggattcagggcaaccaactattcctcaacgtgactccagactatgaagaaaagagcctcttagaagcccagctgctttgccaatcagggggtactcttgtcactcagcttcgggtgttcgtgagtgtactcgacgtgaatgataatgccccggaatttccatttaagactaaagagattcgggttgaggaggataccaaggtgaactccacagtgatcccagagactcagttgcaagcagaggatagggacaaggatgatatccttttctacaccctgcaagagatgaccgccggggctagcgattacttttctctcgtgtcagtgaacagaccagccctgcggttagaccggcctctcgatttttatgaacggcccaatatgaccttctggctgctggttagggacacgcccggtgaaaatgttgaaccctcccacactgcaacagctacacttgtgttgaacgtggtgcccgccgatttgcgccccccctggttcttgccttgtacgttttccgacggctatgtgtgtatccaggcccaataccacggagcagtgcccaccggccatatcctgccctctccccttgtgctgcggcccggccctatctacgcagaagacggggatagaggtattaaccagccaattatttacagtatctttcggggtaacgttaacggaaccttcatcatccaccctgacagcgggaatctgacagtcgctcggagcgtcccctcccctatgacattcctcctgcttgtgaaaggccaacaagccgacctggccaggtacagcgtgacccaggtgacggttgaggccgtggccgccgccggctctcctccaagattcccccagaggttgtacagaggaaccgtcgccaggggggccggagccggggtagtcgtgaaggacgctgctgcacctagccagcctctgaggattcaagcacaggaccccgagttctccgacctaaactcagctataacctacagaattactaaccacagccacttcagaatggaaggcgaagtcgtactgactaccaccactctcgcgcaggcgggagccttttacgctgaagtggaagcacacaatacagtcacctcaggcacggccacgactgtcatcgaaattcaagtttccgagcaggagccaccgagtacagacgttccaccatcaccagaggcggggggcactaccggaccttggactagtaccaccagtgaggttcctagacctccggaaccgagccaggggccgtcaaccacctcttccgggggtggtacagggccccaccctccctccgggaccaccctccgaccacctacgtcaagcactcccggtgggccgcctggtgcggaaaactccaccagccaccagcctgcaacaccaggcggggacacggcccagacacctaagccaggcacaagtcagcccatgcccccgggggtgggtaccagcaccagccaccagcccgccactccgtccggcggaaccgctcagacccctgaaccaggcaccagccagccgatgcctcctagcatgggcacaagtacctcccaccaacccgcgacacccggaggcgggacagcccaaacccctgaagcaggaacctctcagccaatgccacctggtatggggacctccacctctcaccagcctacaactccaggagggggcaccgcacagactccagaacctgggaccagtcaacctatgcctctctccaagtctacgccctccagcgggggtggtccatccgaggataagcgatttagcgtggtcgacatggctgcacttgggggcgttctcggcgcgttgttacttctggccctgcttggactcgccgtgctggtgcataaacattacggccctagactgaagtgctgctgcggcaaggcgccggaacctcagcctcagggctttgacaaccaggccttcctccctgaccataaggccaattgggctcccgtgcctagtccaacccacgacccaaaacctgcggaggctcctatgccggccgagccagctcctccaggcccagcttcgccaggcggagcaccagagccacctgcagccgctcgcgccggagggtcacctacagccgtgcgctctatcctcaccaaagaaagaaggcccgagggcggatacaaggcagtatggttcggcgaggacatcggaaccgaggcggatgtggtggtgctcaacgcacctacactggatgtagatggagcatctgatagcggttcaggcgatgagggagagggagcaggacgcggtggcggtccatatgatgcccccggaggtgatgatagctatatttag
